United States Patent Application Publication US 2014/0057251 A1 - sequence listing, part 164

SEQ ID NO: 314703 - DNA, 6368 bp, Cannabis indica
ttaggttgttaatccaacatacatgatagtaaatagatcctggtaaaataattccaagatagaggtgcattggctctagttggagcttcaagtcgtacaaaccattaaagagaagcatgtttttgtctgttaagaaattctatctttcctgcaattgattacaatcattattatcatgactgtaattattgtggtaacgacaaaattgattcatttccctcttcgttgactctttgaaaggaagaggtttgccatacggcactataaactgtgtggcagtataaatctcctctcttagaaccaagagaatgcagtaggtggtcaagtaaagttcataatctcttaagatattgcccctagtattaggcttctttcctccaagggagttgccttggtttccaccgttgttcgctctcttttctctgttcgaacctcccttcttcacattaccttgcccctccgtggtaggggcttcagtttctagtgacttattcttgccaccctttaagccgttggctcgggtgacgactttttcaagtttgataaagctatctactctatctaggagtcattcataatttatatcgcctacgaaggtcaaaccacagaggactcatctctttgagcccaactgtgagtgccatagcccttgcgttctcgctaagactcttggtcttagcaattgcctctaagaaccgttagatgtagtccttgaggggctcatcctcttgtttcttaacaaccaccaaattattgggctcgatttggcattgttgggaaggagcaaattaattaccaaaagcatccactagatatttccatgagtcaattgatccaggggagcttaaggtaccattgttgagctaagcctgtcagcgtggcaggaaagattctgcacctgacgttgtctctcataccttgtatatcggtctgcactttgaagtagcaaatgtgagacagtggatcttccttctagatgtattaatgctaggaagggttcttgaacttcagacaaatgggaagagctttaatttgtttagagagtggtgagcaccgttctctgtcaagttcaaatttgtataacttaggtttcgtgatcccaatcactaaagcagctgaggtgtcgaattctacctgaagttcccacgtccaccgttcttctcttatttaagagatcacgaaagtctcttgatcttcttggtcgtcttgtactccagtcgacctgggtcttacagttgtctcctaaacacaaggtcgtgaaggtaactctagtgaggcctccagaatgaactcagggtcatcttgggataacccgctgtgggaatgttcatttggagcattgtaatggctacttccctcaaaatagtctttaacaggatcacaagtgtggagagaattgaattggttgctcaggtttaactcctctccgtgaacttaagggaagtactcgtactattggcctttggggccataggaaaagtaatgaaaaattcacccatttcatctcgaaagtgcttccgagtaagaagcggctcattggtccttatccgctggatctcgtagcctcttgttttgaagtagcatcccctactacttccttcaagttgagcagtaggtcccttttcccttgcagggtcgcgaggcttggcttttgagaacgttgagaaggatttggtagagctattagttctctcgttgttacaaggtcgttcaacatcaggtggaggacccattggttggaaccctcgagcttgagtcctcttgggctcttgatcgaaagtaatttccctttgagaggtctccaggcccggtgtttgtctagtgcttgctcgattaccaagtgtagtagtggtgttctgagcattcagggtttttccttgagcactagttcccatgtgaccaactagttgacgggggtgtctctctcaccaactcaaaaaaacctcttctaaaattagtttcgcgattagactgataagtttctctaatccgttgagataggttagctctccattgttcctgctcaacgcattgactttcaatgctcttcttgttttccatgaactagtgttgaaatctttcgcgttgcttatcgagagagtctcacagctgttgttgcatgtcagccacaatttagctaagttgagctacctgaggatcgtctcatcagggccttctatctccacatgtggctcccaaggtgggatctggttattggtgctagtcccaggagctgttggtggtggccttggaggaaaacttaaggagctagttccaaggcctactccttgtgcctggggcacaaaaggatctcggttccaactctatcaactggggtgcccctagttgcttggccagttgctggagtctatctgtcaacacttgtagaacatgttgcgaccatcttgattagtgactttcttgagttgtgactctcaatgaaagcaccaaaatattgacacagaaatctagactaagaaaagtagattgccaagaataagaaaagtagttaagtaatttagagagacacaaccaatttatagtggttcaccccctatatcatgatagtaatggggatacatccacttcgagtttttatttctcacgagatagtaattacaataatagaccaattattagaaaacttcaaactctatagagagaagctctaaccttgtgggtagttttctgaatgtgaaaaatgagctaagagagctctccttttataggtgaaggaggcccacaaaaataggagaaaattacaaatgcgttgttttccactgttcattatgatctaacgataaaaattagcttctggttgtgatggccgattttcggtgctcgacaagtccctctacaggttacctagagcttatttttgtaactctcttaggggtaaattttgacaatgatagctttacaattacgcctggggtgcgatacatgacttgatagatcatttaaatagcttcaaaattcaagttgaatcgcgtcattcagataaagattgagtgatttatggccattttactaaagccagttcaagttccagccactaggttgacatctgacgttaacctggatgctgggtaagtgtaaaaacgtccaagggaagtccattaagatgcctaagtgatattttgacaccacttagtccatttatatgttctggcaaagttgttcaccgattctcggagatgttgttgttttgcaaaagtgggagactcgaaactctttatttttgggagtgctaaaaatgagaaatacaaagttgtgaatttgatttctctgacttcatagatcattgtatttgtgaaaaactagacatacagtcaaaacagtatcagattcggataagcagaacccaaagagctcccgagattttgtttttgatactttcaaggcttctaaacatgaggacgggatctcctcccccatttcttaccattctagattcaatagttgcatcaaatttgatatttaagcaactaaaggcagcgttctaggttaattgttaacttgggcgctcgcccagccctaggtcaacctaggcgctggcccttatttctagggactcaaatttgtagttctctccccgagtttacttgaatcttagttatttctaatgacgaaaaaattcccaaaacaatttgccgaacttgataaaaaacagctcaggttgagaaaatatcaacttagacactgggtcccccttctagccctttggaaattttgtttggtccttgaaattagttgaatctcaatattttctaaaaggggagaaggtgctttaaataattccaaaaagactccattttaaatggccaaaattgataaaatgtcaacctgggcgcagggccagccccaagtgtcaacttgggcactaggccctgttatttgtgcccataaattataatttttcctctataaaggacctatttccttgtttttgatgaagacggattcaatgcaaaagttggactcggatcgaacacttggaaggcacccatattgacagattgtcaacttggggcaaagtgatcggggtcgcgggtgctctaaaatcatcttgctctgattctaattttgatgcctcaaatatgtccatggcatgtctatttgatgtcccaatgcaagttttgctattttgcactaagacagtcccaaaaactgaaaccctaattgaggatgttaacttgggctgggcaccgagtgaaaccctaggtgcccaggttggcttctgggctacatgttcatgtaatttcagctccttgggattgtattaggttgcaacttgtgttcatggtatagaatattgaaagataatgagttggattcaagttattaaagtccaaacatccatcttggaggtcccagagtcaacttgggctctaggctagggtcccctcccatgttgactgctatgactcaggtctactcaactccgtgatgtcatccttcatgccacgtgtcaaacattgatatccacgtcatcaagaaaacgttttgggtaaacaatatcaaagcaaaggtttagataaacacaaaacatgtcaaagatgatgtcttccacaaaatttaagatcgagctttttaatggaaagaacaatttcagtttatggaagaacatggtaaaagatgtgttggtacacaagggctcccaaaggcactgcaaggaaaaaagcttgagagtatgactgatgaagattgggaggagttgcaggcgaaagcgataagcactatatgtttaagtttgggtcctaaattaaagtatagtgtattaaatgaaacatatccgtctgagttatggaaaaatttagaaaaactttatatttcaaaatccctaacaaatagattatattttgaagaagaaattatgtgacttgaaaatgattgaaggagatgatgttagggatataaatagatttataaagtgcataacttaattgttaagtgtagatgtcaaaattgatgaagaggataaagctattattttgttggcttctttgccaaaatcatatgagacgctagtgactacacttttggttagaaagactacattaactatggatgaggtgtcaactgctctttggagatagatagtatcaagcaaccaagtagtatgtctcatactgatcaagcttttgtgataaggtcaaaatcaagttgtggtaggagtatatcaagaggaagataagatgacagaagagacaatcaccctcattcacgctcttggagggaagtaaggtgctactattgtcacacagatggacatgttaggcagaattgtaaaaatttgaccaagcatcttgaagcaatgaggaatcaagaatacaaagacacatcaaattccactaatgttgttaatgaaggctttgaaagtgactctgatgttctctttgtcatagcagatgaatttttttttactcttgaattttagattctggttatccatccacatgtgcccatataaagagtgttttgataagtataagttatatgatggctgtactatttgacggtcaataatgccacctctaaagttgttagaataggaattgtaaaggtgaagatgaatgatggtgttatgagaacattttatgtcagatatatgtttaaacattaaggaggagcttaatctctttgggagttttggattctcatggttatggctactctacaaaagatggtgaaaacctatcaagaaaggtattttagtagttgtgaaaggtaagaaagagcgaaattggttaaaattagtcaggaaggctattttaagtgaagtcaaatcacgaaagacatccatttagtgtgaaggaatgcgacaaggtgaagaaaacttcaatttcagttagagattatttgaagaaagaagacatcaataaaagattgaggaatgtgaagacaagtgctcaaatgaagttcaatgagagtatgaacttgatgcatatatactcttattgatggtttgagttgtgagtttagagaatttgagttaaggtagagaatattggagtttgacttatttttatttatctatatttgtttgtaaagttaaaatttccttttcggtaattattaattgtgagaaaataagttttgatggccaagtttagagtgtttttgtaaagaccgcttatgattaataccttggattattaaataattacggtttatgcatgagattttattattatttataaaaatgcatattgtggaaatttatttaagttcgtatattattatgctatttatgtaaatttcttaatgttcgtaattgtgctcggaagcagtggaaagtgatgttgggcctttagagagtcacattttatgtgtttttagaatttttggggtttggaaaatgacta

SEQ ID NO: 314704 - DNA, 636 bp, Cannabis indica
cagaatattattttatttttaagtatattatgttaaaccagaaatgccgttagataggcactttttaatatataaagatatatatattttttactcatttttgaaagtaccatatttctaaataagggtctattttttttttaatggctcgctaaagtttaaggctaaccctgctagtagcaaaccgttgattttttaaatagaatgagcaaaagtctacaaatattatttatacttcgggagtatttttgctaagcaaaataatttataggactaaagtctacaagctctataatttaagcgtaaaaaactttttatcatagcaagtatttcaaaatataagtcagcttgtactttgtgtgatcaaggattaacaattcttcagcttgtactttgtttatttgtaagcgtaaaataaaaatattaaagtaaaaatgcttttattgggattagaacacatgacctcctttacatatatgaaatgactttaccattatatcaaagcttattttatgtgtatagatattacttttatttataaatatatgttgtaactaactaaaatgcatatatatttttttctcgaattttttttagggtggacgactgccccacctcgcctctatgtgggtccgc

SEQ ID NO: 314705 - DNA, 990 bp, Cannabis indica
agtttgcaatttctatccctaaaatctttacatttcaagtttgcgattttatttatacttgtgattatatttgttattacattaaacttgaatatttacatgaattatctttgagatttttaaaattttgaagttagtttaaatttccaatttactcgcctcttgaaaacctatcttaggctaacatattatagcttcattacttatttctaaaaaagaaaaaaaatattataaaactaaaatatgtgattaaaattaagtgactaaaattataattatattgggattatgcacacgttttcaaatattcaaaattttaaaactttaaacattattttttttaaaaaaaaaattaaaaattttataagtttttctttttcatttttttttaattttgtaaaattttaatattattgcttttgatacatcttgctatcattttagaacaatttattttgcttaaaatttttacataatattttcttttacaataatgtaattatatctagtacatgtatacatctggatttgttctgtcctaaattagtatctactcaattatatttcatagccattttcttatgaaataattgaaaaagatttgttagaaaatgatttaatccacgctatttttaatggtggagaaaatgttaggttagaaaaaaaaaaaaaaaattaaaagaaaacttaggggacccactaaatttgttctacccaattagactataaattttcaattttattattagagtacttataaaattgaaaaagataatttcagtaataatacttaatttttttattggtgtactttaatatttgatatttttttttacaacaatagtacaaaaagttaatattttagggtgattctacaatacatctccttaaaagagaagtattgatgcgcccttaacttattttgacatccagaagaattttttagtctaatttttttttcatattcatgtacgttatacctatttaaga

SEQ ID NO: 314706 - DNA, 617 bp, Cannabis indica
aaaaaaaaaacaaacaaaacacatccaaaagataatatcataaaaattgataggtctcgtgttataaatagatcatgccaaatctagtgcacaacaagatgacgagaatgacagagaatcggaagaaaattttgaacacctagatgatcaataggagtttgatgggtttgaagatgattatcgaacacctccagcttaacaaccatatgcaatgtatcaactaacacctcctgtcatgtataacttttcttcgactataataccgaagtctttttgtgctcagataacgtacataacatagtgaaaaaggatgtgataatgaaatctgttagtcttatgacagcccatacggtgatgtataaagaaggtactacacatgttttagttacacaaccaattcaagaagacatcactactacaaaaacggcaattcgcgacggtcctaaaaacgatttttttcgaggaccgttgttaaaaaaatcaagccacaatttaaaaccgtcgggaaaaatgagtatctcgacggttttgaactgtagcaacaaaaataggcgacggttttggtaattaaaaaagaaaaaaataataatacccctctatacccgacggttttgaac

SEQ ID NO: 314707 - DNA, 1517 bp, Cannabis indica
atatggatttggcttccacagaattcacacttgtctaggttgttatctcaatattcgaacaaaaaaggatttggcttccatcctctttgtaagaacttgagattaacgaaccttttctttgcaaacgacctcattattttttgtaagcgaaatgtgaattctgtggagttaattaatgaagcttttcaagaatccagccaagcgactagtttagcagctaataaaaagaaatcccatatctatatttgggggggggtcaaggaggagatcaaaaatgaaatcttgggaataactcaaatggaagaggggtctttcccgattaagtatttgggtgtgaaccttagacctacaaagtggagagccgaggattgtggtgttattttggataagcttagcttgaaattaaatgggtgggctagtaggaatttatgctttgctggacgtgctcaattaatacattcggttatgcttgggatccggaacttttggatgagcctctttattttacctcaaaaaattgtggcagctgtgcatagaaaatgtcgtgactttcgctggggtgtgaatggtaataggagtaagctgcatatgccgtcttgggaaaaagtttgtctccctaaacagttcagtggtattggtttcagggaaggtaagaaatggaacatggcgatggttgccaaacatttgtgggcgatttcaagcaagcaggataatctttgggtgaaatggatcaactccatttacttaaagaagcaggatgtgtggtcttgcccaataaaacctgatcagagttagtacttcaagaagttgttgaagattaggaatgtgacgaatgtaaacatgttgaaccaggcggccaaaggtaataaattcaaagtgaacaggttttataatgagttgattggagctgttagaaccccctatactgctactgtttggcataaatatattgttcctaaacacaggttcatgttttggcaaatcataaatgaaaacctgctcacccgtgatcacttgagcagattttttcccattccttcaaggctgtgtttggtctccgaagatgctccgcaatcccataatcatctattttttgaatgcatattcacaaggaaactcattgtgtttgcggaaaagtgggctgggcaaattaattggccgaaaaacatcactgagctctaggaccgtatccttccagctaaagtagaattagcttctaaaatcctgaatgccattactgctgcatccttgtacatactgtggacgaatagaaacgattgtctgtttaatgtggtttgtaattctattgcttcacttagcaaagagataaagagtgttgttaaggatagagttcttgggctttattgtactagtaaaaagaagaaagaccaatatgtattgaggttaatcaatagttggtagcctctctttctctttgctaacggttggttccctttcggcttttgttttgtattgctctgttcttttgaataaaattatccttttgttaaaaaaaa

SEQ ID NO: 314708 - DNA, 512 bp, Cannabis indica
ggataacaatatagctattttatccagtacagttatagatcttgatgcccttgatgatgaagtcacggtaatccactacaaagtttgtaagattgtccaatgcaatttcactttagcaagcctctttctcaaaagaagttttgatctgcatattttttccaaattactttattggaatgttaactgcccatggaatttttggttcgaaaatttgaagtggtatgtttttaaagaagtaataatatgtgcacacacaaatgagacacatatacgtcattagggcttttcgcagggcgaatagtaaccttttttttcgaaccaaaccgcatatgcaggttttgtaatttctcaaactgcaaccgcatcacgagatcttaaaattacaaaaatcacactgcgaaaatacggtgcggtgcggtgagcaatttacgcttacatcattatcaaacattatatatgttgcccctgatttcacccaatatacgtggaccaatcgaacagggacacgtgga

SEQ ID NO: 314709 - DNA, 509 bp, Cannabis indica
aaatatacttagtcaattaaatataattagttttaagttattgatctacaaataaagttgtacatttgggatggaggggtgtctccaatggctaattatgctttggtattggttcttcaatttttgtttatttatttaatttttttaaaaaaaaaatcaattaaagatagctagtgaactagcttaagtggtaagtgttaaatagttcaaatcttattctctatacaatttagtgcattttgtttcaaaaaaattcaaatcaaaaagacctctttaattttcaaattttgtcccattagttgaagttgtttatatatttgtacttatatgtagatgtttttttcctcaaaaataaatgtccattttaccgttaatatattaattaattttaattataataatcatacattattattttaagttagctgtaatatccagattaaaatagtatttaatttttttttttttggtatattaattgtagcgaggataattatcttgtttctttg

SEQ ID NO: 314710 - DNA, 1329 bp, Cannabis indica
tttctctctttttcttttttcaatgtgacttaaatattaacttggccttgctatttgggtagcaaagatgagaatttggaatttgtgcttgaacatgttatagacccttttaagtgctctttgggattgtaaattgtaatccacctttattattccaactgatgagaataaccataaataaaagaatatatgtttcaaaggggcaaatctaagcacattaaattcattcattacttgatagtttttatgtttttatgtctaataatccttagtggattgccatttgtgacattagttggaaagatagaaaaggcattagagaacttgaatggcccatcacaacatgcctgtaacatccttgtaacctaaagttgggtaagaatagaatacttttacattttgggcctagtggtgggccatccttctaaaaaatagtatacatcttttgccaaaataaagcccattaatacttttcatagaagcaatatagtacaaatcccacaaaaatgttagttcacttgtcacctttaggaagatagaaaagggtttttgagaaaataaaataacattggagggggcactcattgatggcaagacatttccaatggaattagtgggtcagaatatgaaccatttacaatgtggttgaatatcaacttgttagcagcctcagtgaaatgggtcccatcccaaatgatcttgaccgttggatcggcacatgattttgcagtcacaatctctttacctttgataattttcttgctaccacacttgttgaacctattataattatactttccaccatgaccacaacaagccacaagtgggttctcaaatccttcaaataccataaaatgaaaattaagataaatccataatgaaaagaaatgaagaaaacaaaagttggttatttgtgaaaaagagctttaccaaatttctttgcttgacttatgagggtgtacttaactgagtagacatccacataggttatggcagccaatgggagatctttcctaagttgggccacagttgattttagtttactattgaaaaattgggccacatcattgaatggagtagcacaaccatatttatcgatttgggctgccgtgacaaagaaccggtccaaaatataaggtagacagcccactgggcctgtgttgtgtatccaaaatgatcttccacctagaccataaacaccctacaaataccataatttatagtgaaaattacatcaaatatgggatttcataacaaagttagaaaaatatggcatttttaggtttgccacttttctatggcattttttcacatttaagttttttatgg

SEQ ID NO: 314711 - DNA, 1833 bp, Cannabis indica
atttactggtttgtaaagttcaccactctgcagtccactactttcgtgcattgctatggcggataacagcctcagccatctttttgaagattccgttcagattactacagaagacttgacatgtcgtcttgacccaaggaaatgtgctactgggaaaacttatatgcaaaggcaaacttggtcgtaaagcgattgctggaactttaaaaaaagcttgggcatcttttaaagggtggagctggaaagaggatgatgaagggatcatactcttcacttttgcaactaatgaagacgcctggaatgtccttaatagacgcccttggattatctgcggggcgttattggtcattatgccttggccatcttggcttgccccatcagaagtcaaatttgataagtccccattctgggtacgactgagcggaatccctccattttattggaacaaaactaacctggaagagcttgctgcaaaagcttcaacagtttcaaactgcccagatacatagattttgaaagaggttcattcggcatgggaacactacgcttcaaggctaccatcgagattgacaaaccccttttctcgggtttcttcatgaagagggaatccatcaaagacctgtgggtgcaatcaaatacgaaaagcttccaactttgtttaaaatgcggcatcatctctcacgaacagaagttttgtttcaagcctcctctgttataaaagattcaaagggtgctttttttccattgttcgggtcatggatgaaacacgacgataaggcgagatggcctttctctccgagtttgcgaaagtggtttgaggagtggatagtgcagaaacgcctgacggtggacaaaaagttcaagcagctgtggaaaatggacaaatctatgaaggccattgattcgtgggaggctagagaaacacgaaggcaattacctgggaagagaaggttggtggaacaaatagttaaagacctaccggagacggaggaagaacgggttagtagatttccgatggtctcgctaccggggataggggaattttgccccttcgaggataccgccaacctggtggtcaaaaagtccactgtttctttgccacttccaggggctatagctggcaacactgaaagtgactcctcctccggcgtgccctttgttctggtgaatacagtaaacaaagaggaggtacccgcattagcaacggttgcagcatcacagcaagacagtagccacaacggacaaatggcttcctcttctaggcaagaccaatctgtgaatactaccacaacagctaactgcattcccaaaatgccaaatgagtcaaattccaaaggccctcagtcaaccatgggcccggcccaatctttgctggacccatcgaattttaacccatatacaagcttactgggcagtcaagcccaaaccatgccgtggccttcacaacatttatgggaaatgggcttcaaaactttaactgggctagggacagtagataagttcatgcgtgaaccttcaatttttaaccccctccttgagattaatgactttcgttctatggaatttgaaaatggcccgaaaaaacgcaaagcaatggaagggattattattgggcatagcccattgaaaatcaatgaagaggctttccaattgggagaatccagccaggcgagtgggagccatgccctgagtacgaataaaccagaagacccgtcccctgttatcggggttgacgtgcgattttcccctggttcagtggacgaaacaaaatcccgaagttttgatcctatctgaagtaaggctaaaagaagaaaaagtgtgttcgtctcatga

SEQ ID NO: 314712 - DNA, 1060 bp, Cannabis indica
aaatattaataggatttgttttattattattttatgatatataaataatattttattatttgattaaataaaaataaaaaagtcacccataaatttctcataaaccaagaatttcagttatatagacacactttatatagaatagatatatatatatactaggttctaggtatatatactaggtagatgttaaccaaaaaaaaatacaagttttagctactaatatttttttgctaccaaattttttggtagtaaactggtagttgtattatggtctctgaatggtagttgatgctattttcttagcttaattttttggtagcaaattatctttattctagtagcaaaattattagtttttaatatccaataaaattattttgctaccaaaaattagtagtaaaactaataaattataatgtccaataaaactatctactaccggtttttggtagtaaaattatataaaatagttatataataatgatatattgtcatgaatagtaaaattagttttttttttttacttttatataataaaatatatattatagtacaatctttaagtacaacaaattatttttttaaaaaaaagaaatggttaaagttattaaatttgtacacgcattattgagtcacatctttaagtatacacatgaacaaatttagaattaggttggcttcttgttttggaattgtatcttctggtcctgcacttaacgaaactgcagagtttcaggtgaaaatagtcctcagagtatagtatgagcatctttgattcttcaaaatagaatattagaaagagacaacaaactctaacaaattcttggtgatctaattaatgtacagcctaagttatatcactaaaagtaaggttagttcatccgatcaaatctacacttttgtgatcaaacaacatccaatccgcactaagtgcggatcctaaattttggatccaattcaattcgcataacagtttaaatctaatccgcaatagtgcggattggatcggttacttttttttttttaatgttaaaaattatttaatatttcatcaaaa

SEQ ID NO: 314713 - DNA, 942 bp, Cannabis indica
aagataaaaaagacagcaaagacaactaaaagatgacaaatatcaaacataccataaaaggataagttgacaaaaataaataccttgatggccaagaatattttaaaacattctattacttcttaatcccttgaatatttttttaattaaatgataaacgagaatgacaaaaactcaaaaaaattacctatgatcaatgtggattatcttaaaaaaaaatataagacaaaccaaatgaaaatagatgtgtgtgtatgatagagataaaaatacttgtgatttttgaaaaaaaaaataaaaagaattttcgagagaaaaaaacacaattcaatcacaaacacatattcattaagaaaatcaatcaacatgtacgagtctgatacactcatatgggagtaaaagtttgagataatacaatagaaaaagtgatgttcgataatttattttaaagaatggagtagagaaattgatatatgggagtaaaagtttgaggtaataaaatagagaaagtgatgtttagtaatttattttaaaggaaggaatagagaagtgtgctcatatacatcaattacaaaggctatagacaaacttagataaaggcaagagaggacaatggactctctttatagtacaacatgctcctaggtattgtaattctaattgtttttatgataggctaattagtattttttccccctccccccaaactttgatatgtaccaaatcatgctctctgaactttttggtcgttaaaaattccccccgaactattgagattgttagatttaaggaattttttctaatttcattcaatttgatttgttcagtgattgtttatatactaaatcatgctccccaaactttgatatctaccaaattatgcccctcaaattttgatatgtactaaatcatgctctttgaactttcatctatgttagaatt

SEQ ID NO: 314714 - DNA, 1160 bp, Cannabis indica
tcataagatagaattgccttgccgctggtgtgtatgaggacgtggatgtctgaagttgatccccaatggttcaagtatggactaaagtggcctgtactcaccacgccagtccgattgtacaactttaatcttggtattaagctgtaattcaacataggatttgaattgtctaaaaatagcaacaacttcagatttagctttcatagggtatatccatgtaaatttggaaaaatcatcaatgaatctaacataatatctgaatccttctattgaattgtaaaaagagggtccccatacatcagttgtactaaatcaaaacaagaagtagtcttaggaaccgaactacaaaaatgcatactgtgaagcttgccatattggcatgcttgacagaaaggaagaaaattatcttattttggaattaattgtacagaggacagtctttagaattcttagtgaagcatggccaagccgatgataccagatttgagcgtcaaagaaggatccattgttgttattctttgtacagttgaaaggagcaggtgggggaaagggtcctcgattgaactgtgtggagttgattttggctttggacagatccaggtcatacaagccttgcttaagatggccccgaagaagagcttggcccgtaatcttgtccttgatcacacatgtatcagaatcaaacaataaaattatattattatctgtagtaattttatagatcctcaacaaatttttggtaatattacaggcaagtaagacatcatttaatagaattttcttgtaaggattagttgtatcaaaagtagattggcctatgtgagaaattgagatttgagagccattacctactattattttggctttgcgtttgtaatcattgatggtggtgagggtttgagcatcaaaggtcatgtggtgtgtggctccactgtccacataccaaccattgtcttcagcaagtttattagtgccagagaaaagggcttgtgggttgtggcctgaattctaagaattggaggaggagccttgattgtctgtgtcatatctgtgatagcatttgtaagcaagatgaccaatcttgccacaaatttggcaaactggatgagaaccacatccacgaccaatggggggaccccttcctcctgtttgggatccac

SEQ ID NO: 314715 - DNA, 691 bp, Cannabis indica
ctccggaattgagaaattataactctaatatttatttctaaatattggggtccacaaataaattaattcacaattaatagtaaaataataaaaattagtgctaattgcctttactaatccttgtactagagcggtcattacatcaatcatgtacccttcgctcttacacaattcgtagggtccggtcgatacaatgaggtcgggttgcctattactgtgcggggataattaatggtcgagaagatccattatgttattgaggagtatatagaggctaaccctttctataccaagaaaggcctaagccaatgaggatttctcctccatccaacctcacagtcaaaaggcttacgtacttagataaaaagggttttgtcggagatgtaatttccttcctcgctttcgatggtcaacttgctaatgaccctaaggacgacctttgcgcatattcaggcccacacacccaataggggctcttctacccctccattcgtatttttagaagcttacgtattactaaaagatcttcccgacgcaactttcaccgaagggaatcaagtatttgattgcgatgtacgttctatatagtagggattccctattagttttgtctttatgggtaattaattaattcaattaaatattagataaatatttaaatttgaaaagtagtttatgttgggttttatgc

SEQ ID NO: 314716 - DNA, 742 bp, Cannabis indica
aaattgaacctaagacaagtgcaaaaccacaccaacaacatccacaatagccaggagggaactcgtatgacggtgaactaagtgttcgacaaacaacgacacaaatttcaggagtggatggatcgcaacacccaagagatgtgagcccaacatgaagatatcaatcgtcgagcaaaggaagccatagacctgatccagtaatttgctaaaaaaaactaggggcaaagaactgagatttagccacccaggcctaccagtttaatatcccaagactaaaatcttgaccaacctcccgatgagcaagtgttacttggccattaccttaagagagatgaattaggttgctaaaataaaagggttgagatacaaaatgtccctaaatttggaaactaagttagtaaatgtccactttttagaaaaattaagaaaatgaacaaatctaataaattagctaataaaaattataaaaatgcatttatcacatatttttttaaatatatatataataataaaattaaattatgcaatttttttagtattgcatattattatattgtaacaaaataaaataaatatattagatcatgtaaatatatacagcagtattagatatattgtagtattgaaaattaatataccttagtaataaaattatataccacaaagaaattataacaatactaaattagtattgaaaaaatatatatatcatgctaacaaaaattatatataccactattaa

SEQ ID NO: 314717 - DNA, 1355 bp, Cannabis indica
ataccaaattcatgaaacaattgactaacaatcaatattatgcccactaaaaaacccttcaaaatactcagtggttccaaatgtagtttttaaaccaaataagtgaaccactaatcattaatatttgacaacagcaattttctactctaaattttgaaaggttcaaagtcatcattttaacaaagtaaataaattattaatcattgccattacaatttacgaacataagaataaagctaaaaaattattctagttcggtgagttagtgtacactagcggtttctactacattatttaaagagatattaatttaaagaacattgtaaaagagagaaatagagaactttcatgtccttcactatattttttatgatgtgaaaccattgttaatttgacataattggcctcaatggtcagaaaagtgatgttccgagcagcgtccgacaattaaaggattctttgtgccctttccctgagccccaatgtgaagggagggcggcagtacgagggaatctgctggaaccgagtatggacggtgtccattctctagacgaagtagtactggtccacaaaattgcctatcttgctcacatcggagtccacggtgcccgtcagccacttctcctctatctgagaaaagtagaaataccccaacctgctttgcttggggattgatttcagatcaaagagctagttggtgttgtgcggggggttgctcaccccatccctgtgaggaatagacaatgagcaaggtagataaatacttgatgcccttcggagtgaactgggtcggacagagatggtagtgatccggaattctcctgaagtacggaagcaagggcaaaatagcaccctacttagtgtgagcgccggaccaatcgcagtacctctcccttagactggtcgccagctagtttggagggggaaggaagcattcgacatcccctaggtaaccgtgcttctgcaaattcttcatctttgccctagttacaatggatggaggagaaactccccaagctcctagtgccccttgtcttctctgaggaacggcctcggtgtattcctcagtgacatagtcttcaccgacctccaggatttcactggcctcagacacaggttgtccatgttcattgcagccaccgaagggcaacctccgagttgcaccttcctcctcagcttcagatggagtatcaagacggacctcgccctgatcttccacctcttagactttagcatccccaataatgtcttcctcctcagcagcaggccgggcttattctgcgttaggcattgtggcgagccgagctacgtgtgggtcagataaagaagtgttggaatttattttaccaggatct

SEQ ID NO: 314718 - DNA, 854 bp, Cannabis indica
tgatctctctcgaaagcttacaattttataatgtaggagttctagaacaattgatttcagatccttgaatagtaaatgactccactattatttatagggaagaattttatcaattagacttctcaaaataacggaaaacttgtttacttttctaaaataaataaaactaaaagggaaactaggatggttaatttccacttatttcttgttggtgtaaatttatcccacaatatcaaggatgtgattgtaatttggatgcctgaacatttatggaaagtatttttaaggatattctagccgcatttatcctggccggtgtatgcaagctggttgcgaggttgatgttggtcttacggtggcatataccctgttcggatattccagcttactctgtaaattagttgtttccgaggaataatccaccctggtcagcatggcaaggatggtgtcattcgtccaagttgaaatttcgtattttaatattaccaatttattatttaattaatcaattaattaaatgcgaaataaatatagtactgaaataattattctgtacgtaactacatataacacaaccagggccggccctgagcataggcgggctaggctcgcgcctagggcccactcattttaggggtccaaatcaaaaaattaccttttaaaaaatatacatatttttgtaataatttttataaatactatttatctttatagcaagggcccaaatttttttttttgcctatagcccattttaactcagggtcggccctgaacacaactctataaactacaaaataaaactagaaaacaaacagcgcataaaaataaaaacacacaagatttttgtacgtggt

SEQ ID NO: 314719 - DNA, 2803 bp, Cannabis indica
acaacaaataaagttgtttcgagttctagaggatgccttagtatgaaaatatttagtattcttgtccctagcttttaaccaattaatcctagaacgttgtttccaaaaaaacctcctctttataaagcaaagaatcaatatgagattgaatatgctgagcctcccgaatatctttatccaagataggagacttggaataaatgctatcaagactagattgaagatgattaatatctctcataaagttatttctattaatgctccaatttttaatagaggtaacacaaaaagactgtttagagagaaaagattaaagagggtcagaaaaaatatgggaagaagcatccttccaacccaaccgaacaatatccccaaaatcaggctcagcaaaccaaaaattttcacacataaacctcttgtttctaggtacactaaaagaaggatccttaaaacacttttaaagctctatggtcagaaccataaaaccctaagtgatgtaaggtcacttgcagaaaaagatttaaccatttttgattaacaatgcaccaatcaaggcgctcaaaagacataccatgcttccaagtatatttattacctaaatagggcaaaggaattaaattaaaggtggtaataaaattttgaaaattaatatagcataatgaggagggttattaagattagatctatcattaggagaaagataatcatcgaagtcaccaaaaataagccaaggcaacaaaggtgcaacatcataaagcctatttaaaagagtccaagtatgcgatttagcagaaacataaggagaaccataataacaggaaatatgccaacttatattatcattcatattatcataacagtctatatgattagaagagtagttatttataattaaatcaacaacaacattccaaaagagcaacaaaccccttctaaaccagttctaggcacctcaaaagcattctcaaaattaagcctagacttaaggaaagaactagagccagcccctagtttagtttccataacaaaaagaaaacaaggtctatgctgcttgatcaaaagggagagatttcggaatccctggggactccccaaaccttgagcattccaacacataaaattcatttttctgggcagggttgctcagcaacacccgccggtacaacttgatcttcatcatcattaggaacaacaacttcattatcactagcacgagccctcttcaaaatactcctgactgaagtgccactagacacttcttgacgagtgtatgatctctttgtccctgaactaccaccaatagtaagaggccttggtggaaaaacagggacatgagcaatcgggacagaaacaataagtagttgaaccccttttcctttatccgtatgaacaatggtaggagcttcagacaacataacttgagaaaccacacagagaaggctttgaaaactactaaccatagtggaggagacaacagagttctcagcagaggttgaaataggagatgtagtaacaggaatatcaattctaggctgaacatccacatgtccttgaactccagaaaagcttcccgaaagaagaaattgattgacagcttcttacaagtcctggttatgctgtgaggatctaagattcatttcttcaaatgggatggagtttgacatatcaaacgggtcccttttaaagaacgatttaggcaaagctcttatattatccttgaaaggaagtgtcggaggcatacgtccttcatcacaggacttaagaaacctcccacacttagaaaagacatgcttaaatctcccacataaataacagtaattttgtaacccttcaagcttaaagttaagccacttagtggtgcctaattttctaaaaaagacttgcatacccctacggattggtttcgtgatgtcaaggaggacacagatgcgaagaaagggtcctgagatttctaaaagagttgttttatgaatctcaattagatctcctatatatttagcaacgaactgagcaagatggggagacctaaaaccaaaggaatagagtgaatttgaacccagaagggaacaaagcggagctgatcaggctgaagaatgccaagtccttctggattagcaaagaccataaggcaatggtcaaagtgccaaggttgcccttatatgaccctacgcctatctccatcacacccaaaatgagctagaaaagattcgaatgatacttagtgaagttgatgggaaatctaagagtccaagcctccctcatagccttgtcaagccaatcaggtttgagagatttctgggtaagaattttaaccacaaggcagcaagaatcctccatgacattagaccctaaagagaccccatcaaaatcacgaactaaagcttcctcatcatttagagcaagatggtgaggagagctatgaacagaatgacccatgaaaatgaaagcaagagaagtaaaagcagtagagataaagagaaacacagagaaaatatagacaacgaagcataaaacaacaaaacaacgagaaggaatagatatcgcatttaggagatagggaatatatatagaatcataagtggtatacctgagaatggagatctcatgcagatagtgaacagaagccaaatctccctccacattaatgacctcctagcgtgatccctcgagagaagaggtaatgatcacaaataacccctattttcctatagcgatggcagactgaaagagaagacaaaaggagggtgaactgaagccaaatattttttgatgcaatattaaatgctcatagaaacaacaaatc

SEQ ID NO: 314720 - DNA, 1008 bp, Cannabis indica
gtttacactatttaacaggaaatctaactctttacccttaatttctttttcgaagaagaagaagatcaagggtaatctcaacaaaagtttagctatgtgtttttttggcttgacccctttgcatgaaaataaagggatatttataggctaggtggcagatatggacagacccatgactcgccaaagatttttgcttaaatcccactactcgccaaagatttttgcttaaatcccactactagggtaaattaaatgtaatgtagagttgactagatggtcacgtaggtagcattatgcccgtgcgtgaagcaactggataatagggatcattttataccacttgtacacatgtcacgcaaaggattaacctttaaaaaaaggggacacgtgtcatccaaagcttgttcctttacaagcaagaatctgtagtgttcgtctagtaaaaggataatggtggtgtgagcactaccatgctcagatgtaggagacaaatttgattctattaagaaaagcataatcgtcactttagtgacctggcatgtgggaaaagtccacatacgagatacctcgtgaaggtcgacagttgctttaggtcctccgggtacttgcttggaggtaaatcaaataggtccttccagcactgagagagacacttctttttctgcctttgggaagtaaggctggcataagtaggctttcgcgtgttccttcgttctagatgattctttgtttgtggagagctttcagtgataggcaattttaaagtacttcaagcaatggagcattaatttgaccttcttcaataaatgtcatgtgtcgtgtcttgaaaaaaatgcagataatatttactattagaacatttactataagtaggctttcacgtgttttttctatttttggtttaaaaaaaatatcaaagcccttaattttggttacagagtgagaaaataagagagaagtttgaagaaattttttttgacaaataattatatataaaaaaataataat

SEQ ID NO: 314721 - DNA, 590 bp, Cannabis indica
ggtatttttcaaaattagtaaaacaaatgaataattttaaaaggagataaattagctaggtaagctctagacacaggcttattctgtctctgtccagaatcgagcatgcatttaattgatatttatgtgtaactattaacaaatttttggtggtattatcacaaatattaaaataaaatttttatgataagccaattcgaccataagccttctcaatccatgacaaggtaacctcaaggtgtgtataaaatgaagaagaaatgttaaaaatacatcttcaaattatgagagaaatagttgatttactattattttttttatcatgtcatttagtaatatgttactgaattttgtttttcctcagaacactctcaacaggtgttctattttattctttaaattacatcatcaaaatattatttttttcatttgacgtctaacttttacattacaacatatattagcacttttttatataatagactttaatttatattaaaatattatatatttaagtgtctataaaagttaataccacatatagttttacataatattgcataaaatacaattcaatataatataatata

SEQ ID NO: 314722 - DNA, 4266 bp, Cannabis indica
gcacctcaagtatggcattgatacttctcgacgatagagtttcccatccataatcacataacgggagcctactactggaccttcgtagaagttgccttgtcctctggaagctctccagaactcaggaagttgtaaatgggtgccatctaggaataagagttgttaaccatggaatttacccctggacctcaatgcttggtttttccaaatttaaaattgggactattctgtgttgaatgatcgcaggatctgttccaagtttagctagcatgtccacgaatgaattttggtctcttggaacctggcaaacattgtagctattgaatccttgcaacagttgccgggacatcataatgtatgaagccatttttttacacttcatctagtattccaaaaaatcttattcaccaccagataggaatcactgtacacttccatctattgggcccccacttccttagcttatttacgacctgccagcaaagctttatcttttgcttcattgttagaggcgcaaaaacaaaaaacttaaagcactctagagctagtgcccttgtgggaaaaatacgaatgactctgtccctagctcccttttagttggatgctccatctacatagatcttccatgttggcagttcctgagctggatcttccggaaggtcatttaggcttgaacactctactatgaagtcggcaagggcttgacccttaatagattcttggggctggtactatatatcaaattagctaagtttcatggcccatttagcaatctgctggaagactccggcttctgaagcacttgttgtaggggatgatttgtgagtacttttatgtcgtgggcatgtaagtatggcctcagcttttgagacaagttagtaagcaaaatattagtttctctaccataggatacctggattccgcacccagcaatctttttcttacgtagtagacaaggcactggaccttttcttcctctcgcacaattgcagaactaatagcatgatcagacactaccaagtacaagtataaatcttatccttacataggcttcgataaaatagcagccttggtcaaaaggtcctacaatttttggaaagaaaccttgcactctttagtctacaaaaacttcttgttacctcgcaataccttgaaaaatggtatgcactgatttgttgtctttgaaatgaactggctgagtgcagctatctgaccaataaaacattggacatccttgtgtttcttgggataaggcatgtcgataaaggctttgatcttctttaggtttgcttcgattctacacgagctgataatgaatcctaaagcttcttggaggagactccaaatgtacatttcatgggattcagcttcatccagtgtttcttgattacagtgaaagcttcttcaagatgctgaccatgatcttcagaggtcttcgatttcaccaacagatcatccacatatacctccatgtttcaccctaactggtttttgaacattctattgaccatctgctgatacgtggttccagcatttttatgaaccaatggcatcaccttgtagcattaaatgcctttattagttggtaagttggtgtgttcttcattcgcaacgtgcattttgatctaattatacccagagtaggcatccatgaaggtgagaaacttgtatccaaacgtggcatccaccaattgacctattcacagaagtagaaagaaatcttttgtgcatgcctttttcatgtcgataaagtctatgcacattctccatgatccattaggtttcgaaacaaatactgggtttgcaagccagaccgataatgcttcttggagaaaatcattagcgatcaacttgtctacctttgttttcacagcttccaatgtcacaggatccaaaagttgacacttctactggactagcgttacgtcttctgaattttcaaagcatggaaaatggtgttacgatcaatcacagtcatatcagaatggctccatgccagcatatcttgatttattttgaccgtgtttatgatgctttccctgatggatgagggtcggtttcttcccattccgatagttctcatgcgatcttcctcactaattcctacttcctctacctcctatattggtcctagattcctttcagtctcgattttttgatctaaattgtcatgaaacttttctcgaatagttttaatatccatcaagtcttctattctaggatcaataagggctttttcctgaatcattaactatgtctgtgtcgagacattatagaaatttctggcgctcttgttacctatgttgaagctacggtctctctaaaaccactcatgaatactatgcaaggttggacagtgaaaagggtggcagcagatttcctcttacgcggtgagaaaaacatgagcattgaagctttgtttttcttaatgatttcgtgctttttgtctctagttttcgtttctaggagtgaagaaatgaaactaatgtttggaagaaggataaatgacctttatataggctctaattttatttccccccaagaaacagttaaatggaacattaattcccattaaaagcattatgtggaaataggaatagaaaaaaaaggggaaaccatgactgtgtaaccgtcagcatgtttcccagaaagcacacttttaaatttccataatgaagaaccaataattaatagtcagttgatgagatagaagtgtgacagtccatttctgcacggtacaactttcaatgtgttaagcacatgaggaccacatgcctgctagcattggaacatgtatttaatgtcccaatctgtacagatgctcatacgtggacttgggagaaaatgttatcccaatgttttcacagctaacaaggcccttacacgttgcatagtctagctatctcatcgaccctgcagagaacctctgggcaaaattatgcctagcaggtctacataaagggtaacagccataagctacccaaaatgtccgcagcagcttctacccgaatactcaacatgctgaccagataaaatgggacaacaccctttaagggtgattttacaagccaagttcataaagaaggcaagtattaagggatttaacctgatgaccaacatgatggacaaatctagcactttcagggatgctggacagagatatgtgatcctttatttcgtctccatcaagcttcctcaaatatctataactgaatcctacaaactcaaatctagcaaatttatccaagaataaaggagctttatcaaatcataattgtatcctagaaaatagggatatttattgttgaccttgaaatctagactagacttctaagccacaccgctcgctagattggaaacaattacaagtttctgaagtaattaatgagagacaaaaaaatttatagttgttcaccccctatatcgcaataggaatggggctatgactacttcgagtttttatttctcaagagatggtaattacagcaagtatttgggagcactctctttatagttgaaggaggcccataaaaataggaaaaaaaataaagtgtgttccactgctgatgatgatctaacggtgaaaattagcttcttgtgatgaaggccaaatttttggtgtccaatagatcacgctacgagtttcccaaagcttattttggtaactccctagaagggaaattttacgatgatagctttagaattacacttggtgtatgaaacatcaccttaaatagcttcaaaactcaagtttaattgcaccaatcagatataaatttagtgagttatggctattttacggaaggtagtttaggtcccaacacccaggttgacatccagcgcagaagttgacactaatgtcaacctggatgatgtacaattgtagaaaaatccaagggaagtcctttgaagttatggtttgacacccctttgtctttttatagggtctagcaaaggtggtcagcaattctcgaagatgttgctatgttgtggaaatgggagactcgaaactcttcatttttgggagccaaaattgatgttttgaattttattaatttgacttcatggatcatttcccttgtgaaaaacttgacagacggtcaaaacagcataagactcgaataatcagaagccagcaaaccgagccatttgttgacctgggtgtaggaccatttaaactaagcttttgggattctatttttcacacttccaaggcttctgaacttgaggacaaggactctccccccatttttgaccattctggat

SEQ ID NO: 314723 - DNA, 908 bp, Cannabis indica
tagcatgctgtgcttcgaacaaagcctggaagaagatacaatggaggtggcgtaatcatgagtgtacatgatttatctactatcataaggcctcgttatagtgtatctcacatgacaattaaaaatggacctgataccatacaagctggatggacggtgagttaactattatttttttttcttaatatatgaagtcattcttttaaagcatactattagtaattaaatattaattagatatatttttataattagttaatattattcttcctttctagttttgtttttccactcaactattactttatctttttaggtaaaccctaatttgtacggcgatagtaaaactcgcttcttcacatttttacaagtaagtttctttctcatatttatcataaattattctactttaaataataattaaatatttttaatcatgttattatttacctattaattaggctggtggaagatcttgtttcaacacacattgtcctggttttgttattgttaataccgatataccactcgaccatgtttatcaactactttctcaacgtggtggcccaatatatcttacacaaatttttatttatcgagtaagtaatatatatatatatatatatatatatataacatcatattaatactatttatcaattagttttagtaaaaaaattaacaaatatctcataatatgatatttattttgtagatcaagtttaaaataaaaaatttagttactctcactatatgttgttatatatgtataggtcaaatattatgctattgtatcctttattttctaataggatgctgtgaatggaaaatggtggcttgaatatggaagagacgggtactcaaatcggttctggcccggacgtcatagtttagtacgtcttaacgac

SEQ ID NO: 314724 - DNA, 1365 bp, Cannabis indica
tgattcgatcgagtacatacatataaaacatttcaacaacttttcagatttaacaaagatttacgtactaaattagtcattggaagaaaatcgtttaattagtgtacgtgattattatacgtacgtacatagattatcttaacttattactaaaacattaaataaatataaacatatataattaattagttaataactcggcaattcttcctaatctctccatcattaccagtaagaacattaatggcgcccattttaatcatggatttagcaaaggcatccttgaactttttgaagctgccgaactttttgacgagggcggcagaggctggatcgttgagaagcgcagcgtcagatgttaacacaccatggttattggtaagaccagtgaagtaattactgtcgaaggtcagagcgctgcggcggtccaaatccactgtggtcgccccctacggcaacaggcggtgggcatattttctttagctcctccgcgaagtccgagtccagtgccgggtctttgtctcctttaccggtgaagttgtacagcctccggaacactaatgggcaatgtgtcactccaattgtgtgagcacctacgtacacaaacatatatataaaaattatatataaaatatgtaccaaaatattatgtatagctctttttgtttatcaaaaaggagatgatactacttttataaataatgtgaaccaaaataatggcaagtagcgatcacaagagttgcactacaaaataaaatcttctttttttagtgacactgttttagtcaaaacataaatttttaatttgtttttgtgattaaaggtgacttttagtcgcaataaaaaatattacttgtaaaaaatataatatttagatacaagttgtcacgaatttatttttagtcacaacaagtgttgtgactaaaaacacatttaattacaacaaattataattactgtgactaatacatttagccacaaaactttttatcccaagatataaattattgtttatatttttttgactttttataagattagtatactgggtcccttttaattagtaaaactgaaattattaattaattataaaatgtcaacgatggagtgttgaacaccttaaaactacaaataaaaatgttttgttttttgaaggatatttattaatattaaagtgcatattgtgtctgtataatgatctaaaaattgcccgaaatattttagtgcatatatatatatactaggtgaatgtacgtgccgagccacgtattgttaatttcatttaagattttagtctttttaagattttaaatatattttatttttaaagattacaaatatttttaattaatctatttaatattt

SEQ ID NO: 314725 - DNA, 1604 bp, Cannabis indica
cttggtcacttgcattttacaagtatgatttttgtctattcagatctatgggttcgagcagacctttgtacgcatttaatggtaaatttataacttgctaacagaattgacacaatttgaatttaaatagacatttttattcatttattgattggaacatatttgttactgtagtaacttacacaaaagctattatattgatctaacccgatctttagcttaatttaaataaaacaaattgcattaaataaaaattgtactttcataggtggtcatctgaccttagtacgttatcatttcgtacttaaaatggtcacccgacctcgtacttttactggtagtattttctcaaatgttccccattccagttcttggtaccataacgagttgcatgttttcatcatacttaccaactttgtatgccttggttctagaacttcaactacctgatatggcccttacctatcgtactttctttagtgtttagtaatactcttctaaggaccatatctctcacaaaaaacttaagtgcctttacttgtttattgaattatcaagccacttttttttgatcggccaccaattttaggcttgctgcaggtcgtttttcttcgatttcgtcaagtgattctgctagaagtgcatggttagcttcttggtcataggtcaatcttttgtgggacgaaggttctaattctacgggcagcataacttcataaccatatgccataacaaatggagtctatctggtcgttatattttaagttgtgcagtaagaccataatactactggaagttctttcggccaattctctttagcatcttcaagtcgcttctttaaagtgtctttaagtgtcttgttgactgctttgacctaatcgtttgctgggggatgtggtgctacggagaaacttcttatgattccatggtttgtatagaattcagtgaacaattgactatcaaactgtgtgctattgtctgagactactttttacgatagtccgaactagcatattatatttttcaccacaaagttaagtactttctaggatgttattgttgccaatagctcgaattctgtccatttagtaaaatagtccactacaaccaccacatattgtactcctcctttacctgtaggcaatttttcgatcaggtcaattccccaaatagcaaaaggctaaggactttacatctgagttagttcgttgggcggtgcacaaggtatctttgaaaatctttagcgtttgtcacatttcttaatgtaggcctttgaatcttcaattatggtcggccagaaatacccttgccttagtattttctttgacagactttgcccgactgcgtggtttccacaaaatccattgtgtactgcagacaaaagtcgtgcagcttcttcttgtgtaacacatgtgagtaatggcattgagaatccccttctatacatgactccttctacgatgatgtattgtgcagcctttctcctcatcttctgagcttcgtttctgttacttgggagttccccagtgttgaggtaggctgctattggtgtcatccagtttgaagatgtgtcaatcatcttcaattttttttgcataggtgat

SEQ ID NO: 314726 - DNA, 1255 bp, Cannabis indica
ttttatttagggcataaaatccaagaggacattcattgtcccaacattgattgatccattattcatatctccattcgtctgatttccagccatagtgatttcccttctaaatcaacaaagtattgcgttcccataataataataagtatagagaatatgtgcaagtattcaaccaagaatggcaggcactcaaatcaggaacacaaaatacttaaaaaaaactggaaatacaaagaacacaagagaatatagtagttcagtcaaatcacggtctgcttagtccactattgcaaggatttctgtcttgttcccatttcacggtggatcactcctatatatacgaagcaagtgtcttatgatttacacatggattaaatttattatcaatctgttcatacattgaattacagtaatcaaactaaaaaacgtatacataataaatgaagaacagtttctagcttaattcactaaatacagcaacgtgtgcgacttctataatgcgagttggctgttcacaatcctgcataagctcgcaggcttcaagatgcattcgagactaattgagtctaagaagtctacgtccttttaaagtcacttatatggacatcatataacaagctgccagaaccaagacaatatcagggatgctcaaatatagcctggtacatgcaagcttaaaaccgttcctttgttctaccaaatgccagccatacgtattcgatttgactcggtcgtattcgcatcatctcactgaatctaattcaaacgtggttcgtatttgaggggtctctcatcgacgtatcaactttcatcgaggagagtgaatacactggtcattttaataggagttcggtctcgagtttctaggtgagaaagtctcactataacaagaacgtccaaaacagacacccgagtcaagagttatgacaaacacgagaattttaatttttgcactcgttgaaacactacgaaaacttatccaaattactccaaacttcagaaggcacatatataccataaatattacctgccgtacgtaacagaatttaaattggagccattaaataaaaaacgccattaacattcggattaagctttaaaaagttcaaaactcgatttctaacacaaaatcaccacaaattcaacaagtaaacatcgatactagtcccataggtaccaaagaacaattctacgaagtcagaatctccataactattctaattcacaaaacccctatataaaaccaatcattttt

SEQ ID NO: 314727 - DNA, 914 bp, Cannabis indica
aaaatgacattgctagaaacaacatgtcgttttttgctgaaaaaaatgacacatcgtctatcaattgaagggctactcacatatggaaaaaaacaacacgtcgttttcaaatgaaggctacctcacacatggaaaaacgacacgtcgttttggatcgccttcttcagccaaccaggtcgttttgacccatttttctgcacgcgggtccttgtgaactcgacccgaacccaatcggaactctccattctgacgaccaaaaagacctaagtcaattccaaatgaatttaaatgtaaaaattaagacattcatatagatttcatgcatcgaaaacacgtaaaacaaagactttaaaatcaccaaaaaaatttagggtccgaagaaaattttctagaaatttttttagatttctttgtttttttaaatgagttttcatgcttagaacaatctatattactatatgaatgtattgatgcataaaatatttaaaataaaaaccgaaagtgaagacgaaaaatttacaaggcacgaactgaaaaactaaaatttttatttttacatatatttatacatataatgtatatatcacataaaaatattataaatatatgaaagagagtattataaatattattatacaataaaatcatatattcaacgtataatatataacaacatgaaatatataaatatacagcaatacgtatatataaaccaataatataatattatgggtaaatggcggcaaaactcctaaaacttttattttggtttcagttaacccttaaaacccaaatttgggcggtaaaacccccaatactcgtattctgttagcaatttaccatttccgttcattttaagtgttaagtctttagactggacatagtgtacacgtggcacaattttattggtccac

SEQ ID NO: 314728 - DNA, 733 bp, Cannabis indica
aattttctggatctaaaataactccctcaaattcctcaattggttttaacaggttcttttcatcttgaactcgaggatccagatcctcgtcctgtttctcgctttccttagttgtaactgccattaattgatggctggttttttattttgtagctttatatgatagcattcttgagccaatagttggtcaccttgcactacacctactcctgccagtgtttgaaacttaaaagacatgtgcttaattgaactaactgcccttagtccaattagtgcaggatgacccagcaatatgttgtaggccgatggcaagttaacaactagaaaatcttacatcaatgttgtggatataggtggctcgccaagagttaacgagagttcaataattccttgactggtgacaccatccctagtgaatccacataaattcaccaggcaaggttttaacatcgcattttgcaatcccatcttcttcagtgtatccttgtaaaggatattcactgaacttcaccgacaccctttttattctcttgttggcgagctagattgtaatcacgagtgggtcgacgtgtgggtatctcacgtcctctgtttcttcttccaaaaacacaattggaggttcttcaattttggctttctttgatggttcttgagcaaaagctgacttctcgttcttgattttcttgacatacctcttttgggcattgctactttctccagcgagatgtggccc

SEQ ID NO: 314729 - DNA, 4032 bp, Cannabis indica
atcccatgatctttctatttatgcggattgcaacgagagaggaaactcttcctcttcaagtttcccagccctataaatagtgatgtatgttcactgggcaaggagaccgagagattaaaaaagtcaatacacagcaaaactaagactatattattatctaagaattatatattcagagatactgttgtaagagctataagaaaaggaatcttcttccttgttcttgagtcaatataaataacgaggattaggctattaccgaactgctcggggctgaacctctataaaattcctgtgtcttactattgctttattatatataagttacaacatatcatttatcgcttataaaaaagactcattgttgttggctaaaagcgaagtcaacagatagaattttgaatttgaaggaataagcgagcatcctcatggagccctattttccttgaattatctttctctttgggaggatcgtcaatcaagtaatcatctttttaatactcctcagatacagtcgaattgtcttactccattccaaataatttgaaccaatcaatctatggtctgtgattttagacatcacaggaaccacattactgattttgaatctaattttatctctaccataatcttgaaagcaaaaataattgaaagagaaaaagaagaaagcaaacaccaaaagaatgaacatccaaacatgaagaaggcaaaagtatcaaaccataaaatgccaagaactgccggagattgatgcaaggaggacggggaagggttgggagtgtgacgggcattgaccatcaccgtagaagatgtcagacgcgccctcatgcaccgacgcgtgggaatctggacagtggtaaatagaggcgcgtagggcccgcacgtagtgaatatggatgccagaatttggggttttgtagttcgacagctgggcagcccttctatgtgggcggtgaaaataaactttcactccaaatagggtttccgaaaaataacaaccttaaactaaaaccctaatctttttttttataaaccctaatttcaaatttcaaattacaattctaattcaaatatggctctgatactatgtagagaatggtgaatagaattgtgtgttatattccattgaatagtatatatttatatacaaggctatgagtctaaataggaaactactaaatacaagttagcctaattttttacaactaatattctatcaataataaaaaaaatcataccatcttgaacactttggtaatcttcatcacaatcagaatcaaataaaagaattgagtcgtaccatgcttcatcaatgcttcctgctgataccaccaccacattgcaaaagccattagtgtggaagccataaaaaaagttcactaagataatatgaagatatatattatgaagataccaacaatatacataatataagataaaaaaaaaaaaaactcttcactgcagttcgctttgatcaaacaaccaataacagtccaattatcgtaacaaaaatttcaattttgcataacctccttccattaggaataactgtacataatgcatatttcatgattaaccacctcaaaaagttcaaattctattagaatagtaattattattatgagtcttatttcttacaattaaaatccgaaaaagaaaactccagtactagaacccaccaaaatctaaaaattaaattcatttaaattattaatcctccaacatttctaagaaatatataattagaatggaaggaaaccgaaagaaaaaaatgtaccttggaaagttgggttggtgaaggtggaggaggaatcaagtacgatagacttatttgctctgtcagatgaggccttagaaaactgagacgagactcttcccctcatatctcttctcctcctccgatgaccgtttgtcttcttagaggaccttaatctccctccaacacatagccatgaggcgttgaaacacacgctcccatatccctctctctatgatattatcataggctgatcacccctgttacaacatctccactataatcctagagagaaagccaacaacagagagttttaacttttttaagttttaagtataaaaattaaaaggggtttttacaccacatgttaaaatttataatttttttacttttttactgtgggataattttttttcaaaaatattatatttttttcaaaatactgtgtactgtattaaatttttactctagttccacaattatttttagttgttctactgttattttaattattctgttttattattttacaattattttataaaaagataattttataagtaaaattataaattttgtcaaaaatctaatatttttgtaaataccccaaaataaaaaggggtttttacaaaaatactgaattttcggtaaaaatttataattttactgtcacacggattttttttataaaaatactgtcttttaataaaacaaccgtaaaacaacaaaatagaacaattaaaacaacagggctcaaagctaatcttgctaaatctcaggttttctttggtggaatttctagaagagacaggtctaatttacttgggattttacagattgaggaaggggtgtttcccctaaagtatctcggggttccaatgagaccaacaaagtggaaagtggaggactgtggggttattctcaagaagatcaataaccggttgcacacttgggctagtaggcccctttcttatgcagggagatattaactaatcaactctattttgttgggtctgaggaattattagatgaacattttcttgttgcctcaaagcgcaatcaaggaaatagataaactttgcatgtggtttttgtggggaaacaatggtacaagaagtaagtttcatcttacatcttggactaatgtttgcttaccaaaggagcaaggaggccttggttttggtgaaggtgctaagtggaataaggcgatgattgcgaagtatgtttgggctatcaatcatcattcgaaagctcttgggttcgttggatcaaccatgtgtatttaaaagggcaaagtttttggcagtatcaactaaaaagatactagttggtactggaaaaaactttacaaaattagattgatgttttctcaacaaaaagtggaggatgccatgtgtaagggtaaattttgtgtcaacaaattatacaagagcctttgtcatggtgagcaatttgagtaccaaaggtttgtttggaatcggtatgctattccaaagcatagatttatttgttggcaggttgtgcgagatagcttactcactcgggatcatctctctagaattctgcatattgacagcaggctttgtccagtgtgtggctgctgtgatgaaaccacggtgcacttgctcttctcctgcaggttttctcaataggtgttgaagggtattaatgggtggttaggaactgcctggtcggaccgtctagaggactggcagctttggactatgcggttggaaaataaaaggatgaatttagttgctgcaatggttttttcaactacaatgtattatgtgtggcaaaatagacacgattgtaattacaatgggtattcttgtagtgtttaaaagattgtagagatgataagaaaagatacaaagtatagggtaagcaattttatttttaagaagttgaaagatgaagagaggttattgatgttaaacattacctctttgtagggtgggcttttgttgtgttgagttgtaagttggttgttttgcttgttgattaatgaagattagttcttcttgatcaaaaaaaataatagtaaaacaattaaaaaacaactgtgaaataacagtgaaaacttaatacaatacacagtataaaatttacaaagtatttttgaaaaaaattctatcctataataaaaaaaaagagtaaaaaagttgaaaatttgagtaactggttaaaaaccccaaataaaaagaggaaattacacttactatgggattttaaaagttcttatgataaatatggcacatttaagtttgaccaat

SEQ ID NO: 314730 - DNA, 1175 bp, Cannabis indica
tgtggtctaatgaacacccctaatttctagtacccaagccagcctgttcggtatgagtactagtggttcttgtttcctatgtgtcgtgaacccagctagaggggttgtcactccttgtcctactgatggtagaacccgtggaggcttataggtgcttagatcaggatcttccaccattggatcactcctattaatatgagtttgtacattaggatctgtagccatcagatcagttgtttcattggtttgtgacctcctagtagttacagccatctgtatgtcttttaaagagaattgaaataatgatcatgttcttttgctctcaatgaaagcacaaaaatattaatctcacttttagccaacgacactgagtcaattaaagcgattagaacaaatgataattttttaaagaaattaagcaataagaacacatagatttatagaggttcaaccctgtgattgtggaaatagcctactccactttttgttgtattacttgtgagaaaagaatcagaaagttcttaatctctttcgaaagcttacaatttttatagcataaagagctcttcttgaacaattgattatagatccctgaatagtgaaatagctccactatctataagaaagaattacattaattagtttcccaaataaataagaaaataacaaagaaaattaggaatgtttcccattttataacacgtgtggatatcccattaaaataagaatttaattaataaaataaataaggaaagtatttctgaatatattctattcatgtttaccttggctatcatatacaggcttattgggagatcgacgttgtttggacaatatcatttatcctgtccagatgttccagcttaatcttaaactaaactatttccaaggaataacttactcttaatgacataccgagaatggttccactcgtccaggtcttaaaatgttcacgtgtcacttggatggatgacaagtcaccctgtgtggaattttggataacaataagtatgatgagctgagtcagttctggtatgtatactgtgaggggctacgaatgagcaaacggtctaaaatgccggtggagccttggttttgtgtttagtcagtaaagtaatctgagctcagtgggatgttgtaaatttattttaaaaatacacttaactacttatttt

SEQ ID NO: 314731 - DNA, 1261 bp, Cannabis indica
atgttttatgtggtgtagtggtaaggatatatttacaagcatcctttcttgtttggcttaagggttctaaagtcaccaaaatctctcttaaaaaggattaaaagtgtagtgtcatgggaattcttgaggtgactactaatgacacaagacatatgcaaaacatgaaccccttaaaaaaatgagcttttacaaaaatactcgattttggttaaaattttataattttactgtcacgcgattttttttttaaaaaaaatactatctttttataaaataactgtaaaacaacaaaacaaaataattaaacaatggaacaactagaaaacaatcttggaacaacagtgaaaacttaacacaatacacaatataaaatttacacagtatttaaaaaaaaaatatcatctcaaagtaaaaacgtaaaaaaattagaaatttcagtatatggtataaaaccccccaaaaattgaggaaattgtattgtatacccactttactttatcaattttaatttttaccttcatttcatattctatgagatatacccacttttatatatgatgtccccattatagcccttaggttaatgtaaatcatatgctacacttaagttgaaggcgagcgtatattaggtaacccactcacaaaaattgttagattatttttaattaatggatcaaaaaagagacattcctcaacttatccaaaaaaaattaggaagagattttttctccttttgtttattaggcctattattatgttgttattttcatattctttaaaatatgatatttttctaaatgccactctcttggagggcccaatccgagcccaaacctggtcaatctacccaaaaaccgaaaattaaaatttcagaaattctgaatattttatgacagattttctttcttttcttttttttttcgttcttttttctttttttttgtagaaagttttgtgacagattttcgctacaccattcttgcaattcatacctaaaataatatatgatcctagttttgttttgataaattaatgagggtaaaatagtaattgagtaatgtatatcatttaaatttgaatatatatgtggataaattggtgcacacatgatcatgaccaaagatctattcagctaggatttatttattatttatatatatatatctttatatattaaaagtgcctatctaacggcaatttttggtttaacttggtttaacgatttttttttatttagccttaacgattaacttaacagact

SEQ ID NO: 314732 - DNA, 832 bp, Cannabis indica
tatcctaattctaccaaaattttgtcaacataactgcataacgtctatgattaaacgttctaaatttttttaaagctactaataactacaaaaccattcgaaaacaagataaaccaaacacaacaacactaatctcaatatttagtactgaattactaactactgactcaatcttaatgtgccttaaatttcaaacaagatacaatgttttaagagataatctcttatctcaaactctagataatttttttatgtctttattgattgagatgcataactctaaccacttatctcaaactctaggtatttttttatgtcgttattgattgagatgcataaccctaagattttaaaaaatggtagcaattgagacaagggtttctttcatattactaattaaaactagttatataatttgtaactaactagtttctcacaactagctattatttatataatttgtaactaactattaactaatcttactctaaattactaactagtaactaattatagtatactaaattactaactagtaactagttctaattctactaaaatttcagcaacataacgactataattgaacgtttccaaaaaattaaagttattaataacaacgaaactcattccaaaataatataaataatcacaacaacatttagcaatgtaaatttttttcacccatccgaccatagtataatttatcgcagaacctacttcactacttttgaatatttagaatatttaaatccatctaacatgcatattattccacccatccgactgcagtacaatacatcacagaacctacttcactacggatgaatat

SEQ ID NO: 314733 - DNA, 1282 bp, Cannabis indica
ttttttgcttcttttttcttaaaaagaaaaaaaaaacttaagattgatccaaaggagctgtctccatttgccactgcaacttggtttttttatttaataaaaaataaaaaattgagcgttgaattaatctataattagtttattttaacccctcttgctattttcttaacttttcaattcattatataaatctttagatgaaagcttacataatttttagattcctattctaataataatagtaataataataatactatatcttggattaggctcaaactttcttctttggctgactagtaatgaaaactggacaagaattcatctcaaaggtacagtctttattcatttttcactatattttcttgttcaaattttcattttgagtttgaaactaaaaatgtgataaaaaaatgttatcttttgtattggtgcagagttcttcttggcctaaagaagtggcaagaaaatggcttaacattcggagcaaaacagatgaatttaactcagattatgttttacaagcttcaactaaactccaacgccggagaaagagttgctccgacgacaattgttgcgtcgtcgtgcctgaagatttttcgggtttgctctttttcctctcttctttagatttgttatgttttggggttagtttttctgatcatattatttctttgcagttttttcaaaggcacaagactcagatgatcatctcaatctgaggttagtactctttatttgacttttcatttaatgacttttgaccaaacaaaacattatgagatgagactttgttttttcagcttagacttaagatttttcttcttgttttgttttttgtgttatgaaattagaacatttgttgggacatggaatgttggaggaatttcacctcatgatgggttgaacttaagggattggcttaagtctccaactcaagctgatatctatgttattgggtaatgatctaatctctatagtgataatctcatttttagttacaattaagtttttcgttttctattttaatcagatatgtaatccagcgtgaactctttgaattagtttaaaaggttcgagttagaactgaattacacgaagttttcgtatataaactcatgcttattttacaaatattatcgggtaattaaatttctcttttgttgtaataaggtatgtagtccagcgcaaactatttgaattagtttaaaggtttcaggttagaactaaacagtcctgaaatttagtgggtcataagaaaaaatattgtatttttcaaaat

SEQ ID NO: 314734 - DNA, 1568 bp, Cannabis indica
taacagaatattcttttatttttaaggtatattctgttaaaccaagaaatgtcgttagatagacacttttaatatataaagatatatatatgtattagattgaatttacgacaaacgcatgtatacttagtgttttatataaggggaattacttcatatattatttttttaatttttttttaaatttacggtttaggtttctaaaatggttgcagcgctagttgcagtagaggtttctatacgcttttttgttgcaatttaagttgcagcactagttacaataggggtttctatgtagaattctataaaaatgccaaaaaaaaaaactgttttgaagtgtaaaaataaaaaaactcctttatataaatatataaaagtattttgaataaaggtaatactataaggtttcaagaaaagaaaacgtgaaacatggtagtagttagttcttcacattttttattctttctagatcatcatttgaattgtctataacctttttcttaaacttgctttctttgaccctatccaccttccgaaagagtcgatccctataaggaatttggagagaatttctagccaagctattgtcccagctgcaatatacaattttgagagaaagtgcattcaaaaaataaatggttataattttaaataaaaatttaaggttaaaatttatgtaactataagtagctaacgtttgagaattattttttttttaatagaaaattattttttagatatatatatacatttaaatatataattggctaatattaaatgcaatgctagtttatactttgttatatgctctaaatttgttttagataatatattatgatttttattttttataagaattaatattatataatttaatttaaaatagcaaaatgtttactgtaaactgtgaaatgaaaaacacaagtaatttaaaaataaaaaataaaagtaagcaccacccaattaaagaacattactattttagttactattgttacaaatttacaattgttataaaaaatcttattttatttattgtgactaaagataaaatagttgtggctaattataaattattattattattatgtgactaaaatgtggttacaaaaattacgatttattgtgactaaatgtgttttcagtcacaatatttgttgtgactaaaactaaattagtgagaacttgtaactaaatactatgttttagtcacaagtaactttttattgtaactaaaagtcacatttagtcataaaaaattatgttgtgactaaaaggttgtcactaaaaataacagttttttgtagtgttaatatatgtgatcagagtgatagaaagacaatcacaatcacccaattatacatcaccaaagtttaatgctaatgcttttatctgtgagatatgcactacgatcatttatggcggtatcactaacttttacctatgaaagcaaccatatacaatagaacctctatttaagaatactctattcaagaataacctcatttgttataaaaaatcaagttccaatttgggccagttataaataagaataacctctaaattgt

SEQ ID NO: 314735 - DNA, 1969 bp, Cannabis indica
taagtatatataaataaaaataataaaatatatatatatatatatatataatcatatcatatgcataatgcatggtttataataacagctaaattaatgcagttttattttagccttgcattttacatatgatattgtgtatgttgtttacacaaaaattaagtttgatgtggatattaatatttgatatgtgttaacaaagaaaatattttagagtttattagtcctgagtcatgacagtcgacctaggaggagttcttagacttgtgctcaagttgactccgggaactccaaaataggtgtttggatctccttaaattattttcagctcactatcattcagtaaattgtaccatgaagacatgaagaattaaatttaaagctggaagttgaaaatacaacaaaacagcaacccgaaatcggagtgcctaacacccaggttgacaaccctactagggtttcggtttctgggcctgtcttagtgcaaatatgtcaaacattatactgggaaatgaattagacctatcacaaagatatttgagggaaaaaaaatcagaatctaagcacttttagttttgagcacctaaggcaccatgtgctctaggcacccagcacaaaggcagacattttgtcaacgtggggcacttccaaccacaatattgaagccatatcctgagtattttctttgtcttcatctaaaatgaggaaacaaatgcttttggagaagaaatggatcgacctatatgccacaacaaggacccagtgcccaggttgacatagtgctgggcctagccctcaagttgacactttgtcaacctgggccatttccaaggagttttttttttttttgataagtctttcgggaatactttccatttttgccaaaggttaagatacaagtgtttctaataatcaaacggagtcatctagtggcaaaaaattggatccagtgcctaggttgacacctggcactaggcccagtgcccagattgacattttgtcaacctgagatatttctagtcatacttcaaaaaaagtgttctggacattttttccatcatcagaaataatgaagatacaagtggtctcatggagcaaataagatttctgagtagccagaacagggctccaatgcccaggctgacatggcactgggccctacgcccaggttgacatgcaacctagttcgcatgtttttgctcctcaaacacaaattctactccaagtattcttctgaaaatggtcaaaaatagggcaggagaccccgttcgcaatcttggatgcagtagaagtatccaaacgagccttgagaaggagcccaagaagcacctcacgcctaggttgactcctggcctggtgtgttgggttctgcttatcaaaggtagattctattccaagaattcaactatatttttgtagtaaacgagagctacaactcgtgataggccaaatttttactttgatgtttcaccctttcaacaaggtggaatatcaacaaaattaaggagttttgagtctttcgagaactagtgaacaacttcaccagagcattgaatttgactaagtggtctcaacacattacttaagcatcaaaaaataaaaaaagtctgggacgttttggcactcacccagtgtccaggtttacataaggatgtcaacctgggcgttgggttgtcaacttggtcgcagggtgctgaataactttcactaaaatgaccataactcactcaatattgattcgattgatgcgattcaacttgcatttcgaagctatttcaaagatctatcaggttatgtctcaccctgacataactcgaaaatgatccgacagacgagatttagagtccaaaaaattgacgattttcaccaagagtcaattttcaccatcaaatcatcatgaatcatcatcaacggccaaaatcagcctgaaatgatttttttttcatattttttgtattttttaattatt

SEQ ID NO: 314736 - DNA, 856 bp, Cannabis indica
ttttttttttttttaaatatcaattgatgtaatattcgagttgtttaaacctagtaatcaatataaaattttattcaacataaattttttattttattttttgaaatggtcagaatgaataactcatatgtcgcacaaactgctatatgaaaagaagaaatgttgattgggacattgacactttaagctaagattgatatctttaaatccatgtcctattcaaaattttcagtctttctttttttttttttgacgcgaatttttcagtcattcaaaattttcagtcattcttgaatagcgtacaaacaatcatagatttaggtgtatcatgtgcaataattaatgttatttagatgcgtaatttacaaatttcttccacaaatttgtaaaatatacccttaagtttaaggacaagtttcactctctttctttgaaaaagggctatctatccttactatcaaaattgaaacatctcgatttatgctctctaagcacattttttttttaactaaaatagaaagtgaaacttgaaaaaaaaaatgaacttcaatcatataaataaaaatactctataatagagaatggataggaaactctctaaaatttcgtttggtacgttatattgtattgtattgggtaggggtgtgcataaatcaatctaatccaatgagaaccgaccgatccaattacaaccgaccgccaaacattggatatccaattgtgatcggatcggattggatgttattttaaaatatccaattggatcggatcggatagtggatggggtgtctaaaaatccaatacatccaacatctaatcgaactaattagtattttcatttagtttggatgagtaa

SEQ ID NO: 314737 - DNA, 894 bp, Cannabis indica
agagagaaaaagtagtccctcaagacatgtttgaatggtatattgtattgagttgtatagtattaaaatattataaaaaattacaaatagaaataatattttcaagtcatatatcaaacgccatataaaccccgaacttcatttcaatcccactgtcaccccaacacatactcattctcattctgaccccaaccaatttctaaaatatctagcacattgttagaaaaattacaaagttcatgtaatcgaaaaaaacacctgatatactatcattgttactaatcgttaaaatactagacaattgatgagaaccaaataaccaaactcaagaaaaccaattaaccagtagcaaaacaggaatataggaaagccaattacattctcaagggagcccttaggctcctttaatgcaaagagagaattactcaatacattccataccttctctattctcctactcacctatacatagtaatttctcactcaaaactactctcccaaacaaggactcaaatagtctttttatttactatatgctagcacaccctactaatcctagtgcctaacaacaatacgtcaaaacaagttaaaatgatacgtctcacaagaatcagtaaatggggttaataaatattcatgttatattaataattcatatccgtatgtgtgagtgtagacttactttctaactattttggcaaacaagtgatgatgtgaattagtggtcaaatcaagatccccaagctgtttctctttcagataaacaatgtcaggcggcctaaaatgaaatattccttcaaaaattgggcaatatgaaatatatatataagtaacatttggaacaaacattaacaacaaaaaacaagtaacttatcaatggaagcagaatattcc

SEQ ID NO: 314738 - DNA, 987 bp, Cannabis indica
aaggtaaaattattaagttacaaaaatatgtcagtatttaaataaaataatgagagagaagctaatagaataattaaattttggtaaaagattttatatttgaaggagtaaaattagataagaaagcaaaattcctaataattacttaaaaaaaaaaaaaaaacgaagtatggattccaatttttgtaatattttgttaattttaaatatttatgaaaaaaacacctattgaatgtgtacgtgtcaccgagacacaaaaccttgtgtgcgtggaagtaggccttggactcagtttggggcccaatcaatcataaccacctaagattgagaacggcccattagtcttgtgccatgtatcgctacgtgtagttctagaacagaaaggagtccaatgggcctctttcttgaacaatctactaacaacaagtcaactcaattggtcaaactcaaaaccaaaactctctcctctctctataatctatatatgattcattcgtaaacgttgaatctaattctggtgatcaatggagaagaagggaaagactggaatggaaaatgaaggtgtgatcgacacgtggcttagaaaacaccgtttgctatacgttggtgccactaaacaccctttcattctcagcattagtgatggcaccattgatatctcctctttcaaaacatggctggtaactaaagttttctcctttctcattttcccaacttgggtatctctcaaattttgttttttgaacaagtattagggtatggatgttaaagattgaacctttttggtcttattgagtaaataaatgcatgcagggacaggattacatctttgttagagcttttgtcccttttgtagcgagtttgattgtgaaagcttggaaggagagtgatgataggagtgatatggaggtcatattgggtggtatggctgctttgaatgatgaacttgaatggtttaagaaagaggcctttaagtggggtgttcaa

SEQ ID NO: 314739 - DNA, 2674 bp, Cannabis indica
atggaagtttaaggtcaagaactccctcttgcttctacaaaatggcagagctgagtggcttcttgatcttcgtttaggaaaatgatcattcctttcactttcatcataactattttgatctctttgacttttgtacatttcactactcaactggtttttacctagagattctttgacaggtcatgacctcctaaagatatggcgtttccatctccgttcaacagtagatctttgcccttgatgtcagacatattttcctaccacaagtcttgaatggcctcttcgagaagtgcaagtacaggaaccaatcctgtgaaaagaaaaaggggcactcagaaatacaacaaccagtcttaaattatgtccagctttgtaatcctgtctacaatagagcatcaagacaactgaaaaatttcttttagattagacaccatagcctctgcttattccaactgttttctgtaactgtacccactctaggaacttatattaaagcaagttggcaattcgatatattgcatgtaagacagtatgagctcaacttaaatgagtatttctgacaaagcagacaagaaattaccttgaactctacataggtttttgatggctcaaagtttaaatcataaaaggagcgagggcaccttatgttcaaaatgaaagcagggtatattggagctctacttcgttttctggtttggaaattattgacagcttttccttgatcgaaccaatgatatctagttgccaactgattcaccaatttatgaattggccctttgcatacaaaccgtgaattaatatctgcagatcttagtgttaaggtaaactattgaatgaacattattcaaagccaatacatccacaatgaaaaatttatagagttaacaagcatagaatcagatacagacatattgaaagacctgcaaaagcacatattaaccacaaaatgtgaatcttgctaccttgatgctcaaattgtcaaaaggggaagatatgtatccagaaagcttaactttgccactactacttttcaattcatgaagagaggtggagatctcggtcccaaaacaagtggtcaatagggacaagggagaagaaggtagtgtgtagagaagtacatcctcactgcatacatcatagatcttgtaaacaagaaaaaagagtatttaatccaacttcaactgtgactagaaattacctttctatatcaacatctttaaaagatacttttgagtgcacaagggaaattctctgtacacatttcttgatcgattgcaagaccttagggctttcatttaataacacaaacaaaacaatacataaatgtccattccaattactgtttgcggaatgaaattaacacaaagagagctggaagaaaccatcacaacaaagtaaagagaaaacccaagtagcaaggtagtaaggtaccttgactgaatatacttcctccgaattggttggttgtaaaataaatcccgaacagaaacttaaaaaaagcccatttcaacttgaggaaatgaacaattaccaagaactttacatgttctaaggaaatcaacataaaactacaacataataagcgcttaacctacaaagcagctagcattcttcaaccatcaaccaatgtaaatacactcactaaaaacccagttgatcacaagttaaatcagatcaccaagcttgtgcatagttttagaatggatgtatataacttgtcttgtaacaaacaagattctcctctattttcttgagatgaattataatcttcattattttcaataaattattcattacttcaaataataataataacaattggacatagatgaaatggtactttggtttttgagctgtattaatattcaggagtcttgttcaaaaaagtagaaaaatggaccctttttacaccatataagatttgtctggttttgttctagtgtaatgaaatagttaactgataccattttttttttttgatgaattagaaatgtactggctcaaaacaagtgtttacatcctaatagcacccatcaagggcctaaataatcatctatacatgtgtttcataaaaccacaattcattatatacaattacattattcacaaattcaaaaaccattgtttatcctcctctgaaattttctttggccaaaacaagtgaatccgatgtgttacttcagcctttaaatctttaatcagcaaatcagtttttggttttgctttctcccaataacatctatttctcaatctccatatattgtatgtcaagctagctaaacaggcagcatatgtcattttcttaaacttactcagcttagctctcccaatctatttatgaagatggggggggggggggagaaatgtgagaagttttccaattcagcaagttgtcaattcccgcaagcacctgctagtttcagcacagccaaaaaataaatgttcagcagattcttgatgtgcacagcagagtaaacatacctgatcttccacgattttcatcttgaaaagcctatctctggttttcaacctctggtgcatagcaagccatagcacaaagttatgcttgggatagttcaacctgctccaaacttggttaggccaatgtatttttcccctgctggtttgaaaagatcataaccctgagcaatcgtgtatttctgctgcaaaacca

SEQ ID NO: 314740 - DNA, 1179 bp, Cannabis indica
tggtcctcggtggtcgtcggaggtggtggaggtgagccgtggaggtggtgatgcgtttgggtggtcctcacgggttgagagagaggaagagagaggggggctgggtggtcctcggtggggcatgggacggttgtgggatagttttgagccctggagtttgtgggatggtttgggtggggtggcgaagagatgccgagatagagagagaaagagagatgcagagagagtttgagggaaggagagagaaagggtttgagtttttgagtggggtatttttggagttttgaaaaagaagtcatatattttcaatgtagaaaagtattagtttagggaaaaaattatcccctaatgcatgtatggaaattcaaatttccttatgactattagagagattatagagcgtcatgtcaccgcttcatacttctcctttatatatatagattgtgtagattgtaattatttaagatatcttgcaaaatttcgagacttttaagaaaatttaacatgtagaaaataatattcaaatatgccaaaaattaagagtaatttgtggcgtaaatacttaagtttaactcttacttgcagataaatacctaaatttaattttttatgttaataatacctaagttatattatggaactttcataggtacctaattattaagtttcaagttaatggtcacatactagttcttgattggttcaggttattaaatttttattttaatttaaatatactaataagaaaataacacgatgatattgacttagcactaggtacttacagaaattttagaaaaatataatttaaatgttattaccgtaaaaaattaaacttaaatatttatttacaatcaaaaattaattttaagtatttatgtcgtaaattattccaaaattaattagtgatagtaattttacgtaaataaattgaagatcaaccaacattaaagtggaatgagcaaatgtaaataaaaaagttaaggtatatggtagacaattatatatgtatttatgtcaattgttggtaaaaactttaaaaataaagatttccccaattggtaatttttattcttacaatttcagtttatatagctacgggggtgtgcataaatcgatccaatccaatgagaactgaccgatccaattataaccgaccgccaaacattggatatccaa

SEQ ID NO: 314741 - DNA, 981 bp, Cannabis indica
cagtgagtaagcacatctaaaataacatcactatcccactctaacaaatcattcttaagtaagggaacaactgttttaccaattagagcaagatcgatgacgagagatttaacatatggatttaactcatcacacaaccgatcgaagatcattcaggatacttacttatgtacctgcaccaattgatctctctgcatccaaatggccaccaattaatcctctatttttgaatcgctgcaatttgttccatttttctggtctttaattaggtcttcctgtaccatagccacagaactaatctgaaaaatgcccaaaaccctagcacaccactattcaatgacctgtccatatgtgatgactaagtgaagaaaggagcagaaactgagagaaagggatattgataagaaagagattaagcttcatggcatgggatcatgggagggagcttcagtgattgaagaagaagaagattgtggttcaaatctatctctcgctctcggtgattgaggccaatttttaataaggccggtaattaagacctaatattaatcaatagagaaaaatatgtattttttatttattttaaattttactttcatttttatagaagatctattattatactctttaagttaacgtaaaatatgtgctagatttctggtgacaactattattaatgggaaggtatttttcaatgagatgggatgctatttgaagacgttatagctttattgtctaaatttctgcgggcagtttggcttgcgataagatttctatagctcatggtttggcaaaacatgtcattcggttagacaataagttatggttcgaggagcttccaccgccgatcgtgattaatcatgtgtgactcagttcaccaagtcaaaaaaaaaaatatatgtactgctagacttaataagttggcagtcgaagaatattggacaatccactcaaaaaaatggatataatttaataaaatat

SEQ ID NO: 314742 - DNA, 941 bp, Cannabis indica
aaagacaaaactaaacagtgaggattgcgagctcgaggcatgggttacatgttaggggattgttacgatgttttgatttaaaaatatttcgttaaagattatgattcaaataattttgtaaagctttatattttaaaggttatgaataaataaatgttttgttttaaaaataaagagatctcatgcttagttatttttattaaagaagtcttttactgtctttatcttaaatagttttaaacggactagtaagtgtgatgtcctgtgaaatcggggcattacatggaaaaacaaatataaatgtcgggctagtggaagaactaggagaagtagagattgatcctacttaccgacctggacattcaaaattggaaaaggtttgttgcttgatacaaactttcatctcgtccaacagaaaagaagatggttggacaaagaacatgtagaagcaataaaagaagaggtagaaagactccgcataaacaaattcattattgaagctttctacccgctctgggtggctaatattgtactagtatccaagccaaacaataaatggtgagtatgtattgacttcaccaaccttaataaggcgtgtctaaaagattattttctacttccaagaattattcagctcatagatgcaacagccgggcatgaaatcataagttttatggattcctatttgaggtacaatcagataagaatgcatccacctgaccactactacaaaatttactattcacgtctgtttttaagtgacacttaaagaatttacgtcggttttataaactgacgtatataccgtagtcgcaaatagtttttattagcgtcgttttccaaatgacgcaaaacataattttcgacatttataaaccgaagctaaataattactttctattttattttaagcgtcagttaaaaaatgacgctaaatgttt

SEQ ID NO: 314743 - DNA, 1551 bp, Cannabis indica
ccctgatgctggtgttactaaggttgctgatatcttgttaaacaatggtaattgggacatctgtaaactcaacagtctctttgaccatgagacgattgttgtaatcttaaagggtggtaatccctcgggtcttggcaaggataggtgggtttggactctgaaaaagtactggccaattttcgtgtaagtctgcttaccttacccacgccaaggagaggtctcctcactgtgacattgctccttccctctagaacatgctttggattagtaaaatcttggagcgtcataaggtcctctgatggtgtatcctgtccagagccctccctgttaggtcggtgatcagtagtaggtttcttattgaggattctaacttccctctttgtgggtcgggagaggaatcttttgaacacttgtttctgtcttgtgaagtaacatttcacctgtggcggtcctctccgtggggtatttatcctgtttgcaatacaagcattcgcctttgggactgggtgaaattcatctggaattttaaacacaagggtattaatgctgaagatagttttctttatgcttctatcgtggttgacaccatctggcggacccataatgataaggtatacaacaactgtccggttgatatgaagaagtgtattgactctatttgtactttttttttggtagatttgaatacttctcttttccctccacctaccccatactgcatggaggcctggtgtccccctcctcactactggatgaagctgaactgtgatatcagagtggggtcagatagcatgtattctgttgttgtggctagggatcacatgggcagggtgatccgaattcatacggatcggttggatttttttgatgtgttgtgtggagaagcgacgacccgctgcttggctgttacggtggcactggacatcggtgcgaagtttgttattgtggagaatgactcgagtgtggtgctcaatgcgcttagtgggaaggatcctcattgggctcttgagaactatcgctccttttgtaatagatcttctccctcgtttttagttgtatttttacgcatgtcagtagaacatgtaattttgcagctcataatgtggccaagtaggcatttgctcacctgagatttggtgatatcccagtctctattattctgaccatgaggtgtaactgctttttatcttataacaaatacacttttcttttttttttttttaaaaaaaaagagacaaatgaactacaaattacaattgtaagagattttagcgagagctaattgcaaaagacggtggcaatattatatatgagagaccttaactgaagatgtcatatgagagacaacaaccacatcacacgagcaacaacgttagtttgagaaaggatatcttgttaagtaatagtttattttgttaaagttaatatagagaattaaaaaatactcttaaactaagaattctatacataactatattttatataaaatagatatttaatataatttttcttatatatttttaatataaatataatatcttttagttgatt

SEQ ID NO: 314744 - DNA, 1146 bp, Cannabis indica
tctgttcataagcttcgacataatagtttcacctagaaattctatttttgtataattgttcacatactcttaagaatataactctaatatatcgggtgaaatactataaatcttggtgtcttatttaatttttcgcaattttattttgtctaattctaattagcctagtgttctactttttatgatcatcttatgaatgtcaacacacaacatgcattatactaaaataagaatcaacatttcaaagaaattaatttttataaggagattatattaatgttattattattattattagacatattatctgaacattttagtatgactcgaccatataattaaaaatgtcaatcgttttagtgaaaaataataaaatataagcgggaagtgaacattttagtcttttgctttgtagtttggaaagtccaaatcgaccagcgccaccatcttacaatattttatttgcagcttagtttttcctttttaaattatcacatgtccacgaaattaatgaagattggtacagctaaagccaaaagctcgtgcttattatcggtttgttggctaagtcccacgtaggaattgagaaatgaaaaatgaaaaattagtgacgagaaccaatctgaattaaagttgtaattagagttctacgtcacttaatatatgatatatcgtatcatctgtaatgtactctaacttcaacgtaagcatgtattgtagataacttatattgggattatctttagtgatatttattattaattatcgtattttgatcgatatatagcgaaatacctattaaatatattttgccaaagtgttaagcatcttattgatcggagccatcatctatattatttggataaggcttaactaaaactaaatctttattaatgatgtaacttgggatcgacacccttacagataacagatacttctaatgataatttttcaagaatatatatagtggtatacaaactcctattatctatagcttttgagtttcgataacaagtaaagaaaggcaaaattccatcaatctttcaatcaattatagcttttatctttttatttgaaattctgtattttaatattctcagtttaattatttaattaagtgattaattaaatgcggaataatgaaac

SEQ ID NO: 314745 - DNA, 1161 bp, Cannabis indica
tttaaaatatgtcttgcaaaataactaccatataatatagtttaactcaaaagggcaatttagtcaatttaagcattccaattacgtttcctaataaagtaaacaagataaatcacaactattccatttctaaaaaattttagtaaacaacatattacaaatattgattccgattatttttcatttattccgttacatttctccattaatttattccgattctgattactgtatagtaaacgtgccatgaaagtagaccttttctccctttgttatgctggacaaagtaaaaaaggtcttttccaatcaattcatgatcgaatatggaataagctttctaattggaagtctccctcgttcacgtcgagtggaagggaagtgctcataaaatctatcatcactacaagaaaaaagacttttattggcaaaatttattaattttagtagcataagttacttttgcttgacaaattaattaattatgctggtattactaatccaaagttttggctacatagtgaagtttttgtcggtgcatatattcgctggtaaagctatttaatgtcggtgatgttatctaacttcatcagcaatctgatattttttgtcggcacactatccaatctcactgccaaaaagttaagtaaatgtagagtcgaaaggctctattttctctggtcgttgaagtagttttgttggtgcacatttgcgccagcaaaagctgcgaaaaatttggtgggaaatttctcacatgacgaaaacgtgtgcattaaattagtgggaaaagttatgctggcgaacaaatgcaccgaaaaaactaaaaaatagaaattgaaacgttgcctttaagggtttttaaacaaatttcagggacgcattttcctctttttccagtgcacaacttgttgagaatattttaccaagatctagatttactaacaagtatgttgaattaacatcctaaatatgaattctctaaaataatgaaataaacacataagggtttaagaaaaccttacattgattgcagcggaatataatgactctttccgttcaagatctctagcccttgattcctttctgtagcaaagcattatcaagatctgaacttgtatctctttctctccttcgggtttggtcaccacagtcttactcactatg

SEQ ID NO: 314746 - DNA, 1138 bp, Cannabis indica
tccaaaatagtatttactctattgaaaaattacttcatatactgttttttaactttttttaaatttacggtttaggttattttggtagtttctatgtgggtcgttatgtggattttagttgcgatttaggttgctccgttaatttctatgagaatttctatgtagaattccgtaaaaatacaaacaaaaaaaacaaactattttgaagtttaaaaaaaaacttctttaatatatcactaagaaattttgaaaatcatatattcaaattagtttgtaaaggctccaattcattatagaaagtgtaatgctttgaataagttaagatcagagtaaaatgatcagattccataaaataaataggaagccccatcataaaagaccaacccaataaaatcattaaagctattacttctacttgaaggactcaaaactccctacattaataatgttatccctatttttcagaggagttctacataaaagttgcaaaaaggtgctacatcagatcatatgatattataaattctttattaagataggatcacagaagatattgaagtattcggaagaatgcttcccttgcaaaggacagaatgattcttgaagttctaatctgatgcttctgctatttggaggcaaatgggaagcacgagcactccgggatgatcaagaatcgacaatcttaagaagcccttggctggacttcctagaagctccctacaacctaattcgaaactacacctgatggttacacctcatctgataccaagtcagatgttgtcccctgcgtcagaccgtggttgtgcacatacgtgcctttatagtgcttactgtccaacagcttgtctaggcaattacctttaaagaagaaacctttgaacgacatgtgttcatatctttacgtgatatcctaaatagattaaacaccacacaatggaagagctacctaccaaaccaacggtcagatggtcttgtggtattttcggcctttcttgtgtactgggtaagaaaccctagtggggtaaaatgtatgcccttacccacttatgtacttataaatacttctattttttatgtatagggggtgataatttttacttacaaaacctctgctaaaattcctagagagctttcttct

SEQ ID NO: 314747 - DNA, 1043 bp, Cannabis indica
atttctctcacaattttttatttttatctactccatttttctttttcttttatatgcttaaaataaaatttattatttagcaaaaacaataaaagattgaacctttaaaactttttatattgtgttatgggaaaattcttctacgtatgtccaaaaacattttggttctgctctaactaaatcaactaacatatagtcatttctccatatgaacttttttttttgtttgaacaaaggacatgttatgaccaaaaaagaagtatctccaagaccttttttctttgtattttcaattaactttttcaaattaagcatataactaaatatacttgcattgcatgtaacttctgcttagtatatgtataacacacatattttttcttggaaggaggagtcacgtgggctgttgtccattttaatttttcgttatcaattttaagtaaaaaaaaaaaagcaaaactatcgtgatatgcccaatcaaatcaatactatttataaacttaaaatataataaaattggttagaataaatgttgaactgccaagttttaacaaaatggcacaaaaattttttaataaaaaaatacagtatacaatataataatagggtagtaaaaatgtaattttatgcatataacagtaaaattataaaaaattgggaaatccagtactgagtataaatttcccaatatatttgggccctaactaagaaacatgatattttttggggtgaaatggatcagcaccacttaaagaattctactttttgggagtattatctcaaactagagtttagttggtattgaagaaagttgtgaaaactttcagcagagacaatgtgatagctagggttgagaatcaattggtttgatcggtttttttctttataaaaatttaaaatttggttttcagtttagattggtacaatttaaaaaccgaccgaccaatccagaacctatcattaaaccgaccgttttgaacctcggtttggtagtttaaaccgcccaaaccgaacttcttttttttcttctttaaaatataatt

SEQ ID NO: 314748 - DNA, 2067 bp, Cannabis indica
tgatcaggtacccaatcctacttgcagtggcagcgcgtgtagtttcaacatgagctacggtagctccaccatagcagcttccctatcccaagagactctcaaactggccaccgacgccatcccagcctacaccttcggttgcatcaataaagccacaggcagttctgtaccaccacagggtcttttgggcctgggccgaggcccactctctcttctttcacagacccaaaatctttacaaatccactttctcttactgcttgcccagtttcaagtcccttaacttttctgggtcactcagacttgggcctgttgcacagcccataaggattaagtacactccattgcttaaaaatccaagaagatcatcactttattatgtgaatttggtgggtattaaggtgggcaggaaaactgttgatattcctcctagtgctttggctttcaatccaaccactggtgctggcactatcattgattcaggtaaaatatctatttttttttttatgtaataatgtgtttacatgtaaagcaaatttaaaggtttgggtgatttgtattattaatagtactagagcacatgtggtggggatgactaggattgagtctagattcatttatggattatggttgtcaaaacattctttaagcacaaaattcaattattgtcccactcaccaccatgcatgtctccttgttggttcaaattttttaattgttttttctcttctcaaaatatattggattccattatgtaatgtcacacaactaggctaggctaaaataattgctcaaaaagtttatgccaaaataatgtaatgtacattattattattatacatactaaaaataataatgtgacaatattcaggcacggtgtttacccgattggtggttcccgtttacacggcggtgcgagatgagttccgtaggcgcatgggaaaggcggtagtttcctcgctcgggggtttcgacacgtgctactccgtccctatcaccgtgcccaccttaacatttatgttcgcgggcatgaatgtgacattgccacaagacaatttcctgatccacagcagctctagtaacctcgcgtgcttggcgatcgcggccgcaccggacaatgtgaactcggtgcttaatgtcattgccaaccttcagcagcaaaaccacaggctgctctttgatgtgcccaactcaaggcttggagtggcccgtgagacatgctcttaattaattactacattactagtattattaatagtagttatgttttttattaattagctttgtggtggtcttggtctccaattgtcgtttttggtattgattttgtcgtttagggaagttatggaaatgtgttactttgttgggggtatctctattgtacttgtttattcccaactctaaatcttataagatgaaatccaaaaataagtactaagtttgtacttcttagctttttgtccaaaaacattatgtttattattatggcatgtgtaattgcaaatgttaagtgtattccattcgattcatagtttaggatcatctctattttctaatgaattactataaagttagtatatataactgtttttcaacgtatctttgacgaaataaatctagacatatatttggtatgttcaattcaaaagaaataattaacgttcactaaattagaaaatgatagtgtaaaatatatgtcaaatttagtacatattaaaaattatactaaaattttgactcaaaactttgttaaaatattttaggtggactaatataattaaacattattcacgtaatatcggtattaacatataaaaataactatataattagtattgtatggtattataaacgtttgatggtaaaaattgttgaaaacttttttatttttggctttcaatctcatttttctaaagtttttcgaagcttaatttaagtttttcccatgactgaaaaaggattttttttaaatattatcttgttgaaaacccacaaaagcccgtcagaagaaatggacgctggaggtgcctattagagattttataacaatggaagataaatcaagata

SEQ ID NO: 314749 - DNA, 1151 bp, Cannabis indica
tcagttcattcatgctcctacaagcctgcattgggaagcttgaagaggcttatgcgctatctcaagggcactatacatcacggtctacatattacacctgccacttctttgactttagaaggctactctgatgcagattgggcatcgtgtgttgatgatagacgaagtacggggggctatgtgatgttctttgggggaaaccttgtatcctggtctgctaagaaacagcaggtagtggctcggtctagtagtgagagtgaattccgagccttagcaaatgctgcagctgagataaaatggttagtctcacttctctccgaactacatgtctctacaccacattatccaatactatgggttgacaatcaaagtgcagctgccattgctgctaatcctgtgttccatgcgcgctccaaacatattgaaatcgatttacattttgttcgggatcttatactctctaaacagctatcggttcgatatgtgcccgctctagaccaagtcgctgatgcgttaacaaagccgctgtccacggatcgctatctttatcttcggtccaaactcaagatgtccgacactcattttcgtttgaggggggatgttaaccaacctttattagcctaacagttctttattagttagttaataggttgttatcttttgtatagtcagcattaccttttatttctcacgtgctatagacttggtctatatatagtctacttatttccttgtttttatatagcttttagcaccattttcggttatgtatttctctggttctgtaaaaggcttttagccattttttctctgttttaatacaaggcttctagccatttttctcttcatcagaatttttacattcttcaatatgtttagtgtaactaaatttttttatatgtaaaaaaaacatgaatctcgactatggaaaataaaatgtagtataattaagtaagtacaatgtacttatattttgtcagtcaattgttaaaatttaaagggtaaataccattttagaccctgtgttttgcaaaagttacagattggaccctgtgttttgttaaatgacaaaatggaccctgtattttctaaaatagtaaaaataagatcctgagcttaatttttgacaactttttttttaatacaaccaa

SEQ ID NO: 314750 - DNA, 847 bp, Cannabis indica
ctcctctgaaagggcttcttctgactcttcatcctctgcttcttctgactcttcatcctcaacttctccttttcttgccaactcacttgggtcactttgcaaggcttgcaaacctgaggtgcaatttccccccctctctctctctcaccatatttgctgctcaagatgagagttttaccaaatgggtgctcattgttttctgcattaagtcatattgtcttcactttgcttaaataaagctttaggtatgtttcgtggatatggtaagaacaagatatagcaagaagaaatttttgttacatacatttggtagatccctcttgaacttgaatctttagtttcttgctttgtgtttttttggttagttcttttagcatttgtttttccctgtcgttttctcttctttagaggtagaagggcaatcattttttttttgtcagcctctcttttccttttccttttccttttcctttttcagtcggtccatataacttttcagtgcacaccatttttgttattttcagataaaagtaaaagaaaaatggtaatgggggaacaggaatagaagatgctgtgtgttgtcccttgaattgagttgagttagtctagtctaatcaattactagtcctgattaggctagaaagtgctacgtttaactggctacttcattcaggttgaagtggaagctttggtgattcaaggaccaaagctggctacagtaatgaaccaggtgaagaagctagaggtttctgtgctagttttgggtcagaagaaaacctctccatttttcagctggtgggtcctattactccccaagttccaataaacaaaaaacaataaaaaataa

SEQ ID NO: 314751 - DNA, 725 bp, Cannabis indica
aaaaaaatatgcacacatacaaaaacaaccatgatttcaagtttaagcaaaccctagaagtaaaaacattatacataagatgataaaatactataacccatgtttagatacctaggtgtaaaaatttttatatctcatatataatatatccatgtaaaatttacaaaaaaacttgtaaatctcttgtcttacagggagaaagaagatcttctacgggtgatgaatgaagctttgtacttattcttcacatcacaaattaaaattgatcgttacatccaactcttcaccctctgaaataaataactttgggaataataaaaattacagaaaggaatatacttaacctctacataaatataaaaagttcttgatgaagctatgatcttcgagtaataatgattatcgaaaggaaccgacaacaagcacctggagatgatatagagtgggagaatgcaaattataaatattttcaaggaatgggtgctttaaatatatagctaatattagtgtgagagtcggaaacaatgcaaatctcaattttcacgaaacaaacttatagtagcatacaccttacaaggaaactgaaacaaattaaatccaaattatttcaatcatcaaactcaaggaaacaagtgttagacggttgaaattctataaccactttacagagcgtggtccaccaaaccagagaatgaagagagagagagagagaggagagagagaga

SEQ ID NO: 314752 - DNA, 2928 bp, Cannabis indica
cctgagaggttttgaatactctcttgcaataattgcaagggaaaatcgtcttcccaattggtagtttttcatcatcggaggtttctttctcttcttggttgggaagaaaagaattcaagagattaagttctctactacttgacctagcattactatcaccaccatgggaacctgcgaaaaaccatttttcgatcgaaagctttagatctagagaacaaggagattgttcttcagaattgtctagcactgaaggcatgatggccttcatcttgtcctcagaagaaagatcaaatctctccatgaactatgaatataatagaagaaaagaagattttttgttgataattagtatgagtgttctttgtgtgtgtgaatattaataggacattggttttctttttgtgtagggtttgaagttaatgcattgctttttaagtatggaaagataatcccattttacagttttcatttcaattgatatatatttggtaataataattttaagattatctactatgtatcttatttcttgaaataaccaaaatatttttgataaacatgtattttttttatctatataataattctgtgaatagaataaggagttactatattgtaatatgccacaataaaaaaaaaatcaattctgcaaaatattattgtgaaacttagtttatggtatgtacatatggataatataagagggtgtgtcatatggtatatatattgtataagtatatataatgaaagatagaatttgtttgaactattgagttaaatgatattgtgaacatggtgcgtatgataaccatttcattgtgtatttatttataaggaaatatatggttgtcaatgagtaattcatataataattccattttgagtaattatatatccttttaatctaatatcttatctctttctcactttcttttttaacaattgtggaccttcccctctttcacacacacattcaataacgtacctcaattaaataaataaataatacattgcaagaataaagatgatcacataatataaaatcaagtataaaaaaaaaataattaatcaagtacataaattaaaatttatatttttgtatacttgaccatcaagcttgtaaaatttattagaaaaatttatatttcttgctcttgtaaatatgcatggttgcataatgaaaaatttgaaaagaagatattagctaagagaataagagtgggagagtggtttgctgaaattctgattttttttttttttgaaagaacctcagttcgaattagattgaaagagaaaatgagctgggattcacagggagaaatccctcccctttaaaaaactggcaaccagcattacaaattcttgccgacttggctaagccatcaacaaaagtaaaatgttctcttttagcaaaaacaaaatgacaggcagaaaatatagaaagtttcagtaaaattagagaaaaaaggccagagcatttccaagccggaggttttttggctcgaacagcctccaccagcaccttagaatcagagataacagtaaaattatcccattgttgcagaaaagcccactgcaggcacaacaggacagcttgcatctcagcttccattgcagattctccaacaccagaggaggtgccttgccaccattccatagaatttttgtccagggccaccatagcacacccataggtaccttccttgaacgagccgtccaccatgatagaagtgttagtggatatcctcggcaagagttccccttcgtgattgcttgactgactcgtgttctcctcaacaacctggtgtaattcagcaactctgctgcagatttctcctctgatcaaatgcacattaggcacataatcccctgtatggtacactttattccttgtgttccaaatgcaatccaaaatcacaccaatgcagttgataaacttgggccgaagagaggaatcaaccgaactgcaaagattgtgaataacctcctgcatattggcacccgacaccctctcgatccttatgggccaaggactagagaaccataaagccatagcaagactgcaattagtaaagagatttatagccgactcaggggctgtatggcacatggggcaggtgtttgcttccatagaaagaaatttgtcccccgtagcactactacaaattacactattcacgtcggtcaacgctactattcactgcgttgaccgacgtgaatagtacctaaattatttgatccgtctttttaaaaacgacactaaaaatatataattagcgtcatttagtaaaatgacgaaaaaagaaaaaccgacgaaaaaagccaaaattattttgaaaacatgttttttttttttgcgtctgttattaattgtggattattctgtttgcgaaggttgaaaacagacgcaaaatgaaactataagaaatataaacagacgcaaatttaataaataccctaaccatcaccacactgttcacatataaccccaaattgttcgagtacacacagcgaaaccactaccccttgaacccttttgaatctggccactcaatcgtcctctctaaaatcagcctctctacccttccgatcgtcctcttcaaaactggccactcgaacccctttccctttcgatcgtcctctttctcacggtggtggtttgaagctctctgctccgacataacggtggtggtttgaatgtctcttctccgacatagctctcaacggaagcttctctccatctccatctcatattgctcaagtatcgccccatgctgaaggaccttgatgatactggtcctggtcaagtaatataattcaaattaaaaactccattgatgatttttttttttcatttccatacattttttggttatttttatgaagttcttttagccactaaatttatagtatgctcaaattcattta

SEQ ID NO: 314753 - DNA, 1837 bp, Cannabis indica
atccatccatatgagctattttgtttcaatgtctccaacaataatcatcaccaaagatttcaagattagagtcaagccttagagccacaatctggagctatccttcttttcttattaccatacaccttaaaaatactcaatcaccaataacacatatatatacatctcatacccttataaccctaaggggttattcactaatagggcttaagtggtcttttttatggtatactataattttatgagctaattataatattaaaggtgctctcatgtgcctctaatacataattaatttatcaaccatcccattatggttattagtaaaatattaagcacataattaatgattgagtattatggtattaaacctataattgtattagtccattataataattctaacactaacatcatacaagaatatatacactgacaaattaatggctcaaaaacttattgtaagaacttcataaatttattcatcaatgaaaattgttgaatccttattctgacatgttctcaaaggctaacattagcaattctagttgatattttgtatccaagggtgttcttcagaaataatacttactatattgagaaagcttagataatattattattatgtatgaaatttaactaaacaaataaagtatattcacaaataatatagaagaaaataaaattttattccaaacaaaaaaatattgcacttaatccagtttcaatttatcaattatataccatactttatcattcaaccctcaatatataactacttgatagtaaatctaatgagcgaataaattcaagcaaatgtggctgataattgaaaagttaataaattttccataactataaatattaatttactttgttaactaattcttttttctattttcagccacaacattcataaggccattcagaataaaacgatatgacccattaaatttcagtatcttgagagttgctgcgaaaaactaatctcatatggtctctctagaaaacatctaacatggttgtgaatatagaattatgtttgtgattatattagtccatacaagattctaatatctctccgaggacaaatataatcaataaataccatattaatctccatcatgcaataggcaatcaaataaattatgtatgatatcatattgataggatatgtatactatacatacaatttggcctgggaaacactcaaatgtaataacaaccattaaaccaagatgcatgcagtacaacataaagaccatataccagtcttattgtgtacttgtcactttgaaaaacaatacacataaaaagtgactgcatattactatacatgcatgtattaatctttttaggtatttttcactttaaagctttataaaacatataaaagctttcaaactttgatgagtcaaaattttgagagactatgtttaagacattcctataagagagatcttaacaaaagagtaacgagtattcgatatctcttaaaattttatgcatggtattgtagatcatgaaaaccttgtggacaaatagattaacatgatcaacatgtgtgctatccttagataagacaaggctttaattcctctattctttccatttgttatccaaagttgatactaagccatcaattttactacatgaaaatttttatttagacttcagtcaattaaaaaacattgtctaattatacattggtcatcttcaaatttggtagcaacaatgatatgatagagagtacacacacatcaatccactatcttgattacattgtgtttacgagcattcacaattaacataattatcacaatagaatagacagatg

SEQ ID NO: 314754 - DNA, 2148 bp, Cannabis indica
tgaaactactaaaaacacttttttctctctctttcttttctcaccgcgacaacacctccttccactttccccctcactctcaaaaaatcacaaaatcctcatgtgaatttggacgagaatatgaaattaaggaggagaaaatgacagtgatgatggatgaagatgatggtcgagctatacaatttgattactcttcagaaagtctcaaccatagtcataatgatcatgaaaatgatgacttcttggagatttactgaatttagtttatgtttctaagacttataactagtaattttatgactctatgttgtttatgattttttactattattattgttgagccataagccttggtgagcctttcaaaacattgagattgtttaaacatgaattcatctacatgcttaacgaaaaccaagaaacagaatgtatgaaaattgtcctccaaaactaataaaatcaaaatataaacgtaaaactgatttctcttaattcaatcaagatatttcaaattcatcaaaacagctaaaagttcaacatcatttaaaaaaaaagaaaaaaatgtataccaacagagaagagctacaattcaagctatcaacacacataagaaagaagacaacaccatgttcattgactcttcttccctcgtaaagttgaccctattaaagtcaagattcataaacagtacagattttactaacccttgttataaatttgtggatccacccacccccattaaactcagtaacatacaaaataataacacaaaaatcatagattgaataacaaagacaaacaaatactgatcacaatacacgaacagaaaacacaaagcatcaaaaacccagttctgtaaaccactaaacaagtccgacccatctaaataaatacaaatataaacgcataaacaatgttcagagatttcatggaatgaaaataaaggaaacccaggtgagaaatacctggcatgtcgttgaaaggttgtagagatgtggaagtgaaggaagaagaaggtaggttttgggggttgaatggtggagaatgattgggaaggaagagagggtttaagagaggattcgattcacttaacgaacaagcgatttcttgggtctttgattttttttctttgtttgctaaagttggctcttttgaattggattctgtattatacattgtttctcgtgagagagtttggtgtttcaaaggccagactgacactgttgggttttcctcccttcttaaattgacatgtgtattttgtactacaaatttattattattattattatatttttattacctctcgtaattagatgaccccactttaaaaataataataaataaaaaaatagtactattgtaaatctcctataagaaccttttagttaatctctatgtctagaaaatataggatagaaatttttttcaaatttttgttatggtgtattcgttacccttacaacatcatatttgtacattttttactagtttatagtgtcaaaaatacgttccaaggtttttgaatacgtgtggtaaattggaatatcaagaactctatttttcagtattgtaaactattcaaaaaattttaaaaatttacagagataatactgtaattataacgaagactactatgaaaaaaaaaaattaagaaaaaatattctggcatatgatttcaggcatggaggttgctaagaggttgtaataggaaattgtaattagtactccccaataaaaaatggtggtgactaatttttcttttcaatcattgttgtatatatttatgaataattagtatttttgctctctaaattttcgacactatttgattttgtattttaaaatatacggtttattaaaaattctcttaaaatacaataattacataattatgtcatttctattaggttttgtttcttttattgttaaaaattagtatttttacccattgaacttttacaaatataacaattttgtcccctaatattaaaagaaaaaaaatacttattttaaaaattataatattcttttaattttgaagaaaaaaataataattattattaaaaaactaataagaatattaaattaattaaaaaatattaagtttacttaaaaattttaaattattcttaaaaaaatattttt

SEQ ID NO: 314755 - DNA, 823 bp, Cannabis indica
gtaaaaatgaaaaaattccaaaaacagattgagctattgatagaaatagatggagatttttcacaccgaacacttccaaaaacttactcctctctaagaacataataccgccatatctttctctctctctctaagattagggtttgttccattttcttcttctttcacactttagggtttgggttgggcaccgccggctggttctagctggtggcgcctagcgacttggctcttgctgcagcaggtagaaggcggaggttcctccgttgggtagctggtgtgagtggaggtgataagtgtttgccatctttctcttccttaagactcgtgctacgatgcccaagctttcaggcaagtgaccgctgaatatggtggatggacgtctcttttgaggtgtctcaagtcggaggttggtggtcctgggtagctccggtctcatagattggtggaaggcgatgaaggtggacttctctgcactatcttcctttcgatttttggggatggcgagagcgagttgcggtggtccttctcaggcaagagcttaggccttggcgcgttcactacaagaaatatctcttttagcaaaagtttggtattgcgctactaaaatggaatttacttctaatgcgttggtaaaagaagttggcaaatcaacgttggtgttagaaattttgccagcacaaaatgaaaaagtgttagcaaaaaataactttttcctagcgtgtactgcaaatgtgcgctggtaaaactttgacctgccaacgcagtttgcgaaatgcgctagaaaaagttacttttaccggcacaatagcgaactgtgatg

SEQ ID NO: 314756 - DNA, 1733 bp, Cannabis indica
aaattactaatttaagttggtcgaaaattaattaaataaatatatataaataatcaatttttaattcaaatttaattttatatataatatgtatatatacctaaatttaaaatccataaaacaataatctattgtgcaggaatgcctgaatcagaagtctctagaatccttgaggcatctaatttcacaaggagctcattaccatttagataccttggcatccctgtttgttcaaagaagatctctcggattgaatgccaaagtctcctggaaaaaatgacaagtaggatacgaatgtggagtacaaggaatctatcctatatgggtagggtaaccttgattaattcaactctactagctatccatacatattgggcatagatcattgttctaccaaagaagctcttgaaagacatagaagcaacttgtcgatcctttcttttgaaaggtattcaagaaggagctggccctggtttagtggtctgggattcaatatgcagacttaaagcagcaggaggcttaggctttcaaatgtgcatcattggaatatagtagccttggggagatatgtgtgggacatagctagtaaaaaagattgtctctttgtcaaatgggtacacaatgtgtacctgaaggagcaagattggtggagctatgtagctccattggactgcatctgggcatggaaaaagatagttgctgttaaaaacaggattcagcaaaaggtagatatgagtgactttgtgttgcagaagtataaaattcaacaggggtaccacttgttgtttgctgaacatgagaaactgccttggagtaaccttgtttgggatagacttattattcttaagcataggttcatgctttggctggtgctttgggaaagattgaatacaaaagagagaataagtaaattcattcacaacatagatgcaaagtgtctactgtccagcaaagaagatgagtccatagtccacttgttttttgagtgtgactacagcaagagataaaacagttcctgcaatggaacactccagcaactaacatcaaacagctactccaagcttgtcgaaatacgaagagattctcagcagcaaggaagagtatggtgaagactattcttgcaagtcttgtgtattatatatggaaagctaggaatgaggttctttggaatcaacaaatgtggctcatcaacactacggtgacgaagtctcagcaaatgaggaagctaagtattaaggggttattacccacgaaggctaaggaagaagataaagcatggatcctaatgacttgatttgtaaaatacgaaattgtaattgtaaatttgttagcaaaatgtaaagattagtgatgtaaaggttggtttggagtaataaaattttttattcatcaaaaaaaaaaaaaaaactaaattcgaaatccaatgtatttaactaatacattttcgatattcttaaaataaaataaaataaaacttgaaaaattagtctaatttacgttgttctaaaatcaataaataaattaattttcaatataaatataattttcttatttaattaaatctcttaagaaaatatcaaatattgaagtgtcttgaataaaatcaagttaaggtcacccatgcatcctaaaattactccaagttaagcaagtttaactgtggagtttctttcgtgatgggctaccgaaaaataagatgcaacttgttgatataggtagtatcaatcaatcca

SEQ ID NO: 314757 - DNA, 852 bp, Cannabis indica
cttgaatcaactaatttagagttagtatgcaaaagttatacgagttttattgagagagagagattggagcaaaagaatacctggacaacaagcaatttgcgagcgcgagtcttttacacgtaaatgcgggtctgtgtgggctagaccttttacttatgaatttaggagtaaataggtcaaatttgagaggatttttcaagcaattaacgatagaggacattagagaacaaaaagaaaagaagaaggagaggattggagatgaagattgaagtaagacaactctatctactttattttctttcactcatattttaatttctagttttaatatgctttctaaaaatattatcatagatgtttttattatgattataaattaaattctatttagagtttttaattgaatttcttgaaactttattatgaattaatgcaagatttttatttcttattttttgttttttgacatactatttcttcttcatataagatatattcaatttgtgattattgtgtatatgactgactacgcagcttttacatgctatttatgaattcaaataagatatgagatttgaatatgttaaaattgaataaacatagatttcaatttagaatgagagtatcaaattgatatatgtaatttaagactgagtttattaaattaaattgtatacgactcgaaattaaaatgccttaataaaactttaaggtgacattagcatttttcatgctgaaattgtttttctttaagatacaacatcataaataagcaatcttcattatgttttgatggttgttgctccagaattcgccaaaaatacgtggaccagtcgagaggggacacgtgga

SEQ ID NO: 314758 - DNA, 899 bp, Cannabis indica
aaagcagcacttatttattcgtcacggatgaagcactatttggcaagcaagagacaaaaatttccttccacggacgcctatggaaaagcttacacgccgagtaaagtaaaggtagcttgtaataataataataataatagtttaatttcaaataataataataataataataataataataatgataatgattagtaatattattgagatgtgatttaatgatcatgtgtatgagataagtacaatgtttgatatttatcctctattcttgtttataacaaaaatatataacacactattcactcattttatttcccctctaactgaaattgttattatgataatagagaaagtcttaaccatttttctgaaggtgaagcttaatgttgtagtggtagatagacaatacctataagtaaacataaacactaatctacagctcaattagtacacatgaaaaaggtacttatgaaagtgatatcaccttcaagtaagtaagacaccatttctgataacaacgttgatgtgaaatgtgtgaataaatttaaaggaaaacaataaagtgtctttaattcttaacatgaaataggtaccttatctctcaattaagtatataataaagtaccttataagtgatgtaacagtcaaataaaacatttgtgaatatattttcaaaaaaaaaaaaaacatttgtgaatatgaaatatttaagagttttttacagcaaaacttttttaactgtcgtttcatttaatttaactctctaagcttaaattttgacggtaaaactcttcaaattactgaactagtagcaaatttaaagtatcattcggttaattgtcactataagctgtttatgtgtacactcttgtacatatgatatatttatattagtacac

SEQ ID NO: 314759 - DNA, 1390 bp, Cannabis indica
tattaatttcaatttaatataattcatcatcatcaaatctggtaattaaattgggattccacccacttgagttgttcatcatctttttattaagtactgataattttattgatgataaattcatcatcaaatttgctaaatacatttttgagttatacacaaactgggattcgatccactcaagtagttaatcttggaattttgatgcatagtttagtatttgattaggccattatatatatataaacaccaactaactacatggcacatgtatatgtatgattaaatatacatactttttaattagatgggaaatttaagtgtaattaaacatacctaattctagaaaatatggctgcaccatatggagtccgtgaatctattgtatgtattttttttaccctaattttaatttctcttatttatatatttagaattatatagtgtcagtagtttgatgtgcatctgatcagaggaatacaaatatgttattatttaattaatctagtggctttctcaactagatagtttcttaataattaataatattaattggattgaaatatatatatatcacagttatcatcattgaaaggtagcaatgatcatcatcatcaacatcatcaacaacaacaacaccatgatcaatatgaaaactttaagaaggaagcagctgatcaagggtcatggagtaatggaagtagtgaccaaaacagttcagatgtcaacttagatatttcaaggccaccattaataaacactactactaatacagctactacaactactacttcatcagctaattcttctcaactagtacaaaaccttttcccttcaactcttagaccatcttccataactcaacttctccaaggctcatcatcaaggtcagatttcctcaataataagcaccactctgctgctcctcctcctcctcatcatcatcaacatcatcaccatcaaatggtgcaatccgaagaaagcttttgcaacttgtttgtcaataacaacaattctgctgctgttgctgcagccgcgactgcagcagattctgccacggccgcagctggggttgatgatcaacaacctagcttctggccgtggccagaacagcataattattttcagtgaagaattgaaaatgaaacaaaaaaaaaaataatattccacaatatatattttgatgatgaattattttcttttgtagcaaatcatgaagacacactactgatcatcatcatcatcatattttctttctttctttctttctttctttcttttgggtataatgcatgatgaatttgaattaatttttcatgttttttggtgctgtagagatatttgatgtatagagctttcatcaagtcatgatcatattttgttatttcct

SEQ ID NO: 314760 - DNA, 1176 bp, Cannabis indica
gataactaatcagattgtaaagagttttatttagggcataaaacccaacacatggttgggtgtgaaactactgcacaaatttgggagaccctttgcacctactacacggccctaaacagagcaaatgttggaaaatacaagactcaactcagaaattctaagatgaagggttctctcaatgatttcctgctgaaaatcaagaatcttgttgatcttcttgcctccattggacatcccatgtcttctcaagaccacatagaagctatcttcaatggactatttagtgaatacaatgtctttgtcacttctgtcaacacacggctggacacttacatagttgctgaaattgaggcattacttatggctcaagaagtcagattggacaaagattcagaggaacttgacatgttcaaactagaagctaatctggcccttaccaaaccctttacaggcggtagaggtacattctcttccccttactatccttcctctaactctcaatctcactctgctatgttcaggagtgctcctgacacttattctacaaatcatccacctcctggctttagttcttctctgcatcacgctcagtctcgaggaaccactccaggccgtggacaaatgcaacccaatagaggaggaaatatgcaaggtcgtggtcagtattctgcttggggacaaagacttaatgtcggcgatgtcacaagttgggtcatacagttcataagtgtttatacagatttgataagtccttcacaggtcttgaaacttttcaaggctttaatgacaatgccaatcttgctgaatgctcccatttatatgcctctcctgaggtggttcaagacaacagttggtatcttgattctggagctactcatctcctcactcccaatgcccaaaatctgatgtattccactgagtatggaggagatcagcagattcacatctgtgatggctctggtatcaacatacaaaatattggtaaaacctttcatcttatctcctttccattctcaacaacttgtattaaataatcttttacatgtcctcacataaccaagaatctccttagtagagtctcagtttgccaaaagataactgtgttatttttaatttcatccttctcactgttgtgtcaaagatcaggtcactctgaagaccttgttggttgggaag

SEQ ID NO: 314761 - DNA, 746 bp, Cannabis indica
aaaattcatgataaatccataaaattcatattatttaacatattttctctcattttaacccacatgatatatgtgaccattaaaacctaaaataaaaagaattcaagcgtaaacctgaataaaaacaaataaaaactactaatataaatactaaaatggactttaaaaattcataaaaataaacttaacaataacactgctttgtctttgtagccattagatttcttgcttcctttgtattatttcttgagtgttcttcctttagcagcaagaagtccttctccagtgttatcaaatctgtcatctccacctttcttctaaatttcctttgagcttagagctactttaacttctgtcatggtaagaggatatttaccatacagaattgtatccacgaaatgctcataggttcttggcagagaacttaatagaataattggttgatcttcatcatcaattttaactccaatattgttcaggtctagaatgatcttgttgtagtaatctagatgcttctcaattcttttgactcatccattctaagtgtgtaaagtttatttctcaaatacaacttattggctaaggatttaatcatgtaaatggaggaaaacttaccccataaacctaaggcttttccttcatcaaaaacctctctcagtacttcatctcctagactcaacaatatggttgttgggttttatgccctaaataaaactccctttcaatgtaatccattttattcaaca

SEQ ID NO: 314762 - DNA, 596 bp, Cannabis indica
aaaagggccaaaaagaacttacatatacactaacactagtatattaatttatagaaattgaaaagaagcagtcaaagatgaatgacagtatggagctaccgtattatattccatttgtctctttagattaagttaaccattcttagtttgtttctttctttttaaattacatatgaattatttatctaataagtaactggttatagtaaaggcaagcagggtttttgacagggttctctattgtttatatattgtcttatttaaactcaaagattctctaatttaaatagggatgtaaacgggacggggcggggcggagcggggcgggtgcggggatcgctcccccacctccatatccgcttcttaaatttacctacatacccgtctcaatacccatttaaattaaagtggggacggggcgggtattacccgacgggggaaggatccccattaggtacccattacatatatatttttgaaaaaaaaaatgatgtcttaaagagaattaaaaaaataatcaaaaaaacttagtaaaacaataaacttaagtgaaataatgtgtatagtaaaaaaaatgtataatcaataaaaagcct

SEQ ID NO: 314763 - DNA, 970 bp, Cannabis indica
aaaacaaaagtgttactaaacgccaccataataaatgaaaactgaatcataaaatgaagcttaagtaaataatattaggacatttttttattttatttaaggaggacattttttttattaatacacagcaaatttaaaagaaatacacaacctaatattctattaataatagcatcaaaaatataataattcaaaaattaaaatatcaaaacataataatagctaaaatcagtgaacttacttattaaataataaaattcattttatttaaattcaaaaaatatagatttacttaataaaatatgtatatataatatattttatttttttgtgagagtatatataatatattaaatgttattatgaacttacaataatataatgaattatatgtaattaaacataacaactatcattgtataataagatcacaattgtcaagattcatcacaataaaaatacaaacccaataaatatatttaagatttttaattagaacattagcaatttcgctccttgaatttaattttgataatattgaatttgtctcctaaaatatacaatttgttaaaaattctcctaaacttttatgtttacgaaaatacaatccttctgttagattatgtgatattatttcgtttaaatactgacgtgcctttgtaaattagtaacattgtcccctaaactttaataactatcaaatcacactccctcaaaataaaaaaaaaaaaataatatcaatattttttttctagtaaatcttaacgaattaatttagatcttaagaaaatattttaaataattaagaaaattaaaaaataaattaaaattttaaaattcacttttgctacgattttggtggtccttactgtttcatgttctattttactccccaatgggagttcttttcatccttcccttacagtactacttcactatcggtcacccaggagtatttagccttgcaagg

SEQ ID NO: 314764 - DNA, 894 bp, Cannabis indica
tcttcaagaagctggcatagattacgacgaaactttagtccagttgttaaaccaacaacggttcggactgttctatctctagctgtctcaaacaattggaatgtctcccaacttgatgttactaatgcgtttctaaatggtcctctgaccgagacagtctacatgagccagcctcctgggtttgaagataacgatcatcccacttatgtctgccaattgaaaaaggcactttacggcctcaaacaggcccctcgtgcctggaacgacaaattgagacaaacacttgtatcatggggatttcagggatcaagagctgatagctctctgtttacatatggatctggagacaatatagtgatctttctggtatacgttgatgacattcttgtcacagggcctaactccttgcttattcaaaagctaattgctgacttaaacaagagttttgccttaaaagatcttgggcaggttcactatttcttaggggtggagatttaccgtgacaatacaggtatgtacttgtctcaaactaagtatattactgatcttttagtgaagttaaacatggaaggagcaaaagcttgtcctaatccagctagtgctaccatcaaactgtcactacatgagggagaacctttttctgatattaccttgtatcgaagcacaatcggtgccttacagtatttgtccttaactcgtcctgatgttgcatttattgtgaacaagttgtctcaatttttacaagccccaacttcggttcactgggatgcatgcaaaaggctcctaagatatctcaaaggcaccatcaaagaagggattcatcttcggcctgcttctagcttacaactctgtgcttactctgatgctgactgggcatcctctattgatgatcgt

SEQ ID NO: 314765 - DNA, 934 bp, Cannabis indica
tggtaaaataatttccaataaaaactccatgggcttcgaacacgtcctcaccccagtcggggtcgcttcttgtttggatcagccaccaccgaaattaccgaaaaagaactaacaaaggaagtgaagaaggggatagtctaatttacgtaaaaagaactttaatatttataaaaatgataaaattttattgtaaataatataattaactgttaaataattatagtaggaatttatacattaaaatagtattattatttataaatattaattgttaaaaagagttttattaaatatttatattaaaaaataatcaattataattaataaattttaaaaaataaaattttatttattaataataatctactattacagattaaaaaaatataactatcagtatcatagttataattaatataaaaatataactattgaaataacattatgatataaccattattcattataatcattttcaaacattgaatttgaataagatatattatatatatagagggagtgagtatataaatctttgtcaagagcatatatatatatactagaaaaaagttacgtgcaaggcacgtatatatagttttatgttaagtctttttactttatttaaaataatacaatagataattgaaaaaaatatttttggttattgtttgaaattatttttacatagattccattaattaatgaaaataacgatatgttgcaaattaaaagttaatactcttagtggtcaagttttaatcttcttttgattcgacaaagaagacagtgtaatgttgatttaatatcaccatatatttggggaatagaatgattctctaaaggttcacccccaaagagtagctttgaacttggtatctgaagcaattgattaacgtgttccaaaattgctccaattgtaattaacatcatgatc

SEQ ID NO: 314766 - DNA, 721 bp, Cannabis indica
ttcacacgagattccacgtgtcctatgctactcgagttagagcataagctagtgatactttctctcgctatctagggtgtagcactccactgcttcgcctagtagcgcgacacttgtattgctctcccacaccctatttttgtgatttaggttgcttccattttgatcactgctactgtaggaatcgattttgctttcttttcctctgagtactaagatgtttcagttcgctggttgtctcttgcttgcccatgaattcagcagcagtttgaaaggttaacttattcagaaatctctggatctccgcttattttcatctccgtgaagcatttcgttgcttattatgccattcctcgtctttgggtgcctaggtatccaccataggcctttctagaatcgcttttgctttcttttcctttggctactaagatgtttcagtttgacagattgtctcttgcctgcccatgaattcagcaacagttcaaaatgttaacctaattcaggaatcttcggatctccgcttatttttaactccctaaagtattttgttgcttattacgcgcttccccgtctctagtttcctaggtatccaccataagcctttcctcgtttgaacctcacctttaactttaaggctatgccatcccctaaggtgctactaaatagaaggatcttatcttattaacgtccatgaatgataaatctagcatagatcaaactg

SEQ ID NO: 314767 - DNA, 1354 bp, Cannabis indica
aaagagttttatttagggcataaaatccaacaaatatgtagttgcaatcgattccaaattgatgaactaccgtgtgctcatgcgcttgttgtgataaaagagatgaacttaaatgtttacaactagtgttcacattattacacgacaagaacatggcttgaaacatacagtgggtcaacatatttggtacacaatcacacaacatgggatgtaccatcaaacaaaaaagatattcttgttctgccaccaaatcagaaaataagatctggaagaccaagaaaaagaagatttatagctgattgggatacaaaaaaatagaataggtgcaacaaatgcggtcaacatggtcacaaccgaaagacatgcaacaatcaagtaataaaatagatataacagaattatttgaattgtttaagtctctatgagaattttgataggatgaaatgttatatttgatagattgctattaactggcaaagtttaaatagtttactagtagttgcaaaatagtttctgaacaattttgacacttataaagaacttattacataaagaatttccaaagaaatagtttgtaaaagtcagatatgaatttttataagttgtataataaggagaatgaaaaagttgcataacagtaggaaatatactgagataagatgtcagaaaactaattgacaagtattttgactaaaatagtctgtacacagttgcataataattttttttatagttgtacgcctaaaaataaaccaacaacattaaatgtaaaatcataacactgttgctgttaaaacataaaaaaatgaacatattataatggttaatttcaaatatcctataagttaataatcagttccataatataaaacgtaataaaaaaaaaactaaaaaatttctgaaatgaaaagcaaccaagaacaataaagttttccttaaaatgaccctactttttcaatttagaagccttggaagacttgcttgcttctcatcctcgctatcaatactttcatcatttttcctttgaccgtacgagaacaagagggcagcaagtcaagtgcgataaattcaatatcaaagtcaccaggagcatctttcccatggatgaagaactccgaaaatgcagccacaaatgctccgcaattactatttccaaaaaaggaaaagaaaaaaaattaaacaactattatacagcataaagtaaacttaaaaacaacaactcactatttttgctgagatggaagatagcaatctccacaactcttaaaggagctttagggtcaaaaccttaatcaggaacatgggacctattcttccaaaatccaaggagataaaaaaaagggagtaaaacaga

SEQ ID NO: 314768 - DNA, 1271 bp, Cannabis indica
ggcataccaaacgagcccttaaaattatatatacctcaatccaagctcaaagacccaaaaaaaaaagctccaaaagccacagtttaatatcgttgccgctaagttcccaaacccacgaaaccctaaaatagaaatagtttatttatccttaaaacctaaaataaattaatttctatagcgtatatctttggtcatgtgtgtttgataaatggttaagttagtggagattaatttatatctccggttattttgaaataatctaagacataggtctacaatttttgatatagaaagaggaataaaaataatgttagataggaaagcaacaactttagattggtttcttgttttaaccgatagtgatttcgacatcgaatgaatttattcaaagtgtttatttgtcaaatattaggaaaatagactaaagacttgatcacaattctaattttcgggttattgatgcttttactatgattttagacttatgagtaattaagtagaaataattctacatgttctggaataaaccttgatttattattataaaagttgtcttgtcgttttgacatgtttggtatgtgatttttgttgttgagttatgagtttgttgagttggaattgttgtggacttgggaacccccgggttgttcaattccttaaagaaatagtttttcaaaagagacccaatttaatttttttgtgtgagacaatttgcaagaaagaaaaagttgattgtgttagagctttattgggctatgatagaagttttgttgttgaggctcgtggacatagtgggggtcttgcaatgttgtggaaaaattaagatgatggcaaacttcttagctttagtaataatcacattgatttggagttgaagcttgacggatactctttgtttcgtgcgactggcttctatggtgaacctcagaggagtttgtgtgtgaattcttgggacgtattcggcagcttgctggggaatcgactcttccttggtgtttaatgggagatttgaataatgtccttcatcatagtgacaagagaggcggtcgaccttatccaaactctttaattcagggatttcaagatgtggttttagattgcagtcttgttaatatggagttggtgggctatcctttcacttgggagaaagggaggggtacaggggcacggattgaagtccgtttggatagagctctcatcacgcatggttggaatgatctttttcgcatgcaaggttgaaaatttgaaatttttgcttctgatcattgtcc

SEQ ID NO: 314769 - DNA, 553 bp, Cannabis indica
ctcacctaactcatctcagtgagtatgtgatctacactttctgtcatagagcagttcataaggggccatcccgatagttgactgatagctgaaagatactttacccaagatacttcaaaatccaatacacatgcccgtagcatgtcttctaatatcttgattgttcttttatattgtccataagttcgaggatggaaagatgtgctgaatttcaactgtttgcccatagctcgttgcagactctcccaaaatctctatgtgaactttaaatttccatcattcactatagactttggagaaacgtgaagatgaacaatttctttgacatataactcaacatactgttcaatagagaaatttgtttgtacaggaaaaaagtgagctgattacccacacacaattgtactgccccgtagtcttaggtgtaaggactcagtttttaccgagtcaaaaagtaaaataaataaataaataaatatatgtttatatataataaataaataaataaatttatatataataaataaataaatatatgtttatatataataaa

SEQ ID NO: 314770 - DNA, 1315 bp, Cannabis indica
accactagaccactggtgctcttgtgcttagatttcattactatttttacatattataaatgttttaagtatatagtattttaccacatggtaattattaattaaagtaactctaacttcgaaagatctaaaatttgtactaaatttaactcataaaataagtttgtgcaatatttgacccactatttataattgtactctaatgcacaaggtgtaaaataacgaaaaaataattaagtatattgatgaacatttaatattttatattgagaatatataaaaattattcttttattatttaaataatagtaatatggtaaataaagaatgtaaaatttagtaaaagtcaatgaatcataataattagtggtattataataaataaaaaagtaagatttattgtgggctaaatttgacacaatattatatcttgtgttaaatttagcacaatttttaacatgtagtgaatttaacacactttttaaaacatcattaaagtagtaattctttttaagtgtgttaaaaatatagtaatatactacatttttagctctctattaaaagtgatcttagataatattcatatctccttaattaattaattaattaactaactaattataatggtatgatgatgatggtgttcttctttgtttatgccaagtcatagttaaaagtttgatcattttgttcaaaatatgcataataaaatatagtagcacaattatattttaagtatttttcttttgttttgtaatatgatatataatggagaaaaataaggaattaataatagaaaaatattcttctattatagattgcttaacattgaaagctatgtgaaattcaaactacaaaaacatatttacataccaatatgaagttttcaattctaatttgtgttagtgaatattttcttagtttaaattagagcaaaattgcattgaaatgtttaattttcttgaccaagtcaatcaattattcaatactcaagaaataaaatattaagtaaaactacaaacaaaaacttagtacaaaactcatattgcttactcctttatattcaatagttcatcttcctgtcattgaagccatagggattaaaaaaactttcaattgggtaaagactaataattggcaacatgttcaaattgagacgaacagtcttgtttcagtacaagctattcgaagcaaccaagcaatgaggtccactttcgaccttttaattaaagactgccaacttttgttatctaccttcccaaatgttaatttatttttcattagacgatcaacaaaccgagtagcacattatgtt

SEQ ID NO: 314771 - DNA, 1434 bp, Cannabis indica
aggggagccaaggatgatgcagaatactagtagaagagccagtaccgattgttcttttaaccccttggcgaagaagatccatagaactccagatacttcgccaaacaaaactaggatttcgacccaaccccgcagagagatagtcatcatggggaaaataacgagctttatagagcctggatacaagagagtccagatagcacagcaacctccagccttgtttagctagcatagccaagttaaagtcatggagaaggcgaaagcctaagccaccttcatcttttggtcgagaaagatggtcccaattcatccaaataattccattgcccttactgctagttgttttccaccagaaacgagccattagcttctcaatttcgtcgcaagtaccaagtgggatgagaaagacactcatagcataagtagggagagcttgaaccacagtctttaagagaatttccttacccgcacttgacaacaacttcccagtccagctattgattctattcaaaactttgttcttaaggaaaccaagaatagctttcttctttgtatatccattcaagtattaaaataacttaattttaagttttaagtattggattaaattcttaaatgtgggctcatatgtatttatgtttattgttatataaattttgactcaaataaagtgataattttagtaattgtggattattgggtattaaagtgtcatggactaaatatgtagatacattaaaatatatttttaatttattgagaggctaaataagaatactaaaattaataatagtactagtcccaaaaaataaaagcaactcattctcatttctcctgttaagagagaaaattaaagaagtctaagtcttgtattcttggaagatcattactcaaagatctaatctacttatggacatcactaagttaattatctctattaagaaattgaggcacgcttcactattcatttttttttttgaacaagggctttagatctatagttatgcacttctaatagtattttaatagtatgaaatattttgtgtatggaatttaattttaatattacatattttatgtgtgttaaaaaattctaacattaagttctaaaaagcaagtttttccaaattgcagccaagattctttttaaaaataaaaagataatccaaccaagattatatatggaattatttcattaatacaaaaaattaataaaaaaatttataaaaactataattgtacgaaatttttaaatatttttacgattatttattattttgttgtaaatttcttttattatttttatattattttcatatagttttttaattgtttcataaagtaaaatatactattattattaattattattttttaggctaattaggattttgtcctttgaattttgacatgtattaaattatgccacttgaa

SEQ ID NO: 314772 - DNA, 976 bp, Cannabis indica
gtctatatagtgcttaacacccttgtaaggtgtaaatgtaaaattattattagtgtaattaaatattgaatcacatttattttattttaatagtttataaaaaactgctaccaacttaaggcgccaccttacaatggtaataagcaccttagtgcccccacgagagcatctctaatggggttgcccagtgagttttccaaatatataatctagttcaactttcaagataagttttaaaaatatagtgttgagtgttgcctaaaagagacaatggttttcattaatttaacatttaaaatgtgatatgtgagacataataggtaacttttgaaattcgtcaaccattgaagtactttttgtaaaaaaaaatgcatatctttcgtggatgggttcattggtggtgcatatgtaaatatcattgatgaattcaaatcaatattaccatgtgcatcctcatcctccagtgtcatatttttttcactttcatctaacaagcattcttttgttactcactcgtcacttggctatccataatcttgcttgtaatttgatcttcaataattttatcattgaggatggatgttgcttcattcaccaagttgagatcatccgttgttaaacaggcatccaatataccaaaaattttagtcatttcaaaggggtcatgctcttgaattgtatgctcaatctcttctatgtgtttaactgatgacacttctacattattcaaacagatctcataactttcgttatttgagctattgtacttaaaactctatgaattattcaccatataattatcaaataaagatcttttcatgtccgtcaagcgattaacctcttctggaagtgatagtatattctcctctaattggttggggtgagtttggacaataaggagagtactggtggctccaatcctgaaatgatggatccaatgtcagtcgtaattaaaacctgtcatatcattcaacag

SEQ ID NO: 314773 - DNA, 717 bp, Cannabis indica
tctggttctgatagtactgcacatcaggtgggagagtacagggaaggagctgggaatcaagacgagtttctaccatggacacaagatccaccatcagctttttatgtgaggacgacacatacggaaattctataaatttacgtcgtctttcattgttgtcaagctccatgcgaaacggtgtcgtgaaggctgagactgaaactgaatttgatggaggtcttgtgagactcgatgactgtaaagaagcagtaagaaacgaagaagaagagaggggagagctcaaaccatgagagaagacgacagccattcattcctttcttcttttttcgccaacccaaaacttcttaaacgccataaaacgcaccgtttcgtttcgctaagcaagtcgtgactaaaaaaaggcctcaaaagagagattattaattggtactttaagtcttagagcatctctaaggaaatactaaatttggtgttacactattaataaatttggtgtcaaaaagtatttctactccaaccataacaccaaaaattacactaaaaaaaatattccttattattatattaattttttaataaaataaaaaataatatcatattaattaataaaaattatcacaattgttatatcagtgcaccacacttttaaagaagtgcattattttcggcatattaataatttttttaaattttacaggatgtcttaaataattataa

SEQ ID NO: 314774 - DNA, 1396 bp, Cannabis indica
aagttatgccctagatttacaggacttttcgagattctcgagaaggttggacaagtggcatattgttaggtttgcctccagctctttcagcagctgataacgtattccatgtttctatgctaaggaagtacgtttcagaccctactcatgtattaacttaaaaaatcttgagctgcaaccggacttatcatacgaagaacaaccagttcagatcctacacagtaaggataaggtccttcgaaacaagaccatagctttggtcaaagtactctagagaaacagcaaggtggacgaagccacctaggagttagaatccgacatgagagctcaatatccggagttgttcaggttagatttcaatgacgaaatccttttaaggggggataattgtaaagaccgcttagctttaatttagaaattagcagataattagggtttaagtatgaaacttgtttattagctttgaattatttatttacgatgatttatttgaattcaaaatgcattttatatgtcatatacggaatttcataattttacatgttttgtgtccgacaacattggaacgcggtatttggctattagaatgacatcttagtagttttagtatagcgggacaatatagttagacattagaaatatcagaaatagtcgagattttagagttgtcaaaaatacccctaagggaccttttatgacttttagtgttagaaaggcaaaatggtcattttgcctattagagttttgtctttttgtgggtttatgttaaggttataatcagatttttattaatgttaaaagatgttattttattttatttatctaaaaaaaaagttgttattttattaaaaataaaacctttttcattattcatttatacaagaataagaaattagacaaaaattacattttctctcaactctctctccctctctttagaaccctcctcgaaccaactaaggttatgttttcttcatcaaattctagcaatttccaataaaatcatagtgtattcaagccaaggagcttgtaattcgccgcgcagttgttccatcaggttggccggcacacctgaatttcgaatcaaggtaagattagtataatgtcatgcatatgttattacatgtttagcatacatgttgtttatgcctgttagaatacattgatagcgataataatatacttagagttgtactgattactgataaatgtatgttgcctgaaatactgatcgatgttgtcacatcaatatggctagagtatgactggcatattgagtataggctgacattatggtcgataatacgtcgatagtattatcgtatgaacgttctagactcagtaccgtgtgggacacaggaatagggttatagttgggggtatgggcgcctgatta

SEQ ID NO: 314775 - DNA, 3564 bp, Cannabis indica
atatatcataaatatataataaaataatttatcatatttttatttaataaataattaaaatattaaaataaaaatacttgaataatataaacttatttatgacttaaacacttaattttttattacaaaaaaaaaatcactaatttaatacaaattattaattttttaaaatattgatataaaatttataataatttaaaaaatatatataattttattgtcatattatttatcttataatcaatttaatcaagtattatttaaatactgttattttaaattttgatagcttatgtataataattcaaaattatacatttttaataattttaatgaataagtttttaataaaaaaaattatatataaatttgtaataattcttccatttaaattcttattaaatttaaaataaattaataaaatcaagattaaaaaaacgataaaaaaaactcacctgtatgagattatttatcccaccctgctagatggggtaaataatctcaaacatatatgattagctgaattagttatccaaagttcaaacatgtccaaacactgaattggataaattatcttgtgtaatccaatcaaactaggatagctcatcgtctaaccgaaggacatgctttgccaaaccatgagctgcagaaatcttatcgcgagccacatgggtcaaaactacccctaaaaatttagacaataaaactacaacatcctcaaacataccccgagcttactaaaaaacatcattcctttgttgatagcttttgaaatccttgtatcttaacatgattaagtgagtgaaataaaaacacacatatataaaataaatatataaaatttaattaatacacaacttaatattacattaaaatgaagtttttatctgtacgttgaaaaatattctaaaatattattctataaagaaattttttatttttgatatatgtggagcggattgggggtcgtcactactattaaatcatttttaggataaattcaaaacgaaccacaatatatggtaccaaacaagctacattgagcacataaacatactataaaaatggtacaaaataattcaaaacttacacaaaaataaattagtaaaacacgatacaatataatcttcaaaagacatcaaaataaattaaaattaaataatcaataaaacttctttaatacatcaaaaacggttataaattaacctaatcaaataacaaagaaaaaataaattaaagacaagactaattaatcaacttgactttacaaaagctaaaataaaacatactaatgatacaaaaccaaaatgaaccaaaccaacaaataaaataaaatatataatatatacaaatattaattagggtaaatatcattttggaccctgtattttgcataagtcatcaattggactatttattttgtcaaatgacaaaatagaccctaacttttctaaaatggtaaaaataagaccctgagctcaattttaacaattttattttttaatataactaactttaagatataatttttaacacaaacagaaacaaaaaatgtaaccagttttgtcataccgtctttagatcagattattattaagttttattgtaataaaaaatcagttcagggtctcatttatacaattttaaaaaatacaagatccattttatcatttaacaaaacataaaattacttcaagttatataatttgatatttcagtatacatcatcatagttgtagatgtatgaaaaattgaatttatatggatatatttggtgtatattaaatttttgaacacaagcttactaaaattaaaaaaataggccaatttatattcatacccattttacctttctttttgctcttctcttctgactttaccatccatactccttattcccatctatactgatcgtggtttgatgggagtccgatggtgacccgatactatccattttttttctgtgttattgtacataaaaaagtagcatctgaccaccatcagaccatattctacatttatagatgttaagctccatttattatgctcgttaggaaggcatcgggccactatcggaccatatcatcagactaccatcggatctccgtcttcaatctgtacacattttaacaacatgaatgcatcagaccaccatcgggcctgaaaaaaactagttttttatccaaaactcagatctggccctttttgaccttaaatctaatatctattcacagataacaaacattaaacatacaatatattcctttggcaacatgttgatggtgaagccgtggttgatgggtcgttgagttcgtggtggtcattacgtccgtgggtccttgggtctgtggtcgtggattggggagaagtgaccaaggttgagggtggtgggttgttctgagtccttggaaactcagagagcgagagtaataagggaggaagagagaaggttaggtatttgaaatggaaggagtagaattagattttataaaatgttaacctattttacttatatgacttaacttaagtttagaaaaatagttttaatatcataaatgcataaaaagtcaaattttccattaataattataaattaccaatttattattaaattttatttatctccaataatccaactcaatttcaatgttttggttagatttggaccattcaattcaaagaacacgtgtacaaatacttaacatgactatagtaaatagtaattaattatgtgttcataattaataattaaaaaccacaatgtacctttatatatatatatagtaattacttcctttttctcttgtttaccaattacttttttcctttattatgatacattgttatttattttgtgagagcatagtatagactatagagatccaaaataggaaagaaacttaattaaaatacataaatagatgagttactttggaaattacaagtacatagcatggggatatattagctagtcttttattactttattaatttatttattaagtttcaaacccatataacaatatagtaaaggaattcaacatatttaacatgtgcttatataaaaaaagagaaatgttaaaaagtattattggtgactagtactttcttaggtaatatatcgctattggtgcaataacatatcaggtcccatataatttaatttaataatttttagagagtataacatatcagatctcatgttctggtttcttattctttggcggctcaatgccgggagaaggcaggtattaacacaactctctcgcctagcatgacatttatagattggtgtgttattactttttgtgatgctaacattgacaatgctaacatgatcattgggttgcaaccaagaaagttttgagatatttctaaagaacgaagagttttatgcttgtgtacaagcatgtggataatctttgagttgttggttatttagattcagattttagtggttgtgtagatgatttaaagccaacttctggctatattttcaccttggctggtgctgctatttcttggaaagagtgttaaatatactttaatcacatcatctactat

SEQ ID NO: 314776 - DNA, 681 bp, Cannabis indica
aagtaaaaataattttttttttgtattgatgtatttttgtaattattttcaaatttttggtttgttattatgtaaatttttgaaaaaaaaagatgtaatttgttttaattaaaatagggaatgaaatgttatgtttggttggacccaaatcttatgaaaaaaatattattttatgtatagtatgaattcttgaacacctgttttgtaatgattgcacgaggtttaactattttttttatctaatacatgaacgctttttttttaaaaaaaaaaggaaaaagaaaattttttttttaaaaaaaatgtaatgtaaaaaatgtaggaattcaattgactatattaaaattatttattctgttaaattactctaatattttgtaaatattgataaaaatccaataagtcattagtggaagtttgggtaacctactaaatcaccacactattttagtgggtaatcacatgtaacatgtatatatgaaagctcctaattatattttattaatataattccatccaaaatagtctaggtttaaccttgttgatctattccattaaaaatagtacaaagtcatactattatccctatgtaattatccgtttattagggattattttactaaatatacaaaaataataaaaaaattacaaaaatacaagttttacgtaatttaaactatt

SEQ ID NO: 314777 - DNA, 964 bp, Cannabis indica
actgttggggtgttggtgtaggggcattttcggaatgcttttatttcctacaagaagttaagtttttaagttagtcaggacttaataaccttaacaaactctcctctaatcgagatctccatgttagctcaagtataggtgcttccgaaagcgtgtatgagggcttccaaaatcacggaccaaagcactcgcaggaggagcttctcgaatagagccagctggagtcgactatctggaactcctttttaggaagagccatccggaactcctttttggagaaaggttagatttcttgaggacccttcttggaaggacaagaaagccttccaggatctaattttgctagtcaataactttccaggaataatttttagagacttttttatttgggggaattattccacaaatgagatagggagtgtatatataattttgaagtaataagtgaaatttatctttttttgttgcacttgaagtttattatttttctcaatacttcatatgtaatagaatgaaacgaacattgttagtaatacttcataatgcaagtgaataacaagaaaaaataaataatgaaaatgtgtatacgtatgatcattatctcaatttttatagtaatataataatatatatacatgaaggaataatagaataagatattataaaaattaaataatgaaatataagttaatgtgtaaagacatcttcataatactatgaaagtgtgtcttactagacaataatataatttgttcattttttattagttttaaaaatatttataaatatttgaaattaaatatgtgatctgattagagatattttagtctgattatttacataatttttgttaataaaataaaaaataaaagattgtggaacttattaggtgggttgagaggaatgaaaaggtagaaattaaaatgagaatgagaatatgaataaaaatagaatgaaataaaat

SEQ ID NO: 314778 - DNA, 2120 bp, Cannabis indica
ttattttcatatttattttttgattttatttaagttgggtctaggtccgggatcgagtccgggtccgggtcaggggctgggttcaatgccagggtcggggccaagtttgggtctagttgtagtccaaaatattgattaaaaaaactgtttaaaaaaatattgaaagcgactttattttcattttcaaaattttgattctcaattaaaaaattaaaaagtgaaaacagttttatagaacatgattttgataaaaaaaattcacttttctaattttaaaaacaaaaaattgattacgaaagtgttagcaaatgccaccaaaacaatgttaaaattaatagactgaagaaattttaaatttaaaccataatataaaactattaaaagaatattttttgaatttaaacataaaaatatcaaaaattaataataacctcttaaatgaactaaatattattaatttcaaaatgatatttatgtttaaacatgaaaaatactattttatataggatttttagggttttaaatatcagaaaatcaaaattttgttgaaaaaatcacaaaacctgaatttctgggtgacaatgtcaccttgttcgagccccaagctgcaggcagcctcttcctcacgcggacatgggtgctgagggtcgagaaactcgatctttgtctgagcatatgcgcgcgataccttgtgtgcaaggtatgtgattcagacaggaggcacacatgaggggccgcttgttcgtacattttcacatggaacacgagccacatctccgagaattatggcacacaaaggttgtttgcatggtgtctcaacagccatggcttccaaccttcaaaattgttttttaatttcagtttcgacccaaattcgattttataaaaccttaaattgcttaagactttgtaaggaatatttctaaaataattttagtcacataataaaattatttattatcaaaatctcatactttcacataaaaatcatcaaactcacataaacacaacatgaaccatccaaatcacacccaaaacaatacatatcattttaaattcttatttcatgaaagtaaatcattaccatggctctgataccacttgttggaacttattttaccaggatattaatttactaatcatgtatgctgattataaatctataatctaacatcctagatataaaaatcataaaataaataaatacataagagattagaaatccttatattggttgcaataaaatataatgtctccttctattcagtagtctaacccttattcttttttattgcagagtagtaacaagtactaaacctgatctcctctttaaatccataaaaaaagacaattcttcataatctttcacaaaggtctaagtatatcaccttgaatagtgtgaattgatacccaaatcacttttggaacaaattttgagagaggaaaaggctatgttgactttagaatttcataaagagagaataagagagctttttagggttagaatcaattaactagctctctatcatcacttcttttatatagtcaccacttggggtaggtttagataagatgggctaaaataaagataattgagcttaaaattaacctagggccaaaattcagtaaaggaagccaatggatttgatttttgccactttattttattcaaatgaaacaatatgtattttcctaaatttaccaattatctcatctaattattcaaataccaattttaatttaataattataaataattatcgaataaaatatataaatatatgtattaattagacccgcaaagtgtcttaattaacaaataaactcctatttctatttttttctcaaaattacccgaacttggtgaaaattcccaaataagatatggtctatttttgaattctaattggcttattaaactaattaattgagtgtacaagatgatattatcctaaacaatatggggactatgtaaccaagctcctaataagtagatccgaaatttattaagtagatcctaaatccactatagattcagaattgcactcttgattacatagaacactctatataccaaatataaatacattatgatgttggaagttattttaccaggaact

SEQ ID NO: 314779 - DNA, 1971 bp, Cannabis indica
agttccttatcaacagagggaccagaaagatttttccagccaaaaccagtggggtaatgacctcatttcctcccaaaaccagtggggtttcagtgtattccatgaccagaagggccatggaaccccctcgtatgcatgggcacgtctctcagaaagaggagagagaagagagcataattaggagagagaaaactttcaagttctcttgattggattatgttttagaacttcattaagaaaggaaactttctttaaatctgatataaaattaatattttactatttctaacccttttaaaaatgatactaattgcaaatggaacttccccaacgactgcaaatcccacttggacatcatgtgacaataaaatttttgttgtactgaaaactgagttatggttagaactatcaacgaaaataatcaaatgattttgttgatatactcgagaaatttaaacgttttacagttagtaaattacatttattatcataacttacattttccaacaaatttgattttttttctattccaaccatgatcatgaacaaattgcactgcaactaacaaaagtaaaaagagtacttccgctgtcaattatgcctagaataagtcttaacttgtggactaaatactactacaccaggcccaaacaccttgtcctcgagatgaaacttaggaacaaatccagtaacgttgtaaatccaattccaacaactagaacgactagcttcttaagtgtatggcatgacatatcttgtttttgaacaagcacattactaccattatgtaggagcttccaagcatcgttcttggctgaatgaagactggagaaccatctgtgaagtgtaaatcaccaggtaacacctccaacatcaatccacatcctcacttccttattaagaactggccctcttgacaccaaaaatcacaatagatagtccgataacaagcttctaataaagagagaaatatgacattaacaataataaaaagtgaaaggaaccgcaatgttaggcaaagtcagcaagttgttggttaggtaaaccataaatttgtttatgaactctggaacccagcaagttgagtccctttgaaattttaaatggtaacagatggcttcagtagtagtcctgcatcaaaaagcaatttgataaacctggtcatgttcctcaccacactgctgaaatctttactaatagttcattaacacacccatgaaagggaattctagcttgacccacagcaagttgccctttcccatgaacccaaccagtctagaaccaagaggaacatagaaaattcatgtggaaactgcatctgggtttcaaaaatgtacctaaggaatgaaaacctaaacttcccattcctatttcgatgcttcgccacagagaaaaatcctgaaaaactccgttcgtcctccgtcaaaatttcatttcctgaaaagaggagaggccattaatgagccagtgcacttgaaacattttaagcattggacccttccaagttgcacccaaagcatattccatgtagtttccctctctttctacaggtcccatttcacaaggttatagagttttctaccgcacatagcaagcacattgtatccatacactgccaatgaagacccctccttcgtaacaatcgcaacatcaggaaagacccttgttccctctacatcaactttctcctactatgtttggagttgaagcacaagggaactgctctgcagtagcgtcatctccctatttggtgtgatcgaaacaagggaaccgtaaggtttcgtaaaagacaaaaagagttgttttgggctttactctcttccaagcccattttgatggaccttggggttaacaaatatttggcattttgactttcttggtcaacctaggtaatgtctggggaaaaggatttgaagtcccccgccttaccactcggccatgacgccaaaatgctacaaaatagatgacaaa

SEQ ID NO: 314780 - DNA, 662 bp, Cannabis indica
taattttttaaaagacaatatttttattagtggggctataacatcaatcttaatgggtccgtccctggtgacaggaaataggagaattatgagaattgtgagtgatagattaatttttacctgcttagataattcgaatgctcttgataatatgaaatataccgattgtattcttaatcgtaacctaatcaaattagttataaatatcataaaatattccacttcattttccaaatacataaaacaaaatacttttaaaaaatttaaaatatttttatattttacaaattaattaaatatatatgtatggtcacgttaagattttttgatatcctaacgtgagatacaaaaatcaaatagaatatgcggtatattataatcaagttattctatgaactcaccagatatgaaggtaactggtggaaaatcaaatcaaaacaacaatataaagttgttcatcttggaacagccagtaaagaagtatcatagattggaaaataatatatcatccactgagtagctattggttggaaaataaattaatcttggaacagccagttaagaagtatcatagattggtctcgacagactcagtaagaaaagcataataatactcacatataaatccgggtcatgatcagacgcccatacccctgatcata

SEQ ID NO: 314781 - DNA, 1125 bp, Cannabis indica
aaaaagggaagaagctcaagtagaagctctagcaaggatcactgctcagggaaaccaaagtttcagacaagaagtctaaaagatctaaatggttgctaccattgtggaaaaacttgaaatcttaggagagactactatttgggaagaaaataacaaatacaaattagatgggcaagacaaaaactcaaagaaattagacagttacaagcataaagatcatcaagaaataaactagagtgatggttatgatagtggggaagtctatatggctttaactaccctaaggaatgaatggattttagaatctagttgtacgttctatatgactaacaacaatagtctactgtctagttatagggatgttagaggaggaaaagtcatattgggaaacaatcaaacatgtgaaatagaaggcataagaattgtgagcttcaagatgtttgatggggtgatcagattcctaagaggtgtaaggtatgtaggtatgtacctaatctatctagaaatttaatttcctaagtgtgcttgatgacttgccaattgaaagcaaaatcaaagatggacaaataaaactatgcaagggatccatggtgatcatgaaaggaataaaggaagatggattgtgttacctatgtggggaacctaaagtaagctgcaaaaacatagttccaccacctgaagatgataaggtaactttgtagcatagaagactaggccacattagtgaaaaagggctgcaaataatcaagagccagaaaatacttagtaaagatatggtatctaaagtagatttttgtgaacattgtattttaggaaagtaccactgattgaaatttaacactggcacccataaatcaaaacatatcatagaatacatacattttgatttatatggactagagaaaataagtacacatggtggttgtgttagtgtttatgcactaaaaagcctgtaaagacgttttctggttattaaataaagagttaaacatttgatttatgtatgaatgttaagttattaatattcattatttgaataatttgtatcaaatattggaaaaaaattattcatatatgaggttgtgccttgtagctgtacagagaactaagaccacttagctatga

SEQ ID NO: 314782 - DNA, 1528 bp, Cannabis indica
gaagatgaagacattattacaatttattaagttttatgtgtttgtttagatttcaagtttatgtttatgttttaaactttgtttatggattttaagtttaacatggaaggatttttaattttagaatttatctaaatgaccatcaattatggaaagaatttagtttatgttgttttaatttagtgtttgtaaatattaattttgaatatatataattattattttttgcatttttgtaataaacgggtccccattatggtgtccattaccaatggggattcctcgtcccgttctccaacggggaaggagcggggacaggagaaaaactaataggcgagtatgggagcgagaaatacattccatgatttgccctgtccctatgtgcatccctagacctagtagtgcttctagagatgccgccagaggttagttggtacatttccattagcttaccagtatgtcgctagcatggaacgtggcctaaacctccaagagactttgtggtccgtcttggccacaagtctcaataagagatggcaaaggtagtcattcgtgtgttagtttgcatacgcacatgggatagatgcactatgctagaaagagacagaggtcttacgtaagctaccagtttgatggcttgtcttgaaggcctgccgacatgcgttgaagcatggtgccttgaggattggaccatggacgtatgggagtccttgggccatgagggagactttcgaacaatatcaaatgggacatgactagaggcgtttggcatgtcaatttggtgttggcatctagccacacatgataccttggtcacaagtgacaatgtgaccgatagtattgggatttactttatcgtatgagaacctatggatagtgtgaatattgtggctagagagtctcgatgcatggatgcacttacggatgcttgcgatcatgactcgacaagagttgttcgagggacgaaagtgtaaaggaggcacgcagttacgcaaaaaatgagcctattgttactcggatggttggaaggatgatcttggattagagaagtcaaggtgccacatgggtgttctgctggcagagaaggtgagccaatgacagttagtaccagagtcaggttcatcttagtgggaggtgaaccttgttggcctatcttagagagaatgtaggcatgaggaaggatcaagatggtccaaatgatataacaatactttgttgagctagttagtttcctaaagtggatcaataggccgagacggagttgagactaggttgcttttctttgttggaatactggacatcctagagagggggcagtgatggttacttcaaatagttccaggatgctagaaagacaactaccacgtgcaattatagagaggtgctaaaaatggttaaaactcgttgtcgtagtacaaggtttgattgtatggtccatactctatgcttggtattgttggaaattattttaccagaatcttagatctactaacaagtatgtttattaacatcctaaataagaactttc

SEQ ID NO: 314783 - DNA, 1304 bp, Cannabis indica
aacttaggtgtggacaggtccatgtgaaaattgtgacatctccattaatttttttttataggagacacaactccattaagtatttatttatttaaggcactcatcatattgaaagtaaattatttttgtatcaaacaatatatatttctttaaaacggtattaaataatatatatatattaaatgaaatagcaactttattaaattagcattctcaatactaaagagtctaaagttcatgagataatattatgttagctaagagccttcttcgagacaaggccaatctcccaaagcaattcaaatgccaatttcatttatgataattcccagtaattataattatttctttatatattctcctaattttgattcactctaatagaaattagttacaagtatctcactctctcttagtgaccaagcttcaacacatactccttcagctagccgggtttcgtacgtccacgccgatttcgagccgctccttcccttgtttttttgagtgaagcttcttctccagtttttgacttgcacttttctgcaagtagcccttcagcagctgctaagttctcctcctgctggccaagcttttcctttgttcatgagctgcctctaagttaagttgtattgggcctattaattggacttcactaacatattatgcccaaaaatactacgacgagataaataccgagcatgcctagcgacatagtgggcaactcattaataatcaaaccaaagatataagatatttgttgactacaatgaatagcttgaacaacgagcatactatcagtctccatctctacacctttccattgtttgtttttaatccaacttagagtttatttgatactcgtggcttcaacaacttcaactaggtaaagacttccatagtactcatccttaatgtgtataggtctaccgagagtgtcacgagccacaaccccaaagccataagagtttttcttctcgaacaaggcggcattgacattgatcttgatattatccatggccggtttagtccaaaactcagtttgatcatctatgtttccaagaaacaaagatgataagaaagatttatctcgagcttctttaaagatcaaaagttgtagttgttgatacaagaacctcgttcacaatggaagacttctgtttccatacttttttatttgggatattgacataaatatggtaataagaaacctggtttacttaaatatgtaagtaaacttaataggacaaaatatggtatttaaaataaataaaaaaaattaacatatatgggatatgtcatttata

SEQ ID NO: 314784 - DNA, 1487 bp, Cannabis indica
agggatcaccccacaaaaatactttaaataccccccaaactcattaaggtaggggtctagaattctgggtttcataagaactagaagaggaaaaatccaccaagaacattctctgtaataaatactatcataaatatatagactcgtggactaaggctcattaaatccccaaccacgtaaaaatctctctcgttaattccttatagctttcttaattattattattatactggttgccgaaaacctcggtcaacaatactggttcactagctatggtaatttggtattgcatgtctcttattttttttaagcaagtagtttttagtttctaatattaagaatattgagttttaaaataaaataaatgtataatgcatctgggccacctacatgttcatatttatgagtaacaaagagaataacaacattgagtatttttgcctctaaaaataaaaataaggtatttaaatgtataaaatctaaaatattaggtatttatgctgcaatttatccttttggtaattatactttagtataatatttttccttcaaactatagtcttatttaaaattttcattaaaattttattaatttgaacaagtcaccgaaaaaatgtgtcacataatttatttaaattatttaccaatctatttaaatgacttcccaatttccgctttgtggttattttttttttccaatttgatatcaagttgtaattttttctcttgactttttagtttataaaattagttccctgtgaaatatttatataaattatgacatagataaaatatttatcaaactaaattaattaagccataattttattttaaaaatttctaaaattttcgcactcaataccttagtatttatcccgcaaaatatctttctgcatgaattttttttatgaatcaataaagttatcgttgaaactaaaaaaccattacaacaatacaaaaaccagcaccaaactgaacagaaaaagtgacaaaacaattacaaattggcaattcacgctttatctatttttctattcctttgaaagaaaatggctgcgatcctacccataacatcactttttgtatactgcaaaatttgctcaacaatatgctttgagaggttccaatagttgtcattttaactccaccaaattctataagtgagagcaacaacggtcatcgtataagactattttatgcttttattgaccttacttcgttgaatccacttgattaagtcgcccactatctaattgagtcgaggttctccaatgcagtcacaacttcagattttaaggcactctgcacttttatgacattgaaagaataaggtagtgtttggttggaggtaatgaaatggaatggaatgaaaaggaaataatttcattctatttctttgtttggttgcatttgaaagtattggaatggcattccaatagaatgctcttttcactattttagtggaataactattccaattttttttt

SEQ ID NO: 314785 - DNA, 832 bp, Cannabis indica
agtgaattggagtcatgaggtatagaatagacttaacattcctagacatagtttttgcttatggattgctgtataagataggctcaaaatcagagaaaggctgcataaactcaatattattggtgaagatttctgcttgttctgtaaaaaccaaacagaatcttcagatcatctattcttctcttgctccttctctaacctttgcttatcttaagtaaaagcttggctcggctagagagttgaaacaatagccttaagtagactgttaagatggatagaacgagccaaaatcaggaagtttaggaaggcaatcttggttgctgctgttgctgccctggtgtatcaattatggaggattcgaaatgacatattgtggaattcagcaaagcaatcactagaacaagtggttcatgttacaaaagaagatgtgaagagaagagtaatctgcaactggcccaaacatgtcaacccgactgatacttgttggtttttaaaattgtaattcaaacatttgattaacatattttgttgcatggttatacaattattttatagattgtacaaatataaagaaatcagatcttcaaatgaagatgcttgtaggatgtaaattgatatttttagagtaatgaatttcactaattgactaaaaaattttttaaaatttgatatatacttttataacataattaccactaaataaaaatacaacgcgaagcgtgtattttttttttttctaatttattttccaaaaaaaatagggataatttcacaaatacataaaaacaacaaaaacataactaaaatacggtttcatggaattttaaatatt

SEQ ID NO: 314786 - DNA, 4294 bp, Cannabis indica
aatatatccattttaagggggtgcattgtagaatttcctgaagttatatttttgaataaattattttatattgacaatgcagacataaaataagaatactatttttttttcgctgaaacataattaaaatgttaaaatgggaataatgatcttttatttttagctaaaatgagaataatgttttatgtagctatcatatcataaattagaaacaactatttatcgttttatttataaattgtttagaaatatttttctttaatttacgtgtatgttttcatttcatattaaaatttatttattatataatattgtctatttactaaaattataatattattacactatctttcacaataattaaaaaataaaataaaaatctttctttcaaataagtaaatataatgaaaattaattatacattatatacacatgtacattgcacataaattatatctagcatatataaatatgtctctaaatatataaagatagattctttaatccatccatttcatttgtgtgtgaaagtgctaaccaaattgatcgtgtacttaaattatgaccatatataagagaagagaaatgctataaggactagctagtaatgtttagtatctttttatataaatattgttattggtttaattaagtattaaatcttatataatttaatttagagcattgttattgggcactagtagtgcctaacacgtgtcgccttacgattgactaatgatattccctaaaaattattatattaaactatatggaccatatacataattagaccaatagcgatattaacatgtaagaaggtacttggcaccactggtgccttttagtatttttctttaatttaataacttttaataaatatcgctaattaattataaaaactacatacataaaatatgaaacaccaatactacccaataataatgctcctaacataactagctagcaaagcatagcattagcgccacatcctttcaactatagatcgataacgaatggtggtgggaaattggataccatgcgttggaaaataggtctcttataatctactcttaattctacccatagcccccaattggtcaaaatgtactctttatttattcccaaagtaaaaataaatatgattgatgattttaaattttaatcttaattagcgagaattgcaataaccactctgaactctctccaacccccatctgatattttctaatattttttttttagaatttgcacaaatttttattagagttttacaaaaatattaaaatttaggcaaaagtttataattttactattacacagaatattttacaaaaaatactctttttataaaacaactgtaaaataacaaaacagaacaattaaaacaacaatagaacaactaaaaaataaccgtaaaaacttaacacaatataaaacttacacagtatttttaaaaaaaaattctaccccgcaatagaaaagaaaaaaaaatttaaaaatttcatggtgtaaaaattcatttatttttcaaactctacatttatattgtgataagcaattctttacatttatgctaatcctacataatcttattttcttttttactattttttgtttattaatactattttttaaactttacatttatagtataataagaaattgtttatcctatctaattttttttttccctaataacactatcttcaattttttttttattttttttttttcaattttgacttttttttcttttctctcttcattttttcctctttcctctttttctatcttttttctcacactattttttattttatttttatatatataataagtatacatttttatatattttttaatactttttcactctcccacagaattttattttattattatttttttaaaaaaaaaaatacaaacacttattctatttatttttctctcttttacattttcttattgttgatactcaagctacttcatactattttttttttaattattcacattttataaaaaaaaatcttaattaatttattttaacctttactaaaataaaattcttttactttcacattttgtgaaatattttttttaacactttttctctcttagaaaaaaaaaaagaataagattagtgctcctcctatatctttttctctaatacatgattaacaaaactagtttttttttttttttatgtatattatgtagtttattcgaagttaaatatttatgaatgatttgcatatttcaacaaagttgatgtcttgttattaatctgtttatttataaccgtccttttgttattttatagttattttatacttatttttatattcttgtttatgtgttctataattgttctatagttgattttatgtgtgtattttttctgtacaattgttgtttagtttggtggtgctaggaacccctgtttttttttatgttttctcgatgtttagggtattagtaccctagtgatcaataggggaaattacagtgatgaattgaagacatagaacgggttaggtaaagtgattaatcgttttgtttttattattgtgacataggatccaagatcgttgatctttctctattttaggtaggttgacatacctgaattgaaacttgaggttattatagtacttcacgttgaacaattcttggaattcttgccaagttattctcatgacgtcccgggtgagggataccacgtccaaccagatcaaggcatccttctagaataggaaagttgcacaagccactctatcattaccagtaactcacataaaattcaaaattctattaataatggttagccattgcttggctttcataacgtctggacctgttcatcttgttcattaatcctagcttcatttcagtaaacctacgttcccattcttgggcagcctgcgatgggttagcatcaccccaaccatgtgccctacctcttaggcctctacctggaccatgaatatattagggataaactgcactccctgattgccattggatccgaccaaatcagttcgggtcctaaaccccggactcggacctagacccgaacttagaaccgaacccatatctgggaccagacccagacccggacctgaacccgggacccacacccaagacaagactagtcccaggaccggacccaaacttgggcccgagacttgactgaacctagaccaaaactcaggaccagaccagacccatacccgagacctaggacctagacctagggagagactcggatccaaaaccagactccagacccagacccggacccaactcgcaccatgacacggacccggactcggacccggaccttagacctgacccgcaccaggacctaaatccatacccgagactcgaactcatcagactcaagcccaagactgggtcctggtccggtctaggtccaagaccgaacccggacccggacttgggcctcagacccaaactcgaacccagagccgagtcctgaaccggactcagacctagaatccaggactcggacctcgatctggacccagactcggactcgagacccagtttagatcaggaaaaaaagattaaaaaaataaataatactaatacaaaattaaaatggatacaaagttatcagtatataatttttattttttaaaaggataagtcaggtcggattagatctgatccgaataagtcgagtcagatctgatctgattcgattatttaatctagtagggcgaggcggggtggatcattatatgatcaagatcaggttggatcataatcgaattagatccaacccgatccatttatactttatgcttttacttttccatattattttacaattaataaattaattactaaactatatcaaatactataattaattaaattgactttcattaaaagttgaattaaataaaagacgaggatgttcttgtattactctctcgaatcaactttgattgtatatgatcatgagtcatgataaatcaaagcgaccagcttcaacattatttatctatttatctatttatttataattttttaggaacatttacggtgaaatctctctttaatttaattttgtacacttaattttcttatatatttttgaggcaaatttttttttgtttacatttctttgtaaatttgagatatgagttagatatcacccttaaatactaattaaagtaatactgttttggctacgaaattttactgacgcttcaaatttatgaagaaaaataaacctaaaatattttgctaaacaataaaaaaa

SEQ ID NO: 314787 - DNA, 1779 bp, Cannabis indica
ttttagaaactaattaaataagagcttaagaagcaataaatgcaataataaagaacacaaatatttttacatggttcagccgttaatgagccctagtcgaggagtcagagtcagtatattggcctaaaaatgcgtgtatgatattttacagtggtgtttacaagaaaaccctaactctgctgtcttgatttctcttaaagaagaggaaaacttaatggaaatttggtagagctttggctatctcttttttcctcatcccccctttgtgtggaaataaagggaaatttttaagctaaagtacgggcataggcatgcccatgacccgtctagggtttttgcaaaaagcccactattggggtaaaatacatgcaaataactgactattggaccccgaagatggttcttccttgtgtggagaatcatccatacattgggggactgatattggtgcagagaacgtgccagacaaggacctacctttggtgaacaaaatgctcagagtagccgtcagacaaagaagagtgtacaaaaggggtgtgcgcataaccatagcttgacacaggggacacgatctaatcctgtgtcaaaaatgcataattgtcatggtgccatctggctttcacctcgtaagtggcttttggttctccttactcgaatagcatccacaataggccctttagatggctttccagattaggcctgcacttgtagataggttgatcttccccatgtcttcgatcaacaataaggcttttgggtcccggttgatggtttgtttgggacaacccttggagcctttacccgtgtcagacttttccaggataagcatattcttttcttatcttcccgtaatcaaggaggctcaatcctctctaatttggagggcttttgtctaatccttgccacgtgtccttcatccgaaaacacagataacaaactcaaattcattatgagccttggaaaataagtaggtcgaattctcagtagatagttgatcaaatgtagcatgtagcagtaccatagaactctgaaaaagaaatgaaaaatcagccagtgacagtatttaatggaaaagaaatgttggatggaaaagcaaataaaaatcataacttcgtgtcagaatcaattaatgttgaaactacagagtaagcatttcagaaatactttgatcagtaatgcaaaattgagcaaacaacgatggaatgtgacttagctccacctataatacaatagagtacgccgataatcaatactcaaatgcaacctttgcactctgaatgacataaagaaaatcttttactagtaaaagaacagatgctgaaagaaattgtggcaagaattggagatggaagaattacaaaatggatcgttgatgagccgaagcaaaaagactttactatgtcaactttcgtattattcaacggcgaaggagatccattggaacacgtgctccaatttgaacaatagatggcattggagaaaagtaatccgacaattagatggaaggcattctttacaactttaacaagatcaattttgttatggtttaaacaattaaaagaatgatccattgattcattcgatggattggcacaactctttgccatacaatactaaggaagtgctaaaagaagaaaagagagaaaggattggaaaacttacaaaaatactgacttttggcccaatgtttacaaaaatactgccacacgccagaaattatttttataatgtcttggccaatttttttattcttttatactataaacaccaaaaaaaaaa

SEQ ID NO: 314788 - DNA, 2225 bp, Cannabis indica
agcatgttgctcgaatgggagtgttaggagcctagccttttgagctcagtgggagttttattgccatgtatcaaacgtgcttgtattttgaatcgaatgcttatgacttatgttttgaacatgtataatgatactgtagtcacttcttattattgttgccgttttcatgtatacgtgtgttgtttactgaagtgacaagtacaaaaggagatgaatgcacatagtctcaatttattgtaccacatgcatatttggtttgaattgttaatgattgttattgaattaaatgttttcaaggtgaattcatacataatatatgtatcccgtcgatatgatattatgtacgttttaactggttgccttatgtgtggtaaacaatgttgacccaactaaagttccaaacatccatcgtgtgtatccactctcaacggttagatgatttcagtgtcaatgacaactatgattgctaataattggaaagtgatagtgataataatattgtatatgtaattgatgatgaaatgtaattgtaacgttgttttaataacaatactaagtatgtttttatttaatatgtagggaatatgattagttattataaatctgaaaatatgttctttatgcaaagtatgtctacaccgggtgacagctcttcaaaaaggaaagggataagaggtaaatacaaaggtaaaaatattgaggaagcgctttccaaaacaaaagatgtaaaactacacatttcattgcattaagatacgggcgcccatgttgtccaaatggaaaaaagttcaacaacatgtgtaaattgatgatccacaacaccatccccatgaataagttcaagtgagaagatgtttctagagctgaaattaatgcagtgtaagccagacttgaggtattcagtataattaatgtactaatttgaatgtgtaacttttttgtagataaagtttgtgtgcccacaagataattatacatttgttgactatggcgatgagtacaaaatgtcaaagagtttgcatgactggtgggccaattctatgaaaaaatggataggaaatattgaagagattggacaggagagggcatatatgttaccttcagacggagtaactcagaaggtgtgatgtgattccattacttactagaacatagaaaaacgaaaggtacttaatgaaattattaattttcaaaatactttacgttatagtcaacataaaataattaattgtaacaaaaatatgttagtatcacacaagatcagcaaaaaatagagaaagttaggggtaagaagaaacatcaaggaggatggggatcaaagcctattgtagcacatattgtcgatagggaacttccaactgttatggatacttttttgaaagttttaccataaagacaacacttggtgcaacgaatacgcgtaacaagcttatgtaagtttactttgatatttaataatttataaatatttcttatgattcgttttttattcaaattaactatttaatttatttgatttttttaggagtaaatttgaattggttgcaaatcaagcaacgtcctatgaggattagcctatagatcccagcaagtacccatgagacttgtttattacgatgcaagtactgggttagcgatctcgacatctgagaggctttggccatcttttgagattgaaggtaattgggaccaaaagagcacgttccacgacttcttctctctcacggattcttacaataaaacaatatgaggtgttacagaaaaaagtggaggaggcacaataggtgttgttgaaggaatttttacaacaccagaaataagtattatatgaataataagtgcgagtacttgacccagaacggcgagtattcaaactaagaacaaaaatacttagcaaaagactggaaatacaatgaacacaagagagtatagtggttcagtcagatctcggtctgcttagtccactgttgcagggattctgtcttgtttatttcacgacggatcactcctttatatacaaagctagtgtcctatcatttacacaaggattgcattcattatcaatccgttcatacattgaattacactaattaaactaaaaaacgtaaacataataaatgaagaaaagtttccaacttttcactaaatacagcaacgtatacgacttttatattgcgagttggctgttcatattcttgcataagctcacaggcttaggatgcatt

SEQ ID NO: 314789 - DNA, 697 bp, Cannabis indica
ttttttcttctgcagtacctcgacgtgacatgagcgtgaaagggtttcaataattagttttctttttatgagggctaaaataatttattttggctttttgaccccatattgtagggtggatctcgaaagatatgaaagatctccctctaagtcgtacatacaactttcatcgaatacggctttccacagaattctctatgtatctatgacatcgggtatggaattctggctgctaaaacaattgctaaaataaaagtggagcatgctgcgactgttgatgctaaaaacccattggttgagaagatgaggcaaatctatctccaggcatataaaagcgagacggttgtggacggggtggttgcgttagagcagcctcattcatcactgtctccacatgtacacgttgtttaggtgtcaatatttgtgtcaccgcctgaagatgtctttgcagctaaaatatagtttgccttaagtcaggttgttcaatggctgcagcaagttgtgagcgtcgtcatgatgattgtcctttcaatttgtgacccactcctcgctcatggccacacctctctccaagagtctcacaaagtatctcaatctcaaaatcttgtgtacactaaaaaggactagattgaccgtcatattttgtcttcatccgtacctattttaagaataagttagaaaccaaacaaacttacaa

SEQ ID NO: 314790 - DNA, 596 bp, Cannabis indica
gtctaattttattttattaatagtacgaatacgcttattttttttttaaaaaaaactaacttatataagtaaatattaatagctctagaaattagaatataaaatcataaatttatcgtaaaatattatccatcaaatatttttcacataaactctcgaactactgcagtatattagctctaaatcaatttacatcaacaaataatttgaaaaatatgtaaaatttgatcataactcacttttttttttaatagtggcaaaactcaaagtgtaagaaaatatattttataatatttttaaaataaaaaataatattataaataatgcattaatgaaagaatgagtttatacacatttcatttcttattcttcaaatcaatatatgacacaaaaaaaaaaaaaaagaaacaaaaaatccccctctatcctgaaatataggtattgataagtaagatggctaataaaggagagcactcctcctatcacctactttaataatagataaggggcaaaaatatagctaagaaatgataaaaaggcctctcataagataagctatttaaaaaaataactaaataaaatagaagtgaaatttt

SEQ ID NO: 314791 - DNA, 664 bp, Cannabis indica
tataaattaattaaaagtctaaattttattaaaaatatttatttaaccatgtaaaatgaaatttttcttaaaaaaaaatatacaataatataattatttctaaaaaataaaagaaaatcactaattttgggaaaccagttcccaaaaggagggtgagggtccatagctacgcgtattcactttctcagaatatattttctctttaacgtgatgcgtgcaagaatatgctaaaataaaattgatgaaataataaaaaacaaatcaaaattattaattaaataaatcaaattaaaaataaaaaaattagcctcaacactctctctctgtctgtaacccatttatgattttcctctgcaattgcatcatcatccttcttcaacccctctctctctctctcccaccgactcttcagattcacaatcacattccctcttttcttctttccttaacttattaaatccacatttccgaaaataaccctatactttcccttattttacgacactatcccattagggtccggaggttttctagtttcagataataaagagtaaagaccacccgagtcgccggttcaactcggccgagtcagaatgctggttgaacggtgtctgggagttcgccgtgtccgtcagatccagagggcgatccgccatggaatggt

SEQ ID NO: 314792 - DNA, 2347 bp, Cannabis indica
tgtatatatatatatatatatatatagagagtcggcaaaagggaagtcgtccttttgaatccatgcagtgaatgaatttgaattaaaatttaggttgtctatttattttttgctgaaacttttggtcattaatattcttttcttcaatataatatatatatataaatgaatgaaaatgaactatgaataataatgctaattgtggccaacatccatgcacgtgcctccttagacttaattgatctctttttttctttatctcctacgtgtggtttataatttaatttatttattatttttttttacaagattttagtttaaaaatgtttcttccaatcactactataaaataaattatttttatcggtctaacatgataattaattataaagacgataccaacacataaggaaaaagttatcatttagcgcgactcaaaaatatcatttaaagtattttatgaaaataaataaataaagggactatgtcctcgttgaccaaactttcagttagatcaaagctctgataccatttgtaatgtttctgcttcaagcctccattaggtccttacaaccacaaaataatggttcttatatacgagtacgtcattccggctgcttcatagactaatgactgaccctacaaaccaacacaagtgtttttagtgtgctttgtcctcactcgcacgcttcttgagaaaactttttcttaggaggtcacctatcttgaaattaccccaggtcaagcacgcttaaccgtggagttctttcgtgatcatgggctaccaaaaaataagatgcacgttgttcatataggtagtaccaatcaattcatttaagtcctcttcaactatgtagtcacatacctgcatatatatagtctcaaaatcatcccacttgacctaatttcccaggtgatgtgggattgcacagcttacccagtattttttcttacagatcacgggactactgactgtcatagttatattatattgtattttgtaaagtttagctttgttataataaaattaaaataatttctgtttcaaattaaataattattataacaattaatttataattattttacaaaaaattaatataataattaaaattaaaaataatatttaagtttgaataaaaaaaatattgaaccccaagacttcagttattacataataactaaagacatatggattccccctgaatcgtgtgattaccttgtgttatagaattttttacgtaagtatatatacgtatcgccttcaagtaatataatattaactagagtatcatcattccctcgaggattgtagttaagtaataataaattcaattcttgatttgatttggcactaaaaatttaaagaaaaatattaaaatctaagtaaatagaagcaattaatctagaatgaaaactaagaatgattagagtttagggttattaacttcagttgtatctattatataagacttattataagttaatcctaatatcaatttctatacaatagtaagtttactaaagtaacttatattcgaactaggagatataaatctcatttttatgtaaattttttactttcatgataaatttaaacatatgagagacattaaataaagaaactctacatgttatccaaaccacgtggatactctcgtcctatgtcgaaatttatccctattttactatagcagaatcgacactcacttctcaaattttttatcaaaatcataaataactaattggtgatcatgcaattaaaaaaattttgaacgaatgaaatagatgcacataaaaaattaaggcaagacttaaattatattaaaactataataagatatcaaataatctttattaataccctaaataaaagtctagctactcctattcattgtaaatgattgacgcaaattaaataagaacataagaagaaagtagaagaaaagaaatcgtcgagaaaacgttgttggaaagtcttctaggtcccttttgctctctaatttcgtcctctctaattggtcacgtaaaagtgttgaatgatgcccatttatataactaagaaaagatacacaatatctatttttgaatttttgataggcgagccacgacactataatgtagtgcgcggcccgtgtctttcagcaagccttccccttgatatgaactctgaaaagcttcttaaagatcttaatgctactactttaactctcatccccaaaattaagtgtcctaataatgttagtaattttaggtgtaaagaccgcctaagattaatattttagattattggaaaaaaaaaatagggtttatgcatgagatttaattaatatttatgaaatgcata

SEQ ID NO: 314793 - DNA, 631 bp, Cannabis indica
agagttcctggatgtatttccacaaatattggtgcattggcagaattcttatttgaaattgtcctgaaacttcaaggattgatcgatgtaatatttgataagaaagtaactgagatgctagacaatttctacaatgaaataagcaagatcaatggcctaactgttatgcgtgtattcaagccactaacatattagctaaagaatctttattgatgcgagtattttatgccatactagatgaaatgaaatgtattatattatgaatgtgttgcaaaatgatgcataattatatagtttatgcgtttgtgttagtgtttaactattagaacaatattgtttttttttttttttttaagtcttagttatattatctatttgaataatatgtgtattaatttttttttttagtattatattatgtttgttcattatatttattaatttttttattatgtaatattattggttaagaaataaaatattattttctattatggtatttaagtatacaacatttgtcacaagtataatatcattgataaaaaaaacatatatcaatagtatgtaattatttataaatttatttatggtcatttacaattttgtatacattattttaattaattataaa

SEQ ID NO: 314794 - DNA, 1236 bp, Cannabis indica
gatagctaatcagattgtaaagagttttatttagggcataaaacccaacatttgtggcatactgatatccctttgtcacagcggccaatttcaaggcctagaaaaaaaaaagtaatttcaccaagatccttgagcttgaattgagcatcaagagaatctttgaattgtgttaactcgtgcaagtttttagttgcaataatcatatcatcgacatatatgagtagtgctatgaatatacttgatttgtgttgtatgaataaagaatggtcagacttagaatggtgaaatccttgttggagaagagttgtgcttagtttttcataccattttcgagatgcctgtattaaaccatagagacttttttgtaatttgcatactgcatttgggggaatcactccttttggagtgtatcctggacagagtttcatgtaaatatcatcttttaaatcaccatggaggaaggtattatcaatgtccatgtgatgtaagtgccaatttttaatcgcagcaagtaatagaagcaattttagtatattaaattttgctactagagcatatgtgtcaaagtaatctatgccatgttttttattgtaacctttagcaactaatcgtactttcattctttctataattaacccatcgagattatatttgatcctatatacccatttacaaccaatggtgtgttgatcagggggtagtgggatgacaatccaagttttatttgcctctaaggcatcagtttctgtgttcatggctttaagccatttggggtctttgaaagcttgtttgaagtatgtaggttctttaaaatgacaagcattgagtatggcatctcgaaatataggggaaattttgtgatatgataagtggtttgtaatagggtgagtcgtggaagtcattatcgtgtcacatatatagttgtccaagtgttggtttagttataggtcaaccagatttggtgtttagaggttttggaattatggtgggaataacagtaataggtatttgttctttgggatttgttgctactagtgtgatatgttgggaatcatggctgatattagtgcttgttgcggaaaacaggttaatattagtgttgggaagcttattttgaaggggaaaaatgctttcatagaaagtgacatccctggaatggaatatttgattactttgaatgtcaagcaatgtatatgcctgttgggttttatgcccttaataaaactcatttcaata

SEQ ID NO: 314795 - DNA, 967 bp, Cannabis indica
aaaagttcttattcatacattatagtatgataaaaaaaaataacacattattatcatcatattatctggtataatgatcaatgtatgtaacagttgtatattatatataatgtattctacatgtgtatactaagtaaatacatgcttaattcacttaagtcctcagagtgtatcaaactctaaatattagtttggttttgatatacaggttgataggttaagaagaaagcaatatgaagtcctagagcgttgcaatactagtaatgctcctatagagaggttaaaggagcacaaacgttttcccaatttgcatctgagtttaggtgacggacgttgtgatcatggtaatcacattaatgttcattgtcaacaaattactagaagagctgcagatgaaactgaaattatgctttctctgtctctgtctacaacttcaccaactcatcaacaaccactataatactatatatatagtatgagtcatcacatgtcatacatacaaaaaagtcaaattactacacactcaaattaaaatatatatatatatatatatatttgagatttttcttaaatatatattaaactattcattgcagtagctagagggggcgtgggcctgttatgaatgaaccaagtacgtacttttaggatctgataagtacgtacgtaagtccactatgttaatagaataagaaggctatgtacatacgtacgtataggagtgtgagttgctagatcttgaaaatgcttgtcttgaaattaagtagccacattggcttcgtaaatttagtgtatttgattttttggaatgacgattatgatgtatagtcttgttatatatagtttgtttgtatgtatcaccatataagaaaaatttagcaactgaaacgtgaaagttaattattagaagaactatttcatattttctcgatgcatgtaagcactactacaaaaacaccctttagag

SEQ ID NO: 314796 - DNA, 955 bp, Cannabis indica
agaaataaaataaaaaaaaataaggagaagagaaactaaaactaaccgactgcatgaggtcataactccttgtcacaagactttggaagctacccttgttaactaaatcccaatcgccttgctcaaaggtcttgtaatggtgccagttgttggtagcatgcagcgatcatatctgcgagccttctgtgccagcataaacatgcaagggcaagaaggctctagtagtgcaatctcgggttgagatctagagaatttaacttgatgaacagaccttagggtttgttcaccagtgctcacagcagctggggaagttgagttgtctggggacttttttggttcaatggtgagttgtatcgaggtgcgcttcttgttgacagttttcttgatcttttttaaaggttctcgagttgatcccaaggcaactcttgttaaagtcatgcgcttcttggatttcttgatgggattggtaggactatgaaacatatctttgagatccaaatccatgtctacaagacaaaagataaaatattaatacttgtgcaaaataaaaaacgaaaaatatggagagataatctcccactcaagaaaattaccatagtcatcagacggggattaagaactaaaataattactatactccctagaaccagtaatcatgaaaagatcaaaggtatttataggagacatgtcccaatctggatggctcgccctatcgaagttagtaccatatcatgggcaatcccaaagtaagaactattacaacttaattgaacatggtgctcaggataccaactattaaaccaatgagcaatatgatctacacaattgtaaaatgtgaaagttgtactgactatccttaaatttaactaagataataccctcggctctaagtacggtgggggaccatccacaagtaccaaaattattaccttgggaggcatcatctttagcttcc

SEQ ID NO: 314797 - DNA, 3242 bp, Cannabis indica
attcataatcttaaatcattctttattctcttaaaccatttctttgtttctcttttccttacaaacccacatggccaaaactaactatgtttattgtatttcttaatgacatcatcaatgcttgtgttcatacaatactatactaagtggatatagtttagatagctatttcattattttctcagatttaatgttgtgtaatgtgttagtgtgtaaccatgaaaatgtatatcatgtacaatcttgacacacatttatgttgtaaattattattattaattggtgggatccatctcaaataaatattattagttaaaattatttgtcatatcagtatgtggttagtttatatgtaatttatgtgtgtatatattattactctaatgtgttagttttacaaggaaaccaaactagattttttgtctaattattaagcataattatatataattcgaatcatggatagattgcatactcacacacttaattacttgagttaatgtttctttgcaaattcattaacactaaatagagtcccaaagagactaatctctacctgtgtaatttcttgtgatcaaatagctagttccatatctatacagtatatatgagtacgttactttagttgtttcttggaatgtcgattgatctttcaaatcaatacgagtctttccagtattttctgtcgttactcgtacattttttgagaaaacttttcaggaggccactcatcctaagattgttcaggttaagcatgctcaacttttgtgtttttaagtgatgggctactgaaaagaagaactcaaaagttaaatttgtttgatctggagcaatcttaggatgagtgacctactgataagttttctcaagtttcgtacgagtgatgacaaaacacgttggaaagactcgtgttaacttataagccatctttttagaaagcagctaaaataacgtatttgtgtattattattttgtgtaagtatgagactagttaactaaatcttgaagcattacaaatgtaccatattaataagtcgttcaaaatgtatgatgatcttaaataatgtggattgtagtgtacaattatgatgaatggttattgaatatatagatatatgaatcagaattttggattagaaagtgagggaacttagccaggtagggaggaggagagtgttttttaattgatttagtgaagcagtgagagagcattgagaccaagtaaatttgggcaaggggaccaaacctttcttctttgtttcccataaatggattcagactgacacaacaccatcaatatataaacacccaatgtattgtatttcattccaggttccatatttgaagcactctcttacaacccacgtgggttcgaacactagaaacatatatataatatagttattatatttgtttatttattaaattaatttacatcctcataaaaaaaaataataataaagaaagaaagaaacacacaacacaatgacactcactcactcactcactacttatctcctttttacttttcctttcatattttcatccactacaaaaatatttgattaccaaaaccagaaaacacactccactcattatcaatgttaattaacgcgttatgtaagtattatttggtattggatgataagatggattaaatataaaaaatgttgagtcatataaaagaatataggctacttcacttatcaccgattggttttgaaataaaacttcatcaacatttaaaaagtttatagtttaccctttcattcatatttagtccggctagaagaattttttattttaattttttttatagttgtttacgttatagttatttagggttatttttaaaatgtttaatattttttaaataatttaccgtgttgaaaataagatttaaatattttatttgaacatgtgagttttttttttaatgcataataaataagtatttaaattttattttcggctttgtaaaaatcattcagatcttaaatatttgattaaaaaacttaaaggggtctactaaaaaagatgtactataaatatttgcattattatttatgttttctaccatttttttcccatcaaccaaacaaacaaaaacaaaaaaaaaaaagattccaacttccaaacagaaacagttacagttattattttaattttggtttttacccatttggtaaaagttgggtaagtaaataaggacgtttgaaaaaggagaattggccttagaagagggtttgggggcaagagtaacatggggttcatgtgctaatcccccaaaatgccaagtcaccatcatctccaaaattgaaacaaattccttcttctccatagcttattggctctccccggcaccgcaaaattggtgggccatttcagtctctcaactgttttttttttcttcattcaaatcaatctcattcacagaacatgggatagccctagctctttattccattggagatgatggcatatgtatatttggttttagtgacatattttcatccttttgttacatttactttgttatagtacttttacaatatggaggtcatactaactactactattgtcactatcttgttaaaggttatcaaaacttagtttaggattaagggctatcattgtggtgttttagcttttaagactcatctagacctatgtaattgatttattctcaaaaacacactccttaattaaaattaggagtgagattcgaaaaaataaactccaaccatacaaaaaatagttctctataatagataatgaatatggagctctctaaataaaggaagttttctatttttttacttaatttttttaattgtattttaattagtaagtattattctttttcctattattttataaattaattttatttattcaaaaaaaaattataattaataatgaattttaaatatgattatattattttaataaataaaatttaaattaaatattttttaattttattaaaataatattacttaataaataacattaataaattaattacacagctgaatttatatataataaaaataaaaattataactaactataataacaatattaacataatatatatttatatataatcacacatagctgtggacgaacacaccgacacaattttctttttaatatgatatctttttttttttttttttgtttatttaagcgtttatatattacatcagcataacctgggactcgaacccaggacctcc

SEQ ID NO: 314798 - DNA, 1028 bp, Cannabis indica
tttttttaatttccacgagataagagattttccaaggaatatgcagtaccgtgagacagatctcgttgtctcttaacaactgccccaatcagcatcaacaaagaatgaaagttgaacattagttaaggagaggcttgtttctgcaaaagtagtgatgttggggacagtgttggaagggaaaaaatgcattggcttggaggcttcttaagatattgtaagaccctatgagcggcttggagatgaggaacccgtggacaagataaaaattgagtgagatggttgactgcgtaggtgatatcgagccttgtaatggttaggtagattagtttgccaatgacgcagctctgataggcagtcaaatcagtgagtgttgtacctttgtctttgctgagtcttaaatttgttttcataggcgtggaagtaggcttagcacctatgtagcctgtgtcagtgagtaattgaatggtgaaagattgttgagagatggatatgccttctttagtatgaccaatttcaaggccaaggaatgttgtttcccaaggtctttgagcttgaatttttggtcaagtgagctgttaaattgagttatgtttgagatgttgttgcttgcaacaattatatcatctacgtaaataagaatgtttatgaaatttgattttgttcgtttgatgaataaagaattatcaaatttggattgttggaagccatcttgaatgagaatggtactgagttttgagtaccactatcaagaagcctgttttaggccatatatgctcttgttgaacttgtaaacattgttgggaggtgccttatatcgaggaggtattttcatgtaatcctcttcaaggaggtcctcatagagaaaggtattattaatgtctagttggtgaatatgccaattgtagattgatgcaagtgccaagaaaattttgagtgtattaaacttggcaactggagcatatgtttgagagaaatatatgccttgtctttggttgaaaccttttgtaacaccctaactatcttaggcg

SEQ ID NO: 314799 - DNA, 552 bp, Cannabis indica
gtaggatgggtatggtgtaattttatagttaaaaaaaaaaatctaaaaataatatttaaaaatctgagccaaacaccattaaattttcaaaataaaaaattattttatattctcacttttaaaaatacaattctgagaattaaaaactgaaaaacacagctaaacaagcacttagaaaaccctaactgtgtttgtttttcttaaatagagaagaagaaacaaagaggagaagtgtttagggtttgagagcttactgtgtttacccttttatattagggtttcatttcttctttgggttggactttgttgttgggttgaaccctttgtttttcttttgagtgaatttggcttactagtgggctcagtgagagttgttgggcctattttgtattgtgagttttgaaaatacctacattttttatggacgcataaggagatgaaaagtttgaaaaataccacaattttacctttatattaatcttgtgtcttgaagtgttagaaagttgcaaattttttagcaactgtcttattaaatgaatactcattataaaa

SEQ ID NO: 314800 - DNA, 1286 bp, Cannabis indica
ctagtcttctcttcatcgtgtatatatactcttatttttttgagataatgaaaacataaacttctctttctaatatggtatcaatcgcataattttttctcatcaacaatcgctaccattgctttcctccatggctagaataagagttgctgattcaaggaactcctgccaaactcccatgtcaaacaattcatcctccataccagatgctcccctaaatccttcgatcattcctccggtctctgccataactagagacattgctaatcaacagaccattgccacaacacgacctactcatgaagacaactctagtccgtacttcttaaattctggtgaacatcctagactaattttagtcactccaccactatttgacaaaaaattttaaccatggcgtcgtgattttgagcattccattggtgtgcaaaacaagattgtcttcctcaaaggtaccttaccacaaccaccagtcaacgatcctttgcataaccattggctttgctgtaagcagatggtgataccatggattcttcactccaattaaaagcagcattatgttcttggatacggctactgagatgtggaaggaactcaacttgagatatgatcaaggcaatggtccttgcatcttcgaacttagggaagcgttcataaatctacacataggcaataactctgtaagttcttatttcactaaagtcaaatgcatgtgggatgagatccaagagctttgtcccgagctttgtccactcattctatgtacttgtgttgcatatattgataatttggcgttcttgaatcaagaacaagtacttcaatttataacaggattaaatgaatcattctatcctgttagagctcaaattcatctaattgatccttttccatccctgtccaaagtcttttctttggttattcatgaagaaagacaatgaaaactcaaaagtcctcatatcccttcccttactgcttatgttcaagattcatctcaaaccttagctcttgcaaaatcccttagcatcagctgacaatgttaaccaaggacgtaataagaggatgaggccttattgttccaactgctacaaacctggtcaccttaaagaaaaatattttttcctaattggatttccaccagggtatggagataaatggaaaactgaaaaatcaaccatctacaaaacaagaggacattcagactctgatttcacttctgagtcaaaaactgttgggttttatgccctaaataaaactccattttaatgtaatccattttattcaacatc

SEQ ID NO: 314801 - DNA, 1007 bp, Cannabis indica
aagggagttatatattgatatagttgaatactgtttttaattacacccagtgtttggtaacagaccaggcaaaaaagtacctatttgagacacattttggagacccaagctaaatcaaatcaggcaaataaattaaggctctctaaagaccagtcaactgagtaattaatgtatctttttaaagaagataaattattgacagtttgttctcacaaaaaagaaattattgatagtttgtgattaaattcgtcggcttaaagttaaaataagacaatttgagacaaaaaaaaagaaaaatatcgtctctttcaaaaaaataataataatacattcataatatcattgttttaccttaaaaataatcttccatcgatgcgctgtatagtcaccaatagtattttgccatttgcgttagcctaattcagttttgtggtattaatttttgatgggatttgcttattcttttcctatcaaataagatcgatcatggacaattggacatggtgagttttatattaataataccaatatgaaaagcttacctcctttgtaaaactaaacaagtgacatatataggattgggtaaatatttaatatttgtaaaattattaattttttttattttaaatttattaaaagaatatttaaaagtatataactaatacttaggtatttctatttaaatctaataatctaaaatctagatcttagagtatctccaatagtatcattttttaagaatgctaaaaatatacacacgttagaatgctaaaaatattctaatttttagttataataatttttaacttcaattttatttaaaaaaaaaaaaagaaatatgctactacatagcatccatgcaaccacctaaaataacatcttttttctcttcaataatataatatcttaatattttacgtataatatatttacctcagcaagcaccctctaaattcttatcattagagatactcttatatattctatatttaaaataataacaaaac

SEQ ID NO: 314802 - DNA, 672 bp, Cannabis indica
tttatttttcaaattaaataataattgaaaattaattgaagttgattttttatttaaaccaactttaatttgtaatttttcattattataatatcgaataaaatgattatacaaaatacatattattttaaataatgagcttttaatcaagagacattcgatctccattgtgggttttacaccgcgtttgtttccttctattttttgccacgtgcccttcatccgaaaacatagataacaattactcccaaagcttccaggactcttgagtggtggaagcttgcagtctcctttccgattgttacagcatacttcgggacacatgggtaaactttgagaatgcggaagcttctctttagcacatgtcggttgagaggtctgaaaacctttgaggggggcagttggtcgtgctcctgtgttgcgtatcccacaaacccgtggggcatacgcgcttacagaaagcacgtttgctgcagggaaacccaactagtgacagagttatgacatgaggaccctttaatgcgcatggggccaagaaaaatgatgatgattaaatgcctagattctaccaaggagtaatgaacatggatctctttcttgaatttgcaaactattatgaaatattagtattatgtaatattataatttagagaaagaaaatagagaagagat

SEQ ID NO: 314803 - DNA, 918 bp, Cannabis indica
cataaaaatgcatttctgaattcaataaataacagtataataaattatttaaatagctataaataatttttataattaatcataattaactgctaatttccaaattaaatttaacgggctttacatatatgattatattatattatataaatcacatatacctttatactagtatgattgttattggtctaaaattcaagattttgactaactaatatattaattaagtaatattattccatgtatatatataaatgttaggagtgttattatgatatgtatatatactttattaaaagagaaaaaaggaaagtatatattaagaaagagagaataataatgagaaagaagaagaataattatagagttggttttcttgggttaataataagtatgttattaatgttaataagatgtagtagtattagtgatgataataagaataatatagtgattaatattggtgggattatagatgagagtagtcgagttgggaaggaagaaagaatagccataacaatggcagccaaggaatatagccatcattatcatcatcatcacatctcatctcttcacataacaacctctcaaagagatcccatcaaagctgccctagctggtacgtaactatatattattcatctcatgctaattaataatatataataattattatataagcttttttagtgttaattttttgtcttaattaagttgatggtggtatttaattttagtggtgtttttagctgcactacaaaaatttttatttttagtcataataaaacttataactaaaagtgaaaaagttgtcactaattataaattataatttctatgtatgttgtgactaaaatgtccgtagctaaaagtattagtcacaaaaattacaatttgttgtgactatatgtattttta

SEQ ID NO: 314804 - DNA, 980 bp, Cannabis indica
ttttcaaaatgtataaatttttaaaataatttttttttgcacatttttcgtaattattttgttaattagcaatagacgtaggatttttttttccaatcatcatttagtctaatggtatgctttaacaaactataggtcaatagaattattgttgcgacatgtattaacaaacataaatgtgtcgtgcgacacaaatttaatactcgcatgtttaatacacgattaaatatgttataatattttacaaaattaacgcgattaacataattatatataaaaaatacaacatcactcataagattcatagttttattaatttttatttataaggagaatgagaagaaaataaatttgtagggtttttttctttatatagctaggatatttttttagagattttgtttacttcgcgagacattaaaaataaactaaataatttttttttatataaatgatataattgtgctattttcgtgctaagcgtgttggttcgaaaattaaatgtgttacccaaacccttttgtctcatgtccttctcgtgttttgacgtggtgttgtgcccttgattatgagtcttaataatactcaatactactataaggcaacatttacgagtgactaacaatttttttaatagttattggaaatatgcaggaatatgccacatggtgtctagtgatgttattgaacaccattaatatcctttacgaattctcatttgaatatcactaattaggcaactattcaacataatagacatacaatgattcacccaattgatgagggagttaattataggagtgttcataaaatagtcgatccaatccaatccgcacaatccaatccgcaaagtgcggatatccgtacttgtacggattggattggattggaaaattcaaaatccgtacttgtgcagattggatgttgattgacatgtaaaagtaaccgatccaatctaattcacacatatttataacaaa

SEQ ID NO: 314805 - DNA, 651 bp, Cannabis indica
ggcataaaacccaacattttacccctctgccctacacacaacaaagaagaatcaacctttactaaggtcaaaactgaccttttatcttagtcaaaatccttgttaacttccaagaaagaaaccccaaacgacagtcttattttgaagactacaagtcgtttgaagtctcctgattttgccctaatacctcagaactaaaacaaccctttcatttacacacaacacacacacaaaaaaaaacacaaaccttagcagcctcttcatcgttcttctttgaagaacacgaagacagccccaaaccgagagaaaaaaacccagatctaaaccctcctagatcataatcgaatcccctagaaaaacacacataaatcaaataaacacaatagtaaaacagaaaagaaaaatggagagatagcaccaaatttttataaaggttccccaaaaaattgtgctgggtacttcctcttcgagctcgcctcgattccactataggatcttcaaagatcaagagtacaaagccagattccaaatcacaacaggtaagatttggtaatcttttgaattttacagtgtttatttcctctcgtttctctctctctgtaagaacactaactgtaatgaccgctttagtaatttggattagtaaaggca

SEQ ID NO: 314806 - DNA, 962 bp, Cannabis indica
aaataatcttgttgccttttaatatcagcataaaatgtgattttttaccgtaataaaaattacttagtgatttagcgcgctgcatatttttaaaattttaaattacttattaataacttttactcctaaaaaaaattactttgtagcttagtaacaactaattgaatttctttataattttattatgcgtcttatttaatgttagatgcgttaatttttttcattgggcatggtctctaatctctataataatttaaaataataatctttgatgatatatagtaccaaaaataattgaatataaattttagttacagtaattaccattaatttattttttatatattcacctgaaaatttgtatcaaaaaggacttcgaaaagattttaccaaaactttataatgcaaccaaataaaaaaaaagaattcttttaattctattcaagttaattatctctaatcaaatctcaacactttaggtgtcgtttggtaacatttttgttttctaattttttaatcacaaaatgaaagtaaaatttttatttttaaaaaatttattttgaaaacaaaaatacgttctataactatttttatttttcaattttaaaaatagaaaataaaatgtgtactgtaaagtttgtttttattttaattttttgattttatttacatcgggtctaggtttggagtcggattcaggttcaagtcagaggtcgggttcaacgctagggccatgagagaatttgggtccaagtatgatcgaagtacaaaatattaattaaaaaaaaattgtttaaaaaaataataagtgactttttttaattatttttaaaattttaattctcaattaaaatattgaaaaataaaaacagttttatagaacatgttttttaaaatatttttacttttttaattttaaaaacagaaaattaattgaaaaagtgttaccaaacgtcacttta

SEQ ID NO: 314807 - DNA, 719 bp, Cannabis indica
aaaccaagtagtagttctcgtacatatacatacatatatttacaaacacatgtaaaaaaattcacttgtttctaaaaactttatggctccactaatggaagcagtctttcactcaatttattgggaaatagtgacattaagttctgtcaaatccatcaactttaataaaattgtttttttttttaaattcttttcaaacttttaataacattgttgaatatatttatttattgaaccccaagtcacttcaatgtggagctaggtgggagaaaagaacagtattccaaaacttgtcatcaaatgattttctcatcctcattgatgatggggcaacaaagccattattttcatttgaagagagatctttaaagcaattgggattatgggagtgactgtatgtggtcatcattttgaaaagatagaaatgtgactttataattgattccacactcaaaaataaataattaaacaattttgtaataattatagagatttattgtgtgaactttttttttttggccaaaattttctccgaagctatgtaaatcgtcgcaaattgtattaggattattttttaaaataatttgtttctaatagttatatttataattacagatttttttaacaattttaatctgaaattttgtttattcacattaaatgtataaacatattttttttttttttaactaaagtgattaaaatcactcatgaattta

SEQ ID NO: 314808 - DNA, 1179 bp, Cannabis indica
ccacctttctcatattcataatcagtgacttactattataatccatttgtaactgccaaaatgcggtccaaaatctaggagaagaactcaaagcccacatccacgacccatattgacctctttgaattgaatcagtttcttcatctttaaaattttttaggggacaatccatgctttatggccaataatgcaacagtcatagcagaactcatggatatatttatatcaaaagataagggagacctctaccccatggtcatcaatagccacccttgatccatgtttaagtggtatggtaatattcatacaaactcgatccttcatcacaccattagccaatttgacatctttaacttggcctatcttactaccccattcacgagcaaaaacatcagccatacaagctagtggaacattattaattgaaacccaaaaagaggcatgatcaaaactcatctttgaaaccttgcccagactcgtcggtttaacaaagcagaacaattgcttcttaaacatctaaggaccaccatcatatacacattgacagtcttctttgctaccaaagaaatattgaaatatattttgcacccaactctttcacctggaactgatggttaatcttccaaatacccttcatagtatttttgaggccttctctatttgttggtttcaggtgaacggtctttcccaccaaacaaacttcaagctttttccgtccctcttcaagccttgcatggtgaggcttaatgacataaccatcgaattcattgagctgtagcacttctgccaatcattttgctaaatccatatccattattgcacacaccaaaactctcactcaccaatactcaccaaaccctcctcaatgccactcacaacccataacccctaattattctccctctccccagccaatcaaaccctcactgccccacaagccgccaaactccagctgcacccactagctcccctgcctccaagtgtccaagctcataccccaaaaatcccaatcgcacacctcaaatatgccaattacataaacccccaacaacctcacttgcaccaacctcaatcacagaacccccgaccaatcacagaacccttatcacaatgaccctaacacctcaatcattggcaccccctatcgtagaaatcccatttacacacacacacacacac

SEQ ID NO: 314809 - DNA, 979 bp, Cannabis indica
attatacataaaaacaaatatattatacatattatttaatttataaaaacaaaataatataacatatataatttatataaatctgaatatttaatataaaaaatttatttattacaataaatattcaaagactagtctatgaacataaattacatacaaataattaagaaaaaatttatctgcaaatatctactaaggtgaaaaatattattacaaaaagaaaaaagaaaaataatagtgtatgaagattccttgaaccgccgcgaacacaacccatgttaaagccttgaaccaccattggatccgattgtggctcgtcgacaacccatgcgccaccaaatcggagacgccttaaacaccgatccaccgccataatatcgcctcgtcgtacatccaccgccaccgagtgttttgtcgaactgtccgctccacaaccacgggtcacttgagagagagtttgcaccgaggaggtgtgacatcttctagtagctgttatatacaaaaaaaaaatgagtgtataaaagatatatagtgaaactaaagagagaagagatgaaccaaaaaaaaaagaaatgaaaagtggaagaagatatggtggaggcggctagggttttttgagagttagaagaagagaaaataatacatttatatttatatatgtaaatataataataaataaaatatataattaaggtaaagagagagagtattgggagcttgggagctgtgtacgtgtactggtcccaatattttatataatctataattttattattttaataataataaatatagaaaagtaaagcgagagaaaatttaaaagaattgagacttgtgtttttatgtgtgtgtgtgtgtagattattagaaactgggcaccaactattgtggtgccaaagtgtatcgtgccagtatggtattattcttgtagtgaaaagacacaaccattattttataaatctatagcatttgtatcttg

SEQ ID NO: 314810 - DNA, 1590 bp, Cannabis indica
tatttgaaacatacctctttttatatctattgtacccaaaataccctgatataagagagtcacatagagagtatattgaagtgacagggacaaaattggtacaatatttaaaaaaaaaaaaatgatagactttaaaaaagagggtaaaaataaaagaggataatataaaaagggtatagagtataatttcctcttaaatattagtagggtcggccttttgtaaatgggctaaagaaatttgttgagtgtctgataaatattattttggactcttgttttgccaaaattattaataggactctctattttgttaaatgataaaatagactctatattttttaaaatactacaaataggaccctgaactgattttttgtcagataaaacttaataataatctaatttaaagatgttatgacaaaactggttatctgttcgtgttaaaaattgtcttaaaattggctatattaaaaaataaaattgttaaaaattgagctcatgatcatatttttaatattttagaaaatatagggtccattttgtcatttaacaaaatagacgtccaattggttgcaaaacacaatgtccaaaatagtatttaccctttatctaaagtaaaagggattatttcacaaaagcataaaaacaacaaaaaattacaaaacttcgatttcacagaattttaaacatttttacgatttttttaattttatttacagaaaatatggtctttttatgttgtaatcttgttaatttgttgttgattttttgttatctgtatgttattttattttttttgttattttaatgttattttcatgttacttttatgtagttttcttgttgattttatgttgttttcgtgttattttttggaaaaccgtaaaatgttaaaaaaaaacacattttttgaacgtaaaaatataattattttacaaaaatagtgccttatgtaattattccaaaataaaatgtcagtattaatgggcctccttttataaaaaatttcaaaaatattatttttttaatgcaaaaaaatatactatataaaaattttatgtcctaggtttgagtgagctctaggtacgggcctagcccgccttagcccagggtcggacctgacactaatatggagtgagacttgaaaaaatgacgtccatgttagaaattttatgaatgaaatatgaaacatatataaatcgtatattaaatgcgaaattaaatggaacatatatgcactatgaaaaaatgataaattttatctcctatcgttaattctttgagttttaatctcacacgagttttgaatcagcgaaagaaaagaaaattgattagtgtgagtaattgcatgtcattagttacacatatattattatcatcactattattatattataaccaataatataacaggtagtgtaatgagcaaaacagaatagaaattcagtaagttttgttgctaaaattttagtttttgtggttaagtattaaaaacataaaattcatgtagttttgctgtcaatattccaaactaaatatcactatattggatgtaacaccctaactatctcaggcgtattacgtgatttt

SEQ ID NO: 314811 - DNA, 1887 bp, Cannabis indica
ttatgaaactttataagtattatttttgactcgaagttaatttgattagatggatgcaaaaaatttaaaccttgaggatcatgcttcttggcctgaggctattgaatcgtattttattagtctcttgtatgaagaggccaaaaaaggattgcaaactagaaccttggacaaaaaagggtggctaaaaatagaaaatgacatatttagtacatttggaaagagatacaaaatagataaattgaaatcaaaattcaatcggttgagaaaggcatatcgagaattttctcatcttttggaacaaaatggaatggaatgggattctcaaacaagtactgttacagcaagtgatgaagtttgggatgcttatctaaaggtaataaagttatgttatagttgtgttgttgattacttgtttatttgaaatgctttttacatactaatgtgtttttgattttatagaaatatccaaatgcaaagagatatcgaaaaaaagggttgcaacattatgagatgcttggagaaatattcactaacacaacagctaccggtgggatgagttgcacctccactcaacctccacctatttcagttgaggaacatgaacaagagcggcattatattgacactggagcacatgttgatgatggtattgaatgcgatggtgaaaattttggagaggaagaagaagttactggtgtacgtcgtcgagctacttctgttccacttgatgcaccaagaccaaaggagaaaaagaacaaagggactaattctatcattgaacatgtgatggaggaacttgcaaaaagtatagctgctaaaactgaggcatcacttgtacaaagtgaaagtatgggtaagtatattgatacaagggagaagataatcaatggaaaatcaagcaatatcactagttcatgtaatgtggaagactgtcaaaatattctagatggtattccgaatttagatgacagaaaatacatcaaagcattacgtgagtttgttgcgaatccagaatggcgtggaatatttatgagaatgaatgatcaacgtcgtcgtgcatatcttgattcactattggagtgatttcttaccattttctttctatgacttttctttgtcttgaactactgaacaatgttgtaatgaaggtgacttggtgtttgtttttataattgagctatcttatgtttttatttattcttttagtgtttgtgaatttatttatcaaacatttattaggtaatattaacatatggatatattctaatatatatagtaatttttttttctttcaaagaaataaataacttcatttaggcatcttccaacaatgacacaaaggttaaatacatagtctagaccaacattgtataacacaagtgtttgataatgctcctctctatgatgtggctcctgaacaaattgtaaaattgtaagttgttaaagcgatataaggttatgtggtggagcgttctctccaatatcctgtaacaaaaagaatgcatataaacaatattgattgtcttttatgtggggttggtgagaagatgataaaacacttttttttctattgcaattttgctttcaacttatggaaatttttcttgtagtgaataaccacccttaaaattgtttgttacagcagtaacaatattcaagatgcacaattaaaactaaaaccaatcacaaaatcaaaactagaatttaatttaaattaaacaaaaataaacttagctcgagaatgaatgaaatatggatctttattgattgaaatagtcagtagtacacaattggatatgtacaagattaacactcaacacaatgaacgattacaaagaaatgcctcgcattgagaaaaatcacttcaagagtgatactcccattaca

SEQ ID NO: 314812 - DNA, 2974 bp, Cannabis indica
ttgattgttgttggtaattcattactaattgctgtaaagattgtattaaattcataaggtgaattggatattgtaatacgaatcttttggatttagttgaagtgattaccctggctcgcggaacccaagcactagtcggctgagatgtgttctcagtgcagatgaagcttgtaattcattttgtgctctactgctttattctcaatccaattcttgaatacaagagttcaaattaatcaatccagtgataaaaaactcggtaataagaatcttgaaaattgacaagtagtactttcaaaacctatgggtactagttaggcatcctaatgtacaaagccgttagtcagcaaagaacaaaatcgaggtgcaagaagttagacaacaatgagtttaggctagtaattggccaagatagactcaacataagatatgccatgagagttcttaagggaaccacgtaatggataaaggcaagataagttcaaagagccatgaggagttcgtgacttgaagagtcaagaatctaaacaatctattctttttcattttgaaattatacattatacatcctaaagttatcatgtagattataatgtgaaaagactatactataatgtgagaatcaaggattttaaaaagcttgaaaaatcttgaactcatcaatggtggattaaagagaacaagtagaaaatgagatttcaagatttacccactactgaagtccgatgtggatgctcgttggaaggttggatcgtcaaaaaagaagcaaaaaccttaggaaatggagacctttggggtgtcaggtccagaggaggacttgaagagtttttcttttcttttcttgaagaaaatttgaagagagagagagagagagaagtgaagattagaagttaagcaaatgaaccttatataggttttgatacactcctccccttataacttagtgggtggttaccctttctaaaaaattgccatgtagaagatcaagagttcataagtgggaacgtttgcaacatacaataacacatataataaatccccataatgattggcaaaaaatcatttttgggcatgaagtgagttatgtgaaaggtcaaatttttgaccagccagtaccgcctcgttaataatctaacagtcagagctacagttgaaaagttcctatttgtacaaatgtttacgcatggacttaaggggaaaattttatcctaattttttaccacatgacgtgtcatatccacgtgggcaagagtggggccatgtggaatatagcgtctcaataagtacgcaaagtcaccatgcataacatataaattggcaaatgattcaaacactcaagcaggatcaaggtacaagaaaatggccaactagagggtcttgccggaccacatcctggtcggccaatgatgactatgtcccgactagctccagacaatgaggtaagattagcataaaatatatatatgtatatgtttaagtatgtaaattgtatgtagtattataagatttgtgtactaccagcagtagtacgagacgagtacgaagtacatgtggtacaatacttagtagttctcgaggtaaggttcagcgccactaacactagtacgggacgagtacttgttcatgtaatacagaggtcgtacttctgttgaaaacattctcaatgcatctgaagccttataaacaagtgtatgggtgcctagatacaagtcagtattatgttatatgttttgtccttttcttactgagcttgtcaactaatagatagtgtttacatgtgtaggttaacggaaggtgaaagctgagcatcagtgagtttagggcttgaggatgattatacatatcaagatagttagacctagagagttcggtctcgagacaacaagggcatttattttgtagttgcagagcgacatgtttataaagtgtattttgaatatgattgaaaacttttaagacgggatcaaattttaaaagtttatgtacagttgtacatttataaaattttaaagttcaattaaaattttaaatttgacagaatttttgagaaaccctttgattagaaaaggtgtacacagtaattagaaaatcattgtagcgtgtctaagaaagtaaggcattatagtggactactacagaaaatgggttgaggtgaaggctttagttagcatcacaaccaagaaagtagtatccttcatcaataaattcataatatttagatttagaatgcactacaagatcattacatataatggaacccagtttgagggagacttattaagtttcttttgtgaggagaaacggattgagaagggattctcggcagtggtgcacccccaagaaaatggccaagtggagacaaaaaacaagataatcaagaagaacctcaaaaaaacttggagaagcttaagggtagatgggtagatgagcaatcaaatgtgctttgggcatactagatgacaccatgctctactataggtgagactcctgtttccttggcatatggatgcaaggcagtacttcttatcgagatgaagctccactcgttctaagtgggaaactttgaagtaatttcaaatgaaagagctatgggggaaagtttggatctcttggaggagaaaagagatgtcgcccaaatgagattggtagtgtaccaacagagggcgacatgatactataatttaagatttcaggtacaagcctttaggaatgaggatttagtgctcaagaaggtcgtccccaatgctagagaccagagggaaggagcatttgttgggctttgtgccctaaataaaactccatttcaatataatctttatcatttaattatcaataaagagacaaaagtattttcatcacttatttagggtgtcatttggttcatgttatcatttatatgtttgtttgatttataaattcatccaaacccttatcacattgatatgcttatttattgtgtcgtcagcacagtgga

SEQ ID NO: 314813 - DNA, 4651 bp, Cannabis indica
ttaggtttgggtcctgttacagtcccaggtctgggttctcatccgagtcctggtcagattttgattttgggtcttggatcgggtctaggtacggatctgggtacaggtcctagattcaaacaatgactataggttaggtcgaagcctaaggtccagattcagatctcgatcttggatctcagtcttgtttaagttcaggtcctgtgttccgggccgagtcctaaggttgggtttgggtccgggttaggggttttttctcggtagtcagttactggtattcgggtccaaggtcgggtcctgtgtctcgagtctggggttgagttttgggtctcggtcgcagtttcagggccaagtttcagctccaagtcccccatctaggtctgcatcctttgtccaggtgcgcgtttggggcccaagtcccccatctagttcacggttcgtttctcaggtcccaggtctaagtctcgggttgcgggccccgctcacggacccagaagtagacccagacctaaacttgggaccccgaacctaggaccctaacttggactcggactcagacttggacccagaccgggatctgaaaaacccgaacccaaactcagactacgactcagacccagacccaacctggacccatacccgaacccagaaccaaacctggacccagaatcagaagtggaactgtgacaagaaccgaacccaaaccataaccctaactcagacaagaagtttgactgagaccttgactaggactgggacttcagacctgggacccgaacttggatcaggacccgcactgggacctggacctgactgtgtcctaaaccctcgcgggacgtgatatccgctacccaaactaagatccagaccctgagaaggacccgaacgttaaccaagaccaagactaggaccaagacctggacccaaaccgggacctggactaaaaacaagactcgggactcgaaccaaaacctagacccaaactaggacctaggaaccaaacttggatgggggacctaaaccagggacctaggccccataacctagacccaaatctatattcgggactcaaaccccaaccaagacctgacctggacccaggaatctgaaacccagacccagacccgaaaggtgctctggaccaaaaccaggacaagttcctggacacgaacccataccagtaccaaactcgaaccaaaaattggacctgaactcatacccagacccaaaatcagacccaaacctagacctgcacctggacccaactcgaacccagaccgggatcggaacccaagacatagacctaaaactaaacccgtactgagatcgagatcgaaacctgggactcagacccgatcctggatccaaacccaggaccgtaatccacaccgtagcccgattcagacttagaccgagatccggacccgaacacaaactcggactcggactagaaccccaacccgaactcgatctcagaattacaactagaactggaaccggactaggactaggaccacgatctggactaggacccaaacccgaacccaaacccaaagaaaacccagaccgagacccaaacccaaaccgcgactaggacccaaacccgaacctagactagacccaaacctagacgagaactggcacctggcccagaatcgagatagggacctaggcaacggaactaggaccgggacccaagacccgaccccagacccggacttgaacctagaacccagctcgtgactcggcacccgaaatggaaccagactaggacccaagatcgggatcggaatctggactcgaggcttggaccgaacccattatcagtgtttggatcctgggacccaaccccggacccccaatccagaccaggacccaaacacaaacccagacctgaacctagtcccagaccctaacctagaccagaactcataccctgtaactctaaattggaacctagaccaggttgggtccatatttatgttcgggtcctagtcccagtttcaatgctggtctaggtttgggtccgggtgtgggtttgattccaagttcgtgtccacatccatgtctaggtccgagttcagtctgggatcgcgtcgcaggttcaggttcgacccgatcccggatccggaatcggacaaggactttgattagaacccagacatgggaatgtaacaggacccaaacctaatcccaaacttagaccagaacccataccgggacttggacctagaccaggacctgtcacctaggacctacaccaagaccaggactcagaccgagaccgggacacagacctagacccaaacccaaaaactggggatggagacaggacacaagaaccagacttggacgtaggacccgaaacccagacacagactgggattgggactcaaaaccaattcgggacctggactcaaacaagaccagaacccgaacccgaacaaaaacaagaacttggacacggaccaagacctaggaccctaacatagatgggggaccagacctgcgaattgggcccacatactaggaccagaatttggtccttagaacttggatcgggagccaggacccgatcccagacccaaacctggacctaggacccatctcgagacataggatccgagaatcgatgcttggacccgacctgtagtcagtgtctagatgtaggacttagacaaaaacctgaacccaaactcgaactcaaaccaggacctggacacatactaggacccagacccacactcaggaaccaaaaccaaaacttgaactggaaccagacctcgatcttagaacgggaccgggacctggacccggacccaaacccggaaccggacccagcctcagaccctaactgagactgaaacccgaacctgaaccttgcccttgacctaaatcaggacctgaacccaaactcgggcccaaactcaacccgaacccctaacccatgacatgaaactggaactaagactagacgcagatcgtgacccaggaacaggaccacgacctggactcggacatagacccaccctgggattgggtccaaaacctaaataaaaaccagaaaaaggactcgggacccgaacccagacctgaactcagacccaaacattgaacaggacttgggccataaaactgtgatcaagaccaagaactagaccctagtctcggtcccagacctagacgcagacctagaccgggacctgggacatgaaccgaaaccagattaggactcgtgattgggatccaaatcttttcctgagatctgagaaccgggccttggactagacccatagttgatttcttgatatgggacggacaagggcccgaagctgaaccaggacatggacctagacccagacctgggacccgaaactaaaacttgaaccagaacatgaccaagatcctggaacaggaccgggaccatgaccagcacctagacctggatcggcccggaactagaccaaaacccagccctaaaactcgagctcggacctagtcccaaacccagtcccgaaccaagaaaaagactgagaatcaaacctcaacccgaacctgaacccgaactcgggactcgatctcggacccagaccgagcccttgacctaaactgggattcagacctggacatggacacgaacccagacccagacccgaataccgacccagacccacactgggatcgaaacacgagagctcgacttggacccagacgcaaacccagacccaaacatgggacccagacccaagacccgaacttggacctagactcaaacttggatccaagaaacccgtacccagactcggacccggaccccaacctggacccagaacctaactcagacccagaatcggaacttgaactgtgactaggacccggacctgagacaagaaccaacccaagcaataacccaaactcagaccacaagttggaccgagaccttgacaaggactgggacttgagaccgaggacccaaacctggactagggcccggactgggacgtggacctgacctattcctaaaccctcagcgggacctaagactcgggacccaaactgagatccagaccttaataaggacctgaacctgaacccaaaccaagattggaactcagacctggacccaaacccgtaccgggattggaataaaacaaagactcgagacccgaacctgaacctggacccagactagtatttaggaatcagacttgtatgggggacatagactagggacctaggccccaaaacccagacaaagatctaaattcgagactcgaacccgaacaaagacctgacatggaccctggaatccaatgtcggacccagacctggaccccaaacctaccccaaagcataaccaggatagtaacctagacacgaacccataccaggaccaaactaaacccagactcagattgagatcgaaacctcagactcagactcgaacgtggacccagatccaggaccctaacccacactcggagcccgatccggacctcgaccgagatttggacctgaaccttaacgcaaaccaggactcaaaccccgaccgaatatgaaccctgacccgaacacgaacccatactcgaactcagaatcgcaactggaattggaacttgactaggactaggactaggaccaggaccaggac

SEQ ID NO: 314814 - DNA, 834 bp, Cannabis indica
ttttttttttttgaagaaacttgaattccattcaaggcacaaacgtttgaggtacaattcacaggttacaaataaaattatgatctttccaataaacttcctgaactaggcctaatgcaaactttgcaagtctgtgagcctcttcattgtgctccctggaaatgtggataagtttagcattaggaatgtaagagaggaagtttctgatgtctttggtatatctgtttaacaacagatggtgagaagcctcactatagatataatccacaagcactttgcaatccgaaacaataagatctggttgtatgcttcgctggcggccctaagagagagcatgggagagtgcatgagcttccatttagtaatgccgattgagtgtctgtccaaggggtagcaactgacatcaacatatcacctttgttgttgaagagagccataccaaaacctgtcatatttgaatttatgttctgggctgcatctactgacagttttaagttaaaagtgggtggatcttcatgagtagcagcagctgaggaggaaggatggaaccccggtgtagccaaatgcgtgttgttttgttgatacagattcaagtaatcagaggttgtttgtatcacaagagcagggaccgttagtttctggtgatggagatactcattcctgcaatgccaactcttccaaagcaaacaaagaaaaaattggtaatctctatccgtgaatgatgaagcagctacatggagaatttccctgcaagttagttccatatattttaaaatgaaagaggagaattgagttaatttccataccttttggatagttgaacacctgaaaata

SEQ ID NO: 314815 - DNA, 1883 bp, Cannabis indica
ttgagatgtttggttaatccttttgaatcttttttatgcgagtgagggcactttgttattctcgcactttcaccacattgaaaaaatcttctatctttcagataagcgacttgtcggatagctaaatgctcgactctggaggtggggcctttgctgaagagctggagaagagcgacaacttcatacccacctcgatttctgaggaagaggcccctgctgcccgagctcgtcagagcttgctatctactaatgagatagataggatggtttaggaactcgctgaaacagtgacggttgaaattcacgatagcaaatctatggcgtcagctcaagagcatctcactcattcgagacatgcccctgtcatcgaagtcaaagaaatgggagaagacttcgaggttcctaatcgcgagtcggaggaggaagaaggtgttgagggtagtgagatggattcagttgacgacgctcaactgaatgaacccttttcatgcgaggatctagtctcgcgagtcaccaaatctgacctgcatcatttgcacggtagaatttggatccaatagggaccttacgtcctttagcatctcaaagacctcactttccttttaccaaccctgcgattatccccacacaagacatggtggtttcgatccctattcttcgatgtggggtaactttaccctttcatccatttgtcaaggctatcctcaaacattacgatgtctctcccttccaattaagcccgaatagctatcacataattctggagctttatgcgatgtatatggagtatgtctaaggggaaccaacgatggaggattttaactacttctatgacataaaaaatgttggccacgacaaggacttttactgttttagtaaatgggtcaattttgagattagcagggtagaaggtatggtttccaatatgggagattggaaatctaagtggttctacgcgtttaaagtactaggagttaagactgacttcaatcgtcgacctagtacgtcacatatctcaacatttagtatatattgttttaccttgcatagtcgctaatgtttgctttttattgatcgcagataggccgactcgacctgtactggattctgctcacaaggaaattgccgaagttctaggtagcttgcccgtttaagatcgcgattggcgattgttatgtactactataaaattgcgagaacacaagcttatacctgagaaagctagccttcagcgagaaccagtgtacaaggagccttctgaaaaacaaaaggaaaaaatagacaagcgtctatctaaacaaacctcaaaaccaacatcaggtagtacatcgaatatgtacaggttatttcatataataaaggtatacttatcttatggctttctcgtagaaatgacgttcctgaagcaggcccccattctcaactgaaagcctaaggttagaactgtgacaacttctcctgtcatcttgcaaaagagaaaagcgaggttattgtgactccaatggctgactcctctaagtaggtaaaaattgaagaaagggaagaaagtcatgatcgaccctgctgttagggctcgcaacttcataaccctcgacaagttcgtgagcgatgagtttgtgtccaaggtcgagggggttcttgctgttatagtgagatttctctcacctagaaactcgagaccagactcctctttaaaggacacgtgtattcagatttccaatgaaggctgaatgtccgtgagagatttctcgaagtttagacctcgctcaggataaaaatagcgagatactgtaggtgcgacttaagtcacaccgcataaccataattctcatcatgcagggtagatctaattcgcatatgtcagaacatgtgcgagtgtcccc

SEQ ID NO: 314816 - DNA, 578 bp, Cannabis indica
aaaatatatatataattcaaaaaagaaatataagtataccataagaatttatttaaatttaaaaatttactataaattgttccaataagttattcccataatattaatttaaggtggtcatatgaatgatcatacacattttattttatgttttatttggataagaatatgaattatatttatagtaattataacgttgaaaaaacgtcaacgcctaaaatggctcttgggcaagggcaatgtccatatttccatgttttgttgatttattggacaatctctttccccaaaatctattattattattaattaattaattaattaattaatgatgctgactcattgattttattttttatttttgaatgtgactgttacttatttttctatttcccaaagcaatcacacatcatcaactttcagttgtcaaaattagaaggtgtaactgtctcttctcctcttaaacttgtggctttcactctcttaggtggcgtttggttactaatggcacgtttactatacagtaatcagaatcggaataaattaatggagaaatgtaacggaataaatgaaaaata

SEQ ID NO: 314817 - DNA, 2376 bp, Cannabis indica
atatatatatatattactttgttacatgattaaaattaaaatattgctcttacatgatatatatatatatatatatataaatatttttaagagacaacgtccacaataaattattaccttagaaaaaatttttagtatattttgaattatgaccaagctacgtcgattaagaaatattgctcttgtttaatttttttttttcttttttctttttacaagaggcaaaaatgagataagaaaatacagaaaataaatttacaattaggctcaattctaaaaaaaaatatatccctctagtaattgtcatattttcaaatttcaaaatttttgattttaccaattcagaagatcaataactgtaaaaaaatcgctttctcaattctcaattctcacaaaaaataaaaacttttaacttaagattttttttcaattaaatgtgttcaaaataatcatatcacatgtttggtttgtgtaatttttattagaattactatctaagtaactaaatatagtataaactagtttaacacaatattttgtttattcacataattagccgtacaatttgactcaaattttttttaaaaagtaagaaatttctcaaacttaacgcaagaatgtactcagtacccccaactaaaatgagacagtatcctcaatgtctaaatatgtatatgataagaacatgagatgagaaccgaaaaaatagaaaatatgcagtgatagatagtgattttctaataaaaacaaatgaagaaaataaactaaaatactaaaaataaagaaagcaattgaagataagataagtagtgaaagaattcactaaccttggtaaattggatcgtgaaggagtgtttcctccacttcaggtggtgttaattctaaaaatagtttcaaccactgtccattaacttttaatacattaccagttttagaattttcaatttcaacatctctatgagaaaaaatagtacgaacattaaatgaaccagcccatgtagaacgtaacttactgagataaaaaggaatgttccaatcagaaggtcaaactaaattttgtggtttagggagtgattatgattctaattggataagaggttcaattgattcaactttagttttctattcttgcgtgttcattaatggtgtagactgtaacaaagaattcacactatcaaaagaacttttaaaattcacaccaaaatgattttcataatttttaaaagaattatctttgttcggaaagaaatcaagtgtaacagaatcaataaacttcatctcatatacatcatcacatccaacagatttattagcaacattgaaaatatccaactcaatagtcatatttccaaatgataatttaagaacacgattacgacagttgatgattgtattagatgtgactacaaataatccacccaaaatgataagaatttaagcacttatgtcttcaacaaaatgagtattaagaacaatgaaatcaataggaaaataaaatttatctacatttatcaaaatattttctatgatacctctagaaatttttacaaactgatcagctaactgaagtgtcatagatgttgactttaattctcctagaccgagttgcttataaatagaataagacaacaaatttacactagctcctaaatcaaataaagttttattaatcacatgatagcaaataatacatggaattgtgggacaccccgaatctttttatgtaacaagacttttatattgaattatagagctgacttgttctgttaaaaatacctttttcgaaatattggtgtttctttttgcaatacacagatctttcaagaatttagaataggcaggtatttgtttaatgtcatctaagaagggatagttacacttacttgtttgaatacctctaagatgtcaccatactgactacctcttttgatcaggatgaatgtttgtgggaatggagcttttggaatgaacgacaaagtttgactcgcttcttcaaccgagtctttggaatgtaaacttttaggctaactcttttcaatgtttttagtgagtctttgtttatttaagtatcaggtttatgtacgtaatcaggatttttaataatttttctaggcctaaggataggaaatgatttagcttcttcagtaggtctagatgtacttacctcgtactcactctttgaattgggaatgggttgattgggaagtttattattattatttaaattaatattaggtaatagcaattccaatacaactctaagcaaacatgtattgtatgttactaatacctactatacataaatatatataataaattttatatctcgtatttttattagttttgtactctcacaaattttattttatttttttt

SEQ ID NO: 314818 - DNA, 3059 bp, Cannabis indica
tttttttaattttttttttgaataatttataataaaaatataaaatttaaataataagttttatgagtgttttttttatatgtgtgcaattgacttttatgaacactactaattttgaaactataaattatatataattttttttgaaaagaaataagatgtttattataattacaatcactacaaaaaacagttaattttagtgacaattttttagtcacaatattttttttgtaattaaatttaacttttaataacaacaaaaagtcacttgtgactaaaacatagtatttaaacacaagttgtcactaatttagttttagtcacaataagtattgtgattaaaaacacatttagtcacaataatttgtgagtaatacttttaggcacatactttttagaatggtgatttgtaattaacaactattttacttttaactataatttttataattttattgtgactaaaaataagattttttataataaatatacaatctcacataaatatttagatataacttctctctaagtaccaaaaagaaaaattactcataaaaaataatactcctagctaagcatacaatacatgttgaaataatcataataatatatatgaacccaaagcattcccaccttgcatgatcattattaaacaataggttaataatatatcatgagagtgatggtgattttgtttttggttttgcatttgtggggttgacatgtttacatatatatggaaaagtttttgtggttgcaataaatgcacaacaaataaaataagataatggagcatgtttgttgttttatagtgaaagctatatataaatatttaatatattatatgtatatataaataaatattgtatgtaacgctaatatttaaggatatattatatgtatatatactatccaaatggaaattatctgtccgctgagttgggttcaaacccgagctttatttagagtagtattatgcggctaaggacactgttaagcttggcttaaggaagcgaatggggccggtctaactgttcagattacctcagatccgtggttccctattttggataaatgctacccttcctcgattgttcctggactggaaaatttcactgtcaactgtttatttcaaataggacagcaaaggtgggatcctgaggttgtgtgtgatctgttctctcctacagaggctgctattatcctgggtatacccatctcgcagtcaggtggggatgattcttggtattggctcgctgaaaataacggcttttactctgtccgtagtgcgtacaaactgcttcaagaccaaaaacaccattcggacattccccaggcctctcagttttggaaaagaatgtgggatttgaaagtccctccgaagaccaaggatctggtgtgccgagcggcgtcaaactgtcttgcaaccaaggccaatctttgcatcaaaaaagtcttggttgataacacttgtcccatgtgtggtgtctacgcggaaacggaagtgcatctccttgtttcatgtccgcttgcttgggcgtgttgggagttctcgggcctctctactgttggcagagagtctccttctttgctgcaatggctagaagtttcggccaacagagtagacaaggaggtcttgggcaaaattgtagtgctttgttgggcaatttggtcagcaagaaatgatttaatatggcagcagcgtgttcgttctgttcgggatgtggttgtgttcgccaactcgagtcttaatcaatttctcaaagctcaaggtagggagaatatcccttcgttgtctccacttaaagcaggcgacggttcggagcattggattaaatcggtttcaggcattaagctcaatgttgacgcagccactttcgatcgggattctaagcatggctatgggtgtgtggtgaggaacttgaatggggatttaatctctgtctttgctggctgcaacaatggcaaagtcccagccgagttagctgaaattatggggataaaggaggctttaagttggctaaagtgcaacaactacacacaggcagtcattgaatcagacagtttggtttgtgtagaggcaattcggagtgatgaattaattgcttttggtttcggttttattgttgatgagtgcaaaaacatgttcaaaagtttgtctaatgttgctttattttttgttaagcgttctgcgaattgtgccgcgtattttgttgcccgacactctatttctcttgctgaacgtatgtttcctattaacagtgttcttatggacttcatgtctattttaatgagcgattgctcgagctaatatagaacacttctattcaaaaaaaaaaacatattacgtgttttctaattattatgttaataatctttgctaataaaaaaaaattcaagtaaaaagtgtatttaataaaattttcgtgaataagaacatgaaggtgtgtgttgacgacatgctagtaaagtcaaaaagctctacgaaacatagcgagaatctaaaaaaagcatttttttcatcattcagaaatatggaatgaagttaaattctaacaaatgcacttttgaagtttttttagagaaaattttagggttcattgttagttctaaaggaatcaaagctaatacagaaaagattcaagctcttctaaacatgtctttttctcgtaagcataaagacgtccaaaatttaacaggaataattgcagcacttaacaaatttgtttttatgtcatcttataaaaatatttcgttttttaacgttttgcgtggaaataacaaatttgaatagacaacaaagtgtgaaaatgccttttagaaactgaaagaacatctatccaaagcttcaattttgtccaaacctgtggaaggggaaccattgtatttgtacctggcagtgtcagatcatgcaataaatgtcgccttagtgagagaataatgaatggtatagtttccagtatattatgtgagcaaaagattgttgagcgctgtaacgcccgtattttaataataataaactcagaaattaactttaataatttatatattaataa

SEQ ID NO: 314819 - DNA, 2374 bp, Cannabis indica
tttgatgtcaatcaatcatatatatatatatattaatgtatacatttttaatttgaagcccccactaaacgaaaaattttgggtccgtcactagagaagagaatagagaaaatgtactcattgtaatccttttggcttttctagcccaatagataataaaactaactcgtggcctaaggctctttaacaccccaaccacgtaaaaactctgagtgttctattttgatttgtttcttttgataatttttccttagttcttatattaaataattcgtttttttaaaaatcttagtaaatattttggtgctttcactgagagctgaaggaaccagtgataccatcttagattacgttcagtaattacggtactcacccaaaacaagtgtggtcttcactatattgatcctaatgctaaggcaggagatacagaagatctaactgaggtgaccagtcaccacaagaaggatcaacacagtaaagaccgaaatcctgacgatcctataatcaaagacaatgaattaggagaaaatagttctaatgatcttgaagatgatcaccaagagacacctaaagatgattaccaagacatgcctactaatggtggcaaaaatatggacaacccagacgagttagatcatgtggtcatcatggccaagaagttacaaatagctgaaaaacaatttaacttggcaaaaagaattttctttgctaatgcttaagaaaatgtcgagaatggaagctgtaatgacatcattgactgctggaagcaaaactaaacaaatagctctaacgaacaatgccaccgtgaaggttgatcctaaaaatcttggaacttatgaccctcataaggataaagggaaagaaaaagtagacgaaactttaaggaaagctcttcaaactaaacatcaaaagaaatctaaatttaccagcaaacttcaacagaaaaagaaaggaaactatgcctcaaggcaggtaaccaaactaattctagaggcagagctgcgcaaaaagataaacctgatgccaaagccaaaaagcctactgttgggaaggatgcaaatcagtacgatgattcactcaaacaaagtgacaatgttgaagaggtgcatccgttatcagatcacaacaatagagtctccccataaatgatttttggagaagattaaatcaaaaaaagaaaaagccaaacctcgcagagatgacttgagaaaccacatcaatgatcgagttcgcggaagggaatctttagctgacaaaactcaatgcctggaacataaggtcaacgagttaatgaaactcacggagaagatctctcgaaaataaaatggaattgtgtctgattcagaagaagaggacacagatccatgtgtgaaaagaatcatagacgcaccactgtcggagcactttagagtgcctcaaatgtaattgtatgaaagaagaacggaccttagggattatctatccaaatacaactgaataatgtaagttgttaaggctagtgatggtgcaaaatgtctctccctttctcttactctaacaaaatctatggaagattagtggaagaggttgtctcccgaatcagcccataattggagagatctacaagcgattcatagcagcaaaggactttgatctggaagttagctccctaaccaacatcaagcaacaattcggagaaaacctcaaaatatacatccaacatatgatggattttgcttcaaagacaaaggttactgatggtataaagatggtagttttttaacatcatgaatatccactagatctttactatgggttgagctttagagaaagagggcagatccgctatctgacttcttatctagggcctaaagatttattaacctggaagatgcttatgctcaagcttattgagtacttccaacaccatcaatatctacgttcataacgcctactgtttacggacctgatacttccatacaaccaactagacatgcaagtttctctggctttggagtggcacaaactggatatagtgttgctcccagacaaatgaagaaatgaaaaactcgagaaccaagatactcctagtatgttgtataccgaagggatatctatctctatgaattcttacatttgggtcactgataatggcggctctcccatagtgagtgggagttcaatggtgccaaggctcacaacactatccactgtgaaccaacataagttcaccatgcacgatcttagattagcttcttccaaacccatcttcttcagtgtttctttgtaaggaatattaacagagctctcgtcatcgatgagaatgttagaaatattttaccaggatctagatttactaccatgtatgttttaataacaacctaatatgaattct

SEQ ID NO: 314820 - DNA, 1311 bp, Cannabis indica
ttaattatcatgtaataaaataattcattaatacctatatatatatataaactattatatgtttttaaatcttttacaactattagtcgataaaataattaaatttaaatatattaaattaatatgaacattaaatatgaaataaatgataattaaaaaatactaaatatatatgtggaaagaaataatatattttgcatactataagactatgcttaaaattaaattaaaaacccaaaaggcaaactaaatctcgccaaagtgcattaaatgtttgcaaatttatttaataaaataaattttattaatatcatatattaaatgaaaattgaaattaatactgacatcaatcacgccaaaaaactcgttcagccatctaattcaaattttgcaattaactttagtttcaagaatttcttcgatctgagatgtctgccggctacggaggaagtcatcggaataaccgccaatataacaataaatatcgcccacccctcagccgtcaccaatattatgcttccaccatagtacctccttatcgatttgcactgatactctgttgttatgagttggaaagagcctcagcaggggaaacagaaatatgaggaacggaacaaaaggagatatagagtgattttttcgttatgaaataatattatataagaaacaattgtaaaatctaagacaaaatgtaatacaaaaaattcgaacaaatttctggaaagagaacactcaaaaagtatcactgcttaaaaaataattaaatcctaaatacataaaaacaagaaacaggtcttgtaaaaacatggttgataatacaaaaacaaactcaaacgagagagattgagagaagatagtgagatcaaataaaaggtgaaattagacttatcttgcggttactggctggaaacgataaatcatgatcggagtcaaaatcttttgttgctccgtcgaccccatactaatatcttgaaacaccctcgtttctttattcctatattgttatgtagttatacatatgtactttctggtttcggttaataggaataatcatactactcttgttgatcctcttcagttgctgcaaactgaggtggtggccatcggcagtggaaggaatattaatatcgtcggtggtgatgacgtcaggtcttctgatctggacgactgatgtaggaagtcttcttatttagtgataattatattgtaaaagtatattaaattataaaatttgataatttactagtgtttatataattttgtttattagtaattaactattttacaataatttttacttaaaaaataaat

SEQ ID NO: 314821 - DNA, 2237 bp, Cannabis indica
taactaactaaattacatatacattttctcttgatttttttcagggggcaacttccccaacatcacttataaaaagtgttgaacactcctattacccaataacaatgttctattaaatattagttttattgtcttattaattcatcactttattttcccttattttgtccttctcttacaaaaatagaggcaccatcaatgctcgatcgtatcctacaaaaagagaaacatatccaaaataaaacttaaatggatattaattttagagattcacaatattcccccctttttttttgtaacctaataataatgcaacatcatttcatagataggtgtcaccaaaaactttaagctaaattgtgtagaggatagggcctacctagaaagggggccacacctatatgaaatggagtagtgtatatatgccggcggatcactatataatatagtagtacaatacaagatatatacaaatagatagatatagattagattcatgtgccatgcaaagtcaataaagattataaataagttaggtatggtggccacattatatatctaacacacaattcatttcacttttacccttattttaatgtgcccatttcttttctcacttatctctatttaataatttcaaactattaaatactataataatcgagttggcttatcatcacttgttatcacgagaatgaaaatacataagggtggtcttgcttcgggtgtagaatgagagatgctcaaaatagaagtgaaattaggtcggtttttactaattttataaccgactaaataaataccctaaccatcgttgagaaattataaccatttgaaatcgaccgtacaatttttagcggtttttttatttttgacaatttttgtggttttatggtttaaccaattttttttttaaaaatcgaaaccgaccgttatgtcaaacaaactttagtcgaaattgaccgtcaaattcggtgatgatgtagaatcaaaaatttaattacagtgtgaagactgagtcaattcaaaaaaaaaaatgaaatataacaagtggatggtagaacccactccatatataaactattttaactctctctcccctcgacaaatcactcttagccactccttctctttctttctccccctctttctctctttctttctctcttcaaaaaaccaccaaaagaaaaatccactaacaccactgccagcgtagatcgaacgagcactttcagccaccgtctgacctcacgcatatcaggccatttgaatccccaggcactgacgacctcaacgcccaagcggcaccgtcgttagctcaggattgcaagttaaagttttgaggttcaacgcatttttcaatcacctctggtgtccatttgacgagtcgtcttcaccactagactcagctcattggctcgttgagggaacaatctacactaagttaatttgtccagctcgctacttttttaggtgacgtttttgtaactctacccctttctgatgacttttcagcgatattgtgtaccgttttgacaaataattagtatgagtgtgatctactagtcgaagtgcttattttgatatatactactcctattttcagcgacgtttccggtacacaatttctactgccactaattattgttgtgcaccgcttaggtgaggttttaaaactccaaactttaaatataatcatgttatatgtcgttggactcgattttgagtgtagaatgcaatgatgattatagccatttgatggttataggtgaaagtggtacctaaaattggattaaacaattggaactcgggacttgagagcttaggatcatctttttggacaaagtttaacggcttgggagaggtaggaactcaacttgattattggactttttttttatgtgttgaataacattggacatatttcaatttttatgatttataaaatgtctaaaattttttaaacttaatctgcatatttttctggactattttggagcagtatggccaaatatgtttttgtacaattatttatgcaaattatgatttttttttaaaaaaaaattttataatattataggcattatgtgttagttttatggtactaaatcaagtacacagcgaaagaattatatatctgatttgttagtttttatggtccatatcagagttataaaagcgaaagcagaatttgataaaaataatttttatctaatatgaaccataagcctaagaat

SEQ ID NO: 314822 - DNA, 616 bp, Cannabis indica
aaaaaaatgggggtcttgtgcaatggcccaagctgcccaatgcttgggccagccctggaaagcatgataggacatactctaataagtactcaaattttaatcacgctctataaataaactattgtgtagttttaattttatatttttaaataaatttaattgtagaattataatattaaatattatgtttaagtttattatcatttaatttaattttaactgataaatacacatttattattattattattattatcaaaattataatgtttttaacgtatcgtatttttaagttagtttattcgtatttgtgttatgatttttaagtttatcgtatcgtaccaattttatattaccgtaacatgtgatgaccaaattattttttcgtatttgatctgattgtgcttgtgcctccctaatttatttatttaagttaattgaacttatactaattttagattaatttataatatatataaatattaatatatagtttgtaacattattattttttattgttatttttaatattatgagtatgttcaattttaatatttgtaaactttatatttattttctttaaatttttaaaatttaaaggctaattaggattttt

SEQ ID NO: 314823 - DNA, 1902 bp, Cannabis indica
taaaataaaagtgtaagttcttaagagaacgtaacaaaaaagtggcatccactttcagttcggtaacaaagataaagcttggagaacacgaccaaatcatggcttttaattccagaattagagaggtctgttccaaccctctacagttctaagtaacacctctcatggctcctattaaagagggataccatcctcctccacaagggtcacaacataaactggcacacaaatcgaagatccctcatcctcaatcaaaatatcctccttgaaagggatagaaatgtccatcaactgagctctggccttccacgttgtaagtctagctgagtgcctcgaagagatcagtttttcaacttgctgagagcatacagtaatagccttagctcaattaatcctctccacttcatcgttggcgagaggttcattcgacgaaccatcaagaactcaaaatagattagcattctcaacttcatacggcagacaaagtcccattgggaaatccctaaccactcgcttcactcttctaagacgcaggcttgactttctcccaagcaaaaaggttttaaaatccaacccccaattctttataggtgtagttcgcttaatgatttcagaagacggttgaacaccaatatcaataattattttgacctgaggtcccaatggcattgagttcttggatgtattcgtcttaggtctaaaaattttttgacagagatatcttttgatcaagatgagtagagacatcttggatctttagagagctattaatttcatcacaatgaagtccattgtccaaattaagaatctgctccttagaaacagtattatcatcacatggccgatcaattaaaaatattttatttggcccaccaaccatacccaagaggtataacctttgactagccaactcctcatcttctttatccacacgacccacggctttaaataattcataatattaggcctaaaagccttactcgagtaggagcattgcttaatggcctcatccctaacaaacttatacccatagcgcaaaggactctcaggcctaaaaatatcacacaagggaataggttgagaatagtcaactacaattttgccatttgactccacacagctggcacgactacgagataaattaaacgagataatctgccatacctagtgtgattctacacggcacattcgacgagtccttgggtacccacgccttgctttcaacccagtctcaaagcttgagccatgtgtacaatacctttcagcggcctctacattcacaacttgaagcccatctgtctttgccgaagaagataacccaagcgcctcaacaccgacttagcacctcctcaccctttaccaaacttggtccaattcttctagacaaacaactctgatacattgatgaagtattgctccatgggccataaaggggaaaaggaattccatgagcatcaaggatggttaccgacagcaccagagagcaaccacttctctgatgaaccaactgatcgcacatgtaacaaaaattactaactttctcatatttaaattgtacccagcaaaaatctccattaaccattttgaaaaaacaaacacacaacaaggagttattaacctcaaagtcgacttgaactctaattactctttatatttttggtacttcaaagtattataatttaatttttttatacaataatttaaattatagttatcataaacaaatctttagctttttaaaaattctatataatttattatgttgttgaatgaatttttacaacaccaaaaataaataacaataacaataagtaaggaatatacacgagtactcaacccagaacggcgagttttcgaattaagaacaaaaatacttagcaaaaactggaaatacaatgaaca

SEQ ID NO: 314824 - DNA, 773 bp, Cannabis indica
tgagaaataaaaacttgaagtagacgtagctccattaccatcgcgacatggaatgaactactataaattttgtgtctctctaaattatatacttacattcattattcatctcaccaacctagcgagctggtattggttactttttaacatcaatattttggtacttttattgagagccacaacttgagttccccaactacaattcaatttctttattgtcaactttgttttgaaaggaatttgtaagttaaagcaagcaatcatccatgaacaagcaaagcaacactagcagtcctggtagtcaggctattacttagcaagcagcaggcactgagattccccataaggaagcaaactacgagtgagtgtccaaaacgattcaaactcaggaacgtggatctgtaagatctttgactgatatggagtggtcaccctttaggtaaacgagctacgagcaagcatctgaaatgactcaaacttaagatctcaaacctataggtccaccacacagcttgctcaaagaagaagagctttccaactttcttagctgtcccaatcgttaaattccgagaggggtcctgaatgacacaacaagattcaaaaaaacaacaacaagttagtgttattttctaaaaaaatcattcactgaaaaataaattgaatctaaattcaggaataaagagaatatttttcagcctaatatctttgttaagctgaaccacaccagaggcggtgactttaatttgttggccattaggcaaagtgactaaaga

SEQ ID NO: 314825 - DNA, 1044 bp, Cannabis indica
gtaaaattcatgcaaacataaatcacttcaaatttcttatattgataactaatcaaattgtaatgggttttatttagggcacaaaacccaacagatagttcgtctatatggggctccgatgttgatggtatcttacataaattctatgttcacttccatatttttagagagcctccaaaaggccatgggtacaaagctaaagttcagtataaatttccaccctcggatagatggtcagtctgagaggaccaattaaatactgaaggatatgttacgagcatgtgtgataaactttgaggattcatggagtaagtatttcatattgatagaaatctcctataacaatagttatcaagttacaatagagatagtttcttatgagatgttgtatggtaggaagtgacgttcttcgattcactgggatgatactagagaaataaagtgcattggtcaagaatcagttcagaggaccagtgatgctataggaaagatcaagacttggatgtttgcttcccaaagtaggtagaaaagttataaaaatccaaagtgtagagatatagaatttcaggtaggagattatgttttcctacgagtttcacctttgaagggtgtaaagcacttcagtaagaagggtaaggtgagcccttgttttacaagatcattcaagattctcgaagaggttggtcatgtagcatattgtctagttctacatctaggattatcaacagtccatgaggttttcatgtatcaatgttgagaatatacttatcaaatccaacccatgtcctgagttatgaagccttagagttgcagttagacttatcctataacgaacaaccagttcaatcctcgataaaatcgataaggttctcaagaacaagaccttagctttggtcaaggtactttagagagacagcaaggtggaggaagccacctaagaattagagtcaaagacgaaatcattttaacgtgggataattgtaatgaccgtaagattagacatgaaattttttgtttcacattggggacaatgtgaaattttaa

SEQ ID NO: 314826 - DNA, 783 bp, Cannabis indica
gatttctctcttcgcacctctctctctctctcgccctcatttctctctcgcaccctctctctctcgccctcatttctctcttgcacacccttttccttctcgtcatggcatccaacgtgcatgctccaactcgcacggttatgtctcgtcaacccctgtttgcagatcatcacggggtcggtcttcgtggtgcttaaatacatcccgaaaatcataagtgccgatttttggtgttaacaactaatcttgagggttatttgggattaacacttgccccctaatctgtgttcttgtagactaaatttgtgagctttactcccatcttttagttctgtggctgcctcgttaggaaattattctttaaggtctttctgtcatgatcccttgtgggggagcactgattatattccttttcatggtcaatgtttgtcacatggagagagtgttagcctcttgatctttctcgacctcttgtgtgagctattattttgtttgagggagctctttgtcgcttgggctttctcaatctctttctggtgtaatcttactttgaaggagtatagactctttgagcagtctcgacttcttattggttacttatcggatataagggagcttatggcccttaagctgcgcataactttttttaagttttaagattttattgagggagtttgtggtccttaggcgacgcttgacctcttacattgtattgtggtacttaaagtgcgtttttgttgtgctaaaaattgaatatacgcaagtgcacgtagtcacaaacaa

SEQ ID NO: 314827 - DNA, 537 bp, Cannabis indica
gactaatggtggtcatgtcagttttcattttttaaaatttattaattttttattacaaaaacttcaccgattaccaatttttttcatcctaaatactcatatattaacctcagtcctaagatcaaataactaatccatctaatggtcagggtacatcacagaataaattcccttaaatacattaacgggataaaatcgtgtccctatatattaattcttcacctttattttttctatgtgaaataatagctacacttggtattagattctgagaaaaaaaatatgtggttgtgatttcttcccattatgagtgaattttcacgtgaatttctcaaatttatattttcaaaatagttagttaaatattacatttattattttaagagcgtggaaaaatattgttctttctttgagtttagaaaatatttatagtagatataatgacatgtttacttaaaggaatgagaatgaatggtatggttatgattcccatacaattgtttactaaattttggaaagagagaaactagtgggacc

SEQ ID NO: 314828 - DNA, 1958 bp, Cannabis indica
acaaaaagggcctttatctttgggtttttcgctggtctatgttcggttaaaataaatcacacttactgaagagtattaaggcaaagtcgtaactcctgaaaataagacatacgggggacctatgtcttcagttatttcataataactaaagatgtatgtattttttatatcataattttaaaattaataatgttcaacacagtgataattgttgaaattttaaagcataatagggtggtcattcttaggaattaaagaatgcatttataaactgtgatacaacaggcaatcggcctaaaatcaacagctttagtagggtggtcattcttaggaattaaagaaattgtagcatcatggaattcatgaggcatattacccgatctgaagaaacctgaaatagcgtcgcaaatttatgctccaatgtctttccaagcagctctaaaaaaaccagaaccatacccatgcatcgggcccaggcgacttcgttttcgggatactaaaaaacgctctcttgatttctttcctcgtataaaggtttgatgagaagatgaacttgctactctaagtttagacgatgtccctgatcaatacactccttgttcaacttcaaattagtgatacttttgctgcccatgtacccacggaagtgttccatgaaatgattaaccacatcaaggaactcttcaataacattacaacaaattgtgatttttgtgactaatacttttagccacagaccttttaatcataatattggaatgataatttataattagttacaattttttttttactttagttacaagttttgttgtcactaaaaataattattttttgtaatactaatttagttaattatgagatcaaagtcgcgaacaaaaggatactcatataacataatcatatccttcacatttagccccaatatttatttattcatttcaaatcaacaaaaaggagtctttcactctagtttttatggacttgcaattttggttttcgttgacatgatatgaactatagtaaacctaagtgaagttaaaagttttttaaaaaaacaaagtaaaagagtctttttacttatgtggaagaaccgaagtccctctttactttgtcttttataactggaataaatataaaacgaagtaaaaacctcttgttcttataatacaattatatcagataatcgaaccaactgtcatgagaaatatttttacatatttttattattttttttttggtaagattattgcattattcattaagttagtcaaatttttcaactcagttacaaagacttaaaacttgatattacccattttcccattttctagctctggactagtcacttctgatcaacttttacattagtgtgttccccatcttaattggcaagatgatctaagaataatactgttgccacttaaaagtatcgtcctcttaaagcaagacaaaaacacatagatccaacttagagcaaaagctattcgataaagaacctaataatcatcattattatttctcgttgaaaatttaatatgataccagaagaggaaaaattaaaatatcacaacgtggcatccgagtgtccagaataatattttgaaggatactgcatatgtgataaccatatggtccatatgttagctaaattgactacatgaaaagatagatacaaagtttcattttctataccctaatggcgataggacttcataattcataccattaatgtctttgaagaaataaataaggatcaagtcatgagataataaaagagtgaacaaagagaccaaaaaaccacttatatatctattccatgtaacaaaatttttgggattattaaattatattttatgttatattgttatgtaaaattatatgttgtattgactttatataggcagataaatatataatattttagtataaataaaaatttaatataatattatata

SEQ ID NO: 314829 - DNA, 1526 bp, Cannabis indica
aattaaatttttattatgaatttttatttatttaaaataattaactttaataaaaaaaagttagaaaaaatgagaacatacaagagtaggtatatatattttgttggttttaattaaattcaaaatagaataataaatttatggttttaataatataatattatatatatataaataatatcagtccaaatatcaaatatcagtttaaatgggatttattttatttttattttattattttattatatataaataatattttattattttattaaatataaataaaaagtcaccccatgaatttctcataaaccaagaattcagttatataggcacactttatatagaatagatattcacatttatatttgttttttttttttgtaattttctattaatttagacatgcagataggagattaatatatattgttctgtaaatatcgaagaatctttttttaattatggttttattgtttactttattctatatattgttctatagttttcatttttttttaaaaaaaatccttcgtagaaaaagggaaaataataaacactctatgcgatcaaacaccaatttttcttcaatgaagaatgcaccaattttgcctagagaacatacgaaggaaagaattttccaaatatttttatacaggattatgtattatctaaaagcaaaatatgaattacacaaataatcaaattacaaaagttcaaaaatgtaaaggcaattttttcctctaaattttgacaaataataaatcatgttctttaaactttttagtttgaaatattgagattgttagatttaaggattttttatctaatttcattcaataattcaaggaaaatttttagcggtcttaagagttaagggggtatgatattgtacttgtcaaagttcgagagacaaaaatcttaattggccaaatataaataatcttatcaatgttttgaatccataattagaatgttaattatagcaaatgactctacatcacaacactatgtaagtaaacgtccttattttaaaacttgtagagaaatgactattttatactatttattatttatattattttttgggaacataaaaaaatcaataattttttttttatatattttttagtaattagaaacaaattacctaaagattatggtatatttatattagttttgtaaaaataatttttattttaaagttatgtcaatttttctaatttttatgagttgttgtgggttgttgtatatatagattttgttgtacattatatttctgttttgttgtataatatattattattcttagatgatatttattttttattttgctatgtataatagtggtataattttgttagcataataaaaatattttaaatgcatgtatataatttttattggcatgctacatatatttaattatattttttatatattttaattgtatgatatattatttattgtaaaataatatctaattaatttctattttattatatacaacggtggtatataatttt

SEQ ID NO: 314830 - DNA, 1294 bp, Cannabis indica
gtggagtgtaagaatggataaatgaaaaatttcaaaaaaaaaaaaataaagaaaggagttatgaggtggcgtgcgtgtatgtgtgtaaggaagaagggaaaaggtaaaattgtaattattaaactttttgaaaagtaaaattgaaaaatgtaaaagttaaaaaagtttaaaaaaccgtgtatggataaaaatgtaaaaaaggtgtcaattttgacatgaggtgtaaaaatctctatatctaattaatgcccaaacattcaattatataaagtctaattttatttcatgctaaatatattaattaaatgataaaaatggttctccactagtcaaaagggcgtatttgagtcctttttcatttaaaaaaataataataaaatttattgtactaaataaatcaattccatataaataagaacttaagaaacaaaaagcaataataagaaaccaacgttttggaagaaaaaaataaattaaaacaaaaagcaataataagaaaccaacgttttggaaaaaaataaataaattattatatataaacaaactaataataatattctatgaaaatggatagttttattattattttatttggttcaatgatataaaaacgactgcaaaatatactaaactaaataaatcaaatatccatatataaattaatcattaaaaacataacaaaataatatatatatagatatatatatataatagagagagaatttgaattctctctctataatatatatatatatatatataggcaatattaaagacaggtcacatttatttatttaaaataataattacaaaaaaaaattaaagaagggtcacattgaaattaacaagaacttctgccacattattgttatatgttaccaatacaaatcctcatttaatacaacaaagacaaaatgaaaagacactaccgtgtgattggttaattaattatgatatgaagtctaattagtattttttataatctttagagtaatttgcggtataaatacctgagttttataccgagtagcagataaatactaaagttgtaattttggcggtaaaaataccttccgttacactcttggaacttccgtaggtacctctctgttatgtgccaggttagtgtctacgtgtcactcgttcattgatccatctcattaatttttttttatttattatttaaaagtttaaaaatgattttaaaaatataaaaaataaacaaaaataaatataatcaatttatttttatcattaaatcttatatatttaaaaattaaataaaacttatttt

SEQ ID NO: 314831 - DNA, 941 bp, Cannabis indica
tttttttttaaaaaaaaagtctatttttgtttcaagaatatgtatattataattatttagaaccacttattaaatttttatttttttaactaatttataattttaaaaataattttcaaatattttattacaaaagtgacataatctaaatcaaatttttcacatgaaattttcttgtagccttctttgtataacaagaaattaaatattaaaattttaaaatttttcttttacacgtggtaagtaaatcttttaatcttatttttatcactgtaaactatttaaatttttttaaaaatttacaagcgatcctaataactacaacatacagaattatgaagaaaaaaaattacaaaattttcttgaatatcaaaatagataagaagtctaccaaaagacccatttaaggggtggatgcattacaatttttttttgaaattattcagcaacacttattataaattcattattgattatgttaacatcatttactttattttttatttttatgccacatactgaaatttctcacttttttttattttttattgtggggtagaattttttaaaaaaacacaatgttagccacattttagtaaacattctattattttagttttaacttcgtaaaaaatttatattagttggagaggtttaaaagttagccacatttcatggactttattgggaaaagagtaatgatatgtgtaaatataaatcacacctaaagaatgtgacacacttttatgtagcaaattagttgggtctattgggaaaaaggctgaattaagatgtcttttgtaaagttaaagagaaatgttaaagggcaccagtggtgcctagcaccttcctatgtgttaatatcgctattggtacagctaagtatcgggtcccatataatttaatataatagtttttagggagtatcgctagccaatcgc

SEQ ID NO: 314832 - DNA, 811 bp, Cannabis indica
gaagtcatccatctttttcagcaaaaacactcccctgacattcgagtgagtatttgttctttaatgggaatgtctgaagctggtgatgatggcttttatttgggactgcctaatattatgaaacataataaaaatgctgtgttggggctttctcaaggataaaaatgcggaagagagttgagagttgggatagcaaatttctgtctcgtgcagggaaagaggtccttatcaaatatgttgctcaatctctccctaactatgctatgagtgtgttcttaattcctaaaggcatttgtgaggattcggaacaaatgatgtgtaaattctggtggaaagcttcttctaaacagaaatctggtattcattggatgaattgggaccgaatgtgcgcatctaaggatcggggaggtatagggtttcggcatttgcatgactttaatattgctcttcttggaaagcaagcttggaggcttcatactcgaacaaactctcttgttggcaagctcttcaaagctaaatatttcccacggggctcctttgtgaatgcgactttgggtaataatcctagctttgtttggaggagtattctggaagctaaggatttaattatcaaaggtgggagaatactggtaggttcaggtgagactatctctattactagagacccgtggttgccagatatggagaatcctttcatcacttctttccatccttccttttgtgacaaagatgttaagtgtttattgactatggatggtaagaattgggattatgagattatcaatgacttgttcaatgatagagacaagga

SEQ ID NO: 314833 - DNA, 2851 bp, Cannabis indica
aataatttccaacaataacatcccacaacacaagcttaattcagcataatttagcataaccaaacctctgaaaacaatactaagtaactacagcaatcacagcagcagaaacactatctcatgcaaaatttcaaacttaaaactcaatgaacaaaaaagaaagttgcaaagaggtttaccttggcttgtgttatagtgagatttttctaacctagaaactcgagagcggactcctgtttaaaggacacgtgtactcaatttccccaaggaaagctgagatgtcgatgagagactcctcgaggttaaacctcacctgagctaaactcagtgggatgatgcgaatatgaccaagtctgatcgcattcgcgaggctcacattatgtgggaccaaggaatggactcaactcgcatataccacgatatatgggagtatcctttcaatcctcccacaaaaacatagagatcgattctctctaaagcgagttggtctcgacgacccaacaacctcgataaaccaatatagactcgcatgtctaggttctatcagctcgttatacgatgtctgtaagtgcgactatacaagaacgcagacatcctagagttaactaaaagttaggtgtatcctaaggccgcgagcttacaccagaatatgaacagccaactcgcacattagaagtcgtatgcgttgctgtatttagtgagtaaagactgttcttcatttattaatgtttatgttttagcttaattattgtaaatcaatgtatgaacggattgacaattaatgcaatccttgtaaatgatcagacacttgctttgtatataaaggagtgatccaccgtgaaatggagacctacgaaatccttgcaacagtggactaagcagaccgtgatctgactaaacaactatattcccttgtgttctttgtatttccagtttttattaagtattcgtgttcctactttgagtactcgacgttctaggttgaatactcgcacttgttcaccatattattcttattcttattcttattattattatttatttttggtgttccgaaattccatcgacaacatttggcgccgtctgtgggaaacgagaagtactgtcttgctaatttaagagagaggatcataatggctagaaacaaagcaaacgtgggtcttaacaacgaatgcatcaacatcggaatgatgaacgttccactgacgggaagcagagtacctcccgtagatgtcattaacggcggagtaggtcggggtaacgtgagacctgtcaacttattccctgaaactactggccctcaccctggtgaaacgtctacatcggcggccacaacgggacattttccaccttttactccagcggtggtatccgaaggtattgtccaactgaccaccgaccagtatactgcaatccaggaccagctatgtgctctgcaggctgaagttgatggacaaatcagggctcgacatcctcctcgagtaccggcaactcgcacgaaaaaccctcaggtaactaactctagacgccgtaataaccgtacttgtagggaacgaaaggccaatccagagggaatcgatttgaaccaatcaatgttgagggatcaatccgcgagataccccaatcaggaggcacagactgaagaagaccctgaacgacgtaatcctcgcaacaggcctcagttgcgagacaacgatgtcaaatccgcctcctcgtcctcgcatggtcgcacacccagcaggtacactagatcaggttcggtggaaacaccgcaaggaggacgatatcaagttcacaggggggatctacgcaatcaccttaacgttgtcttcagggcgcgctcccagatgcctcgcgatttcgaagagccccgtgatccccgaatgggcgatcaaggcgtaaatagtcgcgtcaatccgccttccgcaccagctgcgactataggggtcaatatccaagcaaacatagtcgccgtagtaacaacgcttgcggcaacaccagtcactgctcccttagctgggaatattgaccaaggtatgcttttgcaggccttaaaaatgctcgagtagcagagaaagcccatatacaagctggatgggacttctcctttcaccgtagaagtgcgacaagctcgacttcccaaggggttgcggttatccgaatccctaaaatatagaggtacctctaatcccatagactatttagaaaaatttaatactattatggaagtggatcaggtgccccaactcgcaaaatgtcgcattcttgcggcaactttggaagagaatgcccacgattggttcagccaattgcccgaggcatccatctcgacatgggagacctttgtcgacctgttcgtcatgcatttccaagccacgatgacttataggccaccctataccactctggctaacatcaaacaagaacccggtgagtctttacaagactattttaaacgctttaatgctgaggtaacataagtagagaaggctcctgagtcttcgctagtatgtatgttaataacaggtgtcctgccaagaaccgatttctggaaggaactgcaagctcgaagacctgaatcgctcgtcgagttctttgccatggcagagccgcataagaggattgagaattctctggctgagttagagaagggcaaagataagcgtaagtcaccagtgccgcgatcacgatcccacaatcctagagggaagaattccagaggacgaagcccaagaagacgcagtccacagagacagcgaagtctgaaattagccaagtcccctcccaagaaggaatcctccccaaaaaggaaaggtggtccgcactttgtgaactataccgagttggcagt

SEQ ID NO: 314834 - DNA, 1963 bp, Cannabis indica
ttgttctgccatgcttctaactcttcggccttagctatctagtgtgttctacatatctacaaccgtgcatccggtcagctacttaacactcaaaagtcggttatgtctttctcaccaaacacaccaactgcaactcaataatttttcaagatacattgaacatgcctattagcgaatttcatgaaagatatcttgggctacccgcatattctggaagagataaaacagaattgttcagtaccattaaagagcggatatggaaatcgcttaatgcttggaaggaaaagttgttttcaattggagggaaataggtccttttgaaggcggtggttcaatctagacccacatatgctatgagctgcttcagattaccacaaaagtttttatcaccaaattgagtcaatgatggctaatttttggtggggttcaaataaaaatggtaacaaaatacattggaaaagttggaatttgttgtgcaaatcaaattttaaaggtggtatgggtttccgttctttcgtacattttaatcaagcattattggctaaacaagcatggcgaatctttgaaatgcaaaactctcttcttagccgtttgcttaaatacagatacttctccaacacttcttttttggaatcaaacattggtcattccccttctcttacttggcaaggaatctgttggggccgagaattgttgctcaaaggccttcgatataaagttgagaatggtatgcaaattaatgctaggaaagcaccatgataccttgccatgttgatcacaaactagtctcttattcgggtccccccaacctgccagtttcatatttcataaaagagacgagagaatggaacttgactttgttggaagctcacttcaaggagattgatattgaaataatcctctcgattcctctaagctttttttttttttgcaggtgttgatagccttatatggcaccatacaactgctggtgtatacacggttaaaagtggtttccactttggtactgatcttgaagatgttgataaggaatcttcatcgacctcccacaaagattggtggaaattattttggaatctcaaactaccttctaagatcaaaatttttgcgtggcgtgtaattcaaaattgtcttccggtggctgctgcactttttaagaaaaaggtactcacttctgcagcgtgctctttatgttcacaagcctgggaatcgattggtcatgctttgttccaatgcaaccatgccaaagctgtctggaggcacttcaatttcccaattgattttagcaaagcacgaaatatggttggtggagattatatttttcatcttacaacattactaagccagcaagaattggaattgttatttgtcatcatgtgggttatttggactgaaccaaaaaaaaattaatcatggtgaatcaaggcatgatggtttggttttagctaattatgctacaaactacatgggaaattatcaaaagacaaaaaaccatcccactgctgttagtgaaccgaccgttccagcaccaactacaactctaccgactgaaggaattccttggaaactacgtaatatgtttggattgaagtttaatgtcgatgctgcggttaatcctatttctaaggttttgggagttggtgcaatcgtcaagaaccataagggtgaagtcattgtggctatgtcgaaacctgtctaaggttgcttcatatcagatgaaatagaggcaaaaactctcttccatgcacttaattggatatctcaactggcattgccggttactcttgtggaagctgatgctcttcgtgtctccaattttttaaatcatgaaatttgggatttatcttgtttttcaaatttaatctttgatgttcattgtcttctatcctctttccctagtattgttatctctcatgttaagagatctgctaaccaagctgctcatgggttagccaaacatgct

SEQ ID NO: 314835 - DNA, 1328 bp, Cannabis indica
aaataatatattatttttattaaaatagtgcaaagagtaaaaatggaaaatatatatatatattactgcatttttataaattttttttttaatttttgatctattatttaaattttttaaaaaaatttacttcttatgaataacgtaattattgtgcctgattgaattatatatgttgttaattactataattaattatgattaggtcactagttaaaacattcttttttggctaagcttttaagttttttttttcataggattaaaaaatgttcatctagaagtatataaaaaaataatttttctttattattttttaatttaaaattgtgccattttttagcatatattttttataattagaataatttacaagattttttttaaaaaaaaataataaaaattgtatttaaacataaaatatatatcaaaactttttattattttatatttttaactacataaggccggaaattgaaacttagtcaaacatacatattatacgtgtataaataattaggtggaaggtataatctaaaggacggaatttatatataatggtgacaatatttatttgtttgtttagaatgattatgattatatatatatattggatcttacttggaaacctttgtacttaatcatttctttgatgcgatcaacaatgaagacatcaccatcttcatcaatgtagccaatgtcaccggtgtggagccaaccctccttgtcaatggctcgggcagtctcttctttgttgttgtagtaacctacgtaacataaatttgtaacaaataaaacccatatatatataagaaatgaaatgataatgggatatatcatatcatatatagggtacgtatataccttgcattacacattggcttctgacacataattcgcctggggtgtttttggggagagaacgagcagtatcagggtcaagaaatttgacttccaaatttggaaggatgaaacccactgagttcttcttcgctcggctatacccattggcaggatcgtccccgtgggtcagagtgatgcagctatgttctgtcagcccatatgcctgccaaaatcataataataataataataataataataataatatattgaaaatgtagtatagaataattgattttaaaatacatgtcacaacaacattgtttgttgtagctaacactactcataaaataaagaatatttgttaatggacaccaataccaacacggcaacacaccaccttttatcactaccttacatgatgtagaattttagtatttagtgctacgggtgttcacggtgcgggtggtgcggtttttaactat

SEQ ID NO: 314836 - DNA, 868 bp, Cannabis indica
tatatataaataaataaataaataaataataagtactgttttgtttcttcttatccttgttggaaaggtatagtgttattgcattttgggaccaagtaaaagaaagaaagtatggggtaggttttataatttatgtataatacgtaaggctgatttctgatttctatttattctttcatatatattttttttctttcttttaatttcttaataaagaaaattaattattagtacgatcaagtccttttctgttgcttttatgggaaaaaagtaggatgcaagctgtaataagctgctcctatatacatagatagactattattttttattatatatttatgtatatatattacacaaattattatatattttcttatgacaaattaagagaatattgaggtggagtggcaatttttagtgttgtatttgtggtagttcacgtgtcgactgcacttattttatcagaatacacgttgatcaataaagttaaggctaattaatttttctcctaaaattttgatatgtattaaattatattctttgaacctttaaggtcgttaaaaattttccttttaactattgagattgttaaatttaagaacttttatctaattttagtaaaaaaattcgaacatggataaaaattaaaggggcatgatttagtagatatcaaaatttggggaggaaggttttgtacataaacaatcactaaaacagtaaaattgaataaaattagacaaaaatcctaaaatctaacaatctcaataattcagagggaattttaatgatcaaaatagttcaggatatgatttgttacatgtcaaagttcgaggagaaaaatttatatatatatataaatttataatta

SEQ ID NO: 314837 - DNA, 575 bp, Cannabis indica
tgtataaaaatcaaaacataagggggtttcgccgcaaattgctctatttttaaaggataatatttttttgggtttctgggccgagtgggcttgaggcgcgagcctaatccagcttagcttaggtccaactctaaatgtatacatgtatatgagtattgttataaagtactaaaagtgttaggcaccacttaaaggtagtgccttgtgattggctagtaatacttcataaaacatattacattaaattatatagtacatgatacttaattgtatcaatcacgttatgacacattagtgagtgctaggtaccactagggccttttaatatttctctcttctaaggagtgctaattacaacatcctatcacaacctcttagttaattttcgcacccaaaatcacatgcaggaatatttttttcatacaagtatttgttgtagctataatatcatccttataaattttaaaaattttcgaatagtttacagtaccgaaaatagaatttttgatattcaagtttacaatgcatgtttgaaaaacctcaaacctatttttaatactgtaaactattcgaaa

SEQ ID NO: 314838 - DNA, 1124 bp, Cannabis indica
gtttatttcattgttttataattcatattaggatgttaatgaaacatacatagtagtaaatctagatcctggtaaaagatttccaacactttttgttccgaatttccattataatttgctctctatttcagctgttataaaagaccataaatacaatattttgttcactcatgatggttgttttttttttcaggacatagctcagaacactcggattgggactactaattctgtgttcaataatcatactttaattcaaatgtcatttctaattcttgtactgctgtccaaaaacggcatttacgcctaggacacgcctctgtttgaattacaaaatcattgaatcaaacactacatttatttatttcagattcctttatttctccttgtcatgtttgtcacttagctaagcaagagaaactcccttttaattcagctaacaatatggcacatgccccatttgatttaatacatttagacatatggggaccttttcacactattagcattgagggttataaatattttctcattattattgatgatcataccaggtttacttgggtgtatatgctcaaaagcaaggtcaatgctcaaactattatcccacaattttttaccctcatattgaatcaattttctacctccatcaaaggtatccgatgtgatcatgccaaggagctccacctccaatcttttttttttttcacttaaaggtatattaccctatcactcatgtgtagagagacctcaacagaactttgtggttaagtgtaagcaccaacacattttaaacattgcaagagcacttgctattcaatctcgtttgtcactaacttattggagttattttgtccatacaacagtatatctaatgaatcgaataccttctattttactacatttaaaatcttcttttgagttgttatataataggttgccctcttatgatcatctatgggtgttcggttgtcttgcctatgcttacaccttagataacacttgagataagtttagcccccaatctcgggcttgtgtgttcattggataccccgcaggtatgaaagcttatacattacttgatcttgagtctcacaagatttttcaatctcgtgatgttattt

SEQ ID NO: 314839 - DNA, 1207 bp, Cannabis indica
aaaaaaaaaagtgaaaatatgtgttgtgacgatgaagaactaaactttagttaaaaaatcaaatgcaaagaaccgagaatgaaaggcttaagaaaaattaagaacatttagtcatcaatagagtcaaaaataattgtatggcatagtagagctctcttacaagtaataattttcccagagaaatgtatttatagggagctctaatggctcttaaatataaatggtgtcaaaagtttagggacaaaatttattttgtaccatgaagaagcaaagcgtaagatggatagtggaaaggtggtggtcgggtatcaattagtactttgagagacaaataattgtcaccactacttgtacttgtcatacaaccacttattcctcaaaagcgtgcatgctttaacaactttattctttgttgtatgttgtcttggcatccctttctatgtagcttacactcatgatgctagtataacacttaaaatattaaactaagtgtttggtctatgggggtgtccttgtctgggtgtggagcatgggggagtgagtgaaagtggatgatgggctgatagaatagggagatagagagttagatcgagaacatgagagagcggggaacggggagctcccgttggtgcaaggagttgtggatacaggggagctgttggcgcgtggggagcttgctggcgcgggaagcatgcccgcaactggctgctccttgtgacgggggctcctcgtgcaggacgttctcattggggcagatccatatttaattttcttacacttataaagtgcattttaagatttcttacatttaatcttcagatctccaaaaattacacttggtaaattttgagagctaacaacctgtaaaaaaaatctgtaaaaatgtgaaaaaaaaaatcatttttagatgtattgtcaggaccgatcctgaaaatatatgggcctaagacgaattagatttttgggccttcactctcaaaaatatatataaaaaaaagaattattgaaaatgagtgatatgggattcaaacccatgacattgtataatatgtcatacactccaaccaactaagttatgaaaatttattgtttacaatacattgaatttttgttaaataaaatcctaattaaactttggctacttagtaatttttcccccgaactttgacatgtactaaattgtggcccttgaacttttttggctgtt

SEQ ID NO: 314840 - DNA, 1294 bp, Cannabis indica
ttttttacggcaagatttttttttctcttctataagctttcatgaaagaccatcaaagatcaaccacttgaggctagctcaagtggccataagtgggtgtgtgttggaggtcctgggttcgagtctcaagtaaaacatatttgtaatatatataaacgcttaaatatatataataaaaaaaaaaaaaaaaaaaacccatcaaagatcattaaagacataatcagagacaatcattgtcgatctctacatattttcttttttcttctctaagtttccatctaaaaacataagacataattggagactaccattgcccatctttatctccatttaaatctatatctttacccaaattaaaaataaattatgcaaccctaaattctcatctaaacccacttcgcaatattctcaaaatcgaaacccaatttgtagaaatcactacttacaattgaagcccaaatcacaactttgctaatattgagtctctatcattgcaactcatttcatgacttcttctttccctttttaaggaaaatctttttttttccttttttttttccaattttcttgccaaaatcaaaccaatcttcttctctcattctcaccatttcttctatcattcatctttgcaaccttaaattgcaacctgaatcacaaatcaagtcgcaactctataatcgtaattcaagatgcagcctaaaagatatagataatgcttacaccaaactgtaaccttagtcgcaacctaagtcgtaattcaaattgcaatccaactcaatttgtaattgaaatcgcaatttcagtttcaactcaaatcacaattcgaatcgtaataaagttgcaatataaaatcgcaatcaagtcataacttgagcaactcaaattgcaatacaaattgcaacccaagctataatccaaatcataactcaaaagagatagattttgtgattgtggaaggttattagcttcaataataattgtcaaagccataagtcgagaaacttggaaccatattttttttcttttattttaatttatttaaactgtgtaaaaatagtactgtaaatagtactgtttctaattttgaaaaaaaaaatatgcaaacatacatatgtatatatttataccatataaatggttgagtttattagtagattattaaatttttaactaaaaccgtattaagaaagaaagcactaaactgaactattttttcaaaatacctaaacaaataaaaaaatgtaccaagttatttaaaggtgtacaataattttttagtgtactaaattaccaa

SEQ ID NO: 314841 - DNA, 1861 bp, Cannabis indica
gacactgaaattgatgccagaaaaaaccacacttggattgtggttagcctacctattgaacaacatgtaattattggttgtaagtggatttacaagatcaagtacaatgcagatggctcagcagagagattcaaagctaggcttgtggctaaagggtaaaactaacttgaaggtattgatcactcaaacacatttgctccagttacaaaattggtttctgtcaaacttatcttggccttagctgttgttcatggttggtttctatagcaacttgatgtgaataatgcattccttcatgggaaccttcatgaggatgtttatatgtatgactctacctccagggtatagtcctaagggggagaatctattaccacaaaatactatttgcaagcttcagaaatcagtatggtttaaaacaagcctccagatagtggtttgaaatttttttctataactttgacagaggaaggtttgtcacactctacaacagaccattcaatgtttattaagcattctcccaacaacataatcatcttactagtttatgtagatgatgtgattcttgctagcagcaatctcaaggaattagaacttctcaaaatcagattgaatgatagattcaaactcaaagatctaggagatttgaaatacttcctaggcttgaggtagcaagatccagcaaaaagatctttatatctcaaagaccatattctcttcaacttcttaaagaacttggatatctggggagcaaaccttacactcgtatggaagaaaatctaaaattgtcacaaaatgcaaaggataccttggctgatccaacattgtacagaaaaataattggaaaattataatacttagtcataacttgaccaggcattgcttctcagttaataaactgaattaatttctcactactcctaggataaagtttttaattgatgctcaaagaatattgcagtatattaaatcctgtcaatgtgaaggcatcttattctttgcaacatttgacatttagttaagagcttacacggatgcagattgggcagcctgcatagacataggagtttcacaataggattttgcatattccttggagattctatcatctcctggaagagtaaaaagtagcatagtgtctcgagatcttacactgaatttgaatatcgagcaatggcaaatactactagtgagttaatttggctactgtcattgcttagagaattgaaaattgagcacaagagacctgccttgatgtattgtgataacaaggctactcaacatgttgcagcaaattctatatttcatcagaggacaaaacacatagaaatcgactaccatcttattagagaaaaggtacaacagggcttgatcaaaactatttatgttagcagtaaggaacaactaacaactatcatgactaaggcactctttcctaaccagtttaaaacacttaaagacaaaattggattggttgaccattcatcttgagggggagtatcaagattgagttagttaggaagagtgagtgttagtttggatgagtgaatgttagttttctgttagttgtaaaagtgtcatcttcagttagtgtttgtaactaacttactaattgtatatatagttccaccatgtaccttttctagttgatcaataatattgtacacaaagcttgcatactctttttttctctctttctttctacaacttatatcttccagggttcgtttggaacgccgtattaggttgtattgtattgtattatattgaattgtattttatgtaatatttttatgtaaaactatatgtgatattaacttttatgaacacctaaatatataatattttagtataaattaaagtt

SEQ ID NO: 314842 - DNA, 1098 bp, Cannabis indica
ataatataaaaaaaaatgatatatgataattagaaataaaaaaaaaaaatcatataataattaacattttaataatattttatattatataaataagcagatttttttcgtacgctatatttttgcttccaagttaaataattaaagttgttaacttagcataaacatatataatattattatttcattatcaaattatttgaaatttaaatacttcttgattttatttcaataaaaatcaactcattttaaattttttaatctttttttttttgtagaaattaaatttttgaatccttatatatatataatacaatatcaatcgatttgaaaattctataaatatatatataggccaacaacattattttacataatagggttttgagaatcaatttaaatattttatatagtcctctcacacggccaacaacattatttcacagtgagggttttgagaatggatcaagaagaaggtaagttgttcaagtgtcctatatgtgataaaactttcaattgtggtaaaggactcggaggtcatatgagaatacataaccaaccgacgacgatgacatcaacattgtcgtcgtcggtaccttcatcatcttcatcttcatcatcatcttataagtgttacgtttgtaaccgatgtttttctcaagagaagggacttcacggacacatgagagttcacaacgatagagactggaaaggcgttatgccaccagcgaaaaagcatgctattagaaaagataataaccacgatgaagtagctaatattactaaaaatatagctacttcatcgtcaggtaataataaaatagttctacatctcgataataataataataattatcgcgatgtaaatgttaatattgaaactgatatggtatcgttgaattggtctatgactggtaaaagaacaggtcgagtttcaattaatgttaacaataataatcttcaagaagaagaagaagatgaagaaagaagagcaatgcttcttatgattgaccttaatgctccaccccccggtgatgatgatgatcatgatgatgatcatgatgatcatgatgatgatgatgatgctgatgatgatga

SEQ ID NO: 314843 - DNA, 2453 bp, Cannabis indica
gggccccgctgcaggtaacttggagcttacttttgtaacttcttttggggtgaaatttgaggttgatatctttaaaattgtgaatgaattaagagacatgacttgatagatcattgaaataactttgaaatgcaagttgaattgtgttaatcaaattaatattgagtgagttatggtcattttactaaagacatttcatgaaccagcgctcaggttgacatatggatgctgggtaagtgtagaaatgtccaagggatgtactttaagatgcctaaataatattttgagagatattttgacatcaattagtctatttctatgttgtggtgaagctagtcaccaagatgttgttgttctgcagaaataaaagactcgaaacctcttcatttttcgagtgagttttccatgttggaaatgagaaatgcgaagtttttaatttgacttatctaacttcatggatcttatttattgtaaaaactagacggacggtcaaaacagaatcaaaatcggataagcaaaacctagtgcactaggccatttgtcaacctcggcgctgggcactcattcctaagatcctgggatgtcattttgatacttttgagattcttgaacttgaggatgagatctcctacctcgtttttggccattccatatttattgttcgaatcagatttggcatttgcataattgaaaccagcgcaacaggttgattgtcaacctgggttctgggcccaacaccaggtcaaccttggcattgggccctgtttataggggcttagtttgtaattttatccccaagttcgcttgaatcttcattatttccgatgaaaaaaataaatgcctagaacactttttcaagaaaatgattggaaacagcccaggttaacagtatgtcaacttaggtgctaggcccagtgccaggtgtcaacttgggcactgagtcccttttatggcccttcaaaatttccatttggttcctaaaaataagtgaatcttaatctttgctgaaaacgaagaagatgctcggaagagttctagaaaaacatcatcaaaatcaccctaggtctacaaaatatcaacctcggcgctgggtcagcccaaggtttcaacttgggtgttgggtcgtgcttctggcacccaagaagtgatgtttctttcccaaaagtacctatttccctattttttatgaagacaaagaagatgtgaaatttggattgtcgatctaatacttgaaaggcacccagatggacaaattgtcaccctaagcactgggtgcctgggcaccaagtgctccgggtgctcaaaaatgaacttgctctgaatattattcaaatgcctcaaatttgtctgtggtatgtctaattgatgttataatgcaaagtttgaccaattttcactaagacggtcctagttagggatgtcagcttgggtgctagctaaaaccctaggtgctcaacttgacttatggggtgcaggttcatgtaatttcagctcctggggccatgatttgattgcttcatgtattcatggtacaaaatactaaaagatacaaagttggaaacgagttatcaaagtccaaacttctatcctagagttcccgaagtcaacctgagtgcagcgctagggacccctcccaggtcgacttgctataatttgggactactcaactctgagatgtcatcttttttgcaacctgacaaacattgatgttcatatcatcaaggttacttttggtgtaaaaatttgccccccaagtcaacttcgcacttgtgggaggttgacttagtgacgtgaactaagcccatttctcttgaaactaacaggtgggcattaattttgacaatcttagattattgtttcgattcttcaagcattcccactgagagtaggagtttaaattcccattccctgttgaatagtagaattcaaaattctaagtatagaaggagaagacaaaagatgaccatctttttcttatcatttatcttttctttttcaacttaaaatttatataactccttcagtgatttcttttgatttgagatactattaaatcatgccgacattgaaatgtcaacatttactttgatttttggcttttgtcttagcattgactctctcgtcacactctatgtttatgtgattatagatgtaactgttgtcttctgtcaggttgtcgcttttaagtgctttagcattcccttggatatatttcagcgaaggtggtcttattcatctccttagtttgatagcagaggaggcctttattaactccttagctttatagcacatgttgccttcaacatcccttcgactttgcagaagaggaggccttcaacatcccttcagctttgtagcagaggaggccttcaacattccctcagctttgcagtgaaggaggccttcaacatccccttggctttgcagtacaggaggtcttcatcatctcctta

SEQ ID NO: 314844 - DNA, 2205 bp, Cannabis indica
ctaaaccctagccgccaccttcatactcttcttcttccttgaataatttcgaacctcttagtgttagagtagtgcccagacacagcaagtgatatccaggttcagatctttataatactctgcgacagaagggatacaagagttagagatctgagcggaaggagacataatatttcgctgcacccaatgtaaggtttctcatactttatatgtgtttattttatgatccttttagaagttcatatttaggatgttaatcaacatacttgtgagtagatctaagatcctggtaaaataatttccaacacgaatgtatgttggcaccctgtgtaagcggtgactaacatatctgacatcctaggcgaggaagtaacttcaggagtacctcccaatctttgacactgcattgttattggcgttgccaagccactggtaccctgactgactaatgtaaaagtatatggacctaccttgcaatggaacagatttcaactcaaagtattaccccagctcgtaaagtgaaggttatggccacctatgctttgtgtaaagaacgatgagcaccaaaaggtacttgacacctttcagggtgatttgggtcgtacacagcttaaagaagttggctatgtccctaacgtaaggatgtaggggcagcaccgccccttgctcaatgtgatgacttgaccaaggcatccagttagatcctagacaatgcgctaacttgtccctagttggcctattgagtcaaactcttcccacaagtcctcctaccttaatctcataatgtttcttagttgacagagaagacagaggtgatatccatcgttattgttccccatactcaagatccatggttcaggagctttttcatcaacatggtcgatcccgacctcacatggatgaccctgacattcaaaggccacctgaaatcatcataagagcctagggggtagctcaagaccacggtgcaagtctttactacctcctagcaacacctaatctagaagcaggttcagcttgctcagcatcagaaatactgtcatgaacggtcgagctctgctcttcctagcaggccatagactgctcaactacaggctcctcaacctagctggcccctagttggttagcttgaggttgttcaacctcttctacattgcaaaccctccttctcatgaacttaacaatgtgagggtttcgaggaggtgccttacgacacatctatctggccttagccatggcaggcttggagtgcctagcaacagaaactacagtctcaacgatggaaatatctctaattaatagtttttaccaacatgagggtaacatatcaggcacaccatcttggaaaatgtatgtccacaaaatagggaggaactgcctccacccctagtccagttcccaaacgatttgaccataaaattcaccgcttattcactctaaatagcagtgacgttggacttcatgatttggaaaaccactactaacctcaaaatcactcgaggggctacccaaagaaaccttagaagaagaactagttaaagaagctagacaatggttttcaaagagatgactaagctagttttcgtcgattcagttgtcacctccccaaacgtcacgcgggttcatctatataagaaagacaagagaaggtgagcaaccagaaaaaataaaaagacttagccaaagtacaagtcaactaaacctgtaagtgtcgttattttcacagattattttaatagaaagtctagtcgtatctggtgattttagtctgttatatctacacacctgctaactgttatagtccgtgtgattctgttatgacttaacagttggtgttagtttgtgttaggacggctgaactattgcatataaatagtcttttttgttctgtaaactaatcatccattgaatcaatttctttgattactttaggttcatcgtgagagtcagagttgtatcttgcttttcttgttcttgattttacaggtttgtttgttgagcttgaagatggagatcttttgtagacagatcagggcctgacgttgctgagttcagactgaagggatttcagtgtcatctttgtcatcagattggaagggatttcagattgaagagaaatgtcgaagacgaactcagtagctgcacaagggattgtgttcttacaatcaagattcttaattgttgttggtaattcattactaattg

SEQ ID NO: 314845 - DNA, 1403 bp, Cannabis indica
gtatttattgttactttgttattggtatatatggtgtgcatttaaaatgaattcacacatttctacatattctctaaaatttccctaacttataattacgtgttttgaaatcaatatattattaattagtttataatatgatgaatagagagatttctacatgatcatgaaatattcgaaaaatgagataatggattagtaattaacttatttttattgttactgctaaaaagaagatttaagtattaaagtgcagccattaaaaaatatgagtattatcatcttatataatccaaatatatataaatttataaatattaaaaaaatatatattaatttcatcggaacgaaagtaaaaaaaaaatatatttaacttaggtacataaagaaatttagaattataacttagatattattactgttaaaaattaaacttaattatttatttataatcgagaattaaatttaagtatttatatttcatattactcaaaaaattaatcaaagtgagacatataaatctgattgtactattgtcgtatgtgtataccaattataagtgtattgattccacaataagtttttacaacactagcatcaccaattatagtaggcctgccaatttcttcacaaatttttaaaccattctgtatttttttttttttttttgtcttactttatcaagcatatataatactctttactcttctttttaacatcaagtttaattttttttacaataaaatttattgtgtatatcttcatgatccatagagcttaattatttgtccaaccaaatatgatatatggttgccaccaatgtagctatgaatacttggtgcttgaacctgtttgtttaagcatttgagatccatctcatcacaccttgaacactattggcaccagtagtccaccttatccaagccttgatgctagccaatacctgattactcaagtaacatttaaaaaataaatgctcccctatttctttgttcagcccacatattcgacattcttcttcttcacatatattatatctgaacaatctagatctcaatctcagcttatctaaaatcacaagccaaaatatgattctatactttggtatagacattcgattccacattttgtcttgccagtaaatagttaaaaactcagggcaaagacatctataagtatcattaatcaaatatgtaccttttgaatcttttggaaaggcatttagttccatcaacttatttttgactcgaatcgaaccacttgtttctaataccagctactggtaggaggcacctcacagaccctccaattctccttccttatgtacactgtattcacctatttgacccatagtatatccttattcgattcacactacaaaaaatagttacttttagtgacaa

SEQ ID NO: 314846 - DNA, 1341 bp, Cannabis indica
aaattacacacttatttaaatatatataaatttacttactaaaaatgggagaaggagtctgctcatttcttaaaaccgaaacccaatgcttaatcaatggatgcggcggtacatacacctggacaattaaataaacaatgaattgacttatccatcgaattttataaaccaacaaacactatctacaagataatgttagttcttcaaggcaaacatattctttagaaacaaatttcttctatcttcccaaaaacattataatcaaataacaccaaacgaaaacaaacaaaacaaaaagtacttaaaagaattccatctttgttgttattatcctacattgtattctgggtcgttttctaaataatatagttaaaccctgaaaagggtttagagtaagagtgaactaacaagcattcgttcctccgaaataggttttttctccccggtggccatgtgagacttcacagtaaaagagctacgacgcctagcaaaggaataagagatctgcacgcataggattctggctcaagcgaattcgcatacgacccaattataattaaaggagtttattccattaattaagggaattcaaaagtaacaattaattaaatttaatgagaattacctttttgggattaggtgacgagggatttgtgggaaggaggttatataggcgaagattactagggttttggagatggcatgatgacgcaaaacgacgcgtatcagaggggcaccggagagagaatttaatgcagcacgccatggattcgaattgagagagagagagagagagaggtacacagcattttcgagtgggttgagaaagaggatgaatctccctcggctgaaacagattgggctcagtttaacaattgggcttgtgtttgaactgaggcccatttatccattaccaaaaataccatcaatcctaattgttttttacaattatacgatttgcattggaaaaaatgctctcaattgtaacaaatcatcattaatgagttaaactaatgatatatacatacttatgtggcattaattttcaacttagagcttacatgaattttgattattagaaaaatctatttacgacatgggtgtgcagtgtaaatagtgcgtgctcaaattatttggacaaaatattaagaatatgtttgaataagtgaagaagtgttcaataaaagtttgaagaatgattccactactgtgaaatccaaattagcatatagtgatttttattgggaataattacataagacactatttttttataaaataattacatttttacgttcaaagaatatttttttatattttatagttttccaaaaaataaca

SEQ ID NO: 314847 - DNA, 844 bp, Cannabis indica
aaattggataaaaatctttaaatctaacaatatcaatagttcaggggaaacttttaacggctaataaagttcaagggacatgattaggtacatgtcaaaattcaaagaaaaaaaaatcctaattagtcttattattattatattttcttgatcacttgatgactggatttagtatgggttttgagatttgacttggtcttctaaacaattctttttgaagttcattaaggtgatattattattgttattattattatacccaaatgaaaaagatatgtagtcaaattattggtcaaatagtttctaggttgtaaatgtattatacaaacaataataaaaataaataaatataagcacaaagaaaaaatctaaagatagagaaaatattccaactatatatatttactataattttatttgattaatatataattaaataattaattactttagacttatcaaacagatgtacaagcaggaaaatacttagagcgagtttggaagttacaccgtaagtaatattttttttttttgaaaatcaacgttttaataagtcgtgtaattactagtatgttttataatacaagttatgaacgtatatgagatgataattataattgaattcttaatgtaaaaaaaataattattttttaataaataatatactataaagtttatagtaatttcttaagggggacatgaggattgaaaaatgtaattgaacccttaattacttttaattacacagttacagtataattacatgattagaacaaattatatatatatttttttttttgacgcggtaatcaaaatcacacatgattaaacaaaacagcaatcc

SEQ ID NO: 314848 - DNA, 990 bp, Cannabis indica
aatttttatgtaatcattttaaacatcttaattacaattttttattgtccattgtaatattaatatttggctaattaagatttttctctttcaaactttaacatgtatcgaattatgtctcttgaattttgatataagcttaaagtgttgtttgtaggtatatggctgattctgaaaaaaaccattcgaaggctctgaaatggattatgagatatgttcaaggaacaactcacttgggatttgtcattggaagagattcagatgttgacattaactatgcaacaaacattgacataagaaagtcacttactcgtttttgtttgatattttgtgtatgtgatagtacagttgaaaatccaaaaggtagttgtactctcaaccattgagaatagcagaagcttttaaagaagcaatttggcttaaaggtttaactcaagaaattggtttcaaatccaacaatgttactattgaaaaaagtgatgttctcgttgatttattgttaggattttattagtgctattttaaagtaagtttttaaagtatttttagtgaactttaattgcgttttgtataattttatgtttttggttgttaatgtttttggttgtacaattttacaattttacgcttttgtttattaatgtttaaagtcaagaaaaaatgtacaaaaatgaatgtcgttagagcacaaggaaaagaatccaagaaaaaaatccagaagattcgatgtgattggagttttcaaaattgaaaaactgaaaaaaatttgaagtagcgccacaaaataaaaattcaatgtgagggtgctaaaatgtaaaaaatcgacagtaaggtcgtttttagaaggtttagaagccggcctcaacattgggattcaatgttgaggcatgggatccttggttgttttgttctatgttattttttatttgtttttcagtttataattattttttaattatcactaactcaaaaaagaaaagaaaaaaaagt

SEQ ID NO: 314849 - DNA, 654 bp, Cannabis indica
ttttcttaaggtttgattcacctcgttctccctataggggtttcgcgagctcctttcttatgaacttagagagagggctggcgatctccgaccggggttccacatgtcctaggccgtgccccaagactttcctcagtttctcaggttgcttctcctgagagttctaggaatatctttgggttgtcacttgccccttggtttccaagttgcgaggtttgcctcgtgaatctctgttttccaaggtcaggttgattttgggaactactctcttgtgccgccctgattatagatatttcacgctctagttcggcattacactgatttgcttcctccaatcaacgtctaagatgggagttttctaactcaacaataggtatgtacctggttgggtcataggcaccatcctcgtaaacctgatttggaagagaccgaccattgtttatccaaggcccttcgagtctgagtccccaatgctgggtcttcctggagcaagtggtcggttcaagtgatgaattaaaagatccctgaggacttagaggctcttttgtaggacgatgattgatttcttcatgaggagtatcttctttgttgtcatccattgcctttatgtcaggaggctttttctgagtttttttttcatgaaggctctcaatg

SEQ ID NO: 314850 - DNA, 760 bp, Cannabis indica
tgtgaagtttaatcagcccgattcggtcactaaactagtagttgtctactctgcaaatactatccaacagtcaaattttcttttcgagaatgatgctcggcatcaacgtttaggtcatccatctgataggtttcttcgacttgtcttaaactctagcaatgtaccagtttgaattaatgaaaaattaagtttctgtgatgcatgtcaatattgaaaatctcatgctccacctttcaaattgtttaacagtaaggccacaaaaatggttgaattaatccactcagatttatggggaccttccccagttaattccaacactaacttcaaattttacatccattttgttaatgactacagttggttatatcccctcaaacaaaaattagatgccttaaatgcctttattcaatttaaaaccatggctgaaaattaatttgaaactctttgaagaccctaccaaaccaaactatgtgtataaattgcacaaatctttgtatggcctaaaataagcaccaagggcatgttttaacaggttgaaaggcactttaattggctggaagtttaaaaaatctaaagttgacacttcccttatctattacaaggatgaaaaaaaaatcattttagtgctcatctatgtagatgatataccatagtgacatggaacaatggagacaaattaaaagagtttatcattcaactcaacaagttgttttcaatcaaagacttgagagatctgttggaatttattttaccaagatct

SEQ ID NO: 314851 - DNA, 1087 bp, Cannabis indica
taataaaaattagtgctaattacttttactaatccaatttactaaggcggtcattacacaaattaacttctatttgttttatatgatggtttacacaatagttacagtaggcatcatacacgttttcaaaattttttaaataatttacagcataaaaaataaaatttaaaatgttcagttacacgctgtggttatgagaattcgtaaccacaagattgacaattcaagagctcaacttgaagccaaatccttcctttgcctagacaagatgagctcccccatctcctcgaaagggtgaggccaagtgctccctcaacctatagaagacaagttgagctatcccttgtccttgaaaatgaggccaagtcttccctagttcaagtcatttttttggcttagataacggatgctcatcctttgtcctaaaagggtgagacgaagtcttccttcagcttagacaagataaagtttaagtcctcctttggcctaaacaagatgagcttctccttggccctaaaagggtgaggttaagtcctcctttattctaaagaagacaagtttaggtcctccattggcgaagacaaggtgagctcctacttggcctagaaaggataaggccaagccctccctcagcctagagaagatgaactcattcaaaaagtgcaagattgaaccccttaggttttagaaaagggcgagcttaacacctcaggtgtgggaaagggggagtttaactcatttaagccttgaaagaggaaacccaacactcacatcttataagagacatatccacatcaactcaatggttagaatagaagatggtccaagacgagtacaaacaagcgtgaagactttaggggtataacctacgtgcatatactagcaagatagtggacgtacgaagtcaaacattgttgagaaacgtactagactaggacaacaaagagtaccaggccacaccataccatgaaattaacccatccgggtctaggttcgggtatgattttggatctaggatccgagtatgtgagcaaaatataaaatataaatgttagacaaaaaaaattatttttgaaaattgaaaaca

SEQ ID NO: 314852 - DNA, 2748 bp, Cannabis indica
aaaaaaaaaaaggaaacataaaaagattaattacttacttatatgtacatatatagaactcaataatttcaatcaaaagctgtaaagcatcatttatggacttctcccataggaatagataaagtttcaaaaaaaacaaaataaaacaataaaaccagcaacacagaccaaatcatgaaacattttttttggcatatacaaattacaatcattgaaaagaacaaccagtaagtatcattataacataagaagatgatttcacactctaaaaacctcataacattacaatgatatatgtgttgaacctgaacttatcaacaagacaacaataacaaattccattaaatgtgctgaacttatcaaagcttgagtagtactactactgtaaaagaaaacccattttcgactaacgcttacacaataatatataataataaattttgatttccattaaattaccgccaagaagaaaatcccaggtacaaattcaaaatgggtgaagaaaaacgcttggcttgtgattaatggctccttggatcaatacatatatttgatgccttgatggatcaaattgaaaagtcaaatattatgtattggcataaaagaagggttactaattctgggtctttgattacgaatcaaatataacataatgacacaaagataagttatagatcttggtcaagtaagacttttttttttctttttctttttttcctctaaaaacaaattgtcataatagtactaatatttaaaaataattaaaatattattggacaaaaattggtcggttaggtggctaacaaaatggtttctaagtttttattatgaaatgagtgttcttttttcttttagataaaaaaaaagaaattaaattagaaacatctttgattatattgttcacataattattatttagtggttctataagagcatcttccgcatgtgttgccaaaatatttagtgggtcaccctacatgatgtggcagaagaaaaatgatagaatgatttttaaatgggcacctgccctataatattttactatttttgttgatctcattagagatgccctaataatccctacaaaagtacactgaatcattccttattgtttcaatatttataaaaagcttttaggacctgttagtatactttttgaaaaagttaaaagtcatgtatattgacatggatgctgtctctcttagattgagagtctctctttgattgagagtttgatttcatttgtaattctgacttttttctcattgtttttagtcctagtacgtttgttttgtgattaccatggcctctagcagtggcgtattgaagggaattgagaagaactggtccaatatttgcttagatgaagaggaagattttatggcagaacgggaagacgaagatggtgccttgttgggaagcttctttctagaaaagtctctgactatcaagtttttcaaaatatgattgctgacctatgaaaacctgtcaaaggaatgtatgtaaaaatccttgaacaaaatcgattttgttccaattctatcacgagattgacattgaccgagtaatcacaggaagcccgtggattacgatcgtaaacagcttcttattgagaggttgcaggtcggagacaactcacgaacaaaacagatcaatcaccttgacttatgggtccagatacatgatttgcaactgggttttaaaacagagagggcagttttttcaggctggtaatttcatcggaaagttccttgaatccgatcctaataatttcaaaggtgtttggcgggagtatttgcgggtgcgtgttcgtatgaatatcaatatgccactgaaaagaaggatgaagttccgtcgacggggaggagatactttctatgccaattttaaatatgaaagagttcccactttctgttttatatgcggcataatgggacattcagaacgattctgtggaaagctctatgataccccagcatatcagattgacaaaccttacagtatcgacatgcgagctccgtcaagacgacataacttcctggttgcttccccatggttacgaactgcgaaacctgcaacaaccttcggtaccgaagctggcgaagatggcgatcaagaaactaattctttccctcaatcaaaggcaacattcactccacgatcaaatcccaataaagccaagaatattgtcaatgatattccagaagtaaatgaccgtgatttaagggatattgaccttaatgtggtaagagagaagactaaccaaggaatcgtgattcatagtaatgactccacatttatgtatgatgcggatctcactatattggatctcaagagaaaacgtgctgaagttgtttccaaaaatatcccacgtgtgggggaagaagtgatggaccagccaattattccaaataatggtatttttgtaaatgttgatgtcttctcaaaaaattggtatgtggtgggttctggtttcgaagcccaccaatcatcatgaatatctaagtgccgtgggcttgggaacccacgagctattcaattcctaagagacattgtgttcaaaagaagcccaatttccttttactttgtgagactatgtgcaagaaggatgtttcagatcgcataaagggtcgtctggaatttgatagctgctttattgtggaagcccaaggcaagaaagggggtttagctctcctttggaaaactgataatgaagcccatctttttggttattctgataaccacatt

SEQ ID NO: 314853 - DNA, 4032 bp, Cannabis indica
tgccaaataaacaatccaatttgtatttgtattttgggcccgaacccggtttggcccgaaatacccggttgtgactataccgtgccaacctattagaacacacctgaaaagacaacacaggcatactatgtaataatatagttctattaagcacgtaattaaattaatttcatcaatttacccttcccgggtcataattgctaaaatgaccctggctcactaatggggtcttactatgttataaatcatattaattcacatatattgaactatataataatataattcctcatttattcataattatctaattagggttttgctaatccatttgttaattcttgggtattacaacttctctcattgaaaccattagctataagtactttgagtagaagagcccactccattcggtcatataggctttgtgcatatcaagttttatcgccatgaggcctccattgcctttctttcttttaattttgtgcaccaactcttgagtgagaaccaaagattccgcgatccatcatcctaaaataaaagctgattgtagtggagtaatcaaaacatccatgagaggggagagacgatttacaagaatctttgcaattattttgtaaataaagttgcaaagacttatagagcaaaattgttccactttatcaggttgatctcctttagggatgagacaaatgaaagtgtagttcaaatttttgttcatctccccagtaatgaagaattctttgacagcagagcagaccgaatctcctactacatcccagtattatcgaaaagaatagcgtgagaatccatctggccttggagccttcagagggtgcatcgtgaagcccgtattcctaacttcctcatctgtaggaatagcattgattttgagattatctccctcatccactttcttcttaaacatattgcctagactaattgggataactggcaaatcagatttgaaaagatcattgaaatactcattgaagatacctgatatatgcctcatgtcctccccactggttccttgattgtctttaattttccagaatatggtttctctttcttctaatcgttgtggacaggtggaaaaatttagagtttctatctcccaatttgagccaaacctccctaaatttttgacgccattgactctcaagtctacggtattcttcttcaagttttgcttgcaatctactttcttcctaacacaagtcattggaaatactttgttgttgtatccaccttattcgagcctctatgttcttgatattctgttcactgtcaccaaaaaccttccttttcaactactgtaggtctgagttatattctgaagacagttagttatccccaattgagtgttctcattccacacgtgttccacggtctctctgcaggagttctctttgcatcaggcttcataaaatcggaaaggcttgaatccctttgaattatcagccgtcgaatcaaggattatgggcgcatgttcagatgagatgatgggaaggttagtaacacaggctttaggaaacagactgatccaatcaaaggagcctatcgcacgatctagcctttctcagattaaacctctattgaatctttttttttccatgtaaactttccccctttacaacccacatctatgctaccagtattattaagaaaatctgataaccatctgaaatctctccacgatgctttattgcccccactattctcttccagactaataatagaatttagatcccccataatgagccagggaatcgacaatctagcaccctgctttccagttttttccaaaagctctccttcacacaatcgtagggagtgccatacacgccgaaaaagttccaataacatcctttgattctatttgattaataaaaattgttgaatagagatagacaatgatttaaaacatcataaaagaaataacaacaaaaaataaagattattataatcctcaactatccttaattttacttcctaatgtaattacctactttctcttcttcctattcaattgataagttgagttaagaaatttataatctggttatgacttataaacccaatctagatgaaaaatcccaatatttctatggtaaagtttcatcacaaagatagaactaagcaaagcaacaaataaaatcatacaaacaatctacgtacttttgtcttaaatcaatttgcatctataacaatcagagcatattaaaatctcactttctagaatttcaattcgaatcatagacaacaattatagattattagtaaataattctagaactaaaacagattgtatagaattgaataaagagaagaagaaattgaacaattacattaatcattaaaataaattcaaattattcacataataattcgtaaaaagaaattaggtactagaagacattctaaaataataaaaatttaattaaaaacataaaagatagagatggaggatatagaacactgtttggagtcctccaatggtgccttctgctcatagcctttcctttatgctcagaattttctaaattttcgaattgtgttagatctaagctctcatcccctttaaataaaccattagggaggtttttcaaaatcttccaacgcccaaaatttgtctttaagttcgaatgataaagaaaacctagctccaacttgtttagaaatttcgggaagtttcttgtttttttcgtaagagccaatgaatggagctattctaaaattctgctacgataccctatatatagttttatctataactctctcgcttttatttggaatcatacaattcaatataatttgaaaagataaaagagagatctagttctttcattcaagaagtttttcctggaagtgaattgatcatagtcaaaacttagcctgaagttcttaactttattttcagtcacaaatagagagtgttcaatatccaaaacttaaaaaaaattaatttatttttagaaagtgatcactctttactctagatcacaaattttagatctaataatgtaaactttgaccaaattgaggtaacaagaaatccaactaaatattattggcgttttcttttttctttataatttcccattgttgtctcgaaaaggcttgaagaacaccaaaataaccaaaaatatagatcttcaaacatttctcctaaaaagcaaacaacaaaataatataaataaattcgaacaataaagtaataaaaatactaaaacacacactaaaatagactataaaaactgcataaaataaacctaaaatattttcccaaacttaacctttactcgccctcgattaaagaccaagttatactaacgaaaaagaaaaaataaaaacaaacacacagatatgctaacattgtttccaattactatgaaatatcaattgcactttttaatcaaattttcagttcaactgtctcaaagtttaaccttaaagttccattagggaaataactaattggacacatgtgcaaatgaccacagtaacttaaactccaccatatatgcgcaactcataccaaacaattccaaaattgaattttcaatatggttgcatcatttaacttttgttactaatgtcaacaataaatgctttaaaattaaaagaactttttacaagtaataatgtcaggcttatgtaaaggtagataaaaatatcatttaagctcaactataccataaacttatttccttttaggtgcctcacttttattacaaaattatcgtattccccacttaatgtaaaacacaagagatatttatatttttctatttactttgcaatccaaattaataactctttattattcattttttagttactttttttcttcaaattggagagaaattatagaaaaggatttcaactaatttaaacattctctctcactttttttctttaaagctcttaacttttcaagacacaatactcaattatatttttttttctaaacttatttgaagctcatggtcgttagaacaaaagaaaataataaatgggtcaacaaaa

SEQ ID NO: 314854 - DNA, 2492 bp, Cannabis indica
aagatcctggtaaaataaaatccaacagtatttacaacactactgtaaacaaacgtcttggattctggttgttacttttcttgggttccttcttcttaacttgaagataatctctaagaaagtggcctaccataccacactggaaacatgtcttggcccaacattcaccctgatagtgtttcttacccttgggacactctaggtatgacttgaatgtatcactacgaccttgacggccgcctctatttctccaaaatctcttatttgatccagatgatttggaagtctcagttttccttttttgatcagaaataccaccgttagtcccctaactgaagttaccaccagcactaggaattgacatcataccgacatccttaacatttgcttcttaatttgttgttcaacctcctcgacaatcagtgctctctctaccactttcttatacaaagtgccatgatcagtgataatctttaagtcctgactaatcgtggcatccaacctagtaacatatttttgttttcgggtaaaatctgttggtaccaagtcaccagcaaacttagacaggagatcaaactctagcgtatactcaaccactgtcttatcaccttgaaccagtttcacaaaatctttcatatgagttgtacgaatggcgatattataaaacttttcttcaaacaagttcttaattcttccaaggtcaccgtacaaaggtcttgagaccgacctaccaaatcccacaagtgggagcatgctcttgaaacatgaaaacgacaaatttaacccgttcagttccaactactcccatattatctagaatacaagtaatggtactcatctattattatgcctttataatatcagtgccactaaggaatgtcagaggttgcagcttgacaaactgttaaaaaactgaatctctatgtggttggagagctgatccaggattagctaccactagggctagaactagaggaatcgcttgttctaccagagctgcctaaacctatctcctaatttggcggaactcttcttcttgacgaagtataatagttcgcatttcgataaacatttgctgccaatcgactagaggattagcattattcatccccgcagtattcccaaaattttgcagaggtcttggcggtgctagtggattggctggattattatcttgctctacaaactcactctgtatgttgatttagtagggtccattctttcaaataaccctgaaatcaacaataccagtgagtcatgcgccaattgtacagtcacactcatgccaaaaccctaactaacatacacaattcttttcgaaatatagcaattactactcacaattcataatcatgtttctcattaaatatatattatcttctaaatgctcatatgctgcctattaccatttgtaacgtccccgcttcaagcctccattaggcccatatacccacaaaattatggctcttatacatgagtacgtcactatgattgcttcttagaatgacgactgatcctacaaactaacacgagtatttttagtgtgctttgtcctcactctcacgcttcccgaaaaaacttcttaggaggtcacccatcctgaaattaccccaggtcaagcacacttaattgtggagtttctttcatgatgggctaccaaaaaacaagatgcatcttgttgataaaggtagtgccaatcaatccatttaagccatattcaactatgtagtcccaaccaacacagtcttagaattattaaacttgaccaactgaccttacaaactaacatgattattcctagcgtgctttgcccgcactcttgcgcttcctgggaaaacttcccaagaggtcacccatcctgaaattacctaagctcaagcatgcttaactgtggagttagttcatgatgggctgctagaaaacaagatgcaccttatgatgtaggtagtaccaatcaatctatttaagccctcttcagttgtgtagtcccatgcttacatattctcaaaatcatcacacttgaccttcctcaggtgatgtggaattgcacagcttacccgacatttctccttacaaatcatgggactactgactgtcacaatcaccccttctttggaggtccgatgtcctcgtgccacacttttagttgggtcaaggctctgataccaaattgtaacgtcctacttagaggaacaccgcgtgtagtgattacaatatactaatcccattaatcgggttccataagccaagtgatttaaaccaaatattaaacttaattaaataaataacttgcaataatacacactttattttaaaccaaaatatttaaagttacatatctgagatctcgtaaaatttgttttcaaaatattacaagttatttcatacaggccgacctaacagtaaaatggaatttctatacaattccctaatagacccaacccttgtggtctaccttggccagaacatgtacaagtcatcttcaaaaccct

SEQ ID NO: 314855 - DNA, 1911 bp, Cannabis indica
aaattaaaaaagagaaaaagtaaaaaagacacaaataattttttacgtggttggggcgttaactagccttagcccacaagttagtgttatttaataattctttagctagaaaagccttaggagtataatgaatatatgttctcaagtttgcttgagtatgttttgcaagagaattcaacccttaatctataggatttgatgggtatttatagtagtttgagaattacatttagtttcctttttccctctattagggagcttacagtgaataacacacttgtgcttcgtgaagtccagcccacagaggagaggatttgttgactagacagattgaatttagttggatttggtcaacaccttgtgctttgattgtgggcaattaactgtgaattaattgcttgatatttattttaggaagtttccccatttagcatgataggatcctctcccgagatctgacaactattatttccttatttgggcacaggaataaaaagggaaaccgaattagtcttcccaaaacatgctctcttacccgttcgtcctcatggtaccggacttgcttataggcatgagttttcaatggcaaaaggttctatggtgatagagctagaatatgttcctggaaggacctgtccaaatggtcttggcccactttatcttctttgagggcctactaatgggcctttgatgtcaacctaaattccatgtgtttactgttggaaacacgaataacatttacccttaagcttacagaatgttgcatatggtggaagtttgtttcactccttcagtatggacatgtggacgatgaaagataatatcgtgactttttagctattactcgatcgcgaaaggtgacttccatttttgattgtagtacatccacgtgttaattgcatgatggtcaaaagacatggccatcgaggagttgcttcctaaaaacggctatatttggacggttgttcacttttctcgcatgaaaattaaaaatggcatcttcatcattgattaatgccttgattttggggagcattagtcgcggagatgggcatagattgttgaactccccatccattggatgaaacttgtgtttctggaagtttgatcgtggacgacccatcctcttttcatgtgaattgctccttttaggtataaatgcatttagtgaattccagttaccacttttcatttgtttccaaatttttaatcccttcaaagcttctaactttctcagcactcttcgagaccaagaactgaattcagagctaacttttcttcttcaccctagaatgtgctgtcgatttctacattcagcttttgttgaggatttgagcacgagaatttccacatcatcaacccttagcgttcgtgagttttacactagaacatgaaagcataaatctagattttgatgtagaagttgacttgttgatctccctagcatcacgtctccatgaaaggtgtgatagatttcgccagccaaacgcagtgaccattagtctgacatctcctcttttgacatcaggtatgtttcttcttttgtctctatatcatattttctgggtttgttgttataagttatgcttgcatgctttgttctaggatgtgattagggtttttgtttgtccgattgccaccgtaaatagaattaggcactacaaaccatgctatttttagaattccctattaggaattcttggagtcaaacattttatagtagatgtgctagtgaaattttcccacgcccaaaatccttctggttttaggtttttcattgatctttattctactcttcatctttgtcgttcttgacttcctctctataacgaatgaatcttgggagttctcatttttagataagtaatctgattagtgttgggttttatgccctaaataaaactctgtttc

SEQ ID NO: 314856 - DNA, 1103 bp, Cannabis indica
taatataatgtagtacaaatatgtatcattattatacatccacctatttattaccattagatttattatctatggttgtaaaaaatttctctaccataagaacaaaacaatagttcataccataatttatcctatatatataaaaaaaaatataacatataaattttagttcatcaaacattatagaaaaattacagcataaagatcaagaaccttgagttgttgagttcaatcctcctcttacgtacatgtaagaacataatatgtatacagttagagattagtttaaatttgtagattcattttatttatttatttgacataagaataataatattttagaatatcttcaacccattatatagcataatatttttttagcaaagaaaataatttttagtcaaacaaaagtcaacaatataatgtgagactacaaaaatcaagcagccctccaaaagaagcaaatcataaagatttcattttatctattacatgaacatcccttctcttaaactttaaactattaaaacccaacactctagcttttttttttttttttggttattttaaaatttaagtattttacatagatgtaagaatataatatgtacatagttaaagattaatttaaatttacaggttcattttatttatttatttgtttgatataagaacaataatattttaaagtatcttcaactcattatatagtataatattttttagcaaagaaactaatttttattcaaacaaaactcaacaatacaaagtgagactacaaaaatcaaggagccctcaaaatgagaagcaaatcataaagatctaattttatctattacatgaacatcccttcttttaaactttaaactattaaaacctaacactctagttttaatggctagtttaacggactcacaaataactctaaccgagttacatatcaaaaacacttgttgcggttgcatcaaataatgtagtaaatcgcagagaaaatggcattacaaactttaatactatatgttgcccctgaattcgcccaaaatacgtggaccagtcgaaaagggacacgtggatcagataaattgtaaatatttgacaagtct

SEQ ID NO: 314857 - DNA, 952 bp, Cannabis indica
gctagacagggcgatgagcactgtcatgactactgcagtttagttccttggctgaatagaatggctgctggttaataggtgctgtcgcgctctgggttggtgagcagagagataaaaaatgctgttatatatagaattatgagttgtagttttcaacacttgaaagggagggatttgtacattattaatgtaattcacagctggtagctgttctttggttggggcggctggtttcagcttgctttttgcttgtaaattgtttgtcatttgaataaaagtatcatccatttgttcaaaaaaaaaaaaaacatagcacgttatgtatagtagtaagtcacttgaactaggtggatattgggaagttcatatttcgaatatttaaagggagtaattgtggcataaatgtctatgtataatttctgattgcaaataactttctaactaaattttttgatagtaaacataatttctgttagagttctcaaatttctgtgagtatttgacagttaagtgttaagttggtgattagtccaagttaattattatttttatttaaaaatcatttttaaatcaaaacaaaaaaaaatgccttaggagctctggtggtcgaagacttatagaactcctatatttcttttttggaactcctatattttagttatgcgaaagctaaaaaaatgtcaagatgtttttaaaagattttaataaagtatgtggagatgttaatgttgctgataagagaaaattgcaagattttatatcattgtcaggaagatcttcacaaggaccccctcaatgaaagtttaatttctcaagagatagaagtaggagtattcatccaattcaatccgcactattttgcttatagtgcatccaatcgcactaagtgcggattttatttttggatccaatccaatccgcacaataaatcaaatcaaatccaatctaattc

SEQ ID NO: 314858 - DNA, 639 bp, Cannabis indica
tgtacgaaaatcatcctgcataaatgctttaaattcattcttaattttaaagtttttctaaaatttactattcatattttacatttgtagtatattaattactcaacctaaacatattttattaattatttttgtatggagatatatgtatagattaatattatatatttaaaattattgtttagaatttctttcaaaatacatagcaactcaagagaaagtcaggtgatactaagactgacgttacaagacacgtccctttaattattctcgaagtcctttatttcaaaagaataataacagattagtcatttctgtgagtattcagctggaccgcgagcatccctcgtttgttcatctccgcaaataaagtatatatggaggatggtacgggaggagtaatgaaagacgacgtgtcactcaaggaccaagatattgtgtatgcatttaatgtagcatgggaaagaacgttagacgtcttattcagaaaaatgtgtttaagggtttaagctcattattccctaatttcacgagcccccatacatcaatcgacaactgcataaataagttgtcgagtcataaataagggataaatctgttggaattaattttaccaggatctatttactatcatgtatg

SEQ ID NO: 314859 - DNA, 2141 bp, Cannabis indica
tctctctctctctctctcctcacacgcacgcccctctctctctctctcattaactcacacgcatcacatcagttggtgtgagttttgtgatcatccctaactcttcacagtatctcatgagttgagaatatactgtaattgcataattgtattcattttatagaatctaatagtccactctattcttgagtgttgaggctggcttggaagattatggtgtaaactcttcagtagtttcgtagattggatgttcgattaataatacaaaaagatagtgaggatatcctttattaataggctacaagaggtattgtctctctattcattagactagatttaatctatatatattatggtgagatccttgagattatcgttcatattggattaaattatttttaatcaaatacgcttctacttttctaactcttatatggaccataaaaactaacattacgttcatagtaaagatgaaattttggtattttggtagtttttggaaatattgaatcatttgggtttggccaagactgaagacaattacaaaagttcgaaacttctttggttaagttggttaataatgttgtattgtaaaaaggatttccaagaattccatatctttaactgaattaagcaagaaatattcagcggtttgtgttgactgacaaatgtgaagccaattgtcaaaggttgaagtagtgattgattatagctctagtgttagttttaccatcagagcaagaacagtttgtgattattattatgcttctagatagggtttgagctatattctgatgtaagtcatcagggccattatgtatgcttctctttagatagagaagtatgaacaagttacccaacccatgttttggaacttgctacaatagtgtttgcaatgaagttttggcggcactatctctatgagatgttttaagatactttatcatcctgggaaagcccttatggaagcgtatttcttgagtagaaaggaattttgggtaggttttagtgcggagttaatctctacttagtaatcgctaacatggttgagtcaggtatcgagttttggtcgacaatcttagtaatttgacgcttcagtttgatctgttagaaagtgttcaccgatttttttgaaaaaccaataatttaaatgtaagagccaaagaaaaataattcaaatatcaaagaaataagaacactcgggatttttacgtggttgaggcgttaactagccttagtccacgagttaatattattaagttaggctagaaaagctttacggattacaagaaggtatgagcactctctcatttgcctgggcatctgagtaaagaatttccatctgttttcatgtaaggtttattgagtatttatagggcatataggtcatactagttacaatttttccttctaaagggaagtttacaaataaaatattaactttgggcttatctggtgaagcacgtgttgggattcattttaccaggatctagatttactaacaagtatgcttcattaacatcctaaatatgaattttctaatacgatgaaattaacacataagagtttagaaaatcttccattgatggcagcggaataatatgactcattccgctcaaatctctaacccttgttcctttctatcgcagagtaatagtaagatctgagcttggatctctttctctccttcgggttggttaccactgtcttcctcactatgattgagtacttgacttgctatttgtgggcatggcactctatcactatggctcgattatgaagaacaatgaaggagactcgaaatcactatagaaggtgtctctcatctactagctgtctaacatagtaagaaactagatttggtaggttgaaaagagttaagttggatgagatgagagcatcatgttccttttatagtattttaactagggtttaggtttgaattatatggattaaaaaagaataaaaaattggacaaaaatacacttagtggtcggccacttaaggggccactccctagttacagttttgccactttatttcaaccacttattcttctttcaataataccatattttctaatttcaatcctataaatgccaaaactacttatttaataattttaattaattatcaaataa

SEQ ID NO: 314860 - DNA, 1547 bp, Cannabis indica
atatttttttttagagaaagtcaaaagtcaactgtaaggtaatttaaaagtacttttgagcaagcaccaccaattattacagctgctaataaaaaaataacatcattcataataggtctgtaaaacttaaacattattatatgtggaatatatattttgatatatatatttataaattgtgttttaagtactaccgattcattgttctaagttcttctatgcaaatcgataccccctatgaaatggagtcatgtaatgagaatacctaattaaatttctaattctaaatacaattaataattattataattaataatgttcaaaagctaagccctatctacatacataatatatttgagaaacaaacaaaatccgttaacatagttttttcagaaagaagaaattaatgtacacctctccattgtccctacattcctctttacctcaagttttaccaattaaataataattgaataaaataaaaaatttccctctataaatagaccttgcattgcatgaatgttaattacaactacaactaaccattctactgtcctctctacaaagttcttaattagactgcagaaatacaagtcctctaatataaaataaaaattgagtagtggaggagaaatggaatcggtgtctcgggcagcgggcagcaacgggcaggcagcgggcagagagaggtgcggcgggggcggctactttcagatgccgttgcactacccaaggtacactcgaggcgactatgagatgatgccggaatggaagcttgattgcttgctcagagagtatggactcccaatctctggtgatgttcagcacaagaggaagtttgccatgggagctttcctttggcctcattaattattaattatgtaattttgttaatatgatttttactactaattaattatattattgtactttaattattattatcttcatgaatttgtaatgtgtgtctatttctctagctatatatatatatctactctctttcatgttagttaaactactacatgtatagtatgtggttattttggctattattaaagtaaattaattagctcgttttgatgtaacgtagagaagttgtgtaaggttttgttcttgttattttccctttggattcatgtatataactatggagaagatattgaagtaaaatgattaatttataccaaaataagttttctatgatttgtgtgcaaaataaaagggactttagcttttttttccttgtggagatcaaacttaaatatttatttaaatcattttttttatgaaaattgaaaaatattacattttcaaaaaaaaaaattgaaaaatcttcttcacctttggaatgttgttttaaatgttagctaattaagttagtaatattgaggtgacgagattttttgactccaatattgagtagtgttttcacattttatttcttactagcggagttgttgttttatttttggaattatttcataaacacacaaaaataataaaaaaaattacaaaaatataatttcatagaattttaaatattt

SEQ ID NO: 314861 - DNA, 819 bp, Cannabis indica
taataaatatatagtaaaaaaaagtcaaaagtctatattacttctttttttgaatattttataattataaaataaaagtaataaaattattttgttcaatataaattttattttattatattcttatattaaaccaaacacaataattttgattataatgttcgtttcaattacaaactaaacattgtaataaatttttattactatttttattctattacattaggatcactatgattattctattacaccaaactatacatcatatagttttgtattattttgattataactagtttaaaatcttatttgattttagtatattttcctactaattttgaaattcctccaaatttgttgaaacacgaactaaaattctaaattgatgacaaattttttgggatgaatttatagttgttgtatttataattatttaaggtgtaaatataactctccaaatttataaagtcaaaaacaagcttcataatagacttaaaacaatgtgggatggaagtttaaataaatatgttattcatgccacataaaaaaaattataattaatttatgtgccaaaaactcaaaaataaatagttttaaaacataaataaaaaacactatttcaaaatatgttttcggcatataaataatgggaaatttgacattttatgcttaaaaatgtgtaatggtgttaaattataccatcatcctaagaatttggtaactatgccaatcttttaatggtaaccccaaaatgccctctcttcaaacccaaaaaaatcagcccctcctttctctctcgtttgatctctctctctctct

SEQ ID NO: 314862 - DNA, 1486 bp, Cannabis indica
ttttaattttttaattaagtatctatatttttttttaagttctaaaacggggtttgaaattttaatctttggcggtttcttttagccctttgtgattatatgtatacgcattttatatgtataataaaacctaagtgagatataatagtgaattgttgtgtgaccgattaagcaaaattgtcttttattttaatttaaagttaagccaataaaattagaaatatagttaaaaatatttacaatattttaagtattttaaatttaaatttaaattgtttatataaaatacctacataattctttttttattttaaaattaaaccaataaaattgataagtatacttaaaaatataaattaattttttttatataaaatatctgtataatttttatttttaaatatataataatattattaacttaataaaaaatattctttttaacgtaagaaaattaaaagatacggttaaactgaaaatttcgttacataattatattttatatagaatatatataaacacttaacttcaaaacaattgatgtagttgaaaaattgtttgatggcttgaaaaaattgtttaatcgtacatgattccaagctagctaatcactgcttttaatatatagcatatgatatttaactttttttataaaaaaaaataaataaaaacaaaatatatgtatgtactcttctgaaagcaaagtggtaccaaaaaaagcaagagagattaagcaatgtaatctaatgtgacatttcataaattgatatccaagtaactgtcgttttcataagaacatgtcatttatatttatgatttgtaaaaattatcaattagaccttttattttattaaataataaaatggacttgtacattttaaaattgtacacataggacactgaactgattttttatcaaaataaaatttaataataattcgatctaaaagtgttatgacaaaactatttatatttttttgtatctgttcgtgttagtaattatctttaagttggttataataaaaaaacaagttgtcgaaaattaagctcaaggtcttatttttactatgttggaacatatatagttcattttatcatttaacaaaatagaaaatctaatcggtaacttttacaaacacaagatctaaaataatatttaacctatttattgacacaagaagaaatcaataaaatcaaaagagcttgtattcaaaaatgtttgtcataatacaatttaatggcacgtttactataccgtaatcagaatcggaataaattaatggagaaatgtaacggaataaatgaaaaataatcggaatcaatatttgtaatatgttgtttactaaaattttttagaaatggaatagttgtgatttatcttgtttactttattaggaaacgtaatcggaatgcttaaattgactaaattacccttttgagttaaactatattatatggtagttattttgcaagacatattttaaag

SEQ ID NO: 314863 - DNA, 1525 bp, Cannabis indica
tttgctcatcatatatttggatctatcccggtttccatgttaccggagaacctgttatgtaatgaccgagaggtctaatttgtgatttatctaatgacatcacgctagtttcaaaaaaaaaaattccccctctcatttaagataaaaaaaaaaaaaacggaaaggcaataaagtgaaaaacaccctttctctttatacccaattttaaaagtaaaggtgcctctttaatattgttctttgaaattaaaacattagcctcttctttctattaaaacattccatctcattgctgtttctttagtgctcgaatcaataccaatgcctcataagcttctatgttcttccataaaaagaaatgaaaaataagcagaagaagattttattagtaaattttgtaattacaaaactttcaatttatgagtttttcttttctaaaaattttattaccaagaattttttttgaaataaataaataaataatatagggtgtttttacaatataatctcttaaaatagatacaatgatgtactttttatttatttccgcattcaaaaaaaaattaaactaatttttttcatatattcatatatgttatagttatttaaatgtgctttttcattttttacactttcaaaatattttattttttttttttttgtattcttacggaattaggcatacaaacctctattgcaactagcgctgcaatttaaattgcaacaaaaaattgtacagaaacctctaccgcaactagcgttgtaactattttagaaacctaaaccgtaaatttaaaaaaaaaaaaagttaaaaaaatagtatatgagataatttcccttatttaaaatatcctacaatttaaaaaatttataatataaaaagcagtattcaaaaaatctattttatgcacgtataaaatgaaataatcatgtatacaatatatttttttaaatattatatttgaattttttttttaaaattttacaaaatatattaaataattataacgtacaatacaaaatttaactgaaaaattattttaaatactataacatataaaattatattgcatctatttcaagagatgttctttatctcttttatgaaaaatgtgactgtgaaacttttgttaatgtacctttattcttgttttggccaggcagggctttctctattggcctttgaattcagatattttatttggatagggggacaaatagagtacatccaaatttctatttttttttaaccaataaatcatttttggataaaatgaaataacggataacatctaatgatgccacgtggcagaagctaagagcatgtcccctaatttttcggcctacgtggaagaaaatctatgctgccgacatagtacgaccctaatttttatttttaaatttttaattgttttatggaataaataatgaaatgacaaagggccagtttggcacagctgtgctgtggggaaaaacagctgtagctgtgctgtgggaaaaagcagctgtagcagaactgtggaaaaaa

SEQ ID NO: 314864 - DNA, 1257 bp, Cannabis indica
tatttttcccttttatgccaaaatttatcatttcttgatatggattttaacttaattctgaacccaaatgtttgtttttttttttgattaaaaaaattgcttgatttttgtgaatgcttaaccttaacaatcaagtcttttactacataggactatttgctaaaaaatcatcggtgcattactggatttttttagcctgattgctctattgatgctgatgggaaactcttttaggtgcttggtgcttggggtttgggctgggaaatatggatggatgggatggagatcacccaattcacttacttccagcaggttctttcttctatattgaactaacatgtgctgtacataaaatattttttcttttctgaggtaggagttatattttgctagtttccacaccttcacatctgtatgtctctgtctttatcttttcaggccggaagtcttcaattgtcaccaatatctgttgaaattacttacggccttgagcgtatcctcatgttactacaggttagtgctggtagctcctcttaatatttgtttagttatcgcttgctattaatctaattcggctaattactccattgcagggagttgaccattttaagaaaattcagtatgctgatggaattacttatggggaactattcatggagaatgagtaaattagctatttatcttctgtttctttttgtttttgcttttgcttttaaacgaagtatgaaaaagtattatttcttacttgattcttgctgttcttatattgctatgtcaaggggtggactagaaaatcagaatttactatatgtgctcttttcattaacacctatattacaaacttccaccacacttgatgattctgtttcccattcctctttatgtgcgtgtactataatgctttgaagattaaattattaatggaacttgcctattatcataactcttgttattattatttaaagacatgggttcatattttttgggctcgtgtttttctgttagagcttttagtagcttctgtctttttaccttttggatgcttacttctttcatgccactcctcaaagttgattgttactggaactttctagccatagagagtaaagtatgatatttttcgaatatctttttcaggaaagaaatgagtgcatattttttagagcatgccagtgtggaacatcttcagaaacactttgacttttttgaggaagaatctcgtttcttgcttgcttctggtctaccgatccctgcgta

SEQ ID NO: 314865 - DNA, 1222 bp, Cannabis indica
gtacatgaatatgaaaaaaagtttagactactaaatttttttttctagatgccgaaacaagttaagggtgcatcagtacatccattttaagggggtgcattgtagaatcatcctatcttatataccttaaaatcttgaaatactattaagttatataaaggtaatgtaataaaatggaatagaaagaaattatctttattttattcttttgtttggttgcatattaaagtattggaatgatttctatcatttatgtagaataactattctattttaaaatagaagaagagaccattccaatgcgtaatgagaaaaaatttaataactttttatcaatttttttttatgtcattttaaattttactctattccattcttattcttattctcattctcattcttatttctatgatttcaatccttccaatcaaacgctacttaagttccaataaaagaaaattcgtgttttaaaaattacttttatcatatatgagaattgaaaaaagaaaatctaaaatatggtataaaaaaataactaaactacttagcgtcaatttttggtacaccatagggaggctaatttttgtaaaagaaatataataagttgccacataacatttttatttggagtgaaaataatattataaaacattattataaggcacttaaatagtattaattatgatattaattttttttaattacaatatgtgaaatccaataaaaaattgtaccaataataatatatatcatctcttattcacactttaattaaaaagccctaaccatttctcatttttataactagctagtatgaatgtaaatattttatatgctctgttagagttttttgtttctaaatttttagctattggaagttgtctttgtttgaattattgtagttagccttgtctctataaaaagtaaaagtatataatttgtatttattttattatttattgtatcactcatttcatacaaaaaaataaaattaatagaatgtgataaaataaccatcttaatgtaaaagctatattttaagagatattattaatataaaaaattaaaagcataaaaatgctaataataagaaattattttatatatatgcataaaaatatagtttaatttgctctttttacctaaaacatataataaataataagcagtagtactataaatacacacgaagtggtactatctatagtactactacttcatt

SEQ ID NO: 314866 - DNA, 1119 bp, Cannabis indica
accaccctctccctctggttcctacggggtagggaccttccaaggataggttttaggtatctgttgattgtaggcatcactacccatcccttgagtgttttggttgaagtagcttcgtattaagtcgctagcctctcgggtgcgacgatcttggtcatcttggcgcctcctcatctcacaagcatgaacttccagccaagatttgaattctctcctttggttagcgagactttcagtgaaggctgctcgagcttgattttgctcttagtgcatagtttggacctggccttgcatctcgcctatcgcgtctcgcagctgatccatctcggggtcaattccctcgatgtccacacggggttcattccgcgatgtaaagatgccagggtcgcgcccagtctgagcttggcccacgccattagtatgtaggacaaaatttctagtattacctcttccggtggcaccaccagtagcgccgcctcctaaggtagtggcgttggtggtatgcctagtagttgtctgtccagtggctgcagtttggccagttgctctatggccagcagtttgagtggtggtggctgtgccgccattccccagacgcgagggtcgttctccattgttcacggcaagattgcttgctgatggaacttggtgggaactttccatctcttcgtcaggtcgcttttgagatcttttagttaacaccatttttttcagtgaaaaacttcgagattttggcaaaagctctcaatgaaagcaccaaaatattgacttgatttttagccaaccgacacagaatcataataaatgagatttaaaccaaaatcacaataataaatgcagttaataacactagaatttataataaatgtaaataaaagacaccaaaatttaaagaggttcggctccggatgtcggtaatagcgtactccccttgagttttattgatttgagttgcaaaagtcaagaacaagttcttgattgcaaagaataaaaagtgttaattattctaagtgtttgagattgcagatccccttcccaggtcatgggtgaccccttatataggggagggggtcggtgcttctcgcttcaggagacgcgaccaacgtggagctatctcaa

SEQ ID NO: 314867 - DNA, 735 bp, Cannabis indica
attcttgctcatgtgttgagaaacaaataagaacaacattatgcaccttatcctaatagctcacactattccttgtgtgtggtggatcgatttggaagacattggtgggagttcaattgcatcatccttatcatctagattaaatgatacaatatacaagaagtttcgaggataccctaatagtcatcaagcagtaacttattattttatgttttgatttaatgtacacacatctggagatccaatgggctatggtgcaatgataatcaaataatataaaactcttttaatgcatacatgatttagtaccataaaactaacagtaacttgcttgcctatgaccttctgttataacatccaatgagcgggtgtggttgttgacatattttctaaccttaaaagtttgtatttattttaattttgaagcacgcagaaaccaattacaatttttatccacacaagtaaccttgtactcccttggttctgatatcttacttatgatttgaaagttatttaccatcacataacaactgattgtagttttgagaatgttcttgtcactgtatatttgtccttcttcgatctcaaggaccatgtaacttgtggtgatctccatatcttcatccatttttcttttagttgcttcatttgatttttgtataataaaatttgcaacttctccagctagttggaacatgttgttggaatatcgtttaccaggacctagatttacta

SEQ ID NO: 314868 - DNA, 1510 bp, Cannabis indica
agaaactgtcccagctggtgaagaaaagggctagaatcagatatgaatgtgtgtcatcacagacttggacatatcagtgagcaaggcctcaaagaactatacaaacaaggtataattgaaaatttaaattcttctgccttaccattttgttaagcttgtattttagggaaataacataagctgaagttcactcagacaaggcatacaaccaaaaagatattggaatgtgtgcacgctaacctttgggaaccatacaagattcctactcactctagtaagccatatttcctttccataattgattattacagtcggtatgtttggacctacttgttaaccactaatgatgagtgcctggaacaatttagaaatttggaaactcaagtggaaaacaaaaccaatcttaaaattaagaaccttagaattgataatgggttggagtttgttaattctgaatttgacaagatgtatcaagagtttgggatcactaggcatagaattgtagtgaagaccctagagcaaaatggtgttgctgaaaggatgaacgaaaccttgttgaataatgttagatgtttattgttcggttttgggttagaaaaaccattttggggggaagctttagcaaccgcaacctacctcataaatagaagctctaatagattaatagacttaaaacaccttatgaaatgttgtacatcagaatccccaacctaacacatttaacaacatttagatgtacaacatatgtacaccaatccattgacaaaatggaacctagatctgtgaagaaaactttcttaggttatgccttaggagccaaggggtatagaatctatatttccaggaagggtgaaccaaaggttttgattgctagaaatgttgttttttatgagttagaatatcctcacttgacctccaagaaaggtagtgtgtctccatgtgatgtaggaaaaacaagaaacaaagacactacaagtatggaaatggagtacgaaacaaagctcctaaaagaaggtccacagacggaagatagtctagaactggaagacaatgcgtagatggaagctattgtggagtcagaagaacatgataacgagaccaaatagaggtgtcagaagggtccagacagacaggtctagaaggttatcaattggctcgtgacataacccagagagagattcaacctctagaaaggtttgggaaagcagacataatagtatttgcagtagttcaatagattaaaattgaagaggtcggaacctatgacgatgcaatttcaggtggaaacaagtctgaatggcttaaggccatggatgaggagatggattcactctagaagaataagatttggatttttctgccaaagctagagaacaagaagattgtggagtgcaaatggattctcatggcgaaagagggaatcaatgagaatgaacctgtgaggttcaaagccaagttagtggctaaaggttgtactcaggtggaaggtatagactatactgaaatcttc

SEQ ID NO: 314869 - DNA, 1307 bp, Cannabis indica
catagttcatcaaggaagaagagagacaatagaggtaaattagtttttttaaaataaatttgtatttattagaaattattaaaataatataatgcaagctaaatattaattattatcttacacttatttatttataaacattaaatttattatttatgactataaaaaacttctataccataagaacaaaacaataatctcataaacatgtcctatatttatacattcaagtttaagtttttcataaaaacgcctaaaccttttctaattttcatgggttttttttttttcaaatcctatgagctaatttatttcacttatatataaaatatatttttattcaagcttaagttttttttttcatcaaaactcaaacttatttatgagaggaaagaaattaaattaatttgtgctatcataccaattttcaatttttttttcattgacgaaaaaaaaaaaaaaaaatagagaatagtatcaattattggaactttcaatggtagattgatcaacaatcaataaaatgttcaaccgttcaagaatgattccttgtaagtagaagtttagtattagctcgaagttgtatcaaaattaataataattttaaaaaaatagaattttttagtgcttaattttgtaacatatattctcttaaaattgtattttttttttaaagcccaatttttataattagaataggatgctaaaaatatttaaggcggtccaacctagtactttctataagtggcgctttatgattggttagtgatattttcttaaattatataaggtctgatactcaattatacaaatagcaatacgataccaaaagggtgttagacaccaatagtgtcttttagcatttttttttggttatagtgtataatataagagcattgtggagcccaataacttctatacctggcacttcatgattaattaacaatatttttaaagttatatgaaatttaatacttaattaaactaatataggtatgatattaagaaaggtactattcataagtattacattttagtaattctcgtaatatataattattgttattagatgtcattgagatgagatgaccttttacaaatgataaatatactatataattttgtcctgtgattgtactttcacggaatgtattacgtgatgtacgacaaccgttagatgagtgagttatttgatctgagggttgagattgatatagggataattagggttaaaaaatagtaacgtaccctgatactcatataatgtaccctgagatctatctaatataccacggaatacattccgt

SEQ ID NO: 314870 - DNA, 3448 bp, Cannabis indica
tcaatatgagttttttttccttaagaaattacatatccttattaattttggtaatattaaattgaacctcgtcaaattttaaaataccactcgtattttattttaaatttaattatttaattattttttaaaatattgtaaaaaatatttataaaatttaaaaataataatattttctacaattgacacacatccttaaaatgtactttagttatcgaaatttaaatttattatacattacgctattcgatattgcccccccccccccccccaacctatttagttctgggtctgcccctgctcccaacccaacaatttctctactctattatttaaaatacattattaaaaatctactttctctattttatagcacacttttacattacatcatatatcagcttcattaaaatatatcaccaaaatcttatttttttgaaaattttaatatattttatttattttaaatatataatattaatatatacacatatctccatataaaaataattattaaaatactaaaataattaataaaatatgtttagaacaataaatattattttaggaaaaggtaaaacataaatagtaaattttaaagaaattttaaaataaagaaaaaatttaaaacatctattgtaatatatttctagtatggttctttaaatattttaaaactctttattttcattttagagaaagtgtcagagtatcttcaatggtacaccattttactaaattggtgtgaaatctttacaccattttactctaatgacataccaaattatgcaccaaattctacattattaatagtgttggattttgaatctacaccaatttggtgtacaattttttttttgttgcattctaactcttatttaattttattttaaaatttaatcttacattttagacctcaagtttgaatttatcacaaaaataataattaatttaaaatactaacatgtttgcaaatacaaaataaataaaaaatactaatactaataaaataaaaataacataacactaaattataaaactaaacataataacactaaataaaatccttccaaaaaaaacattaaataaaataataatttaatagttaaattgatcacttgtaaatcttgactatatggactttaaatattttgagaatcatggtattcttgatatgtttgatattattggtaatctcttttttgtataatcatttttggatggtcttaaaaatggttgtatatattaggatcagctataaaacttcaataagaatttttttaaaaaatatttagggtttaattaatttaaaaaatatttttattttgttaactagctattttggttttaatgtaaaaaatataaaatatgagatcattcgagtaaaatatatatatatatttggtagagtatttaatatgatatttgatgtgaaaattattgaagttgttgtaccaaaaataaaaaattttacactaaattagtgtagattccacactaaattagtgtaaccattagatatgaacttagttgttaaaggtgaagtgatacttttataaacaatattattataggggatattgacactaaatttgtatcaaattggatcatgtcactttatttttcatgaggagaatctatattttttttttactttccgagtggagaatctacctattttttggcaaagcttaatttacacaactcatatatcaaccaacagagcaacctaaatcgtaaccaaaatctatgtagaattaccccataaaaactaccagctaaatatttacaaaaattctattataacttaagtattattaccgttaaaaattaaatttaggtatatatttaccatcaagagttaaacttagatatttacactgcaaattactcttctattattattatctaaaaaaaattaaaaaacagattatttcaaaaatgatgaaaactattacggtaattagattaaaattataattaacaataaattttgaatattattatattttttttattaaataacacttaaattagatatttttaataaaaaataattttatttattaaattacatccacacaaacaaaactaagtatataatatatacctaaagtattaatatatctatcaatgtattaattaaaaactcatatcttcataaaaaaaaaaaaaaaaactacatatctctataaactataaaaaatgaaatacactagtttaccaaaattctataataaaattaagatttattaactacttattgtaatataaacatcacaaattattcacataaataatatgacaaaaacacacacaaattttttttagacaaaagttaacaacaacacacctcatttaagaggctgcaactttttcttttttccacacaaaattaatgatttttggcaacctaactatctacggaaaaagggtagtaggcctatactaacattgcatatataattattttcaaaaaaacattgcatatataattgttagcaaagaaaaaaaaaacattacatatataattattttattaaattgactttttcccaagcatacgactattttataatgtttgagtatcttttatcaattctatctctactctcatcgtttcttttatccattttttttcttttgacatttaaaaaaagagagattcgaacttcaaatctctttctatgtattttctaaacttttatttagatttaggcaatcttttttttctctttgataaaagagtgagtgattttacaatagaccctcttaaaagggatgtactgatgcacactttacttatttcggcattccgaataattttttagtctaattttttctcatagtcatatacgttataattatttaagatatcctataattcaaaagaatttacaatataaaaaataatattcaaataatctattttacacgcgtataaaataaaatcgaactcaatacacaaacaaaatcaaacttgtatataatgtaccattcatgaaaactcaaatcagttagtttgagagaaatttaccttagtgttatctgcaaagaagaagcaaaggatggctgacaattgcagtgtggaagaccatcacaatggtggtcgacaaaggcatgtgaatcttcaattttctagggttagggtttattgggcttggcccatggctaaagtggaagagagaaaattagtggatttgccaactgagaaagaatgaattataattccaccaaataaaaaatgaaaaagcaattacaatggaatttttttccaaaattgttttccaaccaaacaaaagaattaggcccattagtattccattttattcatttttgacccattaccatcaactaaacgagcccttagtttaatgaaatatattctagatagttatttttagtaactaattatatttttattaaatatttaattaataagaaaaat

SEQ ID NO: 314871 - DNA, 1585 bp, Cannabis indica
tatatatatatatatttatggtaatagttccatattttttacaaattaattgataattatacttattggctttttatgtaaaaataaagatggtataattgaatatttcaatcttacttaattagttatatttttttatttttttatttcataattactttcattatactcttaattagtttatgtgcatatatcttaattgatttcttgttaaaaaaaaataataactctaggaaatataagaaataaaaaatactattaattgaaataataatattattttaattactagattatcaaaagacaagttttcacatactatttttattataaatagtaatggcatagaaaaaataatattcattacttcaaattaataaatagcttgcctttcattcaataaaaaagattttaaaatatggataatattgaaagattctaaaagaagagattgtatatattgttataaatgaataaataaaattaaaaaatatatatattttaattatataacagtctgtgtccattcttaatattactcgtttaaaattatatttttagttacttttaatataataataataacataatgtgagatgtattattatttttgtattatgattactattaatgctaattatatatataagaattatatacatatattatgcaattttaattttacgcattaaaaaataaaaaagtatttgagttaaaattttattaatgattaataaattatttttcaatatataattttaaaaaattattaaaatcacgcagagcacaggtttattgcctcgtatatatatagtatatattccaacagttcgttattaagcgcaaactgttcatctggtcttagaacataaagcccatgttccaaagatgcaccacaaaattgaatgtcagttcgagaaataatagaaccagaactcgaaaaattcaatttgtattgttgcaactgtaaacatgaaacaaaaatcaagtttctattaaaatttggaataaataagacattgtctaaatctaaaattttgttctgaaacttgtgtttggattttcctctagctttaactgatatcatttcgctattacaaactttaagtttcaactctccggattttaaataattctaattttcaagcaattacaatgaacaatagacatggttagtagatccagaatcaagaatccagatggatttgtcattctctaaaacgcatgattcaaaaactaaagcttggaatcactgcttaactgttttcggattgttcttaatgctggttcaatctgttgtgaaagataatctgagtaagtggaatcactttctctatccttctcaactgagcctaaagtagtaggattgtcagaggaattattctcaatattttcagctttccttttgcccttatctacattactggagagggatctcaatgcaagtgacaatgtccattcataagcacgcaattcagcgtccagcttgtctatgtcggacgagttgcaattgttaatcacaaattggttaaactcaagtgataagctgttgagaacaaataaactctttgctctccagataaaa

SEQ ID NO: 314872 - DNA, 913 bp, Cannabis indica
tttttttaagaaaaaatattattcacaggcggcttgaccttctatcaatagagactaactatattattttttgtggttgagtcttttctgctgaacgtcaatcacgggcctatgagtaagaaaggtgaccataatttggtaaaattacaatattattatgatttaatatatatgacgacggaggatgacgtcatttggcatcctcaatattttataagttaatttttttaatgttttatttccaccattaaaacatatataatattaatatcatatgtacataaatttatatgttttatactttcatctcacataattttttttttctaattggataaataagttatttgtattcatttctgaacaaactttacaaccttacaccttgaatcaatcaatctaattacaggtattacatattttgtttacccaaacaatatcctctctcttcctatatgactttcatgtaagtttcgaatccttctcacaataatctgttttgtacaattaataatattccacaaaggtttattcctccctttccaaattgtgtacaaacaagccttaaaaacaagcatgtgaacttctggcgtgaacaattgctcacttcgcaacaactaatccaattgagacatcactgtaaatgtgaattactatatattttggattcaatagaaattgtatatcaaacaataaacatgaataatataaatgatttctaatcttctattgataacaacaaaaatatattgaaatgagttttatttgaggcataaaatcccaattaggtggacactataccaacccagttgttcttaatgatcaacctctgccacccatggaggaacctccattggcccgtcgtacttaggaatggccaacgtggagctacccttgggcaccacgactagat

SEQ ID NO: 314873 - DNA, 1219 bp, Cannabis indica
caataagagatatattttttttttaaatagatattagacctcatggtcgttacacaaaatattcttagattgggggacccttatcctttgtgtgtgtttgtcttaggaatcacatcaagtggatttattgggtctaagcatttttcaaaagaaaaaaaatatgatatttttaaaaattactaaaaaatatatgtatatttttaaataattttctcttaggaccctgggttgatggactctaagcccgccttagctcaagcatgatcctatgtcctgataccactctaaccttatgatatttaagacttacattgtatctgaatttcttagatcataggtggtaacaaaattgttaggcctttttcaatagaaaatatggtatttttaaaaattattaaaaatatatgtctttttttttttaaataattttcttttgaaaccctacttaaagtccgtcttagcccaagtatgatcctgaatttgtagagtaaatattattttaaactttgtgctttgtaaaagttaccaattatactctctattttgttaaatgacaaaatagactttgtattttttaaaattatacaaataggaccctgattttttgccaaaataatatttaataataatctgatctataaatgttatgataaaactggttatattttctttatctattcgtgttagaaattgttttaaagtcagttatattaaaaaataaaattgtttaaaattgagcttggtcctatttttactattttgaaaagtataaggtccattttatcatttaacaaaataaaaaatctaattaataacttttgcaaaatacagagtctaaaatagtatttacagtaaccttataatattttgtgatgttgattaattcacactttcgaattaaaaaaaatcgtcttgaaattgggacataaatccatttggaaggatctaaatgattaaccacattttcaaaaaaatcacattttctactttattgccttagacaactgataagtctatagtttctaattgtattgatgtgatcaaaccgatcacaatgaccaaatatcaagaacaaattaatcgatcaaagtctatgacagatttaacaaaagcttagtgcaaaggattataagtaaaaacagtaagagtaactgaattaaagcaagagagagtgaaatcaagattcagccattaaagaactttccattaaacatgtatg

SEQ ID NO: 314874 - DNA, 2717 bp, Cannabis indica
ttattaattggctgaactattattatggctgatgttattcagcactctaacttttttttttttctttttttaaaaaaaaactttttttagagctctttctcaattattattattattattattattattattattttgagggactcagaaattttactttttgtaaggccttatttatcataaaaaaaaaatatttatacttatattataattacttttaataaatttatttaattttgtgggggatatttctaattttagtccataattatttattaaattaaaaaaaattacatttaattttttaaaatgcaatatttttgttaggggactatagcccccacatgattactagtgggtccgtctaccttgattattcataaatatatataacagtatcatattttatttaaaataacattagagtgaaaaaatgatgtacatgctaaatttttaagcacacttttattatattaagaagtgtattatagatcattcaaatgaaaaggtttcaagttgagtcgttaggaaagctagtagttgtttgaaaatgagttccaaaaggctagctaatccagaagaagtcttgtgaaaagccattcgtcactcaaaaaggagttctggaaagctagttcttccctctaggaaggagtttggagtagtttgttcctgtaggctttgtgcctatttgggaagtctttttagattgcgcttcatcagtttgaacgtttgtccagaaagcgtaatacttgtctgaagagagcttcatgccaagagcttacttagagatctcattgtaaggagccaattaagtcggttaagtcttaaccaaaataactacttagttgtttgaagccaccacttttggcattcatatcctcgatctataaatacaaccatcctcttcttttgatataagaacacgaaacaccaaaagtacgcaagttctttgagaggtagatgattgagtttcaagattttgtaaaggggaagcttttgtagatgaagaagctcttcaggaaagagtgttagagaaaaaataccttgagagaatctaaacaaagaatcactctcaactgtgttgtacatgtgttcttacacaatcaataaatgaagttttagttgtgtgaagtccagaattaaagtagaaccatagattacgtcgatctatatcagacttgaaccagtatgattcttagtgttatttttaaggttttcttgcattgtttatttatgatattatcgtctctattatatttttgttattcttccaattttagaattatatttggttgattttttcattgttaattcattttaaattagtttgattctccataataattaaaatttcccactagaagttctaacaatacactatattttaactctcattcatttttctatatgtgtgacaatagtacaatttacatgtcaaataatttaataaaaaaagtgtgaaagaaaaaagtaaaaagaagtattattcttcttatatattataatatgtttatattttttttttgtctgaaaattatttttctttaacttggtaattattaagaatttatatatcttatagtcaaggttggtgtgtggtgcatatgttgcacaccatttaatttgcagatgtaataaagtgtttggtgtgtattagattcaactataaggtctatgtatgaaaattatagctagctacaagtcattttatttattattataattattgggaaattatatatataaagtaagagtgtcacctttatacccatttgtttatgtagtaatttatagtacataactatagctcagtttgtataataattaatacatatactaagtattaataacataaaatgcatatttagttacagtttaaataataataataataaaattaaatttaatacaatttaattatatttttaaaatatgtacaatttaatttaatttaattttaaatttatttataaaaaaaattatctaactaattttattaaacaataaaataaataaataagattagatattttaaataatataactaataaatttgttatgaagtataattaataattaattgaattaacgtttgattcaaatttaaattaagatttatataaaaaaataattaattgatatttttaaattaaatttaaatatttaattttttttcgaaaaaataataattaattaattgatttaacaatattgttttaaccattagtttaatggaaaaattaaaaatacgcaaactgttttatgaatccagtttttgagactaactaaattttgggggaattatcttatatactattttttttaatttttttttcaaattttcggtttggatttctaaagtggttgcagcgctagttgcaataggagttgattttttgttgcaatttaggttgcagcgctagttgcaataggagtttttatgtagaatttcgtaaaaatagcaaaaaaaaactatttttaagtgtataaataaaaagaaccttaaatttttgaatttttaaaaaattagtgaaatatatgttataactataggacactgttatattcaaattaagttataaagttgataataaacacatctattaatgaagagaaaagtggtgtcccaactatataatcacaccctataactatacatatagatatactctttcaaagtcattttcttgtttttattattaatatttattattatt

SEQ ID NO: 314875 - DNA, 3279 bp, Cannabis indica
aaaaaacatgttcttcgtttgatcaaaaaattggtacaagatgatctatatatgatctttcaaaatatgtatgaaggcaagcatacaaaaattatcctgaatcaagtggctgaaattatcacagaactttgtgtggaatttaattatacacatcgtagtttacatatttttctattagctcatggattggcgtacagtccttttaaaattttgatgaatgatggcatgatgaatgactattaaattagttagttaaaaagtacaaatatttcaatcatagttgacgatattagcaaatttataagcacaataagtgaccgaaaataaaaaaaaattaaaaataaactatagaaagtgcatatgctcatttgattagaaatttaaagtgcaactaaagaaaagaatttactttgatttttttataagattatagttttatatgagggaattgtattatatttttcatgtaaattatttaataaaatgttactgaataattatttactgtgtgtttcatgtttaataataatttaattaatttgtgtaaatgttgctattacctaattattaacttatataataataataaaaattaaaattaatacaatttaattatattttctaaatatataaaattttgtaagaaaatatgtctaactaattttattaaacaataaaataaataaataaatttagacttttgaataatgtaactaatacaagtactataaagtatattaggagtgttcataaaaatcgaaaaaccaaaaccgaccatcaaaccgaccagaccgtaaccgaattttcagttccacgtcatcaccgaatttagcttattgggatattatagatgccatttcgaccacctaattttattaaataataaaataaatatatctaactaattttattaaacaataaataaataaaataaataatataaatataaaccctagttattaactattaggcttattgggatattatagatgccatttcgaccacctgtctagtttttcacaataaaaaaggtctatgatttcagagaagtcaaattcacaactttgtatttctcatttccaactcactcaaaaataaagcgtctcgagtcactcatttccgcaaaacatcaacatctctgaaaattagtaaccaactttgccagaacacagaaacaagctaagtgatgtcaaaatgtcacttaagcatcttaaagtacatctcttggatgtttttacacttaccagcgtctagattgacgtcatatgtcaacttgggcactgggatgtcaaccatggcgctgggatgtcaacctaggcgttgggtcatgaattaacttcagtaaaacagccataactcactcaatattgatccgattggcacgattcaacttgaattttgaagctaattcaatgatttattaagttatgtctcacactttaatcgtaattatgaatctatcatcatcaaatttcaccccaagggagttatgattcttaagttgtctgaatttgagctcgacaaagagcgaccctcaccgctctccaaacgaatcaaagctcttcacattcctccaaagtttaagaacccttcctggcattaatacaccgggaatgaagatccattatctcacatccactactttaaagtgaagatcgatctccaaggtgtgagagaagacgtcagatgcagaatcattcttgccacactgataggcctagctcaacgatggtaccttaagctctcccctggattaattgactcatggaaagatctagtggatgcttttggcaaccagttcgctccttcccgaaaatgccagatcgagcccaatgatttggtggatgtcaagcaataggaagacgagcccctcgaggactacctccaacaattcttagaggcaactgctaagaccaaaagtcttagcaagggcgcaagggtcatgacactcgcaactgaactcaaggagatgagtcctctatggttggaccttcgtcttaaggcagtatacaccatgaataacttcttagatagatcagatggatttatcaaacttgaagaagccatctcccgagccaagggctcaaagggtggcaagaagaagtcaccagactctgaagtccctgctactgaggcacaaggcaatgggaagaagggaggtttgaatagaaaaaagagagccaacaatggtggtaagcaaggaaactcctccgggggaaagaagcttaagacttggggcaagcccttacaagagtatgagccttgcttcaccacctactctattttcttggctctaagagaggagatctatatggccacacatttaatagtgtcacatcacaaacctcttcccttcaaagagtcaagtaagagggacatgaataaattttattgttaccacaataattatggtcatgacactaatgagtgtaatcatttgcaagacgatatagagtttctcatcaaacaaaagcatgccgctcttcaacggtatgtgcgacttaaagctccagctggaggcagtgcacctctccagcctgcctagttgtaggcaggctaattggaggacctcatctagttggaaaactcaaagaagcacatagaaaggtatgcaagatcactccgacatgaaccaagagtcgaagtgcttgaggtagcagaatgtcttccaaagtcttaacgctacggatgttaacctatcacctttagagaattggactcctatcatgtcaactaccctcacaacgatcctttagttgttgaggtccaaatagctaatatgatggtggctagggtgatgatcgacaacatagcatcatcaaacatcatgttccagcaagccctaatcagaatgagtttgacattagaagacttggaaccatgcaggcagcttatgtatggtttcagcgtagctgatattgctccatatggtaagatcaaactgtcactcactattggaactaccccaaagcataccaccatcatggccacactcatagtggtggacgtgaagtcttcgtacaatgtgattcccaaaaggcctaccctctacgacctttgagtcatctccttagtatactatttgtctgtcaagttcctaacggcagctagtacgagttgtcagcttggcaatcaaggaacgaccctagaatgttataaggcatcgttgtcattcgccacaaagacctcctatgctgctatggcaccagggggacgtgcaatgtgaaagtcagtagtcccgtgatccgtaaagggaaacaccgggtaagctgtgcaatc

SEQ ID NO: 314876 - DNA, 792 bp, Cannabis indica
gaggtcacccatcctgaaattaccccaagtcaaacactcctaattgtggagttctttcgtgatgagctgccaaaaaacaagatacaccttattgatataggtagtactaatcaatccatttaagccttcttaacctgtgtagtcttatacctacacaatctcaaaatcatcacactaaaaaatatgaaaaagtaaatatgaacttaagttcggatataaaaatcggaaggcctgtttaagaaatatgggacgacacgagtaaatcacgcatgagtccaagcaccgatacgaaaatattaggcctacgggctatgtcgggtctatcctttaaaaatattagcacgacacagcatgacccatatttttctgtagcacagcataacacggtccattttttaaaaaccacagataaatatagaccaagccaacacaacacacacgaacttactcaaactcgagtatgctagtatagaggtgaatggtgatatcactcacggttttcttagcatttcatttttcatctccgtttcaatttgcattctctctacttagggcttctctaatgggacattataaatccaaaaatagtggagtttaaatacaaaactactctaatggaactctaaatctcatcttatatatgtggtagtctatagtgtcacactaaaaatagtgggacactatagactacactaaaaaaatttcttaatttttaatattaaaataatgtgtttatgattaaatttttatatttatataaatattataatgtgagatagtttaataaattaa

SEQ ID NO: 314877 - DNA, 605 bp, Cannabis indica
tggcgagggaaaggagcatgtccctcaggtggtgctcgaggtgaggggaggtgaccccttgctgggtcgcgtggtgatgatggggtccgtgccttgtgagcgaatgagctattgtctccttcgatgacttccctcaatcaatcgcttcttgatttaggatgacttcagaattaagcttgataaatttagaggtctacacttatcgtaaataggtttcttctaaaaatcaacttcctaaggtgtatgtcttccatattgtataaaaatatatactacatatttcacaagtcacatatatagtatagggagcttctacagtgcacctatgcatcaatgcactccctactatttcggcatgtaggaaaattgaaaaactgagtttttgtaaatatcaataattattacagacatataattaatatacgactggaatagtctacagcagcagaatgtaattctgttactgcagaaaacagtttttcagaatcaaacaagaatcagctatttattaaaaataattgcagaaaataaaatcacttgacaaaagagatttgtacgtggtatcaatgttctttcgaacactcctagtccacggggccacgccc

SEQ ID NO: 314878 - DNA, 825 bp, Cannabis indica
ctgcttagttgattttgagttaattttttattttaatttttgtaaacttagtactctaaaaatataaaaatctgatcgtgtcttaatatttttgtaaactttctcctattttacactatgttttgtaagttctccctaatttttttaatgccaaaattttgtacaatattttaaaattattaattattagtataaatacatttgctttattattatgtacatgataaaaataaattaaaattaatatagggatatgattttgtctcgttattgtattttcacggattgtaatccgtgatgtacagcagccgtcagatgagggaattatttgatctgacagctgagattgatctaggggtaattagggttaaaaagtagaaacgtaccctgacactcatttaatgtaccctgagacccatctaatgtaccacagaatgcattccgtgaaagtacatcacgggacaaaattatatcccaattaatataatcattcaaagatctatgaacacttacgtaaaactattaagttctcgtacgtgttggcatgttgcccttattctttataagaaataaaaatataaaatctttatacaagtaattaattaacttacacatatgtcaagtactaccactgagattaataagtatggtttactagtttgacacgtaattaatccatatatatataattacataatataattccactaatttgtgaattattggaaaataattgttgtgcctataaatggctttgtttcattaattaattttgaagtttttcttggggcatgactttctaattgagatatatattctgtaaat

SEQ ID NO: 314879 - DNA, 582 bp, Cannabis indica
ataaagataaaaaaaaaaaaatagcgtatgaaaaagagatggagattcagagaaaaaaaaaaagtcagcgttgattgactgcaaataaataaaaaatcagcattggtgactgaaaaaaagaagaaagaaagagacagaaaaaataaaatcttcatagaagcttaaataaattaaaaacagtaaaaagaagaagaaaaatatatagtattttgtgtaaagccattaaatagtgatcttaccaatgaatgtgatatccatttgaaacaaaattggaaaagtaggtatatggcatggcaggtgagataattaaaagaagaagacaaggaaatatgatgacaggcatgcattgcaaatggccaacttgatgaaattgaattcaaataaaaataacatcatattttctctcaccaacttgaacctgtttttgccttccttatatataaaataaaccacttgctttcccatgcatgcaacttgctaaacttcacatacggcggcgttttgtgtccccatggaatggataatggattgatttttagtgttattcttttatacatcagttaaaatagagtaattatcatt

SEQ ID NO: 314880 - DNA, 1186 bp, Cannabis indica
acacagaaaacaaggaaaaaaattaaaggaaagtaccataactaaaggaaaatgataaatgtctaccacacttgtacaatgtcgtgcccaggactttctcatgtcatgtcgtattacgattggctagcaatagtttctaaaaattattatattaaactatatgggaccggcccgatactgaattagactaatagcgaggagggtgctaggcaccactggtgcactttagcatttatctatacagtgtaatattgttattggtgtaatttaatattaagtctcacttatttaattttaattaaaattattaaaaattactaactaattatagagcgttatcttatgatgataaaacaaccgaataaaatagaaggaaaaagtgaaagtaaagctcaaaagaaaatccatgagtcatgaccaataaaaaataaaaaatacaccaagatacaaagaaattaaagaaagaaaagtatagtgaagattaaataaaggccaaaacatacaaaagagtgaaataaacactgcaaaacaacatggaagaaaaggccctatcttttaaagagtaataatatgtatgcatataatttacacataaatttgacaagtaatttcaatcaattatttttattttatgatggatcccacttattaaaagttaacttgcccatcattatatatatatacaagtgtataaaatttatcaacctcacttggagagagagagagagaaatatattaagacaaaaaaaaaaatggttaatttttgagattcatcaacctctaaactattagatttggatcaccacaaacacaacaagttgagccaaatttcacatagaaaaagaaaacatatatataagaccaaaatactaccacaacaacaaaccatatttcaaaattcaaagttttttctctctatttttagtcttttctttgctttattcaacagttgaatatatagtgaaaactcaaaaggtctagtcttttttgttaggcaaatgttaaaccttttaataataataataataataattaaaaaaaatcactttttttcttttataaatgcaagtatatatatgcatgtaaaaataattaggataacggccagtgacggacccagaatttttacttgtggggacttatttatcataaaaaaatatttataactacattataatcactctta

SEQ ID NO: 314881 - DNA, 763 bp, Cannabis indica
tatatatatatatataaagatagaagttcatcttatgttttggtagaataaatctacacatcatcactccctaaattacttcatattgtcatcatgtatattatcaaatgaaagttgtaacattttatactcattatgctctattgtatacatcctacgatcaccgttgtatgagaataaaaaaataattaaataaaatattaaaaattaaatcaagttacttaataaaaattcacttataattaagttattttgattttgtctgtcatacactattgtggttgatgacttctaaactgaactgtctaagttgactatctgatactgccaattgaggcatgacgaatagtggccgagaaggattaagttagaaaccttaggtttttttagcaagatgaagaagatgacgacaaagaagaaattaaatgatattccaaatttttatttttgttttaatttttagttaaagttttagttttattaggactttaattaatgattttttatcttaatttaataaaagagatattggcggtaatattacacagactatacatttagttacatttaactccacaatcttaatttttggtggtaaaactctctaaacctcacttttgttttgctcattaaacatctatccaaaaacttcagttaagtcccatagtgaactgcccacgtgtacacttgtgtacacatgtcaaatttttagtagtctaatttaaaaatttcaaaaaaaaaatataattttaaaaaatatatt

SEQ ID NO: 314882 - DNA, 2371 bp, Cannabis indica
atcaatttccacatgtttagttcattcatggaacactggattctcaaaaatgtggattgttgcattgttgtcccaaaatagaagagcagggagtgagatgtcgacttgaaaatctttgagtaaggagatgatccattggagatcacaagtgacattagcatagaccgatattctgcttcagtgatgaacgggatattatttcttttttttgacttccaggaaattagggagtctccttggaaaacacagtatccaaagatagatcttttggtgtcgagacaagctccccagtcagcctcagcaaatgcttggagggtgagttttcatggtgctgaagcatggagaaaaaggccttgaccaggagagttcttcaggtagtgaagtattctgtatgcagcatctaagtgaggttgtcgaggtgattgagtgtattgactgagtttgtttacaacaaaggtaatgtctggtcgagtgattgtgagataggtcaattttccaatgaggcttctatattgtgatgcattttgcagcagagttcctgagtctttatgcagtttggtgttcagttccattggtgtagaggcaggtttagagcctaagcagcctgtttcttcgagaagttgcagagtgaagggcctatgagacacggagatgcctttcgaacaacgagccacttccagacaaaggaagaaacgaaggctgccaagatctttaaatttaaattgtgcattgagacatcttttgaacttcgttagttcatcaagattgttagtggcaacaacaatatcatcaacataaatgagtaaggaaaagaaaacacctgatgtatttcgcaaaaataaagaatgatcagctttggaggggtggaatccttgctgaataagatgattgctgagtttggcataccattatcttgatgcctgttttaaaccatataagcttttttgtaatttgcaaactgcatttgtgggaatcactcctttgggagtgtatccttgaggtagtttcatataaacatcctcatttagatcaccatggaggaatgcattgttaatgtccatgtggtgtaaatgccaattattgatggcagcaagggaaaaaaggattttaagggtattgaattttgcaacatgagcataggtatcaaaataatcaataccaggctgttgtgtataccctttggaaacgagacgtgccttgcatctttccacactgccatcgaggttatatttgattttataaacccatttgttgtcgatagcatgttggccatcgggtaaggtgacaattatccatgtgtggtttttcctcaagggccttgatttcaattcccattgcattattctagattttgtatttgcaagcttggcagccatctaaagttatttgaaaacctgctataagccagagtatttgtgagaggatgagatgttgaggtagagactttgattaaatcacacatgtattgctctaaatgtttaggcttttgtgtgggtctgccatattttgtgtggtgaacatcagctatctttttaatattgctggtgttgagttgctgtttgtcaacattgtctgcattggtgcttttgttgagtcgaaaaatgtcacccggtgttgcgtttttgctggtttcagcattgttgttgggtggttgtccagaaaaatgctggggagtaacagttgatgagaagatcttgtcgaaatcatctgtgtgagatctgttggtcataggataggtgttttcatagaaaattacatctctgcattgaaaaatatgattagtagcaatgtcaagtaaagtataagctttcatatgtttaggatagccaataaacacatatgcttttgatcttggagagaacttatgggagtggaccatgttggaagcataggccaaacaaccaaagttcctcaaatggtcatacataggggattttcggtgaagaaattcataagaagttttgtcttgtaacaaaatggaaggtgttctatttatcaaataaattgcagtacgctccatatagctccagtatatcagaggtacattagattgaatagcaagggcccgtgcaacatttagaatgtgttggtcttttcgttcgacaatagaattttgttgtggacggaaaacacaggaattgtaatggatgacccctttgctagcaaagaaacttgacagggatagttccttggcattgtctattcttacagactttatgtgggatttgtattgagtattaacaagggtaaaaaaaattttgatgatagcaggggcatcaaatttagcatgtaatagataggtccatgtatatcgtgagtgatcatcaacgatggtcaaaaaatatttgtatccttcaatggattctatatg

SEQ ID NO: 314883 - DNA, 726 bp, Cannabis indica
gagcaattcgctgctgataggccacgttcttcagatgggcctgatcgcatttttcttctaagagatcaagtttaagaaaatgtttatctacatttttactaaggttgaatacactttcactaatgttgaattcatctctttgactggtaccatggcttagcacccataagagagcgagaagggggtttcaccagtcgtggatcagggagttgtgttatacaacaatagaacatgtggaagctcttctggccatacccctttatgctcctcgagctttcccttaatggtatgctaaattattttattcattgcctttgtttgtgcattgctttgtggatatgcaactattgaaaatgcctttataattcccaactcatcacacagttggcacatttccttactgtcgaactgttttccattatctgagaacaacttgtaaggtatgccgaatctgtagatgatggaattgtacacaaactcttgcaatttaacagctgtaatagtcacaagggcttttgcttcagccaacttggtaaagtagtcgaatgtgacaacggcttattttactccgcccttccctttgggaaattctccaattaaatctatgcctaagactgaaaaaggctagggactcgttatggagttcgattaacttggtggttggtgggcatacatggctatccgctgaaatttgtcacactttttagcaaagtttgaggcgtctac

SEQ ID NO: 314884 - DNA, 969 bp, Cannabis indica
ctataaataaggcgatataatatgtactcatattttttataatatatcttttttaatttaaaaatgatttcatcacgtgtaatattaatagaaatataataccaattcaaacataatttatataataccaattaaaatttaattcatgcacttgattttttaataattagcaatatcttataattctaatcgaagtaggattatttcacacgtattaattagtcctattcaaaatagatcattaattagctcaaaacctctataaatatacatattatacacaacaaaattaaacatttccaagaacgtaagtaattagcttagtgaagagattagtcgatcattaaagttaagagtgagattaaatcaaaggtgatcatactatggacgatgtatggactttttgtgttagagggtgtggattttatggaaggactgataatggaaacatgtgttctaagtgctttaaagactttattttggaagaaataatatgtgaatctctatctaacattcacttgagtagtaatactactagtattattgctccgatttctactaccgatgagaatgatgctattactaattctctttgtgatcaatttaagagtttaaaagttacaacaaatagatgcaaatattgcaataagaaagttggattaacggggtttacatgtcgttgtggaaatctctactgcggttgtcatcgcttgcctgaaacacatgcttgtacttatgatttcaagagtgctgctcgacaaaacctcgaattgactatcatttgtggtgataaattgggaagagacttttaattttgaacattaatttagtattttacacaattatataacttttaatattttaaagtaacttttgtatccattagatcaaatattatatatgtagggatatgattttgtcccattattgtactttcacggattgtaatccgtgatgtacggcagccgt

SEQ ID NO: 314885 - DNA, 744 bp, Cannabis indica
agagagagagagagagagagagagagaaagaaagaccacccccaagtaaaacaagaaaaacgccttcactactctcactgctctcttcctttatattaaatttgtttttagaaaaaaggaaaaaattaaaaaaaaaaaaaaaaaagagagaaaatctttttgaaactcccttgtctgttgtctctctctcttgctctctgtgcttgttcacgtttctcccaccagtaatcaccagtacagacgttatagctatttgtactcacagcagagtgacaaaacagaggtagagagagaaagatagcgaggagagaggagagagagagaaagagatggtatttatagagagaaaggaagagtatgtctggttgtgaaagaaggactgaagaagagggctctctgcacaagaatatgagaaagattttcgagatataagaaacagagggttggtcgtaaaaggttaaaaacggcaaaaccaaataaatgagggtgcttcccagacaaagtcttacctatctttacacgacacgtgtatatttcatttctttcagttttttttatcccgaataattgattttttgttgttgttttacaaactcacccgtcaccatgtacaaaacaaacatttattaaagatattcatgacaaaactaggtaactttttaaaaaaaaaaactcaaaactaggtaacttagagcatgtttggtattgttttttgttttttgttttaaaaaattgtttttagaa

SEQ ID NO: 314886 - DNA, 966 bp, Cannabis indica
tactcaatcatagtgtgtaaggctgtgaataatccagtttcaagagaaggagattcggactcagatcttggtgatactctgctatagaaaggatacaagggttagagatctgagtggaaatagacattatatttcgctgcaaccactgcaaggtttcttatactttatatgtgtttatttcatatcgttttagaagttcatatttaggatgttaataacatacttgttagtaaatctaagatcatggtaaaattattccaacagtcccctctgccaaacgtggtaatgcgcgtacggcaaggagatatacacttctctttatccaacgatgtccctctaacactcttgtctactgcagcaacacccatgtgtgacacttgttcaaatcatatgggtcccccattgtacggacgcttttgcccaaaggtagtatcttaccatgggccttagtgtcatatatttaatgtatttaccctaaagtgggatatttttacacagaaaccctagcagtcgcaagtatgccagattcatgtaaatagaaagggaaaaaaaacacttttgagaaatcatctttaagctttcttcttcactaataaaaacctaaaggagaaataagatagcaagaactagggttcttcaagctgtaaaacttcacttgtaatttattcaaagcctctaaaagctaatatactgattcgtggactaagaatctttaacatccgaaccacgttaaaatctctatctcagttatttaatcgctcatttatttacttaataatattgttgtggaaccactatgaccacaataatattattttttattgaaaaaatttcttagttacttaataatacttaaagggctcgtttggaacgccgtattaggtcgtattgtattgtattgtattatattaaattggattatatatcatatttttatataatactatgttaaactttaatttatac

SEQ ID NO: 314887 - DNA, 665 bp, Cannabis indica
ccagtacgttgggcgtatcttcctttcttcaggaatcgagcgatacgacccacggggaattgaagtccagccttgacggacttggtgaccgacttctttctgtctccgcctttccttcctccggctcccttggctcctcccttggttgctttggcggtgtccattgctgaaacgaaagttggaagcttttctctgaaatttaggttctgaaaatgatcggagttggagggaatatgattttgttctgcgttgattttggtgggtacggtgggtgtgagtttatataggtgggatgaaagggactgccacgctggcaatccgcgaggtttcttttggatgagagagattatggattgaaagggtatgtaattgaaataatggatggcacgtgactttcagacactctagctaaaaaaatggtctgccacgctggcaatctgcaaagtttcatttggacgaatgggattaaaggtacgtgattgtggggtttaatgaagagtattgccattatcaaagaaaaaaaaataatttattatctgttagggtaatcaaatctaattattattttgtactatctgttttataaaaaaaattaattaaactttttattttgttagatgataaaataaattttgtattttctaaaatagtataaatagaaccct

SEQ ID NO: 314888 - DNA, 1146 bp, Cannabis indica
ggatgctcttgcccagacctacactcccaaaccagtcccgccttaggcacgagacttggtggtgactcccgggaggtcttcttccagcattcccctggaccaagtcgttttaatcaacgaggaatagggagtagaggaagaagaaggcgagattcttcctcccttggacaggatgcgcaaaggaaaaatggtggagactaaggttgctaagaagcccaggagagtagacactctggctcccaactctaattcagggatcccgtctgaggtggacgagtatattgttccgccgggtatcatcctaacccattcttgctgatgaggaaagaacccaactccggatcgccaagcacaactatgccacggcagagtacacaaagaggaacgccgaggtggaggccttgaaaaagattctaagggaggcccatgacagttttactcgaagtgagtacgccaggaacgtctgggatttaaatctagatcctttgactgatcggttcaactacttcatcggacccaccctggctccctttgccttagaattaatgagccattttgctgccggcctagttcagctccctatgaagagatacgcgaccggtgcttctaccaatcccgtctactaaatccaggacgtcagcgtggccatgaccgcagtaagttcctctctgttagaggtatttttgggcttcttttctttttggtgcatgacattatgtattccttatacataaattttatttgttgtcagattgctgcggagactggttgtctttcaaagactcttatcgaccatgggtacaccatgtccgagtttgaggcatggaggaggccatgaagagtcttcgagacttggaggcacagaaaagagctatccgggaggaagcccagcagaaagaggcccttatggagcagagccaccaggaggtgctgaaggctaaggatgaggcgttaaaggccaaggatgaggcattgaaggctagggatgcggccgtggccacagtgaggcgagacctctgggattctaagcagcagtgcaggaattgactgccaagctgaagtctctggaggagttcatcaagtagatttgtaaacgacagccaacctaactgttgaagtgaaggggcgtcgtgaatataaagagta

SEQ ID NO: 314889 - DNA, 1678 bp, Cannabis indica
ggtaagaagaattctctttgcaattgtttgaaaaagtatttagaatggaggctgcattaatagcactaacttttggaaatagagccaaacaaacaattttagaggataataacaccgaaaaagatgatcctaaaaatcctggaatcaatgatccacataaggacaaaaggaaaggaaaagtgtgaaaaaccgcaaagaagccttctcaggttgaacaacagaagaaatctaaattagccagccaaccttaactgaaaaagaaagaaaaccatgctttaggagaggatgcacaaactaattctagaggtagagctgcacagaaagataagtctgatacaagagccaagaagcctactatttggaaggataagaatcactgcaatgattctagcaatcgaagtgatgatgtcaaagaggtgcatccaattttagacaatgatagtggaagtctctccacaaatgatcttcgaagaagattaaaagaaaagaaagagaaggacataacaaaataagccagacctagtgggaatgatttgaggaatcatatcaatgattgagtttgcggaagggaattttcaaatgataaaacttagcgcttggaatgcaaagttgaagagttaatgaagctcacggagaatatctcctgaagatagaatggaactatgtccaatttagaagaagaagatacaaaaccatgcgtgaagaaaataatagaggcatcactatcagagcacttcaaaatgcctcaaacagaattatatgaaggaagaatagaccccagggaccacttacccaaatacaatcacatgatgcaagttgctaacgctagtgatgatgtaaagtgtctttgcttttcattaactctgacaaaatccgtggaagactattggaggaggttatctccagtatcaatccacaactagagggatctccaagtagtgttgaaaaagcaattcatagcagcaaaggatgttgatctggaagctagttccttgactaccgtcaattgacaacacaggaaaagccttaagaagtacatccaagatatgatggatgtcgctgcaaaaacaaaggttactaatgatatgaagatattggctttgacatcaagattaaccactggatcttttgtatggggagaactataatgaaggagagcagaatctttatctgactttctatcaagagcccaaggattcatcaatctagaagatgcttacacttaagtttacggagtacttccagcaccttccaccaacatagtaactgcccagacttcacaaatgacaactccgtcaattttccctccgtcaatttttatacaaacaaatcaaaaagcgaaacctgtagagcccaatgtaagccaatcacggagcaaaagaagttctaaaggtccaagcaagagtgactctgcaaagaaaggaaaacttaggaatcaagatactccgagtacaccaaccttgttgatactcgtgagaatttctataaagaaactgataacatggtccattataagaagcctccaccagtgtacaaggatggaagacagaatagagacccaaacaagatgtgcagataccatggtgatattgggcacaccactaatgaatgtgactatctaagggatgagatcgaaagattgatttgaaatggtcatattgttggaaataattttacc

SEQ ID NO: 314890 - DNA, 689 bp, Cannabis indica
tgtgagtagatctaagatcctgtaaaataatttccaacatttacatgtgactaatgcactttatatagttgtaggggttacaaatctgggcatagagatttcctagaaaagtagggaggttacaacaaatatttaaatcacatagagattatctcctataaacttgggttgttatttactgatggagaatcctatcttcgtggacagtttgaactgatccggagtcgtaggcatgttgaaggcgagttggaaggcttgtgagaaaacacaagtgttgatgcattcttgtagctttggccgaccaaccttgttgaaggctgcccagtgcatggaagttgtccctcctggctgaccagctatagattctgccaggaccttattggcaggtacatggattcctgatggcctgtatgtgttgtgcaacatatgcattccaggtctagaaagctgcccaacactagtaatgttgaatgcactaacctggcaggttggaaagctgcccaacactagtcctcgcaggttaatgctaaatgcactaacctggcaggttggaaggttcacgactccaccttggtaggttaatggtgagctgttctccacgtatcttctgcttttgaccacgtggacatgccacgttaggtggacaaaatttgggataaccttttggtgggttttgtgccctaaataaa

SEQ ID NO: 314891 - DNA, 948 bp, Cannabis indica
aacaaacattaattaaattacgtagtaattagtgttctaaaattgaccaaaataccacatttctgggctaaattctaggaaagaaacctaatatatcacctaacacttaaatctaatttatataattgtccattaataaaaaattgcacatatcttttcttttggtccatttagtttgtcttttcttcgacaaagaattaatttaaatttttggtaattcagctacaatgggacataggtaaagcagggtcaatcaaaatcaatggcactgagtatttccttcatcaatgccactggcattcaccttctgagcacaccattaataacagaaggttcaaatagatatattttaaatatttcaattatcttctaataacaataaataataaataattacttatttcaataaatattaatcaattatatattattcgattttatcaacagttatgatatggagttgcatatggttcatatgagcaaagataacaaacttgctgtgattggtgttctctacaagcttggttgtcataatgttttccatcaaaggtacctaacaatttcacaattatatataactatatattattcattaaatataataattatttaattaatgaagctaacatgggattattatatgatcatgattagttgatgagtcatataacaagtatggccgatacacatgaagaaaaacatttgggtatgattgacccatctcagataaagcttggacataagaagtattatagatatatgggatcactgactgttccaccttgtacagaaggtgttatttggaccattagcaagaaggtacgttatacataattattatttaataatacacaatattagtgatattaatcgtgtattatatatatatatatctttatatattaaaagtgcttatttcttggtttaacattcttggtttaacagaat

SEQ ID NO: 314892 - DNA, 2818 bp, Cannabis indica
aattattcaaaataataattttacaaaattactattttcccctcaagaattatttctcatagaaattaattatttctcaattcatttgtcaaattaaaccttcctagtatagtgttatatagtggtgatctggtgactatgaacctatatttcgaagctccaataaatactagattattattgaactcttcaatagaataatcagattcattaattctattattactccataagaaatatggaataacactctttgacaatatagaattatatttacaaaattcttacttatagtctactgatataactaatataaatagttttccctccaattattagtttataattagagttggtaaaaattacaattttacccttctaattatctcttgaattcctatttactattaattcaatgtgaacagttaatctaaaatccaattatagatttggatctaactgttagcccttctaaaattaacacttgagggaagtaatatttgatcctctcaaaaagcttggattccattattgtataacatgttcccagccactcatgttattaagtttcgaaaacagaagttgtaaaactcatcttctctgagaaattttaataagtgaatcaaataactcaatgaacacaaataggagttcgtgtatacttatgattcagactgatctactaatgatcattgttgtgatatgaataattatttcattataaatgaaaagttgatgaaagatgttattttatattggtccagtgatgtataactaaattatatacaatacctttcctacatgtctatccatatatgtgatctaaatcaaaatcacacaaactagtgtataatgcatagtaaattatacttcgtaactctatattaaagattccatactttaatacactaccaaatttatttgtatttcatatattatataatatattattaattaaatacttgtttttagagcatacgccctaacacatacttctatagttatgaagacaataaagtatttgtatcgacaaatgctacatttcttaaacatgattatatgaaaggtcacaaaccatgcagtcaagtggttatcaaaaaaataaaaaatgagcaaatttttgaactgtgaactttagtaccatcagttgaatgaccaacatgttaccatagtttttggataggaaatcccgatacatcatcgcagtgggaggattgtgagataacttgttcgctacgaacatgaggcacatattcttgtctctgacataaacaagaatgatccattgacttaccaacaagcaataagtgaccttaactcaggcaagtggaacaatatcatggatcaagaaatagattatatgtgcaccaacaaagtctgggattttgaaatcttacataaatgtgtagcacctatagaattcaaatggacttacaagaagaagagaaatactgaagggaaggtatagacctataaagataggctagtagccaaaggttacacacatcaagaaggcatcgattatgataaaaacttctctcatgtggccatgcttaaatctattcacatttttctatccataattactacttatgattatgagatatgaaaaataaacgttaagactgcttttctgaatgacaatctcgatgaagttatttatatggaataacctaaagggtatgtgcaacaaggagaagatcaaaaggactgcaaattgcttaaatccatgtatggattgaagcaagcctttagatcttggaatattacccttaaagtgtatggttttgaaaaaaaatgaagatgaagcttatgtatacaaatactttaaaggtaatatagtggtactcctggttcttatgttgacagtattctacctattgaaaataatgtagaaaggttatcagacataaagcagtggttagtcaaaaaattcaaaatgaaggatttagaagaagaagaaagctatgttttaggcatcaaaatctatagagatagaaagaggagaagtttagcactatctcaagaaacttatatagataaggtgctagaaatattctcaatggagaattccaagaaaggacagtttccgtagagacatggaatttctctgtgtaaggatcaatgtccaaagactcctcaagagatggaggacatgagaaagtatccttgtgtatcagaagttgggagcttgatgtatgcaatgttgtgtactagacttgacatatgctatgttgtaagaattataggtcattatcaattgaatccaggtttgaaacactagatagttgtaaagcacattctcaagtatctttggagaatgagagatctcatgcttgcgtattctggaggagagttgaatcatactagatatactgattatgatttttaatcaaataaactctaagtggttgagctgtagtctaaagaagcatcaagcaaaccggtattgtagattcaaccatggaagctgaatatatagaagctaaggaagaggtatggttgaagaagttctacactgatatggaagtagttccaaaagtagaaaaacaactagtgctctattgtgacaacaatagagcagtggccagttccaatgaaccaagaagccacaagaaaggcaagcacattgagaggaaataccatgtaataagaaatatagtagagagaggtgatgtgatagtcttaaagattgtgtcagaacataacctggtagatccattcataaagacgctattggcaaaatcttttatgggtcatataactaatatgttattaagggagatgcccaattttcttttagggcaagtgggagatt

SEQ ID NO: 314893 - DNA, 1378 bp, Cannabis indica
aaattttatataaatatgtgtgaattggattagataagttacttttacatgtcaatcaacatccaattcgtaaaaatacgaattttaaattttccaatacaatccaatatgtacaattgtggatattcacactttgcgaaatgaattggattagattgtgcggattagattgaccattttatgaacacccctagttgaatgctcaagctacgaggttggatgaacctgctacaacaatttccattgttaagacttctgagtgctagatactgttgtatcttttaagcggtagatgaaactaaatattggtgttttaagattaactgtgatgctgcaatctttttcatctaattttgtttttgtttttttggtcaactgatctgggaaataggcgactgattatttgactagtttttctaattctaattcttgttgtgtctcaaatgaatgagatgtctcaattggattgcatactattattttagctgattgctattaataaaattgcattatttatttaaaaaaaaattattaattacattctttttgaaattgaaaatattgtttgctagagttttttattcttaaatcttagctttcaagggttgtccgtttctcttaccaaacccactgaccctccctaggtttaggcgtggcctagttgggtgtgtggttttgttactgcgattgggttttgctattacaattagtcttgtttatgtgacatgattttaagtgttttttttatttaggttaatgtgagtagtcttgtatgtgacatgaattttattttgttgtcggttctatcttctttattttttgattgctcgttgtcaaatcgttgttagagtactggttgttattaataagttctctatggttcatcttttttgaagggattgttagtggtgcaatcacgtaccttgaacgctagttagtgctcaagctaagggattgaataaacctgctgcaaatatttttacttttttgtgtcttttgagcgatgaaagaaattgaatataggtgctcttaaagttaacaatgatgctacaatctttttcatatgatattattttagtttcttttatcaaacgatttgggaatcaatcgactaattaattggctcatttttcttattctaatccatgttgtgtttccaacagggagatgtctttagggctgttcacaaagtatctgatccaatccaattcaatccgcaaaatgtgaatattcgctcttgcgcggattggatttgattgaaaattttgaaattcgtacttgtgcacattgaatgttgtttgactttaaaagtaattgattcaatctaattcacacttaattatatatattttaaaaattataatatataatattatat

SEQ ID NO: 314894 - DNA, 1846 bp, Cannabis indica
aaatattgttttaaaagtgtgaaaatgaaaaagcccctaaaaattatttctacatagttttacgtaaaaatattacataaaatacaatttaatataatagtatacaatacaatacaattgaataggcgtaccaaaagaaccctatgtgctttaatatatgaacaactaagagataatgataacaaaattacttaaattatacatttgattatacttaattttacgaactcaatttttgggactaaaattttttgaactctcatgaatttctcaagtatttgagggactgctttttatctaaaaaagatactttttttaaaaagaaaatattgaatgcaccgaacttttaaatatttatataattataggcagggccggccctgaaacaaagtgggccataggggaaaaaaaaaacttggggcctttatgtttgaaaaaaatagtatttttcaaaatcggtaaaaaaaaatgtataattttaaaagaggaaaaaaaaaatttaggtccctgggctgggtgggccctaagcacaggcctagcccgtctatgcccagggccaggcctgattataggacatgtctatagtagtaacattagttttgtctctatgatagagaagtttttatagccattgattataaatctaatggtagtaaatgaataggtgtataagaaaagatatatttgcattgcattagattattatttttatttatttttattaatatttaaaaataaataatagtttactaaattaataaaataatacatgttaaaaaacaataaaataatatattgtgatttctttatcctctcctctttagccgtagtatctctctctcactcctcttctctttcttccattgattgaagagtcctctctatattttattctagattttttgccgaaaagaagagaataacaatgggaaaatttgtatttctatccatgttttatacccaaattaattctctaaactaatacttataactatataaaaaaaataggattacttttccctaaaccttaaaatacccctctcattattctcaaccatctctctcttcctcctttctctctcaaatcaaacccaaaaccaacctatcaatccaagccgatccaccggcgttccacccaaaaccacgatcgagcaccggcgttccacccacggttaaccaacctctcatctcatcttgctccggtagacccaacgaatgtggctcccacttcgcaccatcgcaccaaccgaacggccaacgccacctccgaccgagacgccgacggagagccaaccgaacccacagcagcccactctgatcgagacgccgacggagacccaaccgaaccaacagcagcccactccgatcgagacgccgaccgagacccacacccaaccaaacctactcggacccgacttcaaaacccccaaaaaaaagcccatcgggaccatcggacccatgcatcgggcccatcggactgcatcgggcccatcggacccgacttcaaaaaggggtaagttgaaaaataccacttttattaatcaattaatcaaatttacctctaattttatatttaattgaaacatatctctttttatatgtattgtacctaaaataccctaacatatgagagtcacatggagagtatcttaaagtgatagggacaaaattggtacaatgtttaaaaaaagaggtaaaaatgatagactttaaaaaagaaggtaaaaataaagaaggacaatgtaaaaggggtataaagtgtaaattttctccttacaaaactacccaaaaaatgcccagtcgaccgacttcaaaaccaaaaaatgcccccatacggacgagcatc

SEQ ID NO: 314895 - DNA, 1296 bp, Cannabis indica
cctgacataagagagtcacatggagagtatcttgaagtgacagggacaaaattggtacaatgtttaaaaaaagaggtaaaaatgataaattttaaaaaagagggtaaaaatgaaagaggacaatataaaaagggtatagagtgtaatttcctcattaaattatctctaagtgttgttctagtgaagcccgactcaagagtggaatgagttgggccctcgctaaggtgggctcgttttttaaatttctttagaaaattatacataaattaaattatcttcaagtgtgccgttctagtgagacccgactcaagagtaggatgagttgggccctagctaaggtgggcctgttttcaaaattttataagaaaattacacagaaattaaactatgtccaagtgtcgttctagtgaggtccgactcaaggttgggtcctcactaaggtgggactgactcaagagttggatgagttgggctttcgctaaggtgagccttttttaaactttttttagaaaattacacacaaattaaactatgtccaagtgtcgttctagtgaggcccgactcaagagttggatgagttgggccctcactaaggtgggcccgtttcaaaaatttctttacaaaattacacacaaattaaactatgtccaagtggcgttctagtgagagcccgactcaagggttagatgagttgggccatcgctaaggtgagcccatttttaaacttttttaaaaaattacacgcaaattaaaactatgtccaagtgttgttctagtgaggcctgactcaatggtaggatgagctgagccctcactaaggtgggctcgttttaaatttttctttaaaaatttatacacaaattaaactatgtccaaatgtcgttctagtaaggcccgattcaaaggtaggatgaactgagctattgttaaagttggcccatttactttaaaataaaataaacttattttctttgaagaaatgacctatagggaaacttacaaaaatactggaatttgggttaatttttacaaaaatactgtcacacggaaatctttacaaaaatactgtatttttataaaacaccagtaaaacacaaagcagaacaactcaaaacaacagtagaacaccagtaaaacaccagtagaacaccagtgaaaacttaacacagtatactgcagtatgaaacttataaaaaaatacagtaaaaaagtaaaaaataccgcctgacagtatttttgtaaaaaaatggcaaaagttagtataacatgtaaatttccctatatatatatatttat

SEQ ID NO: 314896 - DNA, 1014 bp, Cannabis indica
tggatttcaaatcaacatgagataaggagtgttataacaaaataataatgagttttatagaaatgacagtgattgtttcgcatttatcagattccaattaaaatattggaatttttaatctggtatgatctgatttggttacaaaaagtaattaagtacctataaataattagggatatgtttggcaccaaactactcaaaagctttgatttattatggaagagtttatggtatgagcacagagagatgataagacttcagaaactaaccatctgaccaatctgtgcctctgtatatttagtcttacaatatttttgggttgatgattttcatgaaacacaatttgaaatgaagttttctattctatttagtgaaaattatcatagtatgtgcacaactctgtttgatttaatttagtaaagaaaatgagaaatttagaatagattttgatgggatgtgaagtattgttgtgaaacacaaaattgaaaaggctaaagatgtaattaacaataataacatcaaaaggagaactatggtggtccacaatgcgcaggatactgaatatatgaattgtactgagaagaaagaagcacaaataaatggatttaaggctgcccaactattaattaaagaatagagtagaataaactgtggcgaggccagcagcaaaatattattatagaaacagtatgcagaagacatgcattaatttgagaaagaaaaaggattaatgacgtcatatatgaaatgaaggaatattaatttaaaatgagaaatggaccctatttgataagtgatcatgactcaatagttcaatctggtgtaatgtacatgtatttgcatcttggactttccttttcacgaaaaatctatcatgagaagaaacaaagggctcgtttggaacgctgtattaggtcgtagtgtattgtattgtattatattaaattgtattttatgaaatattttatgtaaaactatgtgtggtattaacttttatggacacctaaatatata

SEQ ID NO: 314897 - DNA, 724 bp, Cannabis indica
cccatataatttaatataatagcttttaaggagtatcgctagccaatctagtgcctaatagtaatgctttttaattatttcttatattttcttgagtgaatgactttgaaaatcaaacttgatatggttagttatataagtgatattagattagctcattcaaataccttgaaaagcaatctttaaatatgctttaaacatattaaaaatctatataagtgatattcgattaactcatttaaataccttcaactcagtcaacccaactccgccaacaaccctaatcatgaggattagaagatttaccaaaaaccagacaacaaattatacacatgatcatcacttcaagacttctaggttacgattatataaggccaccatattaattacgagacaaaatgttttgttatataattaaaagtattatataaaagaaagatattaattatgcccacctcatagagtgatctagcatttccgaatataaaatcgatagagccttggatgaagcaattcttataataatgtctaccacggtcatcattaagcgtgtcttgggcgccatagaatccacacccataaaatgcagcttcatctccagccacccgaatcgccaccgcctgacctcccactactcccggtgacggaggaggggctgtattcttttaattgcaaatataattaaattcatgcattatacattgatatcacatgcatgatatat

SEQ ID NO: 314898 - DNA, 1316 bp, Cannabis indica
tcagatcttgttattactctgtgacaaaaaggaacaagggttagagatctgagtggaaggagtcattaatattaccgctgcatcaatgtaagtgtttactaaactcttatgtatctaattttatcatattagagaattcatatttaggatgttaatgaaacatacatgttagtaatctagatcctgattaaaataaatcccaacagatcttgcatctccgcttctagctctttcattcctttttttcatcctttctcaagtgttggtgagtggaacttaagttttccctgaagtttgcatggagcatgtgagtagtactcctctaattccatcgtgtggcttcccaccatgatttaggggtgacgcctttcactttcttatctcttgaaagggggtgcaagcacggtgtctcctagcacgagattctttgggtaaagtcccttcataagaccacgggatgtctccctcattgtgatcttaccatggtggttagattaacgttgccttgaatgaccacttgggtccttatctcgcgataggtccttcctgttttcatcctttggggtgccatccgttgatgagatgacacggagttctctccatcaacatgtgcggttgggattttgcactcttgctagtgatttttgtacagaaaatgcaaggctttagttttgcctttgagaatgctgctcaacatttttacagaatgttaaatatttttatggtttataagtttttatttacaaatgatgtgtgtcgtaagccacaacaaatttacttttttttaattccaatacttccaattattttagtataatcataagtaaggggtcgatcccacgaggactatgtttatttaattattcaaaaattagtgtcaaaagttagaaaaggggttttaagattgaaattaaatagcaaacataaagtaaaaaaacaaattaaaattgagattataatatgagaactagtaagttattcgcacctcacatcattctaatcctatatgaatgcatgcagtttccaatcaaactataatcccgcagataaacgctgaagcagtcaattatcacaatctccctattgtatgtaatcaaggcgaagcgctcaataattaactcttttacctaaagcagtaaatctatgaagcatgcaatttatttaacttagataaagcatttgagatttatggagatagactaatctaggcaacaaatcaaatgaagcatataattcatttaacttaggttctattcttcatcacaaattgtaatttgtcacaaacactcagaatcctagactattaggtgaatagt

SEQ ID NO: 314899 - DNA, 763 bp, Cannabis indica
aagtaattagaaaggtaaaataaaattttgacaaacactaattacgaaccaacaaatagagagctaatcactagaattgattatatcaatggaaactgctgttaaagtcattaaatataattctataattactaaaagtgaaattctaaatttatagcggagtaatcatagaattaataaacaatggattatttgactgatgagactcaataaataatctactttattggagtttacaattataagttcatggtccctgaatcgtcaccttaaaatattgtcaagtgtgggtataaagagttgtatgaagatgttcagaaaagtatattttgaattggcaaaaaatagagaaaagacaaaaaaattcatgataaaatttgtcgagactagatttttcatgacaaaagttgtcacgacaaaagacactaaccttgtactaaagacaatggtaggcacctatgcttgtccttgtccctatggaaatttgttttgggttaattaattatttagttaaatcaattaggtaaatatctaatttgaaaagtagtcatgaatatttcaagagattccctcataaatatcattaactgaattttgttatttagataattgtttatttaaaaaattaaacaattaaagggattcaactactataaataggagcctaatttaagaaatcagaacacttcttttacactacaaatttcaaaatatacagagagaaaaggaaattagtttttctctctattgttcttgctcatgt

SEQ ID NO: 314900 - DNA, 2509 bp, Cannabis indica
ctctctctctctctctctctctctctctctctctctctctctctctctctctctccctcctaaatactctacgatcttactttgtatctcttcacttcttcttctttcttcgtatctctctctctctctctctctctctctctctctctctcaatctcagattattctcggtctctcactctctctcctctcaatccaagattgttttcaatctctctcctcccttttcctatcttttctcttatttaggttaattttctttcttaaaatttgattcaataacaaatattatcatttttattttttaattgatttccattttaaaaatggggagataggtactttcggggaagaaacaacactttccaggtgccagaagcaaggcccagtgcctatgttgacactggggctcgcccaggttgacattttgtcaacttgggccaattccaaggatgttttccaagaactcttccgagcatattctccgctttcaacaaaaattaagattcaactatttcgggaccaaacagatcttccaaggggccaaaattgggatccaatgctcaggttgacacctgacattgagcccagtacccaggttgacacttggcactgggcccaacatccaggttgacatctggcactgggcccagtgcccaggttgacatattgtcaacctagactgttttcaattagtttttcgaaaaaatgttcagggtattttttcctgcattagaataacgaagattcaaacaaacttggggagaaaaccacaaaccccagggcctcaaagttgaactcaatgcccaggttgacctggtgttgggcccagcgcccaggttgacaatcaacctggtgcactggttttgatcattcaaatgccaaatttgatctgagcattctttttgggatggtaaaaagtggggtaggagacctcgtccttaagttcaagaaccttggaagtatcaaaatgacatcccagaagctctgaaataagcacagaacataagattgacaaatgacttggtgaactggattctgcttatccaaactgattccttctcgaccgtccatctagttttttaaataactgggagtcatgaagtcagagaagtcaaattcacaactttaaatttctcatttccaacatgggaaagcctcctagaaataaagtgtttcgagagtctctcatttccacaaaacaacaatatcttcgagaactagtgaccaactttgccagaacacataaatgaactaagtgatgttaaaatatcacttaggcattaaaaattacatccccacgatgttttcccactcatccagcgtctaggatgacatcatatgttaacctgggcgatggatgtcaacctaggcgctgagatgtcaacctgagcattgggcccaaaacaacctttagtaaaatggctataactcactcaatattgatctgattgacgcgattcaacttgcgttttgaaactatttcaatgttatatcaggtcacatttcacacttcaatcgcaattctgatgttatcgacctaaaatttcacccaagagagttacgaaaataagttctgacacactcggagcaggcctcgccaccgtgactcgggctcagaaaattgactatcacgttaaaagttaattttgactgttagaacataatctatagtcaaaattatccaatttagaatttttcatattttaaattattttttcttatttttaaggacctcctttacctataaaaggagagctcttctagctcatttttcacatttagaaaattatccacaaggtcaaaacatctctctcttgaaatcagagcttaaacacttggtctttttctgtaattaccatttcgtgagaaataaaactcaaagtagacgtaactccgttacaattgtgatataagaagtgtgggcaatgcagagtttctttcattcttttttgtttttgaaatggacaatgcaaagtttccaatcttgatcttttatctcaaacagttattttttgtttattgaaaatgatttgtgagaccatttcaatttgtatatatttgagggcaagtatgtcatttgtgttttggtgattgttctagtaaaattaaccagaaagcaatgtgttgaatttaataaatgctggggtagttagaatgtcatcgttgacttctagtttcaaagtctttcttgacttcattaacctgaatgaacaaaggtgattggtactgttgtattcgccatgcccaataattatacatatacaaaataaataaatgaaaaaaacactcaaatcaccagaatatgatagcaaggggatttctttataatcaacatattaagcagatttaaaaagaagaagaaaaaaattagttagttactttttgtggcgtagaatgaataatatattaacatctctttcgaaattttgataaagtattgagctatatatgttagagattttataataatggaagaaaatcaagatttaatcaaactctattgtaa

SEQ ID NO: 314901 - DNA, 1222 bp, Cannabis indica
ttggatttatttatgtgtgaattttcatgaatacccttgtatgtgtggatatgtgagaattggccctagggacaatttgatcattttgacccattgtattatttttagaaattgagaaggaattttttttttatttggctacccccatacccgaaacctttctctctctcaaaccctcttttatttcaacattgaattgaaggaaattgcatgagaattacttgtgattaagcttgcttttgaagaattaaggcttgattatggcttgagtttgaggtagctcttcttaccactctttaattttggatttgtagctgaggtagaaattgaaaagcatgttcttctaagctttgaatgttcttggttgcatgagtgtgaattttgaaaagtttgagtgttaattgcaagatattgttgtgagtttattgttgattattagatgagattgttgagtattttctaggtcagaatttatgtgttaattggtgttatgccactggagaattatttgagttgggtaagtttgaagctcaagttcatgagcttgaactttgttagtttaaagcatgattttgtgttgattgtgcaatcttaattttggggtttattgttggaattgatgcatgaaatatgtatttcttactatctaatatttggtaggaactttattttgtgatttgagagtttagttgtaaatttggtatgatttagaggtattttgctgctgaagttcgtgattatgcttgctagtttctgggtttggaacccaggtgttgcgacatggtttttagcatgtcgcaacccatccctgtgtgtgaaacctgggagttcatcccaggtgctgcggcatggctttttcatgccgcggcccgccttcgaatttttgggcagttttgagtacaactttaaaaatgcataactttgtaatccaaactccgttctgggagttcaatataccgttggaaagctcgttccaagctctatgtgattatctatattttaaatgccatgaatatatattatgaatgtggaatcaggggttaaccccatttgtgtaaatctcgatattgtgactaggattaccggcacctagttaggcgcacctggggatttggaatctctactattgcgagacatgaagtaagatagtagttagcacatacagttatgcacaatggcgcttatattggaaaaggtacatgtaagtaattagtaactggga

SEQ ID NO: 314902 - DNA, 606 bp, Cannabis indica
gcgatctacaaagtgagatgaaagagaagacaagtgcaggcaccaagtgaagctaatattagggcaaacaaaaatcaataaaagtataaaagggcttttatttatttatttttttttttattattattattattattattttaaaataaggattctttattctattgggagttttatttgcacccaataaatataaggagttttttatttttatattttaaaattaattttttttttttttgccattttttttgcatttttatgaaatttcacacaaaaaatttttatagcaactaatagagaaatttaaatcgcaaccaaaattcgtataccaactcacataaaaactatcagagaaatcaccgaaacaacccaaatcgtaaatttgaaaaaaaaaagttaaaaataatatagcggataattcaaggattttttatttttacattttaaaacagttttttttatatatatttttacaaaaatccacatagcaacccatacataaccaataaccaataaaaacttaaattgcaactcaaaatcacatggcaactcacataaaaatcattgcatcaatccaaattgtaaaaaatgaacaaaaaaaaa

SEQ ID NO: 314903 - DNA, 1270 bp, Cannabis indica
attattattactattatttaaaattttcaatacctataattttactttatgataattattttactccaggaatatatagttacgatgagagcaaaaattataagcatagataatacatttggatgatattatatctcatgcaaatcttgcttgagaaaagatgtacataaatatgatatttattggtatggcccttgcaaaaaataatttgaatatcctattgtgaagtaagaaatttgtattcggttttctcaaaataataatttattatgttatttgtattaactttaatttttgctcttttttttctatttttttttatataagatcaaaatacatatcaaagtcaatgacaaaattgtcgaaataattttggtcttatttaatgaagtagctgaaatattactaaacacatcagcaaataaattagttaacaagttgtactccaaacatcaatgttctatagagattcaaaggctttgtgggataaattttatttacaagctgaagttgaatgagtacaatttgaaagaatgacttgaaaattttactgtgtcaatttttttattcataagggttctccgtgggttcttgctcttgcagctgaaccagctggtgccatggctaaaacaaggtcaaaaattcatggaaaacctaaaactgccactaatattttgaagaagaaagtggggaaatcaacggcggatacgattccatcagtttcgatagaccagatctcagaaattgatgctctggaggtttcggacgaggaagatctggcagaagatgttccagctctgagggatgtttttgctcctctctcactgaagtcttcactggaggcgattcagaggcaagatgaagttcggagtgattttgttcacttcctccagacgaataggcaatgtaatagtgacattgcagcaggtataaactcaattccacctgttttacgatcgaattctgttgtgcgtaatcttgagaattcttttatgaacactgagaataaggagaataaagtgaggattactttagatgatattgaagatgagatctctttttggaagccatcgattgtctgttatgtgttaggagtaaactctgttctgcatattttaaatggttttgttcatagaatctggcagggtaaagttgacagagtgaaggtgttatcctgttaggagtaaaccctcctctgtatatattttagatggttttgttcatagaatctagtagggtaaagttggcagagtgaaggtgttatcctatg

SEQ ID NO: 314904 - DNA, 2243 bp, Cannabis indica
atctctaagatgagcttgacagagacgtagtcttaattttagggtgaactctaaatattttctggtattttctctccctttctctcttgtttttcatttatctaacctggtttgtatgtgtgtgggaaggatcctagggtttctattgaggatcgagaagaactttctctgctagggtttcgagttttcgattctaagtgttaactacaaaaaatcttacttttagtcactaaattttttttttgttgtgactaaaagtgaaaatattgtgactaattataaattattattcttatgttgtgactaaaaggtccgtggctaaatgtattagtcacaaaaattacaatttattgtgactaaattaatttttagtcaaaatacttgttgtctctaaaactaaatgagttacaatttgtaactaaatactatgctttagtcacaagtaatattttgttgtgactaaaagtcacatttagtcacaaaaaaattatgttgtgactaaaaaattatcactaaaagtagcaatttttgtagtggttgtgtttgctgagtttgggggttctagacttttcttgaaaagtctttctaaccctagctaagttaaacaacagtaggatcgattgttgtcgtgttgatcaaagcactgccgtttttggtctaagttcatttagactaaggaaaggtcaattttgaccttgaatactgatagcaaaattgttttgttggtgtaggttaaaatagtaaaattcctacagatgcccttccggattcagagagatttgctcttgaatgtaaatatcttggggctaagacatcctttcgtacatactaggtctcttattttgttagggttttttattaggtcttagataattaattttgaatcgggaatgtcacgaaaaatacatataacaagtgtatactgttgtaataatattctaattattaattgggtgggatatatttgtaaagggaaatgagtgtgtggctgtgtgcaaatttgttgagggtgtaattctcttttgagaagtaatccatttgcttattttccaaaataaataaacttaatctcattatgtacgataacttaatcctattaaaaaaactttaaattcattacattaatacacagttattaattataaattagttttttttttaaaaaaaaaaaaaaatcgttagtgattgatgatataatctagttatgaatgttaataaagtatagatctatctagaatagtactattttgaattttgtgagatcggtaaaagttactcattgtatgatgatattttattaaatattggtaaatcgtactttttaaaatataatacaaaatagtatcttgagttcattcatttttgtcaattttttttaatataattaatttgaaactagcttctagcatcaacatcaacagatgtaaaaattataatcagtttagttatatataacacttctaaattaaattattattaagttttaattcgatgaacgagttcagagtactattttttattattttaaaaaatacagtatctaaattatcatttcacaaaataaaagatctaataaattatttttacaaaacagtccaaatattatttagttaaaatagtatgttttgagaaaaataacactcagtactttaattaattacgaaaagaatagtataatttaatattaagttttatatattttaattaaaataaataatattaaaaatcactaacttctcacaacacgacacatcactataatattaggcactttataaattacctaatattatatatatacacgattttgtctgtactttcacggaatgtattccgtggtacattagatgagtctcaagatacgttaccattttttaaccctaattactcttagatcaacttcaactctcatatcaaataactttcctatctaacgtctgccgtacatcacggaatactttccgtaaaattacatcacttgacaaaatcgtatccctatattattcgaaacttgacccgaaagagttaaattataggtagtattgtgtagaagaaaacttaaagcgatcattcattcgatggatatgttcacacatcatttatatcctcgttctagtcaatttaccagcctcattcaattttttttttttttttaaaaaaaataaaactaataaatacatacatatatatatacatactagtaagaagttacgtgcgaggcacgtatactaattttatgttag

SEQ ID NO: 314905 - DNA, 537 bp, Cannabis indica
atatgggctgagattattccatcggttgaaaaaaaaaaaattaaaaaaaaaaaaagtttttagcaaaaaaaaaaaaagaataagtaaaagttgagtttcacttaaatatttttatatgaacatatttttaatatagtataaaaagagatattttttgatattttctaaaattaagtagttaaactaaacaaagaaattcaaatttctcctttattattcgttattaagtcaaaatttgatgaattaatatttatagttaaatttgtttaataatattcatgggtaatacccattaaaaatgatccatatatatatatatgtgtataagaacctgtatattgtagttatatgagattttttaaaaaaaaaaatacaaagaattctaaattccttattgtgtcgaaaataatatgtatatttttatatatatatttgagtgggaaatgtacatcttcaaatgttatttctagcatttaattaaaataaagggatgagctaattgagagtatcttcaatcatacttttaatttttttttt

SEQ ID NO: 314906 - DNA, 1710 bp, Cannabis indica
tactagctttcattgtcttcgtcgccattctttacggcgaggacgtcgcctgcgtcttcaaccagcagcttcaactcggttccgactcaccccgatacttcactggaccttgtgagctctcttctcttaactcgtttatgattccctttctttctttgtttatttatatattttttgattagaaaccgtggtttactgaagcgagtttagttttcggggtagagaagaagagagagaaggcccttcccttcgccatcggtaaaactgaccccagttgcgacattttcagcggacgttgggtttatgacgaatctcgaccgctttacgaagaatcggattgtccttatatacaacctcagttgacctgccttgaacacggtcgaccagagacgaattatcaacactggagatggcaacctaacggctgtgatctacccaggtgaaattctaattggctttctcactatccagacacacttcttagctaagccttacattaaatttttaatcaacataattttaggttgtgaattttacattcccaacttcaaaattgagaatcgaaattcagtttctgattattttgggggtttatggatgctcataattgatttttgcttttcgcttctttaatttcgttttcttacaattatatgattgaattcttatcttgggaatcgatctctctttccaaaaatgtttcgactctgtgtaaactcaccgacaacgcgaagaatgggtacgacggcttgcctgagtattttttttttttttgtcttattggccattggaccggtttgccggcgagttagatgatcatggccgttcacgtgtctaaatttgttgggtctttgttggtctagaatctagatggtcaacagttttggtgctctgatacgcattttcatttcaaagttacgagcccacaatctgtgagtgtaaagtgacggagggcccgttatgggatgggtccactatttgtgggcttgatccacgtgtcagtaataagggtagagtgttcgaaatgccagtccctcttgaggtggggatgggctaagttgggccagtcacagtatctaatgtgcgggagtgaacccacatgaggtccagaggagtttttggtgttatttttgggtgggggcgtatgtagagaatgtccatgatgggtcaaaacgttcaaatgattagtgcccattttggttggctaattccagttcacggaacccatttctgatttattttctaagcaaacaaacaaaataataaaaggatttctacaaaattttgattttttttttatttttcttttactgtggagaatttcaaaataggtttttatattgtttattgtattaagtttttactgttattttttattgttcttgttatggtcgttttatgttcttttataaaaagacagaatttttgtaaaacctcaataataattctatgaaacctgaactgaattgtcttcaattttgtcggtttggcttctcagtaagaagtattgctcttcagtgaaaagctttgttgaaacactcatgggccaataggaagcccaagagaagctgtgggccttctttgatctgggcccacttctcagtcccacgcaattcacattttgattgggaaatttacatggtatactaacttttgctatttttttacaaaaatactgccaggcggaatttttacttttttactgtattt

SEQ ID NO: 314907 - DNA, 1053 bp, Cannabis indica
tttttttttaaattatttaaataagttaaataaggtgaagcaatgaaaatctgacacgtgtgtacacttgtatacacaatagcgtggaccaaaatagacgaaacaaaccaaaatagaactaaagtgtgtagctcccacaatttcagtttagagggatgatcgtaccaaattagtttagttgaaaattaccctatatgtaacgtccccgtttcaatcctctattgggcattttcccacgaatttatagctcttacatgggtacgtcactcttggctgtttcatggagtgacgactggccctacaaatcaatacgagtatttccagcgtgttttattctcactcgcatgctccctgagaaaatttctagaaaacaagatacaccttgtttatataagtagtacctattaatccagttacgtctatcttcaactgtgtattctcatacatatacaatcttagaataatcacatttgactttccttaggcgtgtggaattacacagcttaccagacattttcctttacggatcactagactactaactgtcacaatcacctccttacgggttcgacgtcctcgttatccacacttctaatttggtcaagattttgatacaatttgtaatgctccgctttaagcctttattttgatcctataaattaatacgagtgtgcacacttaaccgtgaagttctttcgtaataaattagtaaaaaattaaaatgtgtgtaaaattagactaatttactcaatatttgtctttactgatcacaccatcaaatttaggattagttgagaaactttagagggtgtgaccgcaatcagccgtctttctcactctcccagtcactcactgtctctcgctcccctctccttccgacacaataaaacgaaaccccagtccagcgccggcgcgggccgccggagcttcctccttctcgctctcgttccctctctgcctctccttcctgtcgctcacggctcgctctgtctctcctctctctctcgcacgctactaccacaccagaccagtcaccggcgtatccccctcccc

SEQ ID NO: 314908 - DNA, 766 bp, Cannabis indica
caatcatcctaccgtctaatagaattcctctagaaaatgcaccattagcaggcacgcggtgaatagggattcattaaaggcatgacacatgttccataccaatggcaccctattcgagacttcttgacctttcaattactagcgaccaagagggaaggatatttttgtgttctcaaaggtcacccatgtgtcatgaatgtacctcggtggtctggaagaagactggaagcttcaacaacttaagaagtcttgaaatattggggataactattatccatgtttccagacaagggacatgtggcaagaaaaaggaagcctcaagaagtatttaattaagcccccccccccctattagaccgggttacagagaaggcgtgcaaatccggaaacaaatcaaacccaaaagctacatggagatttgtctcgtagcaccttgccatccgaaatctgaaagccttactatccctctagaatttagagaaagctatgcccagggtatgtccaagcaactcctggaaggctactcgaagggcctatcaccacactgatccccaaaagaggttggatgtctaccatgaagagagacttggatcaccccagcgacggttatgcctttgtttgacataggaccagatcttgtcccttgtgtcagaccatggtagtgcatatgccctacctacaaactgttaggatttatgccttaaaagtaagtaattaatggataatatattagataatatatgaaatatattaataatatattaat

SEQ ID NO: 314909 - DNA, 792 bp, Cannabis indica
atgttagtaaatctaaatcctaataaaatatttccaacaagtatgtcttgttgtagttttctcagttgtccaatgggcccaaagtacttgtggcaattcatcgacccatcttccctttgctatgttaagcttctttttgatagtatctcttaaggttttgttagcttctttgacttgaccgttagcctgtggttgtgaaattgacgagaagcttttaatgattttattccactcgcaaaaattggtgaataaatcactgtcaaattgagttccattataatatgatatttaaatgggtattccaaactgacatattatgtttttaatcacaaagtctaagattttctttgaagtgattgaaactaagggtttggcctctgtctatttcgtaaagaagtcaattgtaaatattgcatattttgcacctccttcctctgttggtaagaaaccaatcaaatctatcccccgaattacaaacgggtagggtgaggccataatgtggagttttgttggaggtattcttggtatatgcaagaatctctagcacttattgcatttctttacaaactcatgtgtgtctttattgatggttggccaataatatccttgacgtattatctttttagacaaactttgccaaccaacatggtctccccaaaagcctttgtgtatttactaggatatagatttactaacatgtatgttgtttaacaccctaattataaattctctaaaacaatgaaatttaaacacatataaagttaagaaaccttacattgattgcagtagaat

SEQ ID NO: 314910 - DNA, 719 bp, Cannabis indica
acttaataagagtacactcatatatattatatttggttaattattattattattattctagtgacttgtcaatttaccaattttttaaatcaaaattttggtaagatcaataaaatggcttagaaagtgagagcacaaaaggattcaattttcccagaaaatgttaagcacaaagctctattcacaaaaatccaaaatttagtaatgtgattatttgatttttttttgggaaacaatgtaattattatgttttttttttttgatgaaaatgtaattattatgttaaaactatgaattgcattaagtatttattttggcaaaattataataatatatttacggtttgggtcggcctaagcattgggtagcttgagctattgcacaaagtttcttatattaaaatattttgtagagattttcatactatatattgactttttttttaccgtggagcggaattttttttaaaaatgctgcgtacgtttttttattcaaaagattgtataaattttatctgtgtattgtgttaagtttttactgttgttctacagttgttttttagtttgttccattgttgtttttaattgttttgttttgttattttacggttattttaggttgttttataaaaagacagtatttttgtaaataattgtatatagtagtaaaattgtaaattttttctcaaaatctaatatttttgtaaaaattctttcttt

SEQ ID NO: 314911 - DNA, 1956 bp, Cannabis indica
cataaattgaatctacaagcctacataataaaaagtctgcttctagatatcaaataattacccctagttgacatgcaaagtaggggccattgttgaaaaatgatgggaggtcacacctaaaggctgtggctactagctctttttactctaatgatgagttggtcaaactactactgcaaagtagcattctgtaagctgatcacttatagtacttgtggaggtgctccccattccaatatcttggtaggagaacaaactccatgttctcgttgtaccttcccagcttgtaggctcccttacgtattattttcttaacttggtaagggtcttcctagttgggttcaaacactcctactattggatctttggtattcaggaacactcttcgaagcaccaagtctcttatgaaaatttttctatccttgacttgtttgttgaagtacttgtaaccttttgctggcaggtcttcgactttaggttggcttgatctcttctttcttctattttgtcaagggattctgccagcaggttgttgtttgtatcgtggtcataggttttcctcttgtgagacggtagcaccagctctacaggcaacatcacctcatagccataagcttgagcgaatggagtttgcctgatggccatcttctcagtagtcttgtgcgactataggacctctaagagtaatttaggccaattgccttttgcctcttcaaggtgcttcttcaaggtgtcattgagggtcttgttaacagcttgtacctgtccatttgcttaaggatgggacacaatagtgaagcttctgatgatgccatgtctattgtagaaatgagtaaacatgtcattgtcaaattgctttctattgtctgacacaatcttctatggaagtttgaattgacatatgatgttcttgacaacaaagtcaaggactttcttggaggtgattgttgctaggggttcaacttctgcccacttggtaaagtagtctacaacgactagggcgaactgcacccctccttttccctttggaagttgaccaatcaggtatatcccccatactatgaagggccaaggagactgcatcatcgtgagcttgttaggtggagctctagggatcttcgagaatttcgggcacttgtcacattttttgacatagttaatcaaatcctcgatcattgttggcaataaatacccctgtcggagtatctttttggataggctttgccctgggcatgattaccgtagaagccttcatgtacttctatcatcaacagctcgacttcagctttggtgacacactttaagagcgacattgagaagatccttctatacattactttatctaggattagatagctagcaacctctatactcatctttcttacctcattcttgttttcaggcaaggctttagtttagaggtaagctgccataggtgtcatccatgttggactgtcatccaacatgtcgactttttcaaggatggtaatgcttcgttcctttaggatctatattggcactaggtttgccttatcagtaatggtgatgcttaccatacggatagcatctgctatggcattctgttctctggggatctactttattatatagcttatgagctaagtcttggatcttgctcaagtaggccatcattctttcacctagttgtgtattcacctaggacttgattcacaactagttgagagtcgttgtatatgtccaagtggtcagctcgtacttcatgcgccagcttgaggccaacaatcagggcttcatattcagcctcgttgtttgaggctttgaagccgaatttaattgctccatgtagctgtgcccctaggtgttatgagtgcaatgcctgcaccagacaattggtcagtgcagcttccatcaacatggagtttccatattaattctttaggtttttttttgctgctcttgctctccttcattttt

SEQ ID NO: 314912 - DNA, 897 bp, Cannabis indica
gtattttggaaccttgtagtcactagtgaactggtccgagccaagaaggttgacattccttaaatttttttcgtgtagtagaaaatcgactgactgcaatccaaaaggaaggtttaacaaaatttcatgccgctcggctatcttaggggtagggattggccttttagtaaccgctgtcaacacaataagtgaaataagtaagcaatctcagatatataaatctaaaaaactcaaaaccaagcttttgagagagaaatcacttacgtataatacaaaacgcaattgtgttgttaggagagagactcgtaatctagaagaaatcatccttgaactcgctcttattgggtaacctcacaatgatcctgcgatcattagtgtgagtaccgaggtaatagaaacctcctgaacctcacttccttaccggaacaactttgatggaatagaagtaaactatctcgaggggagtagggcactcccagcctaaaatatacttggaatcaattggaaaggtgtgattctgagataattatagaattctttgtagtactctctcaaggggagaactgctctagccttgatgttctcgaggctccaagcgcctatctgagacgagccactagtactggtgccaccacactcctcgcgaattactctttttggtggaaagcagctaaattcctcaggagcaacggatttgatgcggcatcctcgcccttgcttgatgcacaagtctttaatacaccaccaacatagtctccaatggcccttaccttagattcaataagcttaacctcaaaagcgacattaggatcctgggagtctttgatttacgaggcttggtggacataatttcaaaatctaggtcacttgatgaaaaagcaatagtgacttgaggta

SEQ ID NO: 314913 - DNA, 943 bp, Cannabis indica
tttatgattttcatagtttatgccggtaatagtggaatgcaacgtatggcctgtatagtcacttagatatagtttagtaccttcgaaatagtggggtaatatagttagacatttgaaatgtcgaaaatttttgggcttatggtttatgaccatttcacctttaagtgattaagaaagggtaagaaggtcattttaccctagtttagtattaatgttttttgagtgggattttaataaactctaagcttatttaagttgaataaaacaagtagtttaattgattacacttagcaaaaaattaagaaaaagcctaaactttctctctctacttccttgttcggccaccaccaataagcaagaaaccaaaattttactttcaatttcaatctagaaagtcaaggatttcagctagggtttctatagattaagagagggatagctcaagttaagcttctctccctttctctctttgaatttcaagaagaaaaatatgattttatgtatgttttagggtttaggttgctatttagtgtcgtgatgtttagaatttctttctcgtgttaagtttaggggtgtacgtcggtcggtttggtcgggttatagcatatttttattaacccaatataaatatcgggttgcaaatatttaatcgtaacccgtccaatgaaaatttaaaaaaagttcaacccgcccaataattttgtcggtttggtcgggttaacccgtccaaaccgttttttttttttaataattgttatggttagtttaaaaaaaataaaaatatattatttatatttcaagctaaaaaatgctatagtttgaattaattttaagaactttaatataagataaatataattgagtaaatataaaataattgaataaaataaaaaaaaaaaagtgataatatagtatagattttaaactttaacttacaatatcc

SEQ ID NO: 314914 - DNA, 2169 bp, Cannabis indica
gtaactaactaaattgcatacatgtaggtctgccatgtcttgcctctatgtgggtttgcaggcaccacgagaagttacatatgtttacaagggcggactcacacagaatcgaggcgggacagttcttcctttgaaaaaaaatgtatatatattttagttagttacgatatatatttgtaataaaatatgatatttataaataaatggttaagttagatagcatataggagagaagtcaatagttcaaacctcactaaaaatatagttttttaagtttattttaatccttgtcttactaaaaaaaattgcgtcccctacttttaattttaggtctcacactatatgtttgagtgtcaaaataattagaatttttgtttctcgaattttaatatgtattaaattgtgctctgaaagttttagaaaaagaaaaaggtgtgtgttcagtattgtgttgttttgtgtgatgtttttttttagaagtttggatatgatgaattttcaagttttttttttctttatatgtaagatagagagactagtaggtgtcgggcatcataaaaagtatcatactaaactgttgttagtaaattttaataaaaagaggctagttaggatttttattggtccctaaactttgatatgtattaaattgtactcccgaacattttaggtcatcgaaaattactctcgaataattgagattgttagattcaagaacttccagctaattttactaacgaatgtctgacgtagatgaaagttcagtggacacgatttgtatatgcaaatgtttgaagaatataatttggtacatattaaagtttgagagcacgatatagtacataaataatcgtcacattagtaaaattaaaagattagataaaaatcataaaattcaatattctcaatagtttgagaataaattttaacaaaagttcattgctaaaaatcttaataatcatatctaatttctaaagatatttttggagtaatgatgtggagcatttctattagtacgagtgcccaacaccaatgcaagtgttatatgttttagctcggtggatagtttagtcaaaaggttattaatatcaaatattaaattattactaataacagtataatacttatttttgggtgattctataatgcacccccttaaaatagatgtactgatatacccttaacttattttgatattcaaaaaaaatattagtcgaatttttttttcatattcatgtacgttatagctatttaagatatcctacaaaaatttttgaaaaattcggaaataatttacaatataaaaaacaatattaaaacagtctattttacacgacgtataaaataaaatagtcacgcatgcaacacactgtttgaacataattttcggcaatgttaaacttttttcaaattttcttaaaattttgacaggatgtacttaaataagtataacgtacatgaccatgagaaaaaatttgactaaaaaattatttcggatgctaaaacaggtaggggtgcatcaatatatccattttaatgggtccattatagaattttccaaaattaactattttgccaaaaaaagataaccaactcaattaactaacaaaaatgataaaaataataattaaatacgaaaaagaatcaaaattattaaatataaataaaagtaagatttaaaaatttatttgtgaaaatttgtagtagcactctttgtgtattcactatcaaacgagccaataatatatggtaaaataggcatataatacggtacatgaatattcaaaaaatatggcacagactataaaaatgttttccctattttaaaactctccactatctcacttccatctttccctcttttggtctcttctctttccctctttttggtctcttctctttcttaaaattgaaaattgcaccctctcaaatttcatcccaagccctctactgccacccaagtagcccagacacctcgcgccactatcgaacttccgcaacgacctaagcaccactaacatagttccccagccacccatcactacaaaaaatctcaattttagtcacaacaaactttgtgattaaaagtgaaaaaatattcatattgttgtgactaaaaaggtccgtctctaaaggtgttagtcacaaaaattacaatttgttgtgact

SEQ ID NO: 314915 - DNA, 698 bp, Cannabis indica
caaatctcccacataatcactgttagtaaaaccaagtaaatctgctttttctcccttctgatagaagaacacgaaatcagttgtaccacgcaagtaccgaaaaattctctttgcagcaagaagatgtatctcccttggacattccatatacttactaataagactcacaccgtgcattatatctagccttgttgctattaagtacatcagacttctaactatttgctaatatagagtgctgccaaccttctttccttctgaatctttgataagcttcgaactaacctctattggagtgcccataggattgcaattcttcatttggaacctgtctaaaatttcttggacatatttcttttgagaaataaaaataccatcattagtttgcactacttctatgccaagaaaatagtgcattagtccaagatcagtcatttcaaattcaagcatcatagattgcttaaatttttcaatcatggcactatcattttcagtataaatcaggtcatccacataaaagcaaacaatgagcgtttacctccatctccaaattcaataaaaagtgtgtgctcatatggacatttatgaacatttttctttaaaaaataagttcaatacgactataccaagcccatggagcttgttttagtccataaagagccttttttaatttatacactttatactcatttccaatc

SEQ ID NO: 314916 - DNA, 1487 bp, Cannabis indica
agtttttcaaatttatcaagaacaaaccttgttttagatagaatcaccatatcgggatttgaccggcgaacgattgccgtcagaaccaaccttgtatgacatgttgcctagagtgataccctcataaatcttggtattagatgacatgttgcctagagtgataccctcaaactatattatagtccagattttttgagctggacacctgtactctaaccaggagagattaagcgataattagcaagtcaactcccttgaccaatgttccggcatgataggggcctagctcatggaaagggcaaccatgaagagaactccccgcaaaggagtgctgcgggaggtatccgtgatcagaagcctctcttagtccaaaaaactgaagccacctactcccacgggactgaagtcaaatgcgcctgaaaagagagtggttttttcgctgaaagtcagaaggtatcttggaatgaattttgctgagctatactcccgttttgtgaaggtttttctcgtacatgtcatactacggacttagtggccatgctttttcaagtacggcgtcaaagtttgtcccccatgatacgccatagtacaaggaatgcacatgcaatcataactgcttgatccaacaaatatttacaacggaaattcaaaaaggaaaaccctgggacgacacgtatatgatatacagtcagtacgatctgacactcgtaatgtcatatggtaaaatggccacctaccaaatcaacggttggatctcgaccagagatgatcaagtcaagctggcacaggagggaaactggcttataaatactcttcatccataggataaggggactttttggaaaaaagtaaaatagtaatactatactactcacaagaaaaaaaaaaaactccacaaaaaattcctaggaagtttcttctttttcaagaagaacaagagtaaaaaggagttccagtccattgtatatgtatttgtacttgttgacctcgcttttagccaatgacaatgagtctaattttgtaagcgacaagtagtttaatatgagtaaaatatagtaaagcaaataaagagacaagaattttataaaggttcagccccgagcagttcggtaatagcctaatcctcgttatttgtattgacttaagaacaaggaaaatgactccttttcttaaagttcttacaatagtatctctgaatatgaattttagataaaatctctcgaccctttgcccagtgaatttgaatcactatttatagggctataagcttggagattaagtatttcccttctagttacaattgatataagtagaaagattgcatagtaaatacagaatacactaatcgtctgatttggatagcttgccatatctctgtaatctaatccaaaagttatagggatttctttgatgactcacgatgcgaaagctgaatttggtaagtgttggtgtgttgcacggattgctcactgctcggtctagaggac

SEQ ID NO: 314917 - DNA, 1015 bp, Cannabis indica
tctctctctctctctcttggctcacacgcccacacctattcagtgtgagtgagaccaaaaccctaactaaattacagtgtttcatgagttgagtacacattgtaatacataaattattttatctaaataagatctaatagcctactttattcttgagtgttgaggttggcttggaagattaaggtgtgaattgttcagcaaagttcttagattggatgattaataattataagaaaagaaacaaggataccctgataggctttaagtggtataatctttctttcagtagtttagatttaatctctacatatatattatgttgagatccttgggcttatggttcatattagataataactatttttattaaattctactttcacttttataactctgatatggaccataaaaaccaacatgaatatgcaaatttattgcaattctcctttgttacagcaaatgaagtcttaaaagaagagcctttaggctataaggctatactaaaaagtagatacaagaaaaaatggcttagacccatggatgcggagatgaagtctttgcatgataaccatacatgggttctgatcaagaggcctaaaggatctagagtggtaaattgtaaatgtgtactcaaggtgaaagagagtattctatgtgttgaaccagcaaaatttaaagctagacttgtagctcgaggcttcacttaaagagagggagtagactaaagtgatgtattctcaccaattttcaagcacagatcaatcaaaattttgttggccatggtcgctgagcatgatcttgaactagtacagatggatgtgaaaattgccttcttttatggtgaacttgaggagacaatcttgatgacacaaccagaaggattaattgagaagggtagagaagactgtgtgttcaagctaaataagtctctatatggcttgaatcaatcttgttaactcaaatttttgttaacaataaatgaagcattctaaataaaaattaactatttataatt

SEQ ID NO: 314918 - DNA, 1506 bp, Cannabis indica
ataagtaaaatctttattgaaaaacaaaagagaactacaacaaaccagagcaaacaaagggggctatatccccaattcgacccttacaaaccatagagttaattcttgcccagtgggccaacttatcagctattaagttttcctctcgagggatatacagcacttcaaacctacgaaaacttctacacagcctaaggcactcacaaaacagaggatatacatcccaacaaaaaggcatacgacccgactgaaaagcattagttgcagccatcgagtcggtttcgatgtgcaccatttcagctctatactccactgccatatgtaaagctaagttgattccctgtagctccccttccataatgctatggacctttccattgttgactgcaaagaaatgatcttccaaagggactgcagatacaagctcctccgaatgagccccagaggtacatactgctgcaaaaccagcatactcctcaatcacagaagcgtccactcgaaagcagcatccaccaaattgcagatgttggtgaggtttctccccgcccaactcagaagtaatatccacacaagctgaatagtgagtcgattggaactcactataccgtcgcatacaatcaccatagatatcttcaaaactgcatttcctctctttgtgaaccatgtcattgcgccatttccacatcgtatcccaaacacaagcggcaaacagagccagcttgtcatctatcaggccacaccaccaatcgccacagccctttaaagaattccaattaagaccatcactcctcaacccccatatacttctaaaccaaatactcctgatcgcatgacacttgaagaaaagatgcacagtagtctcctcgcaagagtggcagaattgacacaacaattggtctccattacatagcccaagtcgtcccttcgttggtaagctatccgaaaagattttccagcacaacagttgtagccgaggatgtagacttgatttccaaagtctaccccacaaactgcaaggttctttgaacctatggctttgacttaaccaataggcacttttcacagagaactcacccgacttagtagctttccaaaacaagacatcagccccttcatcaagaggtttgattcgaagaatcgcgtctgcattacttggagaaaagcaatctctgatcagttgttcgttccaaacccgcattccacttacaaaaaggtctttgatttgccagcaggagtggttttgtctaatcctgaagccacatttcagctcctccgtgcttctattatagtttgcctcatattatagtttctaactcctaggtctctttttcaaccttattgttccttcatactacgaaaaacagttacttttaatgacaaactattagtcccgacataaattttttgtgactaaatgtcatttagttacaacaaaaagttactttcatctaaaacataatttttagatacaagttgtcactaatttacttttagtcacaataagta

SEQ ID NO: 314919 - DNA, 1009 bp, Cannabis indica
tattatttttgaatagaaaattattttaaaaaaaagttatccatgaatttctcataaacgcaagaattcagttatataggcacactttatatagaatagaaatatgtttagtgacaatatatatttttatcctaatgtatatttttctcataactaaatattatgtttagtggcaacaacaacgttataaccaaaaaataatatttaaatataaaaatttattaatttaattttttctagaaacactatatattaatttaattttagttataatacatatcgtaaaatacatttaacgacaacaaattaatatatctaatatttagagttataaacattttcatgatagctatattggaatcataatgtatatttaattacaatattttttttacacaaactttttattattttcttttaaaataaattatcccctttattaataacaagaagtaattaaatattgttattgatactatagacccctagcctataataaattttgggtcccgaagtaaagtttgtatttacaaactatattgctggcatatatatattgacacaaacaagttagttattaataactcaatcttaattgaattatcgaccatacttaaattatgggctctagttctacttaaggccaaatttgaagatatatatattgagaaatgttaaagaatatagtacctaagtgatgttgacatatatattagtcatttcagagtttatttggtatgtctattctattgtgactacaaaaaatggttacttttagtaataattttttagtcacaggataagttttttgtgattaaatgcgatttttagtcacaataaaatgttactttgactaaaacatagtatttagttacaaattgtcactaacactacaaaaaactgctacttttagtgacaaatttttagtcacaacataattttttttgtaactaaatgtgacttttagtcacaacaaaatatacttgtgactaaaacataatatttagtt

SEQ ID NO: 314920 - DNA, 2030 bp, Cannabis indica
ctgatctggagatgtaatgataaaattgttatattttctattcgtgttaaaaattgtcttaaaattagttatattaaaaaataaaattattgaaaattgagctcaagaacttatttttaccatttaaaaaatataaggtcaattttatcatttaacaaaatagaaggtccaattaataacttttacaaaatacaagatctaaaatggtattcaccaaaaaaaaattatataaaacaaaatgataaaagggaaaaaaaaaaaaaaaaacatgttaatttgggaatttaagtatagataaataatgatagaaaaagaaaaagatattacctctaacacaattgatgaatacacgtgatggcacgtgcatgactttgtggaaatcgtctcctccttcttccatcctttctttgaatttcttaggcatattatttatctttatctcattgagtgtaacaatgtttcttattccatctggaacactcctcaatcccctgcatccatgaatacgcaaatcggcaagtgtagccaatgcactctcctccactttccactctttcaagttatgtagaacactaagctcaagagattcaagtcgagggaaacctcctcttgagcacaccatctcttcccccataaagctatcatagccaatcacaaggactcttaattttggtagctttcctaatgttagcattggatcatcctcaagtctgagaaatttcaactgtaactttatgagatttggggagaataggttgacttgtggtaaccttaatatagccgagtacaatctaagcttataaatatgaggacagcttaatatcaaaggaactacatctatggcggtgtaacgatttgaactctctacttttaaagaaaaaagacgagagaatgtgaaagattggggaatgtgtaagaatgtctcaaaatttccattcacacaaatttctaatttcttgagactctttaactgtagaagatcactccctacaagatcgttggtacgaatacttaccaatgtttgtaaatttctagacttagttgacctcaagaatttaccaaattctatgccattaccatctacagtgataagatatagatgtctcagttgctccaacttacacattgaacttggtattttatcactcttgctccttactctcaaactctgcaggcatcttaaattcccaaaagaagatggaatcttttcaatcggccaattaggaatacttaataaccttaaatggatcatattctcaatttctttaggcaacttcaaagtataagtggaattataaccaataatcaaaactctaagtttcaaaaagtgattgcatgcatgtctcaatactcttttttcattatactcatttcctccaccatctacagcaaagcacctgagagaggcatctatatttccaaccatatgaataaaatcactactaacagtctttccattatcatagatggcaactcttcgtacctttgtttgtattggctcttcccctttattctgccaatcagtaaaatgtagaaagttttcttcttgggctttagacacacacaagtctcgcatgagatcatgaatgcaaaatgattttatccttcctcctcttgaactcatttctttcacctgaatcatactcctctctaccaactcacacaaccaatcatgtgccacttcctcccaagtttccacataacctcttcttcgtgatattaaaccttctgctataagtatatgacataagtcttttactcttatcgggacatcttcagcataacgagccaagtacaaaaaacaaggcttcaaatgagatggcaactcactgtaacttaaacctaacaccgcccgaacactaatgtattttgagttgtcatcatgttgttgaccaccttcacctatccagcgaattacatttgctttcagttgctcccaatcatatacggtgtgtttctttttcgtagataaaagcccagcgagcacaatgatggctaatggcagaccagagcactttctaagcatctct

SEQ ID NO: 314921 - DNA, 1988 bp, Cannabis indica
ttgtcccagtttttcgccatttgactgaattcgaactttaacaccccgggaaccttaaataatgaaaatcaagcgtaaaactgctccaaaagacaccaatagacgaaataatgctaactttaaagacccgaaatataggttaattataacctaacaacacttttttttttttgctaaactaaaaacttcattattaaacacataaaaaagaactacaaggttagagttgcaataggggtgcaacctctccaaaagaaagaaagcgggaaacatgataattgccatcagctgaccaagaggcaatctgatgagagccacgtaattacaggaacgaggaatccaaacaacattccaaaactcaaacgaattgagagaacaaaataagtttaaaaaaagtagtcaacttccgatccgaagctttcgaacaaacatagcaacaacaagcacttgacagtcggtaaagaaatgcacaaatttccgttcccgaatgcaagaatgacagcttgatagagagccaaagagttatttttgtggaatattttataacattcttactacacggtattgagaattagaataaattaatggagaaatataacagaataaatgaagaataaatagaatcaatatttgtaatatgttgtttactaaatggaatgataatgatttatcttgtttactttattaaaaaaacgtaattggaatgcttaaattaactaaattatctttttgagttatactataatatatgatattattttgtaagacatatattaaaggaaaaaattatcattacatatttagtttttaaaaaataaatagaaattattattttaatgatatttcttaaaaatctagagtgacaagtattcctttcttttagtcaagttctccttttttttttattttaattaaaataataaaaaaaaactataagggaacatgtatcttaattaattactattgattcacattgcttattagtaaatataatgaatttctaatattttaatggcaatactcatttagttcgttacattttttatttattttgtttctgaataatgtatagtaaacatgtcattagttcaattaaaaagaaagattatcagattatccaaaaagaaaaaagaacaaaggagactcatcttaggaaaaaaaattacaaatgtcatacatgcacaagttaattgccaagtactagttaaatgtttaaaaagaagtttcaattaaagattactttataacttaaataatatttaattgtaaagctataataatattcttagaaaatagtatattactatagttaatttatttttaaaaatgatattgaattattttttgtgcagatagtaccgcttgatctacattcctccattattaaaaaacaaaagaacaaagaaaaaattcccatttttaaaaattaagattttagtcttttccaacctaacatcatgtgaattttaaactttgatacaatctcttacgtcttcgccacaaatatattcctccaatccactaactatatgtcacgttcttttcctttctctctcgttcttagctgtcctactcctactgcacgttcagacctaataatttggatgtctttcataaattaattgacaataacaacaaaacgttgttttacctttgtctactttcttcaaattctttttcacatactttatgttttctcattcacatgatatcgtttttaggtccactcatttttaaatgatatttctagcatgattattatattgttcatatataatacttgtactcttattttatttttaatctaaaaattttatacaaaactaaaacaccaaattcatggtggagagtctagagacaagaggctctacctcctcaatcaattgtcatttctaggtgatcgtaattcactatgtaattttgtcccacttgttttaaatatttattcaaacacgatgaggaagaaaaaaaaattaacttatcattaa

SEQ ID NO: 314922 - DNA, 1412 bp, Cannabis indica
aaaaataaaaataaaagaagacagaatatatataatataaatgtgtacatggtccaaagatgttgtactcaatttttgttctccttaattttttatttttgtaatctttataggaacaaaacaaagaacaaaagagctgtatagaacatataaagatgattctatgtagctaatattcacttgttttttcttttttgcttatctcatgtataactaaagagtaaacttttgatctgctaaaagcaccaaattaatgttgatggtcaaccacatcttatcttgataataacaaacaaatcccatatctgatgtcccctctcatttaaataaataaatatatttaatatatttattttactttatgagagagatcatatagcgatttttcttttaattttattacataatataatctcaccaacttcctctttatttctctctccctaaaggtgtgcctgtcttaggaaaccaaaacttcctttaagatggccaattatgagttttgatgtttacaaatcaaattacgtagtcttattgatatttcttaaaattatatatatatctccatggtttcattacttagatatgcttctcatcaagagaacaaaacatatataattgtttcaagcttttcccaaattagacagttatattttatgtgcatatattttgttttaacataatacgcatcttttcttaagggtcttttcttgcttttcttgtgtagtactagtgattacacatttcaagtattacttacccaaaggaaactttggttgcctttgcttgaaaactactcaacaatattgttctcttaagtactagaaattaatgaatgccagggatatagagagataataatatagatggtaaaaggaggtgaccaccacacactgttaaagggtatcattttttgctataacttaataatattcaggaatattgaagccaactttttcttttgatcttttcttttcttctctttctttcactctcactctctccttttaaagaaacgggactcgttttcattcttctaaaagcataacagctctttaatgcatgtgttttggttccttttgtttcaaagtttcagaatacatacataagtattgagaattgctttactttcactattaacatctcatactgtcaaacgatcatatcctacatatctttgcaatcatgttgcttctatatattttgcaagactatttaatttaatttctttctttcttcagtttctttcaacatttttaatttttagccataaaatttgagtttccacgtttctttttccgcgttaaattaatttatggtttccatgatatatatatgataattaacttgtatccaaaactatacttgagagttgtgatgcagaaaagtatgagacaacgaaacatgtatag

SEQ ID NO: 314923 - DNA, 588 bp, Cannabis indica
cttagccttcctgaggtcctcgatttctttatccttcgaggtcacgtccagcttcagtttcttcacgccatcctgaagaagtgtgttttgcttcctcaggagatcgacctccttggtacctgcaacaaaagcccttgagaacatagtcatgaattgcgaggccagttctgcagagcgcggcaacaagtcttcaacaggaacccacttgaccttggacacgaactcatcgctcacaaacttgtctttaagggttatgaagttgtgagcctgaacagcatggtcgatcatgactttctttcccttatcttgggtaattttgagctgcttcttcgaggagtcagccattgcagtcgggaagaccttgctcttcctcttctatgggatgacagaagaagttgtcacagctctaaccttaggcttttggttgagaatgggggcctacttcaggaatgtcatttctatgagaaagccattagataagtatatttttattgtatgaaagaacatgtatatatttgatgtattacctgatgttggtcttgatgtttgtttagatagacgcttgtctattctttccttttgtttctc

SEQ ID NO: 314924 - DNA, 1247 bp, Cannabis indica
gttccctcagaacctcttgttttaacttgagtcaccaggtgtacatggtgcctttcttttctaatcattggtcgactcactaccacccctatcattaccataggtaggaggagcggtaactccaccaacaacttgtgtccctcgggactcttgaatgcactcaactgcgccctcatctctaagtgcttttcccaccatttcaacataggtggtgttatcatcgattgtgatcattaggtcgtgtttgattttagggttaaatccatccagatacttttctttcttactgaagtcagttggcacaattcccgaggccaacctaaccaatctatgaaactgggttgtatactccgtaatggtcatattctctttctaattcagcttagtgaattcttttctcttcgcacttcgaactacctcattataatactttgcattagataattcctgaaactcttcctatgtaatggtagtaacatctcgagtaagagccaccatatcccactagaccagggcttcttcctggaattagaatgtagcacaagccactctgaagttgccgatgacacccataaaatttagaattcgtgtaataacagtcagccactattcatcatatttagacctcccagaaagactggaggtgtctgcttatggaacctttcatagaatggttccatctagtttatagcagcaaccgggcctacctgcacaacagaggtaggagccacctgtatttcaggagcaggcattgtaggagcacgctgctgcctcgtgcgtctgatttctttgtcttgttcattaattctatcttgcattgcgacaaacctattttcccaatcctagacagcttgcggtgggttaacatctccccgaccgcgagccctgcctcttaggcctgtgcctcggtcacatatatttgggagaaactgaaatccctgaccgccattggattcgaccgaatttccctggcttcgcgtgttctgcctggggtccattctaattgaacaaccttcaaaactaagagctagcttggtcagatcacgatcaagaataatttactaatttccgcttattttagaaattaaaacttgcgcctattcagctatcaggctactaacatccttcctatctggcttttcttataacacacaaatcaagcaaactactaaagcaataaaagcttactaaactgtgagttgagcttatctctgataataatgtacatgtcgtgacaatcttcaaaa

SEQ ID NO: 314925 - DNA, 580 bp, Cannabis indica
gtactcaccacacaacaaaaaaaaaaaaaacaatagaaaaaatacaaaaacaacccctaaaaaaaataagcttaaaactaaaacataataattaatgttattattttatttcattatatatttaagaacaatgtggcacacccgagatatcattcagaatgacgatgttaatacttaataagttttttttttctttttgcttggtaagataataaggtcctttatatgtcgtttagtgatggccaaaattcattcagagtccatgtggaactaagcaagcttaaggtggacatggtggcctaatctcaattctcaattctctgtaagaaaaagagaatgaacctgaagttggatctttgtggttgtggtacatactactggtgttgttatgagaattgagaattgttgctgccaacccaaatcgatatgaaactcatcatagacaaacatatcaataaagagcctatgctcttctcagataaagaggcattattcttatccaaagttcattcagacacataaacataacaggtaaagaagaacaaaagccatgcccatgtcctactttttgtggtgagag

SEQ ID NO: 314926 - DNA, 3141 bp, Cannabis indica
tatctatatatttatataaagccgcaatcaactaaatttttgggctatatgtatctatttgatattagaccctagtaataaaataaatattataatatctattacacctactatctagagtagagatcatttcgccacttttataaaattgttgaaaggtctcataatatattattacacatataaaaattcctaaacattaattagtgattattggcttgatataataaccttcaaaaataaaaagtaagaagagaccaccacttattaaattgcaaaaagaaggggaaaaagctatgatttgcttaaacaaatgaataatatttacctttttattgcttcctgttttaaacatatattaaccatgtaggatttaattaatgatcaagtatgcattaaagacaatactaattaagtcatgtataccctaatatatatatataattaatataaatatatagatataatttatatatgtatgtacgtttagttagttataataaataaaaataacaacagacaataagataataggtttaatatattattagaatataacttactactatgtttatggctaatttaataagctatacatacaaataatttattgttttgtatattgattttttaattaatttcctaactaagaaacataattgtttctaaaccccttttcccttattgcatataatatatcagccaactatgatgtataattatttattaaaaactagtgagattgcacgtgattcacacgtgagtagctccttaaaatatttaaaaataattacttcaaaaaataattagtatttttatgttctgaacttataatattaccaaattgtatcctctaaaatgttcaccatattgaataaatttcttgaactcttctattaatagaggtataatactttcgttagctttcggattttttttatcatttaaagttgatattgttaattagtatttttattcttctgaagatattatatacttctaaatcatgtatcctcttaaaaaagaaattaaaaattaaataatttttttataatcttaggtgtattttttataaccttaggtgtattattggtcaattaatatattattgttgatcaatttagatgagaaacttgcatcttcattttttatgtttaaccgaagaaatttcggtaagcaaaacataaatatgagtttataaatatgaagaagattagttgaatttgatttccttaacttaaacaaaaaattttaggaaaaagaaattaaatctttcaaaaaaaatatttgatttttcataaacaaaaaaaaataattcaaaatttatttaaaaaaataataaaaatgggcataatatgatattggtgaaggtcaagataaaaaataattatttagcactttttactaaaaataaatagaacctaacaaaaaagctatgattatgtaataattttttttttaataatccatatattaaaggggcataatttcatagtgtcgttagttaggataataaaattactaattattctatcattaatagatcctaataaaattgtattctataatgtttaaaattcagacttttatattcaaatattttggtcgtttacataaattaatgagtattttgataatgcaccactcaaaaataattatatttattcatcccttttttatgatctctgaataattaatgttatcccgatttttgtgcacctaacatgacaagtctaagtggccaacatcagtgccacgtgggagtacagcttgccaacaagaagatcaaattatccactcaacaattcaaccaatgaggagtctgagtactcaagcaggatgacgaatcatgaatgagccacctcaagggggctggccggccacccctggctggctctatgaccagcataggttggccagcttttgaacatcctatggctggccagcatgcatcctacaggtgcatggccagccagccttaggcctgacaggattttggtccacaacttcagacatggatagctagacaaactatagattgggccttaataacccgcaaaaatggaggaaaaatatctatttttgagaggtattttagttatttgaattttattaatttaatatgtaaataatagcttattttacctatttataagggatttagagggagtaagatctcatatataaagagccttagtcaaatcctaaaaccgtaagctctaagttctaagtttaaagttattaagtctgataactcatctctctctccctcacacgcccacttctacactcatacatgagatctaccaactctaattcctacattgtaacctttagagagctacttcagagccaatcactatagtgatctgagtagtattatctctcggtatcaatacaactaaaaggggagtaggtcattactcgctaacttaggaggttgaacctttataaaatattatgttcatttactttattgttataattgtgtaacacctggtaagcatcagtattacatttgctgtcggttggccaaatctcttatccacattttaggtcttttattgagaccgagtcgaactcaagtaatctaatcaaacaatttggttaacacgagaaaaactccatctacaacgttagcatcatcaggtcttcctcaggacccaatggccacagatcttaatgttcaggttccagtcataactagaatccccatgaacacaacatatgtagaaactcttgccatctcggtagacaccaagaatcaggccaccatagcttgtaaggtcaacacaaccaatccagaggatttgaataatcggcccctgcctccaagggaagaccctccactgtcacttcgcagtgaaggaaggacccacatggagcagctcccatgcatataactagacctcatccctagtattatgttggagagacaaggctagcaatcagcaagccagccattggcgagcccattggcgagccccatgtagacttgggagaagatctcgagttagccaaactgagagaggtcgtcttctaagtcagccaaactgaagaaccatgcactgttgattgcgatgcattcactcaataaagacgtgaatttctaagatggatggatgaccaagagtatatcct

SEQ ID NO: 314927 - DNA, 2372 bp, Cannabis indica
aaaataacaaaattacaacacaaaaaaaatatggaaacatcaatagtccatatttttttataaataaaaacttataagctgtaaaaatacttagctatgtttgatatgaggaaagaagagtaggatacataaaaaaattagagaggatggggagtaaggggaatggagatgatagttgttatccacgtttctggatagatatacgtggaattccaccagcggatacaatataaataatataggcccaacagtggggtcaaataaaatgttgggttggacccatagacagtcagtccttccagataagcaaacatcgagtgttcaaatgactagcttgtgagtattctcattaattatgagatcccgagatattagagattaactcccaaggatttcacccgaagatcataccttcctaaatatggaaagagagtaattagtgatcacgcaattaatgtgtctttaattctccatgaagataggacatagtttttggcatctgtcaacatgatgtggcgtccacatcaacatacaccaagtgcctcatgggtcgggcttcaccagataagcccaagtcaatatgttacttgtaattacatcatcagtgggaaaaccttaacgaataaaaattctcaacactatatatataggtagaacccttcatgcaaaggggttagaaactcattcctcaattattgaggcaaaatatagagttcatatatttttgtaaaccttaaggcttttcttactttaaagtaataatattgactcatggactaagacttgttaatgtctcgaccacgtaaaaatactctgtcattttctatatctttgattaatttctttaactttcacatataataaattgatttcggacatcccgctccattttttgttggaaattttatgcacatgtgaaaaattgaggtgacagccttgaagtcatataacgttggtcagcctaatatgatataaaaagtagaaggtaaatcgatcatcaaggattgagccatcactgttgtgcttgttggagtttgtcctactgtaagtggtaggcggatctatccgagtggagtaacactttggccagagaatctatatactagctgagtccaaagaactagatctttgagttgaagtctcatctttttatatgtcgttttaaacaaaatatttgaggaagctccattataaactattgtctgagccaccattttatttgcaatttgcacttcaacacccaaagggtcgttgtgcaaataaatgatgtggtcggaatctgcttcactgaaagatatgactggttcttcaacacgtgggtgtttaggctttctttcctctacggctagaactgcatttgtttgttcatactgtagggccagagcatacttctctctagctttgcttgagtctccagcaaggtgggggcctctaatgataacctgaatatgttcttccactggtggaggcatcaattagttttgtgtgttatccggttgggcggtcctttgttcctggtcggtcttgacatatttctacaagtacgggttatttttcctaataggaaattctatttactgcttcaagttattgcattcattggtgtcgcgatcgtagtctacatgaaagcaacagaacttggtagtatccctcttgctcatgtctttcttcatgggaggaagttttttatatggtaccacagactgggtggttacaaagattgtctctatatctttttttaggataataaatgcaataaactttgaagtattctcttgaagatgttgttcggagttgcctctgaacctgcttttctttccattaccctgcatgttgccatcatttgacctcttaccaccttggtttgagcttctataattttattgaattctggtctcgctagacggatgtattggttgcagtggcgtgtttgttaatttttctttagtccgattgtgtccacagaccaaactgcttcttcgagctttataaatttgtctgcttggtctaagaattctgccattgaccctatagtatgtctttttatgtcattccacaattctcttagagattcaatacctcctaggattgtggccaacctcccttccttggtcaatacttcaccttggtaacttcagttatgaatatacttatgtatacatcttcaatattggcattttgaacttgggtggtagatcgagagcattgatttttggtgagaatagtgatcctctagtccgatcaagttctagatctatgagttttagatcagccaggccttgaacgaggctcttaagttgatctatttgtgcttgcactaatggatcattttgacctgcctgttgaccgagctattgggttttgtgccctaa

SEQ ID NO: 314928 - DNA, 792 bp, Cannabis indica
taatattattttatttttaaataaatatataattaaatattattataatatgtataaagttttaattgtatataaccagtcttatcgtaagagtatacaccttatatcttaataaccacatgatctaaaatcaatgatcaaaaaagcttccttaccgatagggaacttatgctaagtcctaccataatcttgccctataaatatatatatatgattagaaatttttttagtacacttaaaaaagaaaaggtattttgataacttctatctatctattttgacatttatgaaaaaaaaaaaggatgcatgattatatacatcaaacttatctaagattatttgtacatttttagaaattttgtgaatagtttaaaaacttgagatagttgttcattgcttgtatgagataaattagttatatgtacactgaaatatttaaattttatttttaacactgtaaattatttaaaaaaaaaattaaaaatttaagaatgacccctaataaattctcttagatgctaaagacaaaaaaaatctacaaaaatagctctttaagtcaagaaggagaatttgagaaaaagcaaaattaaagcatcccaagctagctaagctctccatatgtgaaactcatggccttgaatagcattatgtaatgattgagtggttttggggtgaaaaaaagcaagagtgaaagggaaagttggtgtgcccaaccaaactcttccttattttttttccatagcaccaaaatatattcatataatactatataagaagaaaaaaaaaaaaaaa

SEQ ID NO: 314929 - DNA, 1463 bp, Cannabis indica
catattctgtcatttctcccaacgcaagatgttgttccaacatgtgttctttctaaacgctggaaattcctctggtattcagtccccataatctctttctctgatgttggacttgaacaaataacagaacagttttacaattttatcaacaaatatttggaacaccgcaagaaaggtatgtatttcattaccgattcggtcataactaaatttaagcttgataattgtcattatcaaagtgacaaggatgacatcttagataaatgtttagcttttgtggctgagaataaggtcaagaaaatgtattttagaatatcgcctgaatattatgatgatcaagatattgatgatgctttatattactgcttacctaaaaaatggtataacagtgcaaggtatttgactattatggagttgagatgtgtagagttgaatgtttcttgttcatttagttttccatttttaaaaactttgtcattgaagaaagttcaacagtcatatggtgcaaaacatgatgcggtattaaagttcttgttgggttgcccttctctaaagaaattacggttacttgaatataagttcttatgtattaacaaggatcagctccgactacaaagtttaagccttaagttcttggaactcaaatttctacagtttaagtatccattacaggttgaaaccataaaccttgaatctttggatatagcatacggtttcttcgaaagaataaatttttcttcatgcaagaaaattagaaatctctcattgtttaatttcagcaaactttcatcattggaagctcttatttgtgagaaacctcttttggcgaatttgtttttgaagatcactggtttatcttcagactaccatcttagattttcgagtcaacacttaaaaagtttcacttttgaggaacctttctattccaggggattgatccatattgaaattgaatcagctccaagattagaatactttgattatgaaggtagtgtcaatttcagcatatcaatgaagtcttctaattgtataaatggaaatattgtaattcgtgatgaggagaagccatttgagtatgacacaaaatggtgtatcgatatgattaattttcttatgaatctcaaatgcaattggaatattgtgacattgcatgttagctcatataaggtatgttcattaatttgtgttgtgtatatattttaattcaagttcaatgtctaatgcatatatgtttttattaatatatttgtatatatctaggcttttatttggccagaaaatttgaagaagatatgtcgttatcccttgcttaactggaagcgtctcaaagttattactgattgtccgcccgaaaaagagtcagagttgaaggatgccttgatgtggatttcaccttctttagaaacattatcgattaataaaaaggtccattttttagttagcattacaattttgtaactgct

SEQ ID NO: 314930 - DNA, 3297 bp, Cannabis indica
gacatttggaatggagggaccgtatgctagtatgcggttagcttgcgagctatacgttgaaaggtattcccttaagagagaagttcttcctaagttaaagtaccagaacccactaattcatatgaatgaagaattagggtacttgttcagttttggtctttgaatctagagggaaacactaattgatagatggcttgttcagtgtaaagatttctgttataactgcaagctgcaaatagatattatgcatgggcattggctgagattaagactgagctagtttgcagcatgtcatgggcgtgctttgtgtttattggaacacaagggttgtatgggacactgtaagccaaatggttcagagagcatatgccgatgagagatagtagatttgccttatcatattgggaacctatggacagtccgagtatctggacgagagagcctcgatgcatagatgcagtcatggatgcttgtgagcatgactcgatgggagttttttgagagacggaagtatgcatgagacacatggttgcagaaaaaaattactccattgttactcggatagttagaaggctgaccttcgcttaaagaagtcaagatgccactcaggcgttccgctgcctgaaaaaggtgagcctatgacactaagcaatgggcagttcttcctttgcatctatacttaagggacatagctaacttctttaagttttgtccaactcaaatcacgctgaagggcataaaatacctcttagtgctctttgtcctgtatgccgaactaggtaggctgtagcctttgcctttcaaggtgaactattactttgagctgaaatctagcctgggccagaacaggactcgttacttctattttagccagtagggttaccaatggttgagcagcaccaatgacgcaaccatgtcaaagattgggggttacaccaaaagttacttcatggcttatgacataaaaggtgtctgctagtttttttattaagtccctacttatagtcggctaatccccacattaaagctaaaggacagggccaaccacattctatctctttctgttgcccgacgtaatatttgtaggttggcctatgagaagagtatggcttgtacccttttggtgagagtgttgaggccccgaacaatcctcatgaggaaccaaacaacactcttgttgagaagaagaaaaccaaggggaaaaggcctgcgaccgagaaggaaaatagcaagtttgacgatgaggtctctttggctgatattgctcaaatagaaactaggagggactaagcccttccaaggtgtctggcacgaggtggcactattagtgatgccccagttctgattatgcatgagggataaaatttagtgagacctgctcagcctacgccaataggcaaaggcaaaggcaaggctgtagtgactgagggcagctctagtgagtcttcttctaaagacgaagggcctttagacagttatccttgggtagtgttaactcagaaaatttccctggtgatgtggacatcaatgtttgacacgtggcatgaaggatgccattacagagttgagcagacttgagtcatagtagtaaacatgggaggggaccctagccctgcacccgggttgactccaggatctccgggatggaagtttggacttcaataacttgaatccaacccactatatttcagaattctgtaccatgaagagatgaagtagcctaatccaagtcacaggagctgaaattacatgaacatgcaacccaaaaaccaacctgggcacatagggtttgagtttttgggaccgtcttagtgaaaagtggtccttaattgaattagtacatcaactggacataccacagacatatttgagtcatcgaaataagaatcagatcaagttggtttttaaggacccagggccccgtggcctcaagcacccagtgcccaagttgacaatctgtcaatctgggcaccttccaagtgtccaatcggagattcaacttgtgaattgaatctgtcttcatgaaaaatgaggaaataggtccttccagaggaaaaacaacaattcatgagcacaactaatagggtccagcatctaagttgacactttggactaacttgcaccaagttggcattttgtcaacctaggctatttaaaatggagttctttcaagaattatttttaacatcttctctttctttagaaaatattgagattcaagtatttttagggaccaaacagaatttccgaaggggccaaattgggccccagcgcccaggttcacattttgtcagcctgggttgttttcgatcaagttcagcaaaaagtgttctaggcattttcttttgtgatcagaaataacaaaaattcaagtaaacttagggagaaaaacataaacctgagtcccaagaaacagggcccagcgcccaagttgacctagggctaggcccagcgccctggttgacaagcaacatgggatgctccctttaattgctcaaatgccaaatctgatccgaccattgagtttaaaattttcaaaaatgggggggagacaccatcctcaagttcagaagccttggaagtataaaaaaaagaatccagggagcttagtggaaagagcccaacccccaggtcaacaaatggcctagtttcctgggttctacttatccgaatctaatgttgtttcgaccgtccatcatttttcacaaatacaatgatctatgaagtcaaagaaatcaagttcacaacattgcatttctcatttccagcacacctggaaatgaagagttttgagtctcccatttccgcaaaatagcaacatctccaagaattggtgacaagctttgttagaacatataaattgactaagtggtatcaaactatcacttagaaatcttaaaggacatcccttgaacgtttttacacttatctagcatccaggttgacatcagatgtcaacctgggcactaggacctaaaacactttcagtaaaatggcaataactcactcaatttttattcggttgatgcgattcaacttatgttttgaagctatttaaatgatctatcaattcatttctcacaccccagtataaattacgaagatatcgttctcaaaatttacccccaagggagttataaaaataagctctgggtaacccacaacgagacccgccgggcaccacaaattggctatcactaccaaaagataattttcatcgttagatcatcatcatcaacggtggaaataaattatttgtatttttctactatttttgtgggcctccttcacctataa

SEQ ID NO: 314931 - DNA, 546 bp, Cannabis indica
ctgcagaaaagaatgataattatcaagtgccagagcaaaagtttctcgtgcgagcttttcttgttgctgtaattcatagttcagggggtcattcctcaaaaaatcttggtgaagatcgagttcttcctttgctgtcacaacagtagcaagtacatcagcaaaagaattctagtttagagcacgtaacacatgctttaaactttttagcttagacacatattgatacatttttgaaccacttacatgctttgcccaactttcatccaccaactccttatatttcggatgtttagacaacatcctaacataacaaaaaggccttttgttcccactaggcatattgtagatagtaagtatatcaggagaattatcaaatataccttcattttgaaaaatacctcagtagcaggaaaagaatccagccaagcttgatttgctaaaactctgtcaatcttcgagtagattctatcttttccctgttgcttgtagctccttgtaaaattgtaatgaccactctagttatgtggattagtaaaggcaattagc

SEQ ID NO: 314932 - DNA, 926 bp, Cannabis indica
tttttctttaaaaacgagtaaataatacaattaagaaatttcgaaagcgtatttgatagaacttttagagcatacgatgattctttcgccatctgagacattaatttacctttatttatcttttggaaaggctaagttgtaatttgtttggtaagtgtataaccccgtatatacacatatttattcgtgacaaacaaaaatatatacatatttatcaatagctcattgtttaatataagaggataaaaataataattaatagacatatctattaaataaaaaactagctaatatttataataaaagctacaatgacgcaaagttgtcttgtttgaggccggccaaatttggtgacataaatattttatataaattatattgaacacaaaagatggtgtacaactatatgtgtcaatatagcctggtttccttataattacatcgtgctgcccaatcatgaaaacaatattagcattcaacatcatgactacattaatatatagtttatctttatattcatattaaaaaatgaaatctatatatatacttattattaatatgcggcacttaccgtctctttcgacgtgctctccaggctatatatccactgatgacatttcaattatgaaagcattattcaatccaattcaattgagccgaacttatacaatctaatctaattacaaaaaattactaattacaattagattagattagatattatagttgaattctaattgaattggattagttattggatgtcaatcttaaaatccaatcaaaaatcgatctaatccaattatatttatatatgttaaaaaattatttatataataaaaagtatttaaaaatataatatatatatatattaattatatttttattagattttatttgtgtgttgaatttttaatacttgattgttt

SEQ ID NO: 314933 - DNA, 614 bp, Cannabis indica
aaaaaaaaaatgaacttaaattaattgattggtcttgcgtacgtaccctttcatgtccatgaagagaaactttgaaaaagatgtctagtaaatttaaagtatagttgagacacacactctgttcttctatgactaattttaagtcatgtcatattcttaagttttcataaaataaaaagaaagaagctttttatcaatataattgggtttaccagcaccataatttcatcttgagacatttcgggtgtgtgtatatccaatcaagtatacttttttttttaacactcttaaaatattacaattcaaatatttaataaggcccttcaatttatgtggttttctttgtaaattttaacaaatagctaggtattaaataatagagatatttgtggcataaataccatacatttttcagttttatacacttaaataccacatgttttttttcgacggattaaataccttaagttacatttatgttacttccgtcactacttttcagttaaatcctattcaaacatagagtatttgcggcataaatacttgatgttttaaatttcatacacttatataccactgttttgtcttttagcgaattaaatacctaaagttac

SEQ ID NO: 314934 - DNA, 1377 bp, Cannabis indica
attttgccgcaaattgttattttttttttaccttaattttatttcttctcggtgcttttttagtgtaaataataataacattattttcacaataataataacagtagtgcttaatagtaatacttacactttaagatggtattgagtattagtaatgtttaaataactttaataaataacgatgattatactaattttttttttttttaagatgacattggtattaagttatataagaataaacttaattactcgttaggttagataataaactttttttttttccagagaagaaagatttcattcaagtttatgctttgtttattttaatacaaaaattattatgaatcttttctactatcatatttgatgaatcaaaagttcttaatttgattcattatactaagtaattaagtatcattaacaaagttcaaatataatgagaatagctatgtaaatgttaccataatataattacatatttacttaatagttaagtaaatttgtaggtctattttattcatttgttaaacctttgtttggatcttgaattttatgaagtttgaagaattttattctctcatctttagattcaagtgaaaaacaaaggtttattttctaaaagaattaaaactcaagtatatacagggacagatttagcataaaattaggagtggcctatgttgaccttgaaattttaatatttaaattttttatttataatttaatctttttctatatatatttatactttgtaaatatttttatatacatactctctatttttgtatattttttttcttctatattatgattttttaataaattaatttttattatgtcttaacttttaggtttactttcatctctaattttttttcttgatgaaccaaccacccctaagtatatagtataattttataaaatttagaacactataaataaaaataatttcttataaattttttgaaaatattttgctcattttttcctcctttacaattttttttaaataaaagtcaacatccaaacaaaactaatgagagattaattttttcctctaaaatacaataaaataaataaagtaaaactccacttttcatagtttataatgaaatactctaatattctttacaagattcacactaaaatgacaaatcatctaatattctatattcttctttatctttctcattgtcaagtcttcatttagtatatatctctttctagaatattataacagcatattcttttctattatatatttatttttcccacattctagtaaaacttttaaaaaattaatccacatatgtagcctcattatattattattaggtaaatactattttgaaccatgtattttgcaaaagttat

SEQ ID NO: 314935 - DNA, 989 bp, Cannabis indica
atacttgtgagtagatctaagttcctggtaaaataatttccaacacatagttgctgatcctcattggtatcttgacagtggagcttctcaccatgtcatctctgatggttcaaaattaagtgacaaggttgattacataggaaaaggcaaattaacagtcggtaatggcacttctctccctattcttgctataggttcttgtactcttcattcttttcgttctttaattctaaagaaggtcctatatgtccctggaattcataaaaatctcatcagtatctctcaatttacccttaataataatgttcatgttgattttcatgattctctgtgttttgttcttgacaaggtcacgaggagagtcctcctgtaggtcactcttagcaagggactttacaagctttcacaaactccttctactccatcattcatgccctcttcagtcaatcttgtcacaaattcttccactgtaaatgtcagtacaactgaggcatgtaatagtcaagattgtactaagtcttttccttgtaattcatccactcaaattgttgtacttcggcacaatcaattaggacacccctctcatgtaatcttgaataaagttttacaaacaattaatacctcatgttctaaatctgatctagttttctatgatgcatgtcaatatggcaagaatcatcttatgcatttttccaatacaccaataaaaaccacacaaccacttcaacttgttcactcggatgtttagggtccctccccacatccaacagctgaaggttatagatactgttatcccattttttgcactgtgacatggcagcacatgctagtgatacgtggaccttattccccacatttagctaaaaatatgttccgaacaaagctcagcacacacctgcacggataatgtcttcccaattgagcagtagacaatccgagcggcgtattaacacttggcaattccaagacttgcatcgtgaagcataaaa

SEQ ID NO: 314936 - DNA, 1130 bp, Cannabis indica
gtaataaaattaacattttgtatttttaatataaaaatttcattaaataaactcctcttaaaataaaaataaaaacttttaaattaacacccataataacaattcaaattatacatatataaaaaataactcttaattaaattttataaaaatataaaacagactaacaataaattaaacaatttaaattaataaaattttacaaaaataaattaaaacaatactaacccataaacaattcaatgattcaaatctagaaattctcctccatttcttcgtcctttcttgaagttgtagcaaatagtttaaccaaaaaaagttaaagaaccaatttttaaccaacttatcacatatgattaccaaaaccaaaacacaccattatttgtagtacataaacaattaagcttactgctaaaaaccagtatgaatataaacaaaacccactcaatcaaacacattactgccctttggatactcaatgccctaaagctttaaacatattctcctgcaccgaaattgcacctgacaaacatgttcaggcctcattgacaagctggaagccctcatcgaagggagggaggccatttcggggagagttgaggagcagagcgtgtcaatggttgttgataatctcgacatggagtgtatcggcgatggcaactcctcctcctcaggcgacaacaagccttcggtacacatttacaagaggcccaaatttagctcaagaaccctaataactccaatgtttgtttctatatttacccccaaacccaaatcgttacataacaaaattgaaattaagggtttcagaaaaaatcatcttggagggggaaaaatggcaagcgaagacctgcgtgcaagagcggagatcgtcagcaacccgaaggagttctatcgtagatgattgagattcttgaggaataaaggtttctaaaggggattctaccattgcaagatctagaagagtattgaagagtgaaagagactaattttgtggctagatacaaagaagatgaagagactagaagaaaagaagtagttcctgaaaaaaaaaaaaaaaaaaaaaaaaaaaaaaaagaatgaagaagacgacgacgaagacgaagaaaatgatatatgatttatttttt

SEQ ID NO: 314937 - DNA, 1643 bp, Cannabis indica
atattaatttttttttcacaattttggggccctgagcgttcgggggcctgaggcgcacgcctagcctgcctaccctcagggccgaccctgctcctcattctcattctccttctccttctcctcctcttcctcctcctcctttattcttttattaaacttgattattgtggttaccatatttatgattgtgaactcaacactcattttacagtgttgatggaactattttagactatgaattaaatcttttagattattcccatatttatttatgcaattctgtgttaattatcaacttgttaatgcttgattaccattaatcagtataaagactttaggttttacacttgagagagataatttaaaatcagacttagaattgcatgacatagaaaagtatgagattgagacattccatatgagtttcatttaaagagaatcatattactttattattagtgattgattaacattgaatagaaatattgttttagttaattaatttaattctaccatcactcaagagaagttaatagattacattaagattcttgaaactacaaattatagaataaattgagataattggtatactaagattcatagatttaaaaaggaagtcaatattataagtctttattttctgattaaaattattgtttgtcagtttattttttttcaaatattttattaatttgatcttaattatttacttcgaattgtctaattaaagcataaactaaaaaagtataataattggtgaaatttaatagttgatccttgtggattcgataacctttttataattaaaaaattgctataacaacattgtacgcttgcagtaaaaattgtgtattaagtttttcgcgtcattactggagattgaaagttcttaaattattacttgcattattactaaacgtatttgctttaaattaaattttattttgtttcttattttattcattgctttgtgatttaatttatgcaaagaaattgaagtgctacaccactcacaccgttgaatctcgagtttcaaaagactttaaagcagctgaaagtgaagaagaagctagatctcaccatgacatccattaacaataataacaataatggccttaattataaccaactggcacctattgcagctgatgcacaattacgggttattcgtgactatttcttacaagtggtgaatgaaaatctatttggtatgctaatccaatcatcgatgcaaataatttttaactgaaacctgctttaatcaatatggtacaacagaatcagtttggtggattggctactcaagatctcaatatttatctagttatatttctagaggtatgaactactgtgaagatgaatagtgttactgatgatgccataagattacgtctttccttttttttaagggatatagcaagaatttggttacaatctccactacgacaatctttggctttagaggcagtttttaagccctttctgcgtcgattttggcaaaattccctatcaacgcttatccagtcgacactatatggtcaaacataactgacgccatagagggaccctatggcgtcggttatttttaaataattgacgccatagtgttgttgggttttatgccctaaataaaactcttt

SEQ ID NO: 314938 - DNA, 1566 bp, Cannabis indica
atggaattgcccgaagaaggttgatacaagttggtacttcaaagaaaatattgaaatataaagggacgaaacattaatggttgtgattctcaatcaagctgtgacggagaataagttcagtactaaacgttgctacaatctgctagtggagggaactaagactgtttttgcaggggcaatttgggacaaacttgtgtgccaaagcacggattcatttactggcagatagcaaataaccacctgcttactcgggtttttcttcaaaggtttatggctattcctagccgtctctgtccagtgtgtgaaaatgatatggaaacccatgatcatgtcttttttaagtgcagatttttgacacaggtagcagctgctgttaactcttggcttggtgacttccaatggccaacatcgactgctgaaatgatacagacctgttgtaacttgaaagaagggttggttcctcgcttatggaatgctgtcttggctgccactttgtactttatttagaaaaatagaaatgcttgtatctttgatctttgttgtggtactcctagtaggttgagcatggagataaggaaaatagttcagcttaggatcatcagcaaaggtccttacaaagagtgtatcagaaataagtatgttattaatgtaatcaagtcttggtagggaggtcgggttggggttgctgcttgcttcagtagttggtgcgagtctttgtggttttttgccttgtttgtttgtttgttgtttgaataaaatcctttttgttcaaaaaaaaagtaagggcggccattttgctttttttttcttttgccgaaagaaactcaagcacggtgcaatttatggtaagagttatggtaagcttaatgaacaaaatgacgtagtattgtgggtcgaagaattattattactccagtggttcctgacgaaaatatggtattgatccaaatcatttcatatattttagtctatttaatttaactaattacaatttcctttgaactttgacatataccactttggcttcaacttgaggcttcatacttatttcttttagttgcaataaaaaataaataaataaataaatgtcatttttaaaaataattagttattcaaaaatttattttgcaagaggataaagtctaatttttgtaaaaaagaaaaagaccaaattttgttgtaaatattataattaaatattttaactatttaaaaatattataataggaacttctgtataaaaataaaattatttataaatattgatgctaaaaatgaccttattaaatatttaaattcaaatttaattatattaagaaagtacttaattataattaattttattctaaaaaaaaaattacctattgatcctattgataacctgctattatattaaaaaaaaatataattattataattataattaaaatgtatcaattgaataatcatccatacatctatatatgtgcaaatatacacattattgaccttaattatgcccagatcgaattcatgacctatgttatcaaacatcgggcttccaccaccacttggttgcacaagtga

SEQ ID NO: 314939 - DNA, 592 bp, Cannabis indica
caagctatgtgtaacattaaaaatgatatttatgtaacaataaggtaaaatatcaagctgccacattatttaaataaatgaatcaaaaagtaattgcatgaaagacatttgcaaatacgatttttatagtttaagaaaaaaaaatttaacaaaaaaaagttgagaaggcaaaactctataaaagtcataatttaagggaaataataaatcctgtttattctattaaacttgtaacaatttttagtttttatgttaaatttaacatagtttatttctctatatttttagtattcgatcattagataaattatgagtggttattaattttttatattaaattaataaatacatatataactcaatatttaattactcttatttgatggttacgtttagcatttttcttttcaaaatcatcacatttatttattttactttttcgataaattcgaaagatataatgaatcaacatcaacaaaattctaataaaattaaagaaaccgaaaaaaaagtagaggaatatatgtaagacagttccacgtactcataaatgatatggttagatgtatcaccaaaactaaataaaggattt

SEQ ID NO: 314940 - DNA, 556 bp, Cannabis indica
taatctataacttttgtaaaataaaggatccaaaatagtatttaccctatagaaaattgtgtttacaaatttttgcaaatattttagaaggtaaaatcataattttattttttacttaaaaaacagagaagggtacaatggtaatttcaatattatagctttgtcaataattgaccattaaaatcatcattaacggttaatcttgcctttcattgtctaaaaaaaaatctagaacaatgacttgagagagagaggcttttttttataaatcgtgctctcattttcattgcacttaaaagttggagaaatactctacttgccgtgtccagaggcgactcactcacacagcacaacatttcctcactttcacctctttcgtacaaatatataaatagatagatctaaagacccaagcttgtagactcaaatctgcatcaagcaatggagttccagtgctcttcatcacccactggatccatcgccaagctcagcagcttagccattctgattgtgttattgctttcttgcttcactttcacttctacaggtcagtgcc

SEQ ID NO: 314941 - DNA, 695 bp, Cannabis indica
agacgccactcctcgctcgtggatatatttaataaaatattgctttttctttctctctcttaataatcataggaatagagttataccgtcaacttcatgttaacctctacattcgaaaacacaagttggaatatctttttttaattttttttttcacggtggtgttcgttatacttttaatatcatccttgtaaatttttgaaaactttaaaatagtttacaatgccaaaaatacgtttaaagttttttaaacacgactgaaatatcaaaaactctattttcgatactataaactattcgaaaattttcaaaatttacaagggatgatactgtaactataactaataccgctatgaaaaaaaaattgaaaaaaatatttcggcatgtaattttggacgtagagatttactatgagattgtaataaaataaggcatggaaatgtttctagaattcattgtatacatatatatatactagcaaaaaactacgtgcgaggcacgtatactaaattttatgctaattttttctatgttatttgaaagttatacaattaaaaattaaagaaaaaatattattagttattcggtgagattattattattatgtgtataggaagaaatcacaaattaattaatcttataattttaactttaatcaaataggattctagatatatgaacaataaataatcacg

SEQ ID NO: 314942 - DNA, 1619 bp, Cannabis indica
ttttatattttttgctcacatacttggatcctgaccccgaccccaaacgcgagcgcggacccaaaccctagaccttgttcccagacccaaactcagacctagacccgaacacggacccgaacgcagacccagacccagacctatactaggaccaagacatggacccgaaccctggaccaagacccagaccccagatccaaaccccagatccaaaccccagaccccaaacctagactcagacccgaaccctgaacttagacccggaaccggaccaagacccggacccgaaccccagacccaaacgcggaccctggtctgagcctataccagacccagaacaaaactcaaaactgaactcggactcgaacccgaacccagacccaaattcgggctcgaacccggaccctgaccttgaccctggaccggaatccagacgcaaacccccagactcaggtccaggtccatgtctaggtctaggtctgggtccatgtctgcgttcaagccgagttctggggttcgatctggggtaggataggttcatgtcatggtatggtgtagaatatcaaatttctttttattagtaaaaaaaatctaaaaatagttttaaaaagccttagccaaacacaattaaaattttaaaatgataaaaactgttttctattctcatttttaaaaatacaattctaaaagttaaaaactgaaaacataatcaaatagcctccaaaactccctaggaaaagagacaagcaaaatgtatcataagacaccacttgttgcttatatattctttcatcataaagataatgatattaataataataaaagattgtaactattgttttttatataaaatactatacatatatatactcttgaaaatagtaataaggaaagtagaaactaatgtgtcgaaaaaaaatagaaactaacagactaatttgatacagaaactgatgggatacttaataataacgttacttttagatgaagaagaaaaactatactagtgtttgcctaattcatcaacaacaaaaagatgtgtttggtaattaaagaaatgtcattaatttggttatggcagatctgagggaggacgaacaatttctaagggattatcctggagcacataccatttctacacagcaggtatatataaaatagaggttgaataaaattcatcattaagattttttaatctaataataatgtcatgttatcaaacagactcattcatcattttgtaggatgatatgacaatacatattcgggtgttttattgtgttttataacttttaaatagagcattaagtttgtactcatttttatgaacaatctttataattatgtttcagggtgaagatctgaagaagcaaattggagctatggcctacttagagtgcagctcaaagacgcaacaggtgtgctttttaattgattttattagaaattaattaattaattgacagcgagaacaataaaaacaccaaattttaaatcataattattcacatactattaagtattaccccacttttacatccaactgctaaaattgatatgttggtgctagaaactttcaacttgattatatttaaaagaagggtaaatactattttaga

SEQ ID NO: 314943 - DNA, 2708 bp, Cannabis indica
tacttgtgagtagatcatagatcttctttgtaaaataatttccaacagatggccactgggcaaactccattcgctcttgcttacggctacaaggcgatgtttcttgtagaactagtcccaccatctcacaggagaacaatctatgaaaaactaataaataacaccctactagtagagtcccttgatgaagagaagaaagaagagaataagccaacctaaagctggaagcctaccagaaaaaggtggcaaggtacttcaacaaacaagtcaagagtaggaaagtcttcatatgagaccgggtgctccaaagagtgttcctgaagactcaacaacaagtgtgtttggacctaactaggaaggcccttatcaagttaaatagataagtagtaagggaacctacaagctacgaaggtataatgagaacatgtagctctttctcctatcaatatattggaatggagagtacctttcgcaaatactatcagtaactagcttacaaaactctacaccaaagtatcagttctacctactcaacattatagtacaaaaagcgctagaacccacagcctttttggcatggtctcttaccgttcttcaacgatggcctctactttactaggcgagtaggggtagccacttgacatctagaagctaaatttatgtactgtaggcctatagatttcaatttatgtaagttgcaaaaaacaatgaccaattaatgaataataacaatattaatattatgttcattgtgtctaaaaatcacttgttcatagattaacttcttgaagttattcttttagttccacatccgtactatagtattctcgccagacagaacctaggaaaagtctattaaatgtggtgaatagcaagtgaccaagagacttgtctacatggtcacttggggtgcacccaaatagtacaacgcattgaacaagcacactaaacttacatagcgaaattttaacgctttgtataagctactaaacctgcctctaagtcgtgcagatgtactttggcttgccaaagtaaattcggacccttacttgtcaaggccataagaagatagccaagattaaagtccgcgtggtcggtcacacaatccatgataaaaaaaagcaacagtaccaaatactagtagtgttaaaaaacaaagggcttatagccaaagacacgaacatgaaggccccggggctaaaaataaagtagtgtcctaaaaaagcctcaggccacatgcaacaagaatataaaaaaaatgttttaaaaaggccacagccacatagaatgtaaaagtaagaagtgttctaaagctaaaaggccaccggccataaaaatccacatgatatgcggaacatgaaaatacatttatattatacaaacataatatctaatactactaatgaaaaaactatctaaatatgtccaagggctgaaagagttaaatctggagcctcagaatcgagatcaatagaatctaggccagccccatcatcagcatgctggccgacctggtggtcaatatcctggccggccacctcctccacaagtggatcgaccaacccctcgtcatgagtcccagatgacgacccctctcgataggtagaaacatggtctaccttcatccggctgtcaaaaagtgcctttctaggggccaacattctctccaaaaaagcctcacttcccatgtaaggcagattaggtctagggttgcgcaactagatcttataagtgagttcagaagagaagtcggcgtactcctttctaatggcttgttggccatcaagagcctcctacagcttctgcttgtagtcatcaagatcagactgcagccttgagatgaaggtggtttgtgtggtgttctatgtctctccgcgaagagggcctccagctcagatatggctttgtcctttacaacaaggaagcctcaaaggtcttcactcactcctgaaaagaagttgaggacccccgagagccatcacgagatgagctcagtttaatcaaggcctacaaacaaaacaacattagtgtaaaaactgttgggttttgtgccgtaaataaaacccatttaaatataatctgattgactaattaataaagaccagaaatcacattttatgttgcatggttcacatgattataaattctattaggtccagaacatatgtatttgttcgtgattatggtgttgtcagcacagtggaatataattatgattatatgttcaaaaagattaattccctgatttgtcagttcactggatttagacttgcatgataatcatctattggtatacctacaccttggataagtggtatgtcctttccagggcattgacaaagtgttgacttcacttttaaccaacgtcaatgagtctttttgctaagcgataaacgatatgtcgtaatgagaatatatataagaaagcaataataagacacgagaattttatagaggttcagccccgagcagttcggtaatagcctaatcctcgttatttgtattgacttaagaacaaggaagaagttttcttttcttatagctcttgcaacactatctctaaatatataattcttagataatagtatacccttagcttagctgcgtatcggcttataatttctccgtcctttgcccagtgaacattcctcgctatttatagggctgggaaacttgcaggaaagagtttcctctctcgttacaatgcg

SEQ ID NO: 314944 - DNA, 1042 bp, Cannabis indica
gtgagtagatctaagattctagttaaataattttcaacagtcgtgtactttctaattgacatactctccccttggaccaactgagtgacttattttctttttgtataatggactacatcattctagtacttttcattgagcaattcttgaaattcctccaggtaattttggtgacatctcggcttagggataccatgtcccaccaaaccaagacatctcttggaattcgaaagtagcataagccactctattgttaccagtgactcccacaaaattcaatatcatgttgataactactagccattgtgtaactttcataactttcgggcctcccaagaaaactaaaggtgtttgcttatggaacctttcatataatggttccatacaatttttaacaacaataggccccacttgcattataggggcatgagccatctacacctcaagggcacgcattacaggagcaccctgttaccttagacaacagatttcttcatcatgttcattatttctggcttgcatttcagcaaacctctgatcccagtcctgggcatcttgtggtgggttaacattaccccaaacacatgccctacctctttggcctctacctcagacacaaacattagggggaaactaaactccccgaccgccacttgatctgatcaagtaaccttatcttctcgtgttttgcctagcatccattctattagaccagcctacaaatccatgggctagcctggtcagatcatgatcaaatttaaattgtaattgccgcttacttgagaaaataaaacatgtgcctatttagctaacaggctactaatatgtttcatatcagatttttctatcacatactaataaatcaaactactgaagcataaaaaggcttactgaatcataatttgagcttatctctaatgatgattgtacatatcgtgaatatctacaaaagataacccgtaacgccctactagattaaccacgctatcgtgatttcaatttactatgcactcctttgctaatcaaaaagtttattaaaaaa

SEQ ID NO: 314945 - DNA, 647 bp, Cannabis indica
aataaaattatataatgtatactaaattgccctaatccgatccaatatacacactgatataaaaaaattaagttataatttcttaaaattctaaaaaatgaagaaatctcaaacaacataatgtccagctatagaaattccctaatattttgttgtgaattttcaaagccatttgatttttttgaggccaccattctgacaactacattctcttgtctagttttgaccattagcaataagttgacataattgtcatcttttttgtggttagaatttttttatcatataatatgttcattttccttctttccattcttagaatgtggaaaattctataagcttgatatttaatcgtaacatcatgtcatcatcaactaaattctcacaacttattccataaatgaaaaacaattgaacataaattaaactaggagtacaataataaggaactagtcttttttctttctttctatttttaatattaaaaaaattaagaaacatacccgcatggtttcgtaataaagtaaatttagattttgtgttaaaaaaatatggccatcctctatatattattagatgacaatttgtatcttgtgttttaaaagattaaagggttatttgcggcaaaatctcctaaagtggacagg

SEQ ID NO: 314946 - DNA, 4442 bp, Cannabis indica
attagggtcggggtttaccaccgagattcagggtccggggcaaaggcttggggatcagggatcagggcccatggtccaatgttgaggccaagccaagatttggggccggggttcaaggtttgatgtcttgggttggagtcattgtttgggatctgaggcctgagcttgggatcaaggctggggttagggtcgaagctggggtctagcagggttaaggtctaagtctaagatctagggtctgaggtcgcaatctgagctaggggtttgaggttggcgtcaaagtcaaggctagagttaatattacatatgaataaaataaaaatatatatcttatttatttattaaaaatataatataatacaatattattgtgcgccaagcataatataatttaacatgttaaacccaaacaaagtatctttgtacaagtacccacaaaagatttggtatttattgatcaaattatatatatgtgtgttatctctgtttttaaaagggagacacattgcattccaaattcaagaataattaattaagatttggtcaaaagccctaccaataagacagacccatcatgtacaaaaggatgggaccaaacctatctttggcccaggatatatagtttcgagacccgatctttacagatttggaagggcatcctacccttacaagaaggagtaacaaagaccctctagatgagcatttgggatacacccagaagggcattccaagaggcgttctagagacttggtacatgatgacatgacaaccctctaatactaaatcccaccaaattaggggattgtcccttgtgtcagaccctaagagtgcgcgcaccacaaaaaggaaacttcccttttgcgcaccacaaaaaggaaacctcctttttgtctaacgaccactacttttacactagtacaaaaagatggtgcacacatgccatctgtcaaataccgtgtggtccccaagcatacggatcaccttcgccccatgggctgacctcaatctatgggccctttgtcaacatatttcatgtatttaccctattagtgggctaggtttacatgcaaaccctagcgggtcacatagataccctattaactcgaaaactttccttgctgacatggacatcaatatttgacatttggcatgaaggatgacatcacaaagttgagtagacacgagttatagcagtcgacctgggagggaccctagccctgtgcccaagttgactctgggatctctaggatggaagtttaaacttcaataacttgaatccaacccactatctttcattatactttattgtgaagtcacggagaaacctaatccaaggtttgggagctaaaattacatgaacctgcaacctagaagccaacctgagcacctaggatttccactacccaagttcacatcctcaactagggtttcagtttccaagatcgtcttagtgaaagtggccaaaacttgtattgggacatcaactagacataccacaaacatatttgaggcatcaaaatcaaattcagagcgatttgatttttgggcacccaaggtcgtggggcctcgagcacctagcgcctaagttgacaatctgtcaatctgggtgccttttaagtgtctgattgaagattcaaattttgcattgaatccatcttcatcaaaaatggggaaataggtccttacggaggaaaaacaacaattcttgggcgtaaagaatagggcccagtgcccaagttgacacttggggatggccctgcacccaagttgacaattttccaacatagatcacaaaatatagtttttcagaaattctttcgagcatcatctctgtcttcagaaaatattgagattcaactattttaggtgaccaaacagaatttctaaaagggcaaaactgggtccctgcgcccaggttgatattttgtcatcctgggttgtttcttattcaatttcagcaaaacgtgctccaggcattttcactctcataaaaaataatagagattaaagtaaactcagggagaaagccacaaactcgagtccctagaaataggccccagcgctcaagtcgacaatcaacctaggatgttgccttcaattgctcaaaccaaacttgatgtgaccattgattccaacatggtcaaaactaggggagaggaccccgtcctcaagttcagcggccttggaagtattaaaaacaaaatcccaaaacctcagtttaaagggcacgacgcccaggtcaacaattggcctagttcgctcggagcctatcctaatgattgataacactccatcatagatgacccaattgcacagtacttggaatgaggtattcttccaactgaccgggatgaagctaagagattgattagaaaagctcacttcatcattatagacggagtaatgtatagaagaagcttcttgattaatttctaaggtgtgttacgaaggaagaagttgaattcctcatggtcgaggtacatgagggcttttgtggcaaccatgctaggggtaaagcctctcttagaagattttgagacaagagtatacttttggttgacaatgatagaagactcaatggactatgtcagaaagtgtgacaagtgctagagattctccaaaatacccagagctgccccaaatgaacttaagagtatgcaaacaccatggccattttctatctggggaatcgacctcataggctcattgcctaaggagaaaggagagttcaatatgtcatggtggcagtcgactagttcaccaagtacgccgaagtagagcccttagccaccatcacatcaaagaaggttcttgatttcgtggtcaagaacataatttatcaatttggactcccacataagatagtgtcagataatgaaacacagtttgatagtgatctctttactcatttctacataagacatagaattattaaaagtttctcagcagttgcctatcctcaagaaaatggacaagtggaattagtcagccaaaccttaaggatacgctaaagaagcgtcgggagcaagcgaaagagaattggtctgaacaactgcccaaagtactatgggcctatcacactacaaaaaaaaaacagtaacaggtcacactcccttcgctctaacctacgagtacgaagccatgatacccgtatatctcacacctccatcccatcaaaggcttacatatgaccagcaaactaatcaccaattgttggctgaatccctagatggaattgaagaaattagagaaaggtataagcttaaaaaggcggtgtatcaacaaagggtcgcaaaacactacaattccaaggttaaagatagcaaaatttaagcctggagacatggtgttacgacaggtattcttgaactcaaaagatgcagtaacaggagtactcgggcctaattgagaaggaacatatgtcgtgattgaaatgcttgaactcagaacttacaagttggcacgctatgactacaacttgaatccaatacgggtaccaaggtattaaaacaaggtgcatctacaatggtactaccaataaaagtagttgtctttaaatcagcctgcttcacggtgagattcaccttacctcgtgcaaatgaatcgattgccccttgactgatgggatgtgatgaagttatcccgtttaagaggtcatcataagtatggctcctatgctaaaagtcaaacatggccttagcatggtgatgataacttcagctaagcttggatgaagaagaaattctacaactaccacataaaagtgtattcttttttttttcaacttagctcacagtaatgtagttgtatttaataagcataagtaaaaaaaaatttggtacttcatctaaattaatcaattaaaactcatagagttgacgatgctctctaagtgatgagtaaagttggtgagttggtcttgagataactttagttgttttttaagtgagttaaacactaccacccacgaatcctaagacaagtggagagtgctcacacgtgtaacaccactcaagagtcatgatcaagaatgcttagtgggatttggggtggaaagtgaccaatgaaggcacttctttgatcacttgagggtacatagtttatgtaatggtatacgagagctgtatgttacacgagcattcaaattttttccacatttatgtatgtactctcatcgtaacgataactttaagaaactctccagtaaccgagtttcttaagacatggtgcactttgcaagtatttaacggtcaagtagtaataaataaagtagaacaaaaaatataaagcattggaattaatgttttattaagttgaaaataattttttatttaactaaaaaataattctaatcacattctactaaggcttatccatatcgaaaaatcgcctgggaatgaccaactaacacactaaagttaaatgctaaaaacaaaaaagaa

SEQ ID NO: 314947 - DNA, 536 bp, Cannabis indica
catatatcggaccgccatcaggcagtatcatgcacgaggctcagatgagtatacatagttcatatcgggcacatattagactactatcggacaacatcgtacttataaggcctcgtaagttttgagaaacaactattggcagttattggggcactatcgggctgtatcgtccaactctctatgcttcatcatattgagatggtatcaatttactatcagaactttatccttaacctttaatccatccctgtattggatcctattgtcccaacatcagacactattggactatattgaaaaaaccaaaaaaatacaaatttccacctaaactcgatttacacaaattaaaaaaaaaaaaagacagcaaaaaatactaacaaaccacgcattgaacatttaaacaatattcttaatcatcaaaacaataaaataatatcaagaatcaaaggaaaacaataaaccattattttcttgaaaatacacctcaatttattttcttcagctgaataaatgtctttgttacaagattttagtgt

SEQ ID NO: 314948 - DNA, 556 bp, Cannabis indica
aaaatcttggtaaatattttggtgctttcattgagagctaaagaaagtagtgataccataaaagattgtatactgcaaccatggtactcattcgagagaatactggtggtcgcaatggagacactcctatagacaatgtagatcctaccactcaggcaaaaacaagagtcgatggagacccgacagaagcaaccagtcatcctgccaagaaaactcaacattgcaaaatatgttgatcagaatcctatcaatgaagatccagaggatgtgtaatgacggcacgattagaatatggtttagtaatgcgattagcattaattattaatattttatgactatgcatgattttatttgttgtgggtcccatttttaagaaatgggcattagagttataatttcacaatgctgaagattttattaaactctaagtgtaacgccctaaataattaggcacgctacctaaaatgattatgaaaccctaatcccctaaccgggattactaattaaaaacagcgcagaatttaaacttttatattaaacagactgaaaataaact

SEQ ID NO: 314949 - DNA, 658 bp, Cannabis indica
cctgcccattctcatctaaatgtccttgcaattacgagtattgttaggacattcattatggacatttagtatcatcagttacttgattatcattgcaacgtcgatttgggattcatggtggacgttaggcttgaatttggtctcttcttgctatttctacctgtaatgtctgcatttgttcctgcatagtcatatactgtgaggttgtgagttgaatgatacccttggatgcaatggacaagtgtaattggtggaaaatgtgctacagtagccgcagatgtagaggtttctccagcatgtcctgctatttcaagaaatagattgagaggagtgacattggtacgccctactcctcatataacgacctcaataggggttgttcctctactagaaataagaacattaagagtcccaacgttgaaagatccattgttgttgttcatgtttgtctgatctatagccatctcaattctcctctaaaaatctttagaaatacttctttccacagatagcgccaaatgttatcagaggaaattggacaacaacaaaatatgtgactattcaaataaaattagaacacttaaatgcagatgtgcgagtactcacctagaatagcgagcactcaagatacaggatactaaatagacaaaaataaaag

SEQ ID NO: 314950 - DNA, 882 bp, Cannabis indica
attattattttttaacattaaaataagaattttatataaattttaaaatttcatatttataaatatgtatttattggatcgttaatttttatggcaattaatatactattcacactttatgaattgaattgaccattttataaacactcctacctctaattataatatgaaattataaaataaataaagatttattttttctttagaataaaacccccaacttgagaaaagagttatagaggaaggggagagaggcaaaggatcattatttgattaatcaggaatacacaattatcaacaatactagcaagcaatgagaaagacaagcatattttatcaaatctagcaaaattacaactaaaatcatgcataactaactaatcctaaaatagagtccagagaaatgaccaacattaatcctcaccattcccataccacaaaaaccaccaccatgaaatgcaacatctactgacataacccacccaaggagaagaaagagccagctgctgtcccgtcgttccctactgcagccaccaattttgtgtggtgaggtttcaacaattgattattatgatcatagttgattccacttattaaatctgtaacgtatcaaaagatcaccaagtacaatttttgacacaaaatgagaaatgaatacccgcacaaaacatgatgagtaattttttcttgggtgtgacaaaaagaacagaatccatctattaaaagtcgtacaattaagaatttttttttcattcctttcttttaccaacgattctcttatttgaaaagtaattaaacttttagaagaaatttgttaccctacatttcccaaataatattcagtttttttaaaaaaataaaaaatataacaagtctaccaag

SEQ ID NO: 314951 - DNA, 896 bp, Cannabis indica
ctaattattaagatttagtctttttttagtagacttcctaaattagtccttttgtttaaggctgatatttatgttagaataagacaatatattattttaggataaacattaaaaagaaaaaccaagtaatcaacctctctctttctctttttcagcctcacccaaaacccaaaggaaccagatcctaattcacctaatcctagcagaattcagcaaggaattgaaggtaaagtcataaaatttggttccttagttttgatgatttctttttagttttagagtgaaagatttaagggtaggttctgtcctaaccctggctgatcttgagttattttctgagtttaatttgaggttgtttatgctagcatgaggttattttgatcagtgattcttgagttgagcaagtttgagttcaagaattcaaacttgggtcaataatggtaaattgtgtaattttgagttttatctagttttgttgcttggattttgtttatattgatgatattaggtgttctggagcttatggtgaagtttggggattgttttgtatcgaattggagaaccattttttttttgtagtgaaaatgtcatgttgtttctgtagaaatggtctaccgtttttattggtgcagacccaaaaaaatggcctacctttttttagaaaatggcctgccgttttttaggtagtttccccatttcatcgttttctcgtgtttcctcgatatttaaggtcttgccatgttatttatcgataagaaaactttttgtttcgagtttagatcctcaaaaaggttttaaaaagttgtttaccattttacgtgattgtgacatagggcctctgttcagcgcgtgattttctatttaggtcgactggtacacttgaatttggaaacgag

SEQ ID NO: 314952 - DNA, 1148 bp, Cannabis indica
gagagagagagatatgagatgatttgtagttaaattgtgaacaaggttatatttataggcaaaagaaaaataagcaagctaaacatccatacatataagtcaactttaggaagctcatcatctcaattccatatatatataaatgtatattaattatattgacttgttttaatttgtagctattcatgattatttggccagccaattatatatatatatatatatatatatatatatgtattaatagtcaattaagttggtaagaggaaaagtaatatatattgcatattagcctaccctatatattttcttttcccacatgccacacatatatataaatttatatatattatttgtaaatatatgaaataataagattattattaatgaattaatgatattctcatttgtttattttgtatatgcaaatcaagggtatgtaagattcgattatcttatagtatctcaacttaatgctcaaattaaatttgttattgaatcgacatatatacgtgcttaaattaataatttaatcatataatttaagtttgtagtaattaatgtctactactaaacaatattttttaattattaattagattgagattcatatggtttaaaaaaatattcacattatataatattaaataatatttcaatagagatattaaaaataattttatgtagttattttttaataatgtgttattattttattttatgtcgatatttattatttattttttttatttattttttatataattatttattaaaaatattatcattttttttgtcattttctcttttttttttcttctttctctctctaaaagtttttaaaagtctctcctcaaaaagtccaaaattgtaacaaaaacaatgggctttgatatttttttaaaaagaaaaatagaggttaagactcaaaaatttgatctaaatcaaagaacaatttaaaaaaaaaaaaaattgtacatctctctcctcttatatcatattcatatatatatccaccaattttttttctctttttttttttttttggattataatagtatttttaataaatattataaataaatatataaattaaaaataaacatttaattattaacctaaaatattaaaaaaaataactctaacat

SEQ ID NO: 314953 - DNA, 1546 bp, Cannabis indica
aaataagccaacctatttttatatttgagtttaaatttgtgctttactttcctacatcgatttaataattattcagctaattactaaactatatattattttttttagtttaaatatttatatattttttcagtaatattatacacaggcccgatcctagtgataggcttgctaggcctatgcctagggtccacctagctcagtagaccaaaaatattcctctttaaaaatacacattatttttttttagttattttgaaaataccatatatatttctcaataatggtctataattttttttatgacccactaaaattcaaggctgatcctaattatataaaaactcatataaaatcatcattatacttattaaaatttgaagatttacttataaatactcaaatttttaactgacactatacaaataaatgaatataatattttattttacattttctaaaattttaattatataattataatattgtatatttaagttttattattattgttttttaattaatataccatgtcgtgcacacatattttttgtattttgatgccaatttgtagcttcgtgttgtgttatgtcgtgttgtgtacaaacagatattctttcgtacttgttcatgatcgtgccacccaagttcataatgtgtaaaaaagtccggtctgtatttatagcactggctacaaccacccctattggtattgttggtcctccaagagcagcttcttcggctcaagctcatcagccacaacaattggtaactttgatgcgtgtcataatttattaatagtttatttgattctaatacttctaattatttcattataaaaataagtacgggtctatcccacaagaattatgtttactctattattcaaaattaaataacaattaaaagggaaattgtttttaattttatttagaagaaaattaccaattcaaattaagagaataaataaaatgtgatactacagtattcaaaaaatagttcaaaaggttaatctccaccctcaacaacaatcatccttaaatactaataacgaatgttatttcaattttccaattaaatattaatctcccagattaggctaaagcaaacaactattccaatctccatattgcaagtaatcaaggtgaaacactcaataattaactcttttaactaagtaataaatctacgaaacgtacaatttatttaacttagataaatgtttgacttcaatagagatagattaatctagacaataaattaatgaagcgtatagttcatttaacctaggttctattcttctacaattaaaaatacttataataatattcaaaattataatttatcataaacacttagaaaccttaaactattaggtgaatagtaatcctaagatgattatagattaaagtaaaatctaatttagtaatcatctaaacaagattaaagaaataatcatagcattagaatagaaaaatagaagcaattcaatatattagaaactaagaaaataacattcatcatagaaattaagaattcatgtctt

SEQ ID NO: 314954 - DNA, 1191 bp, Cannabis indica
tagttagggtgttacatagtagacctcctagtatccttgcttgatgcataatttgcatccacgtattctttcaaatttactttctctgaagctcttttgtaagttaatccaatatcaaatgtccctctcaaatatctcagcaaccatttgagtgcccttataatgccatgattcgcgaggacgccacgtatgtgcttttattaattactttataataatgatctaacgttttaagaaacatgttgtttcattaaaacttttaggaaaattatttaaataataacttaaactttattacaaaatactactcgtttctgggatccccttagttacaaacttttacaaaatactacaaaacaacttattacaaaatattgttaaattttcaaaacacaactaaaggaagatcctgtccactaagaaccaaaacatggcgggttgatatttacattaacgggagacctttgaatcatagctgatccagtttccctttttccttatctgcaccacaaagcacccgtgagtcacaaagactcagcaagaaaaacaggtaaaacacaagcatcacataaagcataacattttaacaatgcacaacatacattgcaatatatagaataagcaattatttaaagcgtaattgaacgataataatcaattatttgccttataagactagccaaacttgatattttataaagcatcattaaccctcagtaccaacgagtttttttatgttactatcgttgcttacttaagcaatagataagtaagaaatctaacagcaattttaaaagtgattaataactctttcttaataatagtaattatcatatcttattttgacatgctaagcagtgcaattgacttttcttacctcaagtccaaagtcaagtgtatgagccgacctgagtggaatggtgctcgatgatctcgggtcctatgtcataacaacgatacttgataaataacatgatcacacccaaaagggccctaaactcaaaaaagacaaaccctaatcgatactagcttagaaatagcctaagcaccgataaaacattattgacccaaaaaattgatcaactgacggtgggggtcatataaatctgatgtttgccatgtgttacacaattagaacaagaaagtaaggaacacacagcatttttatagaggtttggccccctttgatag

SEQ ID NO: 314955 - DNA, 846 bp, Cannabis indica
atcgacatttagcgacgatgttcgcgaagtttgtcgatttcttttctagatgcaacaaaatgtagcagttgtgtatgtttttgcaattttttacgacatcttacaaagtctacccgcgacatgtttagtcttgatgtcgttagatatcgttaaatttaattaaaaacaattttacatacacagttaaacttatgccgcgaacatgtcgtgaagatatcgctaaatcgtgaactgtgtattaggtattttttgttgtgtgtttggtatctgtgttgctgtagttggcgacatgtgacgactcgtttgtcagcatgtcgcgacatagtcttaggggatgttttctacagattatgtgtatgcgtttagcaattattgtcgatatatggcaactttgtttgcgatatattgtgattttattttatgacgttttgcgacacatttttatgtgttttaataatattttctctttttttgtcataaattttgccgatggctcatgaacttaagctgccggtgtccgagcatttcacaagacgtcttacctatcgtggcttaaataggtttaaagatattaaagccaagtttgaagcaacgaagttgactgaaaaggttatgaccagcccttttggaccattctgggaagctaaagaattgactttctcaggcacattggtccacaaccctactcctgcaaaagatataagttgaaacagagaaggaagatgagatatggttttacgttggaaaaacaaacatgagatttgagcagcttgagtttggattgattattggcttacctatgggtagtagccctacagaggaagagatagaagccaagtccagtga

SEQ ID NO: 314956 - DNA, 1046 bp, Cannabis indica
tctttaatttacaaatatcagctcagattctctttgtttgatatgtgaataagctgttgaaaatatagaacatttattttttaattgttgctttagcagaagatgtttggaggcaattaaacaatggcttggatggagtacaaagagttttcagcttgcagattttcaaagccatcaaaagggggagaacatctaaatttcgaaagcaagtaattgctacatcaatggtaacaatgatatactttgtttagaaagagtagaaatgagagttattgaaacaagagtattccaacattgcactctctggtgtacatgattatagcaacaaaaatttacaaaaatatctattgctctaactattcagccgcacaaaccactttcttcaacaacaatagcttccagcaactaaaccagcaggccaattgtaaagaaaccaagtaagacggagaatcttaataaattttggcgacatcacctcagaagaagactgtaagaaatctaaacacatacaaatttgatttatgcaaaattggacagaaaaactggttcgaagctaaaattcaaccctaaattacaattaaattcgaagaaaactaatcctcctaatatcaattttcagagtcataaaatatagatctatttgaaatagatctggagtttctattcaatccaaatcaagtacaaaccaaaaaaatgtatcaatacactagctaatgtttctcccgttgcattaacattatttttcaaatttttaatggtgaatttattcatataaatcacgaataataaagaaaatttgaattcatctagaaccacgtatatagatacattgttctagtttttaagtttctgcgtagttacattgcagttacattaatattttaccaacgctctaaaactagacatattaatgattacgaattgtcaatgatacaataatttttatgatatttgcaagtatttcatatccataattcgacacaaacctctttaaaaaaaattataaatggttagttttattaatatattcatttggttgttataaa

SEQ ID NO: 314957 - DNA, 1775 bp, Cannabis indica
gaaacagggcagaattctcatcttcgtcttttgcccaatttaatttttccttctgctgcaaatatgataagaaacttttatgtgttgtaacataattgttcctagcttcaagttctgaaagttgcagcccaatatcaagtggttgctggtggagcttggtttgacacttttcaaatgtattccttgcgtgaacttcttgagcttggatatcggaaaagtgctgagaatttaagtcattgaaagccatcttcatactcttcatttagagacaacacaatatattttagttcctttaaattgcccctgccatgtgcttttcaccaactcagtatagttgggataatttttccacattttaaagtatttaaatggttttttatcagtcaccaccttgtaatgaacaattaaaacagcaggtgagtggtcaaaaattccctcattcatgaatactgcctcagccgtgaggaactttaccatccaatcttgattagcaagcacacgatcaatcttagagaagattcaatcatctccgaattgcttattactccaggtatagtaatttccactaaacttaacatcatctagtcgacagttagctacacaatcaataaatttagtggaagaaacatacctaacccgcttcccaatcctttcttcctttgccaagatgtcgttaaagtcacccataacgatccaagcttctcttgtagtcaattcttgaagatcaagccataatctcttccttccttcttcatcattaaaagtgtaaacaaatatgacataaaattgagccttgttatccaccgttgaaacttcaaagtgaataaattgactagaacactttataatgtttatagtaaaacttgttggcatccaacttacaattattcgccctcttgaatgccaagcattattggaggtgaaacaccatccttgaaatacattagagtataaggcaccgagtttggaaaccttaactctagtttcgagaatccccaccaaaccaacactttgaacggctaaaaattgtttcaccaattgttgtttgtgctggttgttgactccttgaacattccaacatgatattttatccattgggaagaggaggtactcccctccccctgtgttcccaatgttcacagtgttacttatttcactcccctgctgttgtatctgcgcgtgctcagctacagctggttcttatgtattcgagtggcctaattcaacatcagcaggttcctgcaataaagaataggagtttgcaacaggtttatcaatagccattgattgagccttgttcttctccttccatatttctttgctggtataaaaccatcttccccttccacttgcactgattctcgggcattgacagcaggttttttaacaacccattcagacttcttcccctccttgttcctgcaatccttggtttcatgacctattcctttgcaatgtgcacaagtcgtaggtttccactcagaagacacatagaatgcaatgtcctctccactcttatcttcaaaccagatttgctctggaaattcttgctgcattgatacttcaatgagaatttgaggatacgtcaatttctccctggccttagtaaaagcatccaccataaccggttctcccacttgactaataattttaaagagaacttgttctccctaatatttcagttctaagttctctagattaacccatattggcacagtgtgaatatcttccttcttgaaattgaaattgggatcctaagtgttggaaattatttt

SEQ ID NO: 314958 - DNA, 1376 bp, Cannabis indica
acacaagtgtacacatgataactttttagtggttccacgtatttaattattaaatatataaaaataagaaaaaattaattttaaaaattattatttaaaatagcaaaaaagagatggggctcaagggttcctaggggtaaatcgagtaagttccagagagagttgggaccgcgaatctggggttttggagggatcgggtgatggcttcatcggggggggatagaggcgtcgcacgagattatgaaaagagagacttgtaggcgaaatggaaaaggaaaggggataaaaagaaaaaaagagaattaatttattatttattttaatatttaatgtatctatttttcatattttgtaataattttgatatttctataaaagataaaaaagggaaaaaaaaataatttttgtaataaaaaagaaaagaaaaaggaaaaaagaaaagaaaaataaaaagaaaaagaaaaaatatattttttataattattttttaaaacttattttttttattttttatagcattttaataattaaaattacgtggaccactaaaaatttatcatgtgtacactgtccactgtgacacttaacatagtcttttggacggaaggggcaaatatttaacataaagggggtttaggtaaatttttgaccaccaaaaattttcaattttttgaggttaagtgttaaacaatataaagttcgattagtttgccgccaatatcctaaaatttaaatatttttcattttattttaaataacattatcaactttaaattattgacatttataatattttatgctcatatgcataacttaatagttccacacttctcatagaaaggaggtcccaagtttaaattcatctcccccaatatataaaaaacatatataatattttaaattttatataatatacttttttttattcataatttcattttattttaaaataaataggtcccatgtgagtattacctgccccattggggatttcccgtccgccttcgatgaggaatatgtcgggatggagacggagatgggtaatatatttaacggggatggagactgagggagcattccctgcctattaccgcccaatttccatccctaattgtgaggatgttttcacattatattgttctgcatcagttattaggggtattcattcaattcaatccatactatttaatttgctcatagcgcatccgattcgcactaagtgtggagatttcatattttcgatccaatctaatctgcacattaggggtgcacacgggtcgggtttttgggtttcggggtttcgggttcggttttcgggcttcgggtcttggaatgcactccgaaccggtgttcgggtgtgcgggtgcgccgggttt

SEQ ID NO: 314959 - DNA, 897 bp, Cannabis indica
aaggaatcaagggctagagatgttgaacagaaagagtcattatattccattgcaataaatgtaaggttctcttaaatccttatgtttttattttcattgttttagagaattcatatttaggatgttaatcaacatacttgttagtaaatctagatcctagtaaaatattccccacacccttatgattaagagctgcataaactgaaatgggttcatgagtatcaagagaaaacatggattgaccaaaataaacttttggtttgaaaatccttactttggcatgtataaccatgggatgagagggttgttttggttcagttggagctagacttggctgaggagaaatatcaacaggagatacaataggaacttcaagacaaaaatcattagtggtgtagggaattggagaaccaacatgagaagatgtggtacttaccaattgttgatgtggtgaagcaggggaagatggtactgcaatagcacgagatgaagagttaagagtacctgctgaagagggaatattcaaaggtaatgtaaaccaggaatgaggagtgttagtggtcacatattgctcagcttgataattattcagaaagccatgatggaggggaattcttgttcattgaaaacaacatgcctagatatatatattcttccaagttatttgcggcataacctccttaagtggccaggtttttgcaactaactcccaattctaaaattttggtggtaaaacctcctaaacccaagttctgttagcagttagccctttccatccatttttggctgttaactgccatggcggaatgtccacgtgtacgcgtggcacaatttgatttgtccacgtaaataaatatttaaaaaataaaaaaattaattattttaaacataaaaaat

SEQ ID NO: 314960 - DNA, 2081 bp, Cannabis indica
gatttagatggagtcctaatgtttctgagcatccagagattaaaattggtttgtataagtgcatggatagactcattaaggatgaaaaaatttatatgaaggtcgatgcccaacttgatgagtataaatacagcaaggattatttggccttagatcatctttggcatcatacacaacacgaccacctggtgagtactatctttaccttatttttccttagattaattttttatataaaatgaattattaagtttaactaattttattattattattttatttctaatgatagtcgattggtgggagagttttggagataaagttccagaactaagattatttgcaatgaaagttcttggtcttacttgttagcttgtaaatgtaattggagcacgttcaatcaagtgcacacaaagaaaagaaatcgcctaagcacatctaagatgaatagtttggtgtacattatgtactacaaaaaattgagacccaaattttttaagaaataatcgcgaagagaggaagatgatcctttgatcattgaaaatgtgccttcaaatgatgagtggatagccaaccccaacccaaatgatgaagaagataattataacatagtaactgagattgaggatgaggatgaggggtgaagttctatagcaccaaggaagaggaaaagaaatcaagcaccgccaccaccaaagaaaggttacttttagaactcattgcatatttgcatctacattccatatttacattataaatagacttggcattttataaatttatcatttacatattacttgtggtgtagggaaaggaaaaaatagccaagtggatgtgagttttgaggagaatgattttgaagaagaagaagaagaagaagaagaagaaaatgagagtgatgatggagatgatggtcgagctatgcaattttactcttcagatgaaaatgatgccaatgaccatgatcatgataacttcttcgagatatgagtttcaatatggaatttggaacttggaatatgtcttttaatctttagtttgaaactttagactttaaatttatcatttctctattaattagaatattttagttttgcacctttcatgcctttagttatattttatgacttatagttagtaattttaggactttattatgaaattatgtatttttggttatgaattttatgatatatatcgtttttatgaatattgttattcttattgtcgaggcttacgcctcgcggtactttagcaaaacgcctcagaacccgtttccacctttcaaaacattacaaataactatacaaaaaaaactcaaatatatatacaaaaattgacttttaactttgtttggtaacaaaaatataactacacaatatcactaattaaatatgcaaaataattggacatcaacaaaatacagtcgacaactttaaaaaaacatcacacaacacacacaactaattaacaaccaacaaataattgtataacaacacaaaaataatttcgatatatgtacccatgaaaatgaaatcaagactttacttttgtaaaaatgccatattttttataaaatataaaatataatattatattcgatttaatttatttagttaattatatggcaattatttttatagtgtattattattattattattttgataatttattttgttgaatggttatgtataaataatttttttaatgaattatgtataaataacttcaatttaaaatataaagaaaaaatattaattattatatgattatatatacaatttatactatttgttaaaaaaaatataaaaatcatctatacttcaactaaaagttaatcaaaaatataatgggatattaataatttatgaaaaattaataaataaaataacaatcccactctaatttaaaaattaactaaccttcaacatattgtgtgaactcaaaaaaaaaaataacacataaagaactcgtttggtacgtcgtattgtgttggattgcattgtattgtgttggattatgttgtattgtattgtattgtattagtattctttaatacaatactatgtttggtattg

SEQ ID NO: 314961 - DNA, 1156 bp, Cannabis indica
gggcataaaacccaacacctatccccaaactctctcaagtgttttccatgatagttcaagaaaagagacaaagaacccttggttcatcagaattgccttccttagcatcctctttcgaccatcctcatccaccaatcctccacgcttaaagaaaccacgaccctcatgcaccaactgtggcaaactaggccattatgttgaaaaatgttactttatccatggtttccctccagcctatagagacaagaaaaaatttgacaaagggaaatctgttgctaataatgctactgctagcaccagctcagacaatgctactaccaactctcatgtagacctttctactcaatgccagcaactcatttcacttctcagccagtagctaagtcaagcacacccttgtgatgatccaaacactgcccctgcatcatccaacatggcaggtaacaaatttgtttcaaaactttttcttagatagttaacaatggagccacacagtatatgtgctccaccaaaccttatttttcttgtttttctaatgattcattctcacaatatgtgcttctgcctaatggcactaacattccagttaaatgcattggtactgtcacgataaacaagcacattactctccataatgtgctctttcttcaactttcaacatcaatattttctcaattactgcttttcttgacaacacccctaatatggtttttttaacatgagtcttgtgttatacaggctcattctctgaatggggtgattgagacagctaaaagacttgaaaagctctatgttcttctccaatagtctcttcctttagctagttctagttgccctttgttttctcaaaataatgtagcccaatggcataaatgccttggccatccctctatgtacatttctaatacattcaataaaaatttagtgcatgtttggcatcataactaaaaaactattttttgtttttaaaaatagaaaattattttttgaaaacaatttggcttgtttggccttattttctgaaaacagttttcagaaaataaagttacaaaaaacaagaattttgaaaacaacaaaatgttgttttctgttttaaaaaaccaattcacttttagtcaatattgtttttaaaaaacactaaccaaacatgacttgt

SEQ ID NO: 314962 - DNA, 1622 bp, Cannabis indica
gttttctcatgtatgtatgacatcaatattagggaggggagacaatagtgtttatttaggccttagggtttgaacttattttctttttctaaaaaccttattgggtcggcccgggttaggttggttgggttacaatgtatgcagcccactacgaacccaatcaacacagcctaagaaagttttgacccatttaatttcggcccaagaaaaacaaggctgtttcggccaaaattcgggttgggtcggctggtttggtcggcccaacaggttaaatgctcacccctaataccaaatagaattatttaaagagaaaccataattataaaattacaaacattaaactaaataaaattacagcatctagtaaactaaaaccttaaataaataaataaaattccttcaatcctacacaagatgataaataatttcaataaaattcttttttattcaggtttatatgatgaattttaaaaaacatattattttaccaataacaaagatatatgctaaatgaactatacaagtaaggtatccaacaaccttgttacagcaaataaaaattgatttaaaatttgaagacaaactcactgattactacaaaaatcaaccaaattgatttatataataataaaaaaaataatagagaataataattatataatgcaatttacacttaccacctatggagttgacaataatacacatataaaataacattttatattaaaatacatgtaacatagtaacatatgtttccaaatatctaattgtagcttatatattttttttcagtattactaagataatatggatcacattattaaataaatatgagaaaaaatacaacctcatatcaattactagatttaaaaaaaaacttcatttaatccaaacacttctattaatttttcttcatggttacaaccaccactgaagaaagagtggactatatttataaaccaaccataaaagtgcttaattgtgccaccatcaatcagcttttgaagagagtgttttgaggaactagtttaaataggaatgaaatgctttgaactcgtatgtgaaacattgaaactcacaagtattaggccataaattgtcaaaattggatgataaattaaagaaaataatttataacttagttgccaataataatcgagtgcttaacttctaaccttcaatatcaagaagctcgtgattgtcattaacttaatcaaatattcattctaacattattaattcattttatcacaattcaaagtttcaatactcaacaagacgcaccaaaatgttcggaattaaatcaaacacaaaaagaaaaataaacaattttggagaactataaaaaaatttgggatatctttatacataatacattgtatagtacttattaagactgaaattacaaggcataaaatctaatctaataaaaaatcacaaaacttcatcactattatcactctatttttagttttttttttcttcttctgttctacagttatttgcggatcaaaattgtaacctgatgcatgaaatggagtttgagttatagaaatatttgtgtttagtatatatatatatatatatatatatatatatatgttctatcgtattcgtttaac

SEQ ID NO: 314963 - DNA, 2179 bp, Cannabis indica
ggggggacctttatggccggtagaaaatctatttaactggagattctcaaatgaaatccattttgatttgttcagaaaattgtggttctcgagcatttagttagttagtattcataaccctcttactaaaagataaataatatttttaaaaattattaaaaaaatatatatatatatttaaaaatgtaattttttgatttagattcttaaaatgaatgggtcctaagcgcgagcttagctcgcctatacctatagccgtccgtaatgattagatattaaattgtatcaataggatcttaaacctcacaaaggtactatttatttttctttatcatgagtaaatgtagcactcaagtagagtagtgtgtagtagtgaagtgatagcatagcacttgatattattttatacataaacaacaacataaagcatattaatcaaaggttcaaaattaaaccaaatataaaaagcccatgcatcttcctttcttgtagggtaggtacgtgcattattattcatttttattgtcattattatcatgtgaggctgtaaaaaaattccaactcacacccacaattaattaaattaaaaatccaaagctttaaaattgacattttaagatgttcattgttcatggtcattgggatgtttgattagcaatttttttttatatattacatagtgaaaaatattaaaatagttaccggtgtctattactctcttcctatgtgttatattgatattaatgcaattaagtatcgaatttcatatacgttaaaaaaaataatatcaaatcttatataagttaaagaatattattaactaatcataagatatcacctctagatagtgctagacaccactcatatccaataacaatgcacataaagctcgatatttaatttgactaataacaatataacacgtaacaaaattttaaataccattaatatcttttagcatttctctaaattaatttatactattactagacccaatattaaaatatagtaatgcttaacagttaactctattacattttttattataaaatatcgctagccttttacactaagaaatgaatagatagaaccgattcaattaacataattactgaaattaattgaatgagataagataacaaaatttaacatctaatatataattatatcgaatctgaataaatcaaaaaatattgaaagtggtccaataaacacctctactaaataccttaagatgtcacttaacatttctcattataaaatggtcaaaaatatatttatccacaaaaattgtaaaccattattattattattattattattattattattattattattattattattacactatttttactcttgtatatataccaaccactttttcttcattctttcttatttatacaaatcaaaaaaaacacaaagaacaaaaattcatattaacaatctcaaatcttaaccttcccaaaacaaaaatggctctttcctccaaacccaacaagatcttctcttcttcatcttcatcatcaccatctttgttcttctctcaatcttcaaattcatcatcaaaatccaaatccaaatccctctctttcctccacacctcatcaaaatcaaaaccacaactaaaaacaacccaattcacaaatacaaaaatcaatagcatactcaaaacgacaacacccacaaccaaaacgacaccccaaaaaaaatacccagaagaaatttcatcaccaaaacccaccattttagtctccgaaaaactcggagaagcaggtctccgagttcttcgcgatttcggccacgtggaatgcttgtacgatctttcaccggacgatctctgctcgaagatctcagactgtgatgcgttgatcgttagaagcggtactaaggtgagtcgtagggtttttgaggcctctaatgggcgattgaaggtggtgggtagagccggtgtgggaattgataatgtagatctgagcgccgccactgagtttgggtgtttggttgttaatgctccgacggcgataccgtcgccgcgctgaacatgggattgctttgcttgcgccatggctaggaatgttgctcaggctgatgcttccattaaagctggtaataattattaattaattaattaattaattactgaaaagataataataataaatattattaa

SEQ ID NO: 314964 - DNA, 1210 bp, Cannabis indica
taagcggtttgggacacaccttcggagaatatcatcaagatcaattcctctatttgctttggtaaaaagttgctgaaaataagtgatggaaattgtcttaatatccttctccttagttctccattgctgattagcatcaaaaagaccctcaatggtgttcttctttcgtctggtaaaggctttaaagtgaaaatactttgtatttctatctccatgctttaaccaaagggccctacttctttgctccaatagatctctcgttttttctccacacaattaaggtcatgttcaagccgatttctagtgagccaatcttccatttttactgaatttgccaggcttccaattttctcctttagctccttagttcttgctatcaactcacttttttgctttttgttccagaattttgagttttttgccccacaattagcaaagcagccgggtgagattttgaatccgattgctcgtatcattttgtccccaaaacctcctcaatgatcttatggcactcttcattatccgcccaagcttgttcaaaataaaatctacgcccattttttttattgaaatcttctccattatcctcaaattgagcatgaagagtaaatgcctatgattcgaattccaccaatttaggagggacaccgtattcttcttaaatttcttatgccaagctgagttacataaaattcggtcaagtttttcaaaaactaagttagctgcccgaccattgcaccaggtaaatccatctccctcagcttgtatttcccgtaatagacaattagaaatggccaggcgaaagtttctcattaagtaatctggtttgggacctcctccttttttatcgttatggctgataatctcattaaaatctccaccgcaaacccaagcacctgaaaacatgtttttgagacgattcaatagcttccaactttctaatcttcctcccaaatctgggctgccatagaaaccagtaaagcgccaagtaaagccaagattattttcaacaagagcatcaatatgagatcccttataagactttatctgaaccatataatccttagaccaaagaagagccaaacctccactcttgcctttagcatccactgtaaaacaaccatcaaagcctaactgaattcgaacaaattccatacgggcactagttaagcgagtttcagaccaaaatatcatcccgggatgataatcc

SEQ ID NO: 314965 - DNA, 1242 bp, Cannabis indica
gcatgagatttttgaaacaattttcttttatttagtgagatatttgttgttaataattaaaatttgtttttacaactaaaaatactagattctgcgttaaattagtgtaaaatatacacccaaaatagtgtaatagttagagatggtctcaatcgctgaaagttcgaacattaaccaataagtgaaaggtttttattttaatgtaccctacttgaattgtgactaaaatttaacctatagtaggttatatcgttacatttttaatgtaataaacctaattaaatttaaaaaatgtgatcttacataattaagaattaaatggagaatagataattcagacttttatttaattaatatatattaataagtagatataaataatgcagttagaaacttattcttgttcctttattatttgtggtatatatcacggtcatgtatatatattacaccagtacacttcacttcaccaaccctatcacactacctagctaatataaattaattattaattaataacaagagtttatgtaggaccttgcattaatgttgatactattactttatataatcacaattagcatgatttgatatcaattggtaataatttttgtatgtatatcgatagtggaaaattaaattaaaatcataaagggcatttaactaaaaagtagaaacccattacaatagttggataggaacacatatgcatctaattaaacttaataatttatttgcgtccaacgaaaatttaattagagtttattactttatacctatatgtgatatatatatacttccgtaccataaaaaatgtgatatacttatctttgattatttatgttttaatatatatggagcactattagggcacgtttaatggtgtgtagtttgagagaaagcttgtcaaagagtgaggtgggtgaggtggaagagagagagagaaaattttgtgagattgttgacactggtatgcagctacgtagtctctaatttttttatttttcatttaagaaatttattttattggtttaaaatattaagtggttctactataacaattataagacccagtttgcatttgtgatgaccttatgtattgttcccgagatatcattatcgattaagaagatgggtacaagactgaagaataaggaattgactcttaacttttcaaagctaaaactactctaacttctcctataaaatcaaaaaaaaaaaaaaaacaaaaaaaacttaaaa

SEQ ID NO: 314966 - DNA, 1135 bp, Cannabis indica
atataccttcttatgaaaccaattgggaaattctttctcatgtaaaagattatggccgttagaaacttcatccctatgtcgaatctcattaaagtgttccctaataaaacaaacaaattcttacaaatccatgtgttaattcaatatactaagtactaacgcagtacacattgattaacttactccatatacagatcgatttgagaacaattatgcaatatgaaccactcagctttctttcgatcttcatcatccaatggaattatcgtttgttttccaagtggacaacattggtattcaaacatagttaggtgaagagggacaacaggtgtatccgcattacgatcaagataattaaatcttgtttgtatgcctttgaagtacatggaacaaaatgtcaacgcctcatccacaacatataattcagcgatagacccttctagacgagctttgttttcaacataattttccaattttttcatgtacctttcaaaaggatacatccatctcataaataccgagtcacccattataggttcttctggtaaatgtagcaccaaatggatcataatatcaaaaaatgttagaggatagatcaactccatcttacacaaaatatgaatgagatcttcttgtgccttctccatatatttcacatttagtgtccttgaacatagcattcgaaagaattggcaaagttctatgatggtgcttgatgttcttttatccaaaaacttgccaacacaaactgggagtaatcgctgcattatcacatggcaatcatgagactttaatccaataatatttgtgtcatttttgtttaccttattcttatagttagaacaaaatccatctggcaatttaactcccttcaaaaattgacaaaactctttcttcagtagtcagcacataaggtgtgtgaggctttattaaccttttgttagcatcttcgtaaatccatagcgactgtcggacacctagtttttccaaatcatgacgtcttgcattaatggtgtcttttgatttgtcattatccaaaagtgttccaagaatattgtcacacacattcttctcaacatgcatgatatctatgttgtgtttcaaatcatttaaactccaatattcaagttcataa

SEQ ID NO: 314967 - DNA, 734 bp, Cannabis indica
tgactaagtcaactttttcaacagcttcaaacacatatatattgtgattacaccaaatggagtacacaaccacacctaaaacagcagaagaaattgcagccaccaaatcattcaaaggatcacagtaatttcccaaccaatcctcaatactaaccagccaaacaaaatggcaaaacctacttgagatttctgagagaaccctcttcgagaagatatagttaaaaaaaatgtgagagtgagattcaaatgttaccacgcaaacagggaacgaaagaaactcaacctgaataagttaggcaattagatcccgagttaaaaacttctcattaacggcctgccaaaggataaatcaatgcttcaaaacttttaacttatgccaaactaccttgtcatagttgattttctttgctgaaataaaggacaagtaaaaactttttattaccttaaacttgcccgaactcccagcagccatcaaagcttgtttatcaatgacatgatgaagcttgataagttttctagaataccagttattgtccaagctcagggtaaaaagccaaaagtcatgatttttcacatagatgttactaatccatcaaatccaaagatagtcctttttagtggaaatagcctaaatatgtttggccattaatgttggattaaaatcctatgtgggcacatatatataatgtatatactattataaagtgtgataaaaaattaagtgacaaattatg

SEQ ID NO: 314968 - DNA, 1338 bp, Cannabis indica
atgagcgatttatcggacaaccaagggtactattctggagataaggctttggccgatgaatctcaaaaaaatgaaagttttattccacattgctattggaagacgaggttcgtgcgggaggagctcgagaaggttcactatctaccagtgagattaaccacgtcgtccaagaattagaaggaccatcgattactctagaggtgtggaaaagtgaattcacggtatctactcaaggcaacttcatttatccacgagttgtcctagacgcagaggtcgtggaaatgggtgaagattccaagttacctactcgcggggttgaggggagtgaaacgttctcagtggatagtgctcctctggatgaaccattctcctgcaaagacttaggctcgtaggttaaaaagttttaccgaacaacatttgaacggttgaatatgattcatattgccccttcaaattcaatgtcgatgcaatgacctcatcttccccttaccaatcctggaattattccaacctaaaacgtaatggtttcaatccctatcattcgttgcgacatcatgcttccttttcatcctttcataaaggatatcctaacttattacgatgtctccccattccagcttacgcccaacagctaccccataatccttaggttttacgcaatgtatatggaatacactcgaggagaacccacaatcaaggattttagctattcttatgatataaaaaacgttggccatgacaatagcttttattgcttcagtaaatgggcaaattctgaagtcaacggggttgagggtaccgtttccaatatgggagattggaaatcgaagtggttctacacatttaaaatgttaggaattagaattaacttcaatcgttaacctcgtatgacacatatatttacacttgatgattatttctgttctttatgataacacttatctatgctcgctggtagaatattttgatttgttttggataaagatcgtgtggaaattgttgaggttctgagcagccttcccgtccaagatcacgattggcgtctattgtgtaccactacaaaattgcgagaacacaagttgtatctagcagacgctaaacttcagcaagagccagtatacaaggaaaattctgagaagaaaatgaaaaaaataaacaatcgtctttctaagcaaactcagagacaagtatcaggtgatatgtctttgtacggagaatatttctttattttttctcgacttcttaatttttaaccattccattgttttcccagatgaatttcttgaagcaagcccctgttgggttttgtgccttaaataaaacccattacaatctgat

SEQ ID NO: 314969 - DNA, 638 bp, Cannabis indica
tatatatatatatagtattttattatttgaaagaatttcataagatcaaatggaatgaggacatttgtgaattttgaaatagataaaagacaataacattagtaaggtataattaaactagatccataccccaatttagacttggggagacactggactcgaaacatgccccagacccggactcaaacccggacggctgggtccaagtttggagccgagttcgagtttgggtatgggttcgaggtctggatcaaaattcgagtttgggtccagatccgaggtcggggttgggatttggagtttgggtccagatccgaggtcggggtcggggtccgtggtctgggtccaaattcgagttcaggatcgaggtcaaggtcggggttcaagtctaggtctacgtcgggatccaggtccatgtatgggtccgaatctgaagtttggggctggcatcagggttgacccgagaccttttataaacattataatacaataaactaatacgtgttatttattgggctcgtttggaacgccgtattaggtcgtattgtattgtattgtattatattgaattgtattttatgcaatatttttatgtaaaactatatgtgatataacttttatggacacctaaatatata

SEQ ID NO: 314970 - DNA, 933 bp, Cannabis indica
aaaaaaaaaaaaaatcttataacaaatcaaaatcaatcaatcaaaacctatcaaagaaggaactcaaaaattcacaaacaaaattcaaacttttcacatttggggtcttaaaaaagaaaaagattcaatttttaattgaagaagagaaatgggggtagcaaagtaccgtcttgagttgaccaaatcgattcgaatcagataaaaattctctcatagcagcagtcctgggatggtgcatccacatggtaccatccatgagctgaaccccattggattcgcaagcttcaacgatggtatcgaactcagaggcattaagggccacaggcttctcaagcaaaatgtgctttttcttcttggctgcgagaacagcccaatggaggtggagactagtcggaaggggaatatagacgacgtcgatttcagggtcgtcgagtaaggaatcatatgaaccgtagatcttggcgtgagaagggaaaccgttggatgaggcgaaagctttggccttttcgatcgtacggctggcgacggcgtagaggtcggcgtttggagcgagtgttatggcacgtgagagtttccgggctatttcggcacaacccaaaatgccgaatcggattggggtttcttctgttgatgccatttgtgggaaagtgagagagtgagtgagtgatgatgagactgtgaaaagagtgtgtttattggtgaaaaatggaatggaatggagagtagtttggctttgtggtccaaaaaggattggtgccatttataatcatagagaaatgccatttataacgggtgtctatcagtatcctatgtgttaatatcgctggatttctaaagtggttacaatgttggttgcaatagagatttctgtacgattgtttgttgcaatttaagttgcagccttagttgcaataggagtttctatgtataatt

SEQ ID NO: 314971 - DNA, 1793 bp, Cannabis indica
tatgtatatttctacaactatattagttatggatgaccaaaaaatttccctcctacatttaaggtgcccattatattatttgaaataatcaataattaattatatactataccaaaacaataaatatagcttgctagctaattaagtcttgttatataaccatatcttatacaacgttaggtagagcttcataattttatatataaagtttaattaatcagtgtcgcatgcatgtacgaaagcgtccgataattaagcaatacgttggatatgtataaatttaaacaaagaaaattgtaacacatataattgggtgattatgtgcatgtaccatgttttggtttaggcctacataattatcaaattttttttgtttttgtttccaaaaaatgtttataagggtagttgttatcatttatgatcatgttttgacacatttgaccttttgaatattataattattagtcagtcaacacgcagaaatattattggagttggaaagagaaacaaaagagtgtcttacttgatatgttgtagccaagtccaacaacccatttagaacacagcccacaatagattggagctcaatgttgagtttccaaagtgggtaaatatcttcttaaaaaaaaatttagtaaaatgttttataggataaaaatgaaaaaatctcaatagttaaatataataaattagttaataaaattataaaaaatatatctattatatattatttttttaagaaaaaattatataataattaaattatataaattttgtaatagtaatacattgtaataaaaataaataaatatatattgaattattgaatatatacaatatttaatatatcgtattactaaaaattaatatactataataataaaattatatattacaaaaaattataacaatattaaactaatactcaaaaatatatatatcatgctaataaaaatatatatcactattaaaacatgtagaccataccaaaaaaattatatataattattatttataataaaatagatactaaacatcatcttaaataaataatatactatataccatagaaaacatatttggaaaagttcttggcgaaagatctgactatcaaagaggcgtgggttatagggtctaaggtgaaggaaaaaaatcctatagtcaaagtcagtcgacggtgcctccttcgccacctactaaaatgtttagcactatggccaaaatgttctcaactatgcgtgacacatttgggagtaatttgacgtctaaacaacgtgctaatttatataactcacgatttgagaactttattcaaatgtatagtcaatcgcaatcgtctggtggttcctcttcttagagttatgccgctcctccacaacatcaacaacaacctacttcgcaacaacaatttcgaccttctttgcaacatcaattccaaaattttattgcagcagcaacactagtcttttcctcaacaacaacaacagtctcgtccgcaattagaaaaccagttcttatacagaaccccatcagaatctcctcactcaaattttgctaattttgaattatttgggagtttggcgtaagagcaacaatttttttcaactcctattctcaaccaagcttagctagggtatctaacacttggtttatcgtcagatcaaccatatgttccttctcctccacagctgtcgagaactcgaaatgataataatgcagatcaagactttataactcgagatcttaatgaagattttatggaataatcagtttatgtttttaaataatttagt

SEQ ID NO: 314972 - DNA, 487 bp, Cannabis indica
aataggagtttctatgtataattaccataaaaaagagaaaaaaaaaaaaaaaaaactagttttaaaagtgtaaaaataaaaaaaagtctctttaatataataatttttagggagtattgctagccaatcgcaagcaatgctctttcatatatagcctttttctaaaaaaaaaattctaaaaaaggtaaattaatcgagtgtctaacactaccacgaggtctattattatgaatgttaggtaaatttcataagattaattaggatatttccctcgtgaactttcacatatgccaaattatgcccttgaatttttaaggtcgttaaaaatgacccttgaactattgagattgttagatttaaggatttttatctaatttcatttaattttactatttcagtgattgtttatgtactaaactatattccccaaactttaatatctagcaaatcatgcccctcggactttgatatgtactaaattatgacc

SEQ ID NO: 314973 - DNA, 516 bp, Cannabis indica
atcaatacaaattctcaattacacatgcttgaacacaaagcttcaaaccaactaaaaatacccaaaaaaattagagcacaatcccataaattcaatccataatttcaaccctaaaatcacttaaaaccatctagatgcaatctttatagtcccattagcttagatacacaaataattaccagtataccttaaaattacaacaacatgcatcatcaattcaataacatcacaaacaacaagtagtgaacttcaattaccagaatttaaacataatcaaagagggattagaagcttaccacaaacacaagcttcaagaaatgagatcacacaacaatccctcaccaaatccactccaatttaagcttgattttccaaaattgatttgaaaatgaaaaaggaaaatagagagaggggaaggttggctagggcaagaacaacccagaaataatttatcaatttgtaaaaatttcatttttattgaaaaaagtcatatatggtcaaatgaccaaaataccc

SEQ ID NO: 314974 - DNA, 902 bp, Cannabis indica
gctcgcatgcgagccgtgtgtgtagtgggatggcgatgtgtgtgtgtgtgtgtattgagtgttgggggctcgcatgcgagccgttgggtgtgttgtgtaagtgtgttccggagattgtaaatataaggtgagaggtgaatgcacattgacaagggtgacgttagaggaggaatcaagggacaaggcatgcaaggagaaagcgtacaaccacgccttctacgaactctagaagcaaggaggtacgagtagcgacgataatagatctgcaaggtgtaaggacccgaccaagggtacgctacaaccactctcctacaacctataatcggggaccacacgctgcaactactctcctgcaacctgcaatcggggtccactctcctgcaactaggaccacatgcctgtaatcgggaaccatctgacaccagacaaaggtacgaggaccaaagccacctccagcacatgcgacctgtagcgcaaaagcgacgtcttgtccccttaggaccactttgtattccgagccattagagcctataaatatcccatccttaaatatgagaagggattggaaaattatttggtgtaactcaggccttgaatgcaatagagaaaaataagttttagacatcttttcatcttcatcttcatcttcatcttcatctccatcttaatcatcatctaattcctaagttactttatattttccgaccactaaattagttgacgagttctcaccgtcaacaatacatataaaaagaactatttgaacatatataaataaaatataattaaatatttcaactctaatttggtataaattaatcaaaattttcaaaaatttgtaaaataattataataataataaaaatgtacctgtaaaggccgcatatgattaatactttgaa

SEQ ID NO: 314975 - DNA, 2735 bp, Cannabis indica
cgactgtttttaacactcgtatacattaggcgacggttcataaatgtaaagaaaaaaattaaaaaacaaaattgatgcactattgccgacactttagaaccgtcggccttatactttgcccgacggttctaaaccgtcgggaaataccctttcaaaataaaaactcgcctcagacctaatccctattttgcttctccccaatgcacgatttaccctaacccctcttttgcttctccccaacccacgagcctatctccggttccctctgctccacccttccatcagatcgacgagcccccaatccgcgagtcgcgagcctatctccggtaagactctctctctctttctccattttttttctctgccgagcctatctctggtttccatctcaacttgttgccactactccacccatccaggccagctccggtttcaagcttccgttgttcgcccgtgattgaaggcctaatccgctcaaaacaacccatatcccatcgggttcagaggcctccgctccttccttccaggtatgttcttcatctccttgcctctagtatttatatatatatatatggatagaaccaaataatagtggttaaattaatcttttatttattcttttttgtatgtatgatatgatcttaagtataccaaaaaaaaaatcgagttcaacgtttatagattctagttagttttgtaatcgttcttcttgtttggttcctgccaaaagactgggtctgtttgaaatccactcttaagtattcgatttgagtggatttggtgtttttattttcgtcaattttgcatacaactttaagatttgtttctaattccttctttgatatccgtttatttttagaagtacttgtaatatttagaaatcgaatatgcaatgtcttttggtttggtgtatgtaatgaaaatttaatttactcaaatttatgtagttacccaccattctttatacattattttgaatattacatttttggtagctgcacttagtagaagagtcatgtttgtattaatattgaattttagagggggcattggtggatttagattgcttctggttttagatttaaaattagggaaatttgaatgatcgtagacgtattggtgtgaagaggttgtggcataattcgaaaataatgttactgtgtcattgctatctatctttggaagtgctttttgagtagggagtgtaggataaaaattaaaaggaatacttgcttttctttggaagaaaaaagaaacgtacttactttatcccaattttgtatatgattgatttccctaaatgggttattcaagtttaaacgaatcaacaaagtgatttatcataagcacaaaactatactactatatatacattatcaactcatcaaggtttttctcacctatgtttgtatttaactaactattttgtatatggaataattaatcaaataagatataaattatgacattgtaattagtagtactgatattgatgagaacaattttgttgtgaatatatattcagacttgtcttaaaaaaaaaaggaataattaataagaaaacaaaaggatgaaagagagagatgagatacaatgttttgtgtgtggtgatgaagaaaaaaagattataatttttttgggtcagaaccaaaaataaaaagaaaaaactgagaagtatgagcagggaatggacagtgaattaggtcaacagtaatttatataaaaagtgttactaaaatcttggattgtcattaatttgttagatcagagataatatatcatggccctggccctcttttattccctgctgtaaatcgtggctctgttttgaaaaaattggacttgagttttcctttgtactttgtttgagatttttttttttactgatgcttttgaagaaatatttaatgtcaaaactgagttttcaaaatttaggcacatatttaagtcaataaatgatagttattaggattattttggcccacttattttatgggtcattcttttgtctcttataaatttgatacatattgtcttgtttataagcactctatattcattttattgttgaggtaagaagttttttttaatataaaggcttgttttgtgataattgatacaaaagtttatcgaattaaaattaatttttgattcaactcccctattcacatattttatttttgttatattttttaattgtcaattatatttttgtgttgattgaagagtatacaagtagctagctttattggggaaaggtataatcactagctaaaactttaaaattctttatttagaggagtttgaatatcttggaaataattgactactttaacttgtatgtttttttatgttgtttgctagaaaaggtttaatgggttttagttttggtgttttgtgtgcattgcgttttaccattttagaacatgaagagaaaaattacataaatataagacttagaatagatattttaccttgggaaaagaatgcagacctctcatttatttattttatggatcctcattgatttcattctctctctctctctcttgtattgtcgtttattgagttccagttatggtttccgaaaaatggggcaagcaaggacacttgcaaatgcaattgttgggtatttctttatgctttttatgcttatacattttttaatgtatttttctctataccatcctattttgttttttcttttcttttcttttccttatttattttttttc

SEQ ID NO: 314976 - DNA, 950 bp, Cannabis indica
tttaaaaccgtcgagaatcccaggttagcgacggttttgaaccgtcgcctattttgcccaatttacgacggccgaataggcgacggttatagaaaccgacgacaatactttaaacgactgtttaaaagcgtcgggaaaacccatttttgtagtagtgaatagggtcaaagaataaacagtaccaagagtttagtactggtcacacgtatctgttatatgcgaagaactagtatatgtcccctgtgggaagtaaagattgtttctttatataggctgtggtttgactgactaatctgtttgaagatttcttaaagagctcactagctcttaattgtcaacataaggaatgccaaaaatatgcgatcaaaggtggtcgctgacattcaactaaataagagttgaggcctaatttatgagtacaacaccataaagctctgtgagctcccgtgttaggatacgaatgaacaagttgcgagttgacaagtcgcatacgttgctacaattaaggaagaaacaaacagccaaatctatcgtacatttattattaaaatgttttttctcattaaatcatataattatcataataacactcttaattgacatgttgtgtaatcctaacagacacatgctttctatgtaaaggggtgatccaaatctaataaaccaagctgaaaaataaaaagtggactaagcagacaaaggtggcacaatgaaaaacgagtaaatagtgaaggtgtgcttagaaatcttgctgatggagaagcttggaaagatttcgataaacaatttctagagtttgtaaaagaaccaagaaattttagattggggcttgcaaccgatggatttaatctatttggaaatatgagcactagctataggatatggcatgttgtattagtgccttataacatgccaccttggaaatgtatgaaagaaaataatttcataat

SEQ ID NO: 314977 - DNA, 1032 bp, Cannabis indica
ataaaaacaatcaagttatattatttgattatctcacattacattggagctataactataattttgaataacaattaattatatgataaataagccaacatactccatctattatagtcatagaaattaagaaataatagtatgaagatttcaaatttcatatgaatatttctaaaaaaaaattgataagcaacactttatgtaatttactaaagttatatttgatccactaacataatatttaagaactgcaataaccaaaaaaaaaaaaaatcattcaggcaatatacgatcccaaaaaattcatctcaaaaatttaaaatttataaattatacacctttatgaatcctaccactacttatttctctatttatatgctcccctccctttctctatttatatcaccaacttcatttcgttcattcccgaactcaatcatcactcacaattcacaaactaaaaataatcactaccacaactccttatattacttataaaagttcatatcttctgctatattcaaggccgtctttaatattttaaacgccctgttctaattttacgaattggactcctaataaaattagtgatattgatcaatcacaatttttagtataatttctgatatcaattaaaatatttaccattattacggtgattacatcattgactaaatctgtatttattagcagctatcaatagatcacatttaaagtatcaatttctcatttacacattagcctaaaataactttttattatatactacatataatttttttcaacacatctaacataatacaattttctaattttttattcttatttttctcaaagaaaaaataactaaaagtctaacaatatgtatatgatatatcatgtgttaatctttcttttgagtaatgttgatttaatatggtcaatgtgtttaattgaattaattattcctacagattatggattattttttaaataaaataatggatttacacaaaaaaaaaaaaagtttaaaggaaaaagaaaaggaaaaaa

SEQ ID NO: 314978 - DNA, 3216 bp, Cannabis indica
tcctatataaggaataagatggctcttgttgacctcaaaaagtgatcaaccgacagcgggatcgtatagatctgatgcttgccacgtgtttgcacaaatgaataaaaatcaataaacaaaaagatttgttatagaggttcgacccccttgtgatagcgggtaatgacccactccccttttagttgtatttataccgagagaaatacgatccaaatcactataggtgggatctactatagcacccttaggattacaaggtatgaatcaatactggcaaaactcaagtattgagatgtgctagggtaggcgtgtaagagagaggaagtgaggaagagagagagagagagtttatcaaacacttagagtttagaagcaggtttaccaaacacttagggtttaggcttagaggcaacttaggtttctagcctaaggttaaggcatttatataggaggcctaaaaccctaggtttacaattcaaatcccttaatacttgcatagtttgttaaatatttacaaaagaccaaaatgcccatgattttagatattattcaaccatcctgttgggattttaaggctcaattcgcagcccataagttgttgttcatgtgtaaaagtgtccaggaaagcatgtagtgcacctcttggccggccagacccctgtggaggccaagctggctggccatggtatagtcccaaggctggtcggccagctcctgagtgggagctagtctgtcgcttgatgcccgtttgggtgttgggatctctgtttgttcaggtgctaacttagccttcctattggtgagttgtactgccatgtggcacttattttgtccatgtaagcatgcaacgttatgaggacaaaaattgggataacattttccccccaagtccctgtacaaacgtctgtacggatagggactttaccagctatattgatgttgtcaggactgttgtagcttttgctaaataaaagttgatgcgcttttaaaaaactttatcttgactgtctgatctcattgcagtagagaaataactgctttagtttcctttatgatgtgtaggtgaggtaagtgaggaaaaggggcccacatgtactacataagtgacttttgggggaaacccttttttcacttctgatttttatttttctcactagaaatttgttctagaaaaagctcctccttctctccagatggccgaacccacaagcaccattcttcttgggattattgcgctatttcaacgatccaagcttcccacctttttctccattgaaatcttgtagtgggtaagctttctattctcgctatttcccttggtttgattgattttgccatgaatgcatgaacattatttcttgtttttaacatgctttgattcttacattagaatatagtcccttcggtatttttatttgcacgatagccttaggatagataatgtgtgatttctagacaaaaaagaactgagtttgacctttgttgtgattcttggctctttgagtaacgaagaacatgtttgagttcttgtaaaatcatgtgttctaattcatgtaaatgctggtcggataggtggccttcatggggtctagccggccatggagactgtgtccttaggctagccggcctatgcctggaactagggttcttggccagccactagactgggtcttggggtctgcccggccactaggacttgggaccctggccggccaaggccaaggctccaagtgggcaagcaatttttctccctcttttgacctcggttagggtctcgtgacagccttggaggcatatacaaatgtagccttatgcttggtctttcttggaaacattgtataaggctaggtaatgagtccattatagtcaattggataacttaggacttactgtatgtcttagtaagtgtgcttaagacggtttttggtcgttgatcgaccttgtacactttgttttacctggaaggtacccttgggtaccgttgacttgaatatgtttgtagctttgtcaggttgctcacctcctcttatttcttccatgcaggtagtgctaggcgttgaataggggaggtgatagccatgtaggtctctttcttaccttgtagttatggctggtatgaaatagagtaatggcagagtgaccccgtgcgaccctcatacagctagattggctatacggggtcacatcaatgttgtagaaggggttaccctgcctcatgccaatgttagctttgaaaatgaccatgaggatgagagtcccgaggttgagttcggtcatgagaaagttgtaccggttagaaggaagagacacaggccttgtgtcaccctgtccaattgtcctttaggtcgttatgacgacgatggtaatccactaaacaggcttggtgagccttcggcaattggcttggatcatgtctcggatcaatcccctgagcctgagattctcgatgcaagttcacaaggagacaggtggatttcccttattttgtctctctcaaaggacagttttgagagaatacgggctaatgggctagtgggcggtatccatcgtaagatacctcctttggaccaactagcgcatagattggctcttaactgaatggcgtggtcagagtaccacattgatcaaggagccgcactacctcttcatttgtacttttctgatattgccgcttatttcaggatgtgtccaacaaaaatcatcccacctttcagcaatatttgttctgtacaaggagctaggctggcctcacccactccttatgggatcggatactacttcgacttggagtctattttgtagcaacatcagtctggatacttctattttagccaagttggccaccagtggctagatgattttaacaactcatccctgcctaaggttgacgagcatgctaacaagtacttcatttcttgggatgttaaagaggttcgccatcgacgctttcaaagaatatcattcttcaagtgttccatccccacattacaaataagtaatagggaaaatcatatcctgtctttattggctaagcagagaaatattatttggcaaaccagtattgacaatttccgaaagtatggcttatatccccctgctccagagcaacaagagtgccaactaaagaagaggcctaccctggagatgggcaaggccctgacttggatgatgataaagtacatgttgggattttatgccctaaataaaacccattac

SEQ ID NO: 314979 - DNA, 781 bp, Cannabis indica
atgtatttttatattgtattgttaattttttttatatttatatattattttttgttataattttttaattattttagtgttgtttttatagaatattgtaaaattattaaaaaaatatttcaacgtaaaaaatataaaaatttactataatatattaagtatttatctcaaacgaaaacattaccattaaatatttttataaattctgaaaagaaatacgtatatttattaaaagatatttttttaattgaactcttagaataagtttaaaaatagttctttataatttagttaattgtatcaataaaatataaaaaaaactgaagaaaattagtcaccaccgatatgtttgagcctttctcaacatttaaactgttatggacataaaaacgaagtcaaatttctaatttggcggccattcaaatattgatattaatgaagcggtggtaattatgatatttttattaagaagaagaacaacaaagaagctagctagtacgtagtactctatgatatgatacattaaatctaagcaagccttgtggcctagctactactgcttagcataaattttagttccgcttaattttgtaaagttacaatgtgacagccagtagtttcgtgatccgcaagggaaatactaagtaagttgttcgcttgagaaatgtcaagtgagatggttctgagactgtgtaggtatagcactacacagttgaagagggcttaaaagattgattggtatcacctatatcaatgtgcatcttgtttttcggtagcccat

SEQ ID NO: 314980 - DNA, 708 bp, Cannabis indica
aaaaaaaaaacttaagcaaaataaaattatgtcaaaatatctaacacagacagcccatatagcaactaatctaaaccatttcgttcaaaaagcataaaacataaaaagtgactaaaaaaatacattttttacatacagccaatcaaccatagctaggaataaatcgctctgtacctcttattctctctttaacaaaaattcacaaaaatatacatacatacatatacatatataataattacctctgtaacgtcggcggaggggctaaaaatgacggaaaatctagctaaaagcggagctccggcgaagagaagacgaagagagaaaggggcagatctagagagacggcgatggtgatggagagcagatcgaaagagaaggcgatgggaaagaggtcgccagagagacgatagagatggagaagtagaagaggcagcacagagatttgtcttttagggtttcattcttttcagtttgaataattagtaatttcgcccttccattttgacaatattaattttggcccctaaaatctacggcttgttaaaaaaaatttttgaatttttacatatacagacatatcaactttaccctctaaactttgacaactttcaaatcgtactcactcaaaataattttattcttaaaccaatacatttcaaactaaaaaaatatatgacactttattctaaaccaaaaactaaccct

SEQ ID NO: 314981 - DNA, 870 bp, Cannabis indica
aaaaacatgtgaaaaataactctaatttctagagttatcatgagtgaaaatggcttgcaactactcacaaagaagaagttcgatcctttggagaaaaatattatatcagatccttatgagcattgcttatttggaaagcaacataaagtttcgtttatgagttcctctgctaagaaaaaggaggtagtagagccagtttactctgacgtttgtggtcccacagaagttgaatccttgggaggagccaggtattttgtaactttcatagatgatgcatcaagaaaggtgtgggtctatatgctaaagacaaaggatcaagtgtttgggttttttttcaacaatttcatgatatggttgaaagagaaactgggaagaaattaaagttcctcagaacagaaatagaggctaatatacttctcatgagtttagaaattattgctctaaacatgggattcatcataaaatgacaatacttggaactcctcaacataatggtgtagcagaacaaatgaatcacaccattgtagaaagggtcagatgcatgttatctgatcaacagatccttatcagttcctttgaagtttatattccaaaaagagcatggacaagaaaagatgtgtcatactcacatcttaagctgtttggatgcagaacatttgtgcacgtaccaaaggaaaaaaagtccaaacttgacgataaagtagttccatgcatcttcatcggctatggagatgaagaattcaggtataggctttgggatccagttacaagaaggtcataagaagcaaaggtgtggtcttttatgaagattaaacaattgaaagcacgagtgaaggaaagagaaccaaaaaaggctaaaattgagttgtt

SEQ ID NO: 314982 - DNA, 1429 bp, Cannabis indica
aaaaataatagtatgtattttaataaataactaaatatttattttgatttaataattaaattgatctatagatacacatgttaatgttaagcccacatagctctaagcttgttttagcaaaactttaaccacttttacaactcaataaacaacataaattctaattttcttataccatattaaaataaagtgtctcactcacataataattgtgtatgttagaagatttaattattcatatatataagattatatattaatttttttttaaataatactctttaaaaataaattaactagagcactaaaactaataaactaaattaacacattcatgattatgattgtaaattctcttatcctctctacctaatgttagttttcgttttgttagacgatcaacaaacaaagttgcccacttcgtagctaggcgctcttatttctattctgatcgtagcattcgtgatgttgatgttctgacagataactttcatgccaatttagtaatttaaatgctttatttcaatgaagttgatatttcatgtttacaaaaaaaaaaaaaacaattacatcataagtttttgtttttgtttttaaccacaattaaattgtaatttcatcattttttttttctttttgatttaattatgggatatagacgttcataattatatgcggcaaatcagcttaaaattgatgaaataaacaagcaatatttattaaatcaaagcaaactctaatgttgcataaaattgatgaaataaatatataggctaaagaattattaattataagagatttagtagttctaatgttgctttcagctatttttccaccattataggcaaactcttttctttgatattcatcatcttaattaattggaccccatttcatctgaccttctttctaatttcactcacacaataatttatcaatttttaaatatacatttttcttaaaaaattaattctcactataataatatatatatatagtagatgactaaaattgttccagaccaaacatatatatatatcctattcctacccttattttttatctagatggtttgatatttacttacaaaaataaaaaaaaaataaaaaaaaacaaaccccattaatgaattcttattttattttgcattttctaccatttaattaaattgcatttgttgcatacattaaatacttattgtcaggatttcaaaaaaaaaaaaaacttattgtcagatttgtgttttgggaaatgccctacaacaacaatggatttcctaaataaaaaataaataagagaaaacggtttggaatatatatctttatatattaaaagtgcctatctaacggcatttcttggtttaacagaatataaatattctgttaactttaacgattacgtttgatctcccgttaataaataaacccaa

SEQ ID NO: 314983 - DNA, 529 bp, Cannabis indica
aagtgaaaacgaaagaaaatggcgtttattaagacgcctgaagattgtgaacgaatgaatggtttttttttctcttgccgtgggattttatagtaggcgaaaggttcagaggcttaaccgcatatttaaccatggttaggataggtgtcagggagttagcgctctttttttatctttctacattcaaacctcttttggtacatctactacttagatctgggtcgttcatttttttaatcgttacgaattaaacggttcatatcagattttcttttttttgaattcatatcagattctaaaagtcgaaatgtacagctcatctttactttaaatttctctaacaacatttgcattgccacctttaatctttaccatttggtagttggcctgggcctgggcctaattggttcggaaatttccaactcatactatttattaataaaaaattatacataaaaacaaccaaacaaaaattataaaaatagggttgtataaaattttaaatattttataattttatttaaaaaaa

SEQ ID NO: 314984 - DNA, 1179 bp, Cannabis indica
ttttttttttttacattatcaaatataccaaatgtgagaatttattgtttattattttttcatttttttcctatgtttttggtacctttttctgttcttactaaactcgaacttcttcttagcaaaagtaatattaaaaatagataacttctgagaaaagatttgtattgcttccctaaaacttacaatacttatagtagcaaaaaagaaatatttcaatgagaagtttgtaatgtaattgatcaaatgtaggtagaaggatcataaattaacaatttttgaagatgataaatgaggaaatgtatacaaattaaagtttatatgaaaagaaatgctatgggggatcaacaccatttaaaatattcgatagggtgtatcaatgcattatttactgtttcgacatataagaaaaaaaaattaatttaattttcgtatacgttataattatttaagatatcttgtaaaattttaaataaataaaaataatttacactataaaatgtaaaatgtaatgttcaattaatttatgtaacacttttataaaataaaagaatctcgtgtgcaaaatctaaacaaaattttcgataaattattaatataatgtcgatatcttatcgacaaactcaagacattcaaaaaattaattaacagctactaaattatcgacatattatagataaaatattgattttctattgataaatattaaaaaaatttaaaaataattaagctaaaactatcaactactcattttatttttaatcaatattatatagacaacttatagataattcatcgataacactgaaaaagctaccataacacataaacagcttcataaactcaacttatctccaaaaaaaaatcacaaaaaattaaccaatttcaagaacatatataaattcacacattaatctatgaaaaagctacaatttttttttaagaaaaacttacttgggaggaacaatgagttgggtggcgatggtggttaagagaggccgagaaggaggaagagaaagaattgggtagatgagatttgagggttgttaggttgagttttgggtagatgaggaggttcggcagtggaggagaggaggttcggtggtggtggttggtggtcttggtacctgagtctaggtttggatttggatggtctcggtggagagagagagagagaga

SEQ ID NO: 314985 - DNA, 1178 bp, Cannabis indica
ttttgtaaagggaatgagggttctctcaataccattaaatctctgcatgatgagtttagcaagatatcgagcctttccatcaattttactgaatctcaagtttatttcggtggagttgcacaaccgattccgcttgctcaaaaaataaatctttctataggagaattccctctcaagtatctcgggatcccccttaaaccaactaaatggagactagaggattgtgggtcgattttgaagaagatgaaactcaagcttcattcttgggctaataaatatctatcctatgctggcagagttcaattaatccattctacattgataggattaaggaactattggatgatagtcttccttctgcttcaaagtgtgataaaggagattgagaaactttaccggggcttcctttggggattgaaggataatcgctctagagttcacttgataagttgggaaagggtgtgccttcctaaagcctatggtggtcttgggttcaaggatggtactaaatggaacaaagcttctttagctaggttcattttggatttgatgaacaaaaaagatttactgtgggttaagtggattaactcggtttatctcaaagggagtgatttctggtcctataggatgagcatggatactagttggtattggagaagctttgtaggttgcgaacaacttatagcaaagctgatatggtggcaacgggtggagaaaagttcgaaaccagcaaggtttattgcagcatgctgaagcagagtgagtttccagcagcaggggcgatctggtatggcttaaatatgcctaaacatgctttccaactttggcaagcagctcaaaccaagctgttaacaagggatcaactctgctggcagagcattcccatttcaaacttgaattgtgtggtctgtgatcttgaacctgagagccacagccatatatttttcaagtgtaatctgtctttataggtgctgtataacatttttcattggttgggcactgctgagtggtctaaggactacgaaaggtggacagtttggttaagaagttcaagaccgaatttggtggacaggataagagtgctaattcttgcagctgtgatctatcacttatggagaaatcgaaacacatgcatattttctttctactttaatactgtgaattgtattataaataaa

SEQ ID NO: 314986 - DNA, 1273 bp, Cannabis indica
aaaaaaaagattattattgaaaaaaaaatagtactaaaatagtattcttttagttttggcattggagttgctctaagtaaaaaattagtgggttaattttattataatggcatagatgtaataatgcaataatattatgtctaattattaagtatacatacactaattttaaaggatgacatttgtcactaatttatagagagagtgtaaaagagagtacaaaagagagtctccttagcacccctcatacactaatctcaaaagatgacatttgtcacttatttatcgagagagtgtaaaagagagtacagagagtctccttagcactcctcgtaatataaaataaaatggaaatgatttagaatgctttggatagttatttgcaaaaatttagtagctactaattagttactattttgtttatttttatgatttgagttataatttttttttatttgtattttgtgctttaatattacaatttttgatgtaatatattatccttataatatttttcttagaattgtaattgtttttaattttttattcatcttattttatgtataatttatatatttctaatattaaagatataaatgtgattactgatgttagtaatgggtgtaaatgtcaccaaatcaagaacataatacaataatagcaatgatgagatcaaaataaaaacaatatgacatattgaaatgcaaataaaaattagacaaaaaagattattttgtagataaatccaaagagaagaacaacctcaatgaataattgaagacttgagctctttattaaatcacaatagaaagtataattgggttacaaaaccagctcacattttaaaaattaattttatgaattcatttacatgttcttaaaatttgttattagactattttctgtcttttaactcttaacttgaatcaaattagctcaactgttttaaaaatggacattatgcaacaaaaatagactcttttgtaatagttaaggaaaattttagccacacaaactccaccgatgcaataatttattaataagaaaaacatattaatataattttaaaactttaaaaatgtattgataataaacaaaaattatagctcataaaattaaaaaataaacataaagaaataatatttttaaaaattctccttgctaaaagacaccattctcttttattggcatgattactaaggtaatcattctcttacatttgtttacttacattattaaaattaaaaaaaagagaacttgattaaataaggga

SEQ ID NO: 314987 - DNA, 944 bp, Cannabis indica
attctgggtttcataagaactagaagtggaaaaatccaccaagaacattctctgtaataaatactatcataaatacacagactcgtggactaaggctaattaacgccctaaccacgtaaaaatctctctcttatttccttatagctctctaaattattattattatattggttaccgaaaacctcggtcaacaattttaatccttataaaataagagaagagagagttagggcttatctcaagctatctttgctattcctacttgaataacaactggaatctttgctgaaaatgaaggaattagctagatagaaaatctcttagtttcgtttggttctagcttgagagagagagagagtgagttttatttttcagttttacaattatctcttatttcattgtttttcattctaacttaattcagcataataaaagaaacttactagaaattccactaactaaaggataaattcaagcttaaggctaaaattaccaaaatacattttcccttctttcttaagtaacctttaaaaattaggagcaaaatggtcaaaacaaattaccccacttcaccccgacattctaaatgtccataaattaacttaccccactaaatctagatatacaaccgtatcatagtaacactaatggccaaatcatcatattattccacagtaataagacataaagtataaaaaaataaactttataattaatatacatggcacacctaaattataataaaatatccataattgaaaaattatatcacaaatacctatgactaacaataggttttattttgtactaatgcacaagtatagccataagcagtaattaaatcctaatatgttacaactaaaatcctatatcgtgaataaaacatactctactacaataaccatagcaaagtggtgttgtaacaccattattgaaaataaaaa

SEQ ID NO: 314988 - DNA, 917 bp, Cannabis indica
aaaaaaaactaaaaaactttacaacattatatgttacaaaaaattattttaatcaattcatattattattttagatgagtcttgttaagttaaaatgatttttcacctatatatgtggaattattttgtttgttattattcttctaagcatatcaaatatggtaccttttttaacattattttacatctcataaatgtaagcgaaagatcataaatgtaagagaaagagactaacgatgtgattggttagagatacacaagttgtggtgggaaatgataggttagaaatgataaaagacagtattatctggtataccctcttaaatgttataactattaagcattgctacgagacatttgggtacttagtatcacggtattgatataagatatttgggtacttagtaacacgataaacgataaagtattattttataatttgttagtaatattttataatatttattaaaataaaataaatggaatccgatattaaattatactaataataatattacactttataaaggtaatagataccgtaagtttttttagcatttctcaactattaaatgtttacaaaaaagaattacttaatttaatagctaaatatcttgtggttgtggtgtacttgtggcttgtgggcatattctatgggccatgaatagtactataaatacgagttagattttttgacacgccacgaagtcgatatgagtctggaagacacaagcatgactaggcacaaaaaaatacaagcttgtgcatgacatgacacaatactacaattaacacaacacggaaaaaaaaaatatgtccttaagcacgacacgacaccacaaaaaagtacgaaaggcacgacatgtaagtacgaataaactagctcgaaaagcacgacacacgacaagcccaaaaaa

SEQ ID NO: 314989 - DNA, 1777 bp, Cannabis indica
tttttctaatagtttactacttgttttaaaaagtaaaaagtaaagcgtgcatatatatatatagaacttaaatatatatatatatatatagaacttaaacttccaagtcattacaaaggagttacataagtatggttacaacatccaaacacccatatcggttatgggtaaaagcttacttagccacattatgggctgaaaaattactacatctaccaacaaaagaaaacatacacccaacaaaagaagtaaaaagggatttacaaaacttagagaaattatcaatctcccatctcgcatcaataccattaagagagttgattactaccttagaacactttctacaacaacacatttaaaacctttagcctttgtcgaatcaagagccaaacaacaagctgcagcttcaccacaaagagcatccgagaactgtaaatgggtcgtagtcacccactcaatctttccaagatgatctcgagcaataactgcagtgtacatggtctccatctccaccttgacatcacaattcaccttaatccactctagaggaggagggatccaagttgccaaaggagtaggggccactgagggaaaaagggaattcttgtaatcagcataacaaaaggtgatagagtcaattaagtatacaatgctttcaactctattgttatggatcttgtcattcctagcttttcaaatggtgtccacaacgatggacgcatagaggaaaacttcattcgtattaatgtccttgttacttaaactccaaataaatttgacccaatcccacatacgagtacccgagttcgaaacaggaaagatgccccaaggagatgacctccaaagatgaaaggccaaattacacaggagaaaaagaagttccattatttctttgtcatccccaaacataggacaaagggggtcctcctccttgaaccttttgttaagtatagactgaatagggagggcattcgataggatactccaccaaaggatcttgtgacgctccaataacttactgttccaaagcctattccagagagaaggggcaacatcatacagcggagcacattccgaagcttgaatcaggtaggtagatttggtggagaacttaccattcccctccttcgtccatatccaacaatcactaccctaaccaaagggtatgccccccttgagaatagttgagacagtatcatgatcgaaaagacaattcaatttctgagtatcctagttcccgatttttgtaagaagtttagccactttagtaaatctaggtgtcgtccttccactagctttaggaatgaattcctttccatgggcaacccaagggtcttcccaaatattagttttcataccattagtaatacctttgtaggctcctttcaaaagaatagattttgctttgaccacattcttccagaaccaggaatctgaatctttaaacttacacttgaggaaatcaatccccctaagatatttggcctccaaaatctgacaacaaagagattgaattctattcaacagactccacccccacttagctaagaaaggttggttcatttctctaattttttggaaatccaaacctccacaagatttgagaacaaattacttgtcccaagccttaaggtgaatcccattataacctttattaaatccccaccagaagtcgcgaaccaaaccatcaattcttttatcagatgattcgaaagtttagtggtttgcaaagcataaactggcaaggccagtcctactgactgttggaaattatttt

SEQ ID NO: 314990 - DNA, 737 bp, Cannabis indica
ggcataagaaggtaaaccgatcacgcccatgcaaacacatccaacaacagtggatcagatcaccttttaaaaaaccttacaatgtgctctaaataaactaaggatactttgaaattaaaattggccatgtacattaatgagattaaatatatcaaggatagtttgaaatttgcgagaaaatttgaattgctttatatgcagcaagttgggaaaacatcagcatggataaaaagacttcagacctgatttttaatgtgtattatcagttaatttgttctgttacaactttataaatatatatggaagtttatccttcaacagattaactaacataactaattatttggtaagttagttaaaactggttcaactaagtttagacaactcaaatcctaactctttatcctgttacaaacaatttgcctttccttgtgtatgagttgtgctatatatagctcaaagtcccatttcaaagaaaagacgtgcaatctaatgagagaggcaaagagtattagtgagagagtgatgagttctttgtgactaagaactcaaaggggaaacacatggggttgaaggactgttactactcttctagtgatttcagagggtctgctaagacctctgccattagtgttgtactgactcaaacttgtttatagtggattaatgataatggctttaagctggagtatggttagtaggggtgttcatccgatccaatctgcacttttttggtc

SEQ ID NO: 314991 - DNA, 1689 bp, Cannabis indica
ttgtctctctcaaatccaaaacaaatgaaatcaaaattaaatgaaatgaaagaaagtcaagtaaataaggaaagtgttttcattgtttttttttttttttttaataaatgagtagtcaacaaaagggttaattaaatataattagggttgtcttttacgattaatttaggaaagaagatattaattgagaataagtgtcatcagctgatgacattccataactctctggaaaaagtaatattaatatataccctttctttcttaaaaaggtaatgctaacaattaaaatattaaaaaaaatatgaaagaaaaaatattaaatatttaaacaatttcaatttgtttttatttttttttaattttttttccagatgaaattaaaacaatttaaatctatatttaaaaagaaaatattaaatctaacaattataagataactattgttttcttgttgtacaggtactaagagaaataaatagatagatatcttactacagattgagaggaccttctgcggttaacaaaatttaattaatctctcgatcagagctagcttagagtcataactatagaagaaaaataataaaaattatgaagatttagcggggaaaatgctacattttattatttctgacataatttaaaaagataaataacattttaaattctgtgttttacaaaaattattagactttctcttttgttaaatgacaaaatgaactccatatatttcaaaatagtaaaaataagatcatgagctcaatttttaacaattttattttttaatgagctcaatttttaacaattttattttttaatataaccaactttaaaataatttctaacacgaacaaatacagaaaatataaccagttttgtcataacatatctagatcagattattattaagttttattttgacaaaaaaatcagttcaggatcctatttgtacaattttagaaaatatatggtctattttatcatttaataaaataaatggtccaattaataacttttgcaaaagacaaagtctaaaataatatttactctttaaaaaatatgattgattcattaagaagaattgaaaaagatacgtgtgtaatatattattatcagtacaagtaaatattaaattttatataatttagaaaaaaaatagtagaattattcgttataggactttataataattgttttttatttttatgggtaatctttttttaactcatttttataatttattttattcactttaacgttaaacctcaaaattaatattaaattttactatttcttcttttttttttctaacattttctctggttctctttttgctttcatctccaagagcactagtgatcttcttacttatttaaagttctctggatcactcaatacatgtgattctttcaataaaagtcacattttctaccattttaatgttattgacatatttctcaacaactatgttaacccaaatattggtggagcattaggcaccactggtgcctagcaccttttcgatatgttgcgttgcgattagctagcgatactccctaaaagctattatattaaattatatgggacccgatacttaattaaaccaataacgatattgacacgtaggagggtgttaggcaccactggtgccctttagcatttctcatattgagcattactattaggcac

SEQ ID NO: 314992 - DNA, 1167 bp, Cannabis indica
tgattcatattccttttataggacatgtgtcagcttcgggtacatagccgaatttttggtataacaatatttgtgattataatgaactatattataataaaatcttaacaacttccaacactttaaaatttataatttaccaaacactgaactcaacttttttccacagttctgatacaactatttttttcacaacacaactatagttacttttttccataacacaattgtgccaaactaaccctaattaattatatatgtatatacatatgtataaaatacaaaaacaaaaacaataattgtattaaataatagtttgataatatttttattaggtgacttgaaaagcatttcatgcaaatttatagtaaaaattattattattattattattattattattattattattattattagaaaacttaaacttatttttcaaagttacatttaaataattaaaataataatttctatgattctatcttatgaactattactactatattatattaaattttttgtcttgttaaaattttctcggaactatgcacactactaaggtattgaattttcgttagttttcatatcttagatgatagagtacttatatgtgactatttagatgatgtgacaaattattgccttgacacatgtataactaattaaagtttaaatattttgtaaaaaaaattaggagaattactctatatactatttcttaattttttttttaaatttacggtttgggtttctaaagtggttgcagcgctagttgcagtagggatttctatacgattttttgttgcaatttaggttgcgttgcaataggagtttctatgaaaaattctgtaaaaatgtaaaaaaaattattttgaagtgtaaaaatgaaaaccccttataactttaaacatttttttagagtgattaaaatatatacatatatatatactagaagaaagttacgtgcaaggcacgcatatttagttttatgttatgtgttctataatttaattaagaaagattcaataaataatcatataatttaaaataatttaaaaactaattttaattagtgtgtggggctatttaaaaatcaatagtgaaaagttaaatttaaaatttgcagaaagagaagaggagaatggagattagcttgaaatatat

SEQ ID NO: 314993 - DNA, 1830 bp, Cannabis indica
tttcacttggtaattataaaaaatagaatttcaatcatcatcccatgaataaagcgacactccactcgatcgtatgcctttgccatatcaagttttaaagaacacttggatccattttgaaattggtttttcctcatagtgtgtagaccttcaaacccaataatagcattatcatgaattaatcgtcctttcacaaaagcgatttgagacttcgagataaccccttctaaagtagtcttagccgattagcaagacatttagaaacaatcttgtaaatgacgttgcataagcttatgggtctgaattcctccatccatttaggctgctccatttttggaattaaagcaatgatggtgtcatttaaaccgctcatatccagcccatcatttaaaattttcaagcagatacttaccacatcatcatgaaggtttgcccaatacttttgatgaaagagggcagggaggccatccgctcctagagtttttgttggtggcatctctttcactgccaattaatagtttcttcttctttaaatgactctagcaaatctcgattcatttctagagtaacccattgtggcactgagtttaggacatcatcaaggacatcatgttggatcatggaaaaggtgaaaagggtatgaaagtacgtactaataattctctgaaccacaaccttgtcttcttgccaaattatcattgtgtccatcaacccatgtatctcatttttttttcttcgagcagaagctttgtgatgaaagtatttagtattatgatccccactttttaactatagagtcctacttctttgtcgctggtacttctcatccttatcaagaaaaaaatttgactttttttcttattttttaatttccatcccaatggatggttgctgaacctcagataagtcacccaaggtcttcttaactctatcaagttcttcattgttttttgtttttttttctttattccacttcttcgaagctttcccatatagagaggccctccgtttgaacccctttgtcatacctaaattagctttgtccctctaatgccgctcaacaatcgctttacactccccatcctcgcaccaagcctcttcgaaatgaaatcgagttctcctcctgaccattccaaacttctatgttgaatgacctagtggtatgtcaatcacaagggctctatggtcggactctagccaacccaacaccttaacatccgctctcgcaaagctttccatccaaattacacaatgccttgtctagcctctccatgaccctattttccccatgcccattacaccaagtaagttcagttttacaagtacaaaaattagccaatccacattcatcgataacctccctaaattcctccatatccttcgaagctttaacccgacccctattttttcagatagactaacaatttcattaaaatccccaacacaaagccatgggctagtaatttcattatgtaaatagcatagtaattcccaagaaaacttccgttgagatgtattaggattcccgtaaaaacccgtcaaattcaacggtaaaagtcctccaaccaccacagtcgtaatgtaaccaggagaactcaaatccactcgtaatatttccttttctaaaaaaaaaaaagctaatattttaatttttttaattaaattttagcatttgaaataaataaagtggggagtaaaatacatttataatagaaatttttacatgaaaaatctattttactactaatttattacacaattactcatacacgcctatgtctacatttttacttacaaagttagttttattacacaaataccacttagtca

SEQ ID NO: 314994 - DNA, 1643 bp, Cannabis indica
tagtgttgggaagagaagggataaatagagtatgtgttagagtattggaaaaaataaatgtttggcaggcttcacttgccgctgtcgggtgtgtatctcacgcacgcgtaggggccattggatcagatgacgaacggcgtggattgggtcaaagggctgaccgagagtgggccttctaatggactgatctgattctcttttgaaaattgcacttttagctccatttctctaatatttcttcaatttaatcccaatctttttcttccaaacacacctaaaaatacataatattaattataaaactaaaataaaattaaaaataaatatcacataacaaattataacaaaataattataaaaacacacaaaaacatataatattacaataaagctaataaattcaaagataattaaaaacttaataaattaattaaaaacttaagaactaaaccaattttaaacttaagaactaaactaatttttagtaaaaaaatgtgaaagataactctaatttctagagttatcaggattatattagtccataatattaattctaacatcattttgcattttcattgttgtttatttgtattatccttagaagagagatgtcctaaatggttacatgatgggggtatacttgctcgactgccattaggctattagttctcgcaatttgaaacaggttcaaaaaattaaccattctacgttttcactctcgtttatatgtattatcttaacacaaataaaaatcaatggatgatttccttctattgaatttaacaatggtatttttaaaaatttcttcttttatacttaaataaaatctcattgttatgttggttttttttttatattatagttataatttatgtgataattatgattttaattcattaatagcatgggattcgtaaggcttcaggatctaatgaaggtacattgttatggtctaacttgtggaaattgaacttaattacctgttaaagtgaagcatttcttatggaaagttggtcataatttgttgtctactttttgcaatctagtgtatagagatattcaattggctacttcttaccctttatgtttgaaaggcctggagactgttcatcatgctctttgggattgtgattctttgagacatattcaagagtatggctagctttgtgtgtatcctcatctctctaagtttggacttttatgtatttttactgtcgctctaattaagttttcctactttaattcttgagaaatctagtatcgtcgtaatatgcttgttgttgttggaacttatttgactatgatttaaatttactaacatgtatgtttgattataatctataatctaacatcctaaacatgaatttcctaaaataatgaaataaatacatataaagttatagaaaaccttacattagtgacagcagaatataatggctcattctgttcatatatttaacccttattcctttctgtcgcaaagtattaccaagatctaaacctagatcttcttaggtgatggaattcttcacaatatattgacttgatatgtgtagacatgtactctcttcactatagggtacaaatttaagaggggagaagagaagggaattcaaaaattataggagctctcttatttgtct

SEQ ID NO: 314995 - DNA, 1278 bp, Cannabis indica
actcgtgttggtaataccgtaatatttccttaaacattatacattgtaccaacacactcaatattacaactattccagtgttggtagtgtacaataatataaacaacatgcatttacatacatacacacatacatatgcataatttatgctaatcatacctcattttcgaattcaagtgagttgtccgatttgaaaggaagtctttgtgctagatggatgccctaagtcacatttacataaatgggtaaataacatgccaaaaccttaatttgggaaatccaaactcactattaagggttctgctatcggtaattattataacattaccctaattatcagaaaaataaccaactaagactctaaaaataacacaaatcaacgaatcagcacaactcgggaaacctgcccctgatttgattaaccggttttacaggtcttgtaaaaccagttgatcggtttgcaccaggtcacttaaacaaattcgaaacttatccaattcgtgtccaaaccatgccaaaccttccaaaacatttgtaccaacctcaaataatgttttccaaataataagagcaggaaacatccacgaaatccaaatatgccattaatgatccaagtttgaagtttcaaactcaaacttgcttattcacaacaaaacacatcaaaactagcatcaagaactcaattctaacctaaattgatcttagaaacagactcacaaacacatgtaaccctaacagccacaaactcttaaaaatacatactaagatcaaacttacaactcgagaaatcttgaaattagaatgtttagggtttacctcacgctaccactggattttccacttagaaaatgctcctgaatcctgctgaaatgaagaacctagtagccaaaccctaggttctagcttggttcgaagaaggagggaaggagagatgaattcttgtttttcctttgattttcttaatttctttctaaaagattaatccattaattcaataacttagctaaacaaaaataagatggccaactttcccccttagagaaagccacatattcatcaaataggaagtacgaaaaaagccctttaatctaataagctaaactaaagtaagcctaagggtaaaatggtcaaaaatcataaccccacttaaacccgacattctaaaaatctcaaatgtttgtcccgctaagaaataagttctaaacttatccatgtgactctaacggccatcccatcccattttttgtcgtcgccgagtaaaaatcataaaaattgcat

SEQ ID NO: 314996 - DNA, 989 bp, Cannabis indica
cttgtaaaataagttccaacaatttcaccagggaattaagggcgttgaatgtacagggattctcaatcccttggacattccatctcaaggatcttgccatgcaagactcgtcgatatttcatttataaaagaaaaatggttatctaatgcatcagaagacccaccactctttgaaacttttccaccctatcatagaccaatgacctagcctcaaaagaagcctctgaaaaactagaaggattggaaaaccttcccaattttttattttttgagcatttttcttaatcgagtgtcgccttctagtaccattattattcccctcttacaacccagaagagaacatcactgcaaaactagagaaacaattaaacgttgaaccatctgcaagacccccatctcacttcctcccttctttttgattgtattaaggttgcactcttccttttcagaaaacctcctttttttttatcgatattgtccttatgaatgtattgagaatcacatgttattcttagcacctcttatcattttttagttggggcatgcatgccatttgttccaagaccaacaaccttcacgttattatttctttttccacttcccacctcaccaatatttacattaccacttgaattttcttttgtttttgttgtattactctcaagaataaaatctattttattctttttgtttattatatttttggcatgtactacttgtgcaacttgggaataacaagtcatattcaaaagaccatgcaatgttggagagttcaaacgactctccctggagtttctcgctttctttccctccaaagaaggctaccccagaattcttgattggttgcacatttttttggcctcaaactcataatctctttttaatcgaaaccttgtttcaagtaactccatttttcgctaaaatataaactctagcatcgaagcaattgctataatcacgttgcattttttagccaaggtccaaacatc

SEQ ID NO: 314997 - DNA, 2288 bp, Cannabis indica
caagacataggggtaaaatggtcaaattacataaccccgcttaacctcggtattttattttctccaatatatatcccactaagaactaaagttctaaatttacccatgtgatcaaacttgccatccatcacattttctattgtcaccgagcaaaaatcaaaaatagcataattcatatataaatcaaataatacccctagagtttaacaaaatcttcgaaattgagaaattataactctaatgcccatttctaataatgggacccacagataattaaattcataaataattctaaaaataacagaaattagtgctaattgcctttactaatccaatttactaaagcggtcattacaatgctaatttactttggattacaaaaatttttgagcagaagctactgtcatagcatgttatctaatcaataggtgcccctcatttgcaataaacttcaaaactccaacaaaaatgtagtgtgaccatgttaccagctatgaccctttgaagatttttgggtgtgtggcctatgctcaccaaacaagggaagcttgatcctagagctaggaaatgcatcttcataggataccctgatggtgtgaaaggatataggatgtggagcatagaagagagaaatcatcaaaatattttcatcagcagagatattgtattttattaaaccccatgtacaaggatccgtcaaagggaaagaaagtaaatacaactggtaattaaattagaggggaagttcagattgaggtggagcaaactgagaaaggtcagatggtagatgaaacatttgacaagaggttgaacaatgagctaaggagttaactgatggagaatctgaccgtgatgtggatcatcaaggctatcagttagttaaagatagagaaaggagagacatcaggccacccaacatatttgggtatgttgatttggttttttatgctctaaatatgttagaacttgatagtgaggaaccttgttcctatgaagaagctatgatgtctatctataagcttcattgggattcaactatgcagcaggaaatggtatctctaaggaagaatgacacatggatcttagtaagaaaaccagcaggatgcaaagtgatcagctggaaatgggtgtacaaacacaaagagggtatccctggaattgaagaagctagcttcaaggctagattggtagcaagaggttttacatagagagaatttattacaatgaagttttttttcttgttgtaaaacacacctctattagattgcttttgatcattgttacaattgaagaccttcaattagaggaactagatgtcaaactgcctttcttcatggagatttggaagagaaaatctacatgaaatatctaaggggttttgaagaagagagaaaggaagatcatgtatgcttactgaaaagatcactttatggccttaagcagtcttttaggcaatgctacaaaagatttgatgaatttgtactgaaaattggttttaaaaaaagttcttatgatagcagtgtctatgtcagaaacccggtaaacccgctcgatgttcagccctacaatgaagcttgtatttctgatagcagtgtctatgtcagaaatacaagcttcattgtagggctgaacattgggcgggtttaccgggttcgggttggtgggtttcgggtactaaaaatatatatttcttttgattttaaagtttaaaataagttaagtttaaattaatatttttatagaattaatgagatatatttttatattaagaatattttatttgaatttaatttgttgatgttttgtaggaattaaagtgtgtttttattgaaaaagaaaacaagtgacaaagctgaaaaaaaaaagagaaaaggagcaactcaaattaaagaagaaaaagaaaagaaaggcccttgagctaagcccaacacaagatctattccctctcctttcagcccaacatgacaccacatcatcaccaaatggcacctctccattcgctccaggagcttacatcaccgcctaagtggcgcatctccttccctcagcttgcacgagtggcccttgtctattagctgctctcccatcttcttctttcacctaccattccatcaaagttcttttgggcttgagtacactcaacatcttttaaagctaaaattctaataataacactaaatggaccacaaaattatcataaaactcaccaaaccctcctaaatactacaagattaaagataacgaactagaaattacactatatatgaaaaaattataagagtttactt

SEQ ID NO: 314998 - DNA, 630 bp, Cannabis indica
acaacattataaactaaatataagaaccaagaacaagattaaataaagaaaatcattacccattgaattcgtatataatgctctgtctgaaaaaataactactaccaaagtatcgagcttgtagtatagtttgtatcaaaatttgtgttatttggtaataaaatgagtgaagagaatgaggtttgtgatgggcaagattagagaagagctgtgtgaagagaagggaagagagagatggaaatgttgtgtttttgggctacagaagtattatggagattaaaattaaaattgaataccaaactctacaaataaaaaaaaaaaaaaaaaaaaaagttgatccaatctcttaatattacacaatatgaatttaagagaataattttcaattaatatatgcatagaaatttaaatttttggaaagaaagatcgatactataatatatataaatgtgacatgcgaataaatatatatatatatataaaaaatataaaatttttttttcataaaattattttcatgccaaacatataagaaattgatttcttttttgccattaattttttttttctacattttcctttactctttctttccctaccaaaatgcaacttccaaaatataatctaaaa

SEQ ID NO: 314999 - DNA, 434 bp, Cannabis indica
agggggccattttaaccaaatttaacgcgaaatcaatcttcatatacacttattagtagtaagaattcaatttgactagtggagtaaaatattgttaggtatttactatttcaattaaaattattgttagtgctttaaaactacttttttgtcagtgtatccaatagagaacttatgcacaacggtcttagctttgtctctgttaaatttcacgatttttgagatgtgtagactgacattttaagagaacactaacaagtgtaggagtaaagtcccatattttttacaaagcttgtatgctcttgatcagggacatgcatttttaatctagttatatccagagtatgcatctataaaagttatcaactcatgtcatgttgttgctgttgggttttatgccctaaataaaactctttacaatctgattagttatc

SEQ ID NO: 315000 - DNA, 1443 bp, Cannabis indica
ttagtaatgtagtgtgttataatttagcagtttttaaaaaattagctatatatgcaaaaatgttgtaggtaaaggtatatatatgcattttggaggtccagcgtcaggactacgtaccaaatcatttaaaaactctttacgtctaccaaactaacaatctcataagacaaccacttgaggctagttcaagtggccatagggggtgcgtttgtgttggaggtcttgggttcgagtcccaaattatgctgatgtaatatataaacgcttaaatcaaaaaaaaaaaaaaaaaaacaaacctcataaaactcatactcgtgagaattaatatgtctcctcttcaattcgggtactacaagtgcttaaagcaatgatcagtcgcattaagaaaaaaaacaaaaaacaattataaatttggagatactattactagctacccatgtcataattttgagcagtatttataaatacttggtactttataccatcatatatatatatataaaagctccttgtataaatttgatatagacatttgattatgtacctttgaccatttattattattttcaagtggaaaacgtcccatagtgtaattatattagagttgtaacatatatgcagatatattcagcacttacctaaaattggtacaaactatatgatctgtcaaaacaagcacaatcaaactctatatatatattgatcccaatccaaattcccatggaatcactgaaccgaagttagggacagtatttatatatattaatatataaaataaaataagttgttgacaattgatattcaggttttgatattaactaggatattgatataataatgatattgtatgtatgaggaatattgagcaaatccaaatgcaaaagtctcgatcgatggtgagcatgagtcactacttatctgttgtttgatatcgatttttcactttgtatatattgtcatctttataacaaattatcacagaacacaagaaaaaagaaaagaataataaaaagaaaaaaaagatttgttgtaatattgaatattatgttaggtatagtggtatatgaagagaacaaaatgtgaaacaaaatagattcacatgtaagcatatgtaaaaatgagaagcatcatcatctatcatcttctttaatatattcagcctttttggtcaaaatggttgagtatttcatgcacgtggtgtggtggcctattaattaatatattgtatttatttttgttttgcttacaaaaagctgttaagcttgcatggcatgatgactcaccttctcaataaatatgtaataaaaaaaaatgagttcacataaatatctcaaattttttattgaaggctaaagttggtaaatatttaatttaattttaagttaattatatggagaattttatttccatccacaacatgataagtatattctaatatttaaa

SEQ ID NO: 315001 - DNA, 762 bp, Cannabis indica
taattatacggatttatttagttggaacctttactaagatttctaaaatcatgaccaaaccaaagaatttaaaaggtccaaatcgaccaaatcattcacatcagattcatttggtttggtctcaaattgtttggtccgaatttgttaggatttaaaatcacaaattacagattatataaacactcctaataaaatatatagaaaaaataattaaatatacgtatctctaaatattatacctagtcatatatttgtattttttaaaattatgggttctattttaatatgttgtgattgaaaaacaatactacatcacttattctatagtacacatttggtatgtacatatatttgtaggaaaattataacaatgtattgaatcaaattaattaaaatttaatcaataaacaattagcaattgagaagattaacaattcacaaacagtaattagagataaaaaatagagattaacagagtattaaaaccaaaaataataaagcaataaaacattaaaatcaacaccaagatttatactggtttaagtcctctatagattcctatgatttatggctctattcccgttctggaacaccaccaaaatcttctttattgattgtgcaagaacagagtacaatatagtcaaggtcgattttatgttggattctcttaaagtttttatctctcacactcttttctaagaatcttcttcatctaccaaagattcttcatacaaatcccaaatccaatatctctctctctct

SEQ ID NO: 315002 - DNA, 625 bp, Cannabis indica
tgtgcatgaacttattagggatcgacactaaaggatgagaaggggcatattcaagttaagacccccagagaactaaagctatcaatactttttttttgttggggtaactgataaaggttaaaataacaagggtaacaaaagttacacaaaaggtggggaggtttctttcatccaagaaagttcattgtctatcctaaaggcatgcttagccaatgtatgagcctcaactataaagttgatgcacatgagagagagatgccccaaaaaaactagacaataaaactttaatatcaaaaaagaatccccagttcatatggaaatttaggttgacattattaagtaaatcccatgtaagctcagtttcaagaaaattaaaatctctaacccgaggggtttctcactattcgctaaagattacaaagaaggaaataaacagttacaactgatgccagctacgatcgagctaagactacaaaagactataaatccctaagatccaaaagcagttgataccttagacaaatttcttcagttggaaagagagagagagagagagagagagagagagagagagagagagagagagagagagataggagagagagaagagagagagaagagagag

SEQ ID NO: 315003 - DNA, 1181 bp, Cannabis indica
atgtaagcccaaataaaagtctaacatggtttagtacataaacaatcaatagttttggggaaatttttaacggcaaaaaaatttcagagaaaaaaactaattagcctaatttttttcgttcctattcaagcaaattagatacacaagtgctacaatggcaccagagtatacctccttggacatgctaagttttgacctctctatccacctgagaatgccttgtaaacaagaggttgcagctttccatctaagccaaaccttaacttgctgcaaacattgttgagcgaaggtgcattcaaaaaacaaatgaagagttgttttcgcaatagagccacacagaacacttcacctcatcattgatcctgaacttgtggagcctctctctagtttctcgcatgtttaatattgttatccaaaaaacaaaactatgtttaggaacattgagtcgacccgacacttctttactccaaaagcaagtcctttgaacttgaatattccacttattccttgctgtaaatttatatgatgccagtgaaaattttataagatctattaagaccttaacactctctttgatttctacaattttcttccaataccatcttccttgactaggggccatgtatccccatcaatcttcttgttttatatagacaatatgtctatttgacccatagattgtccttcttgtagctattgcacacacatgtttaataagtgttgctgtgttttaatccgaaacattcaaaaaaacccaatcctttagctttctttggtttacagagactttctcaagccacacatccagacccgttatgctactttgtcctttccaaaggaaacttcgacaaatattttttcttttagagacaatcctctttggtaatatcaatatctagctccaataagtatggaatgttaggaacattgaattgatcaacataattttaatatttggtatcaaaataatgttgggctttgtgcctaataaactctatttcaatgtaattttttattctattatcaataaagaaatagatttaatttcattacttgtttaatgtgttatttggtgcatgtaatcatttatttatttaaatgatttataaattcatccaaatccttatcacactgttatttggaagcgctaatcatacatgcagaatctatagcttctatct

SEQ ID NO: 315004 - DNA, 1676 bp, Cannabis indica
ttgttatctggtttatgatttctagtttcattttggttggtttatttgatcttgttaatatttgttatgttcttggatggtgttaattcaccacaatgtggttaatagaatgaattaattaccaagaatgtaagactcttattttcgttttattggcaaagattgtgtatattctctaaaattaactggaattaaagatattattattttataatctagatatatatcaatcattgtgagaaaaaaatcaatgtaatcttgataatttcattacaggtcagtggttgaaaggccaattatttccaccatattagttgaaaatgaccttcttggggattgtatgttgcatgtccagtgaaaatgaatcggatatctttttatgctaatctgaagcattagtgtcgccttgttgtcattgtttatattgtaatgatgttgaaggtaatcttcatttattttgagtatttttttcctgaaggtaaaccttttgctaggttgtatggtctgtatttatttatctattttcgttcctgatgttgttactgcttttgtatatatttaatttttttttaaaattttgtcttgtctcgttcgataatcaacctaataactttttttcttctgagatattccatgcagaaaactattggagacctaaacttaagaggcaacattataaaattatgtttgcaactgttcgatattcctttttgtttcaacaagtgttccactttttctttgaaaataaatattttataatgttggaagtcttttaacacgatatattttctttgtttgtttgtggttttaagatccaagtgaagattggatcttagagaacacattaaaatttcacaatgagatatttctttctttttagttacttgcacatttacttattcattatatttcactgttttttagatactaatgtgtctttccttagattggatttgtgattttacttctctagtcggccaatggaagaaagatgttagttcatactctactgtgttgtttattaagtatgttttaaaattatttttaatagtttgaagtacttaaatgttaatgctaatgaaattcaatcgttggaggttgttaagactaaggatgatgaatttaataacggaccactttctgttctgatgatgagtgtcaaaaacaacacccaagtaataatgctctcttatgattactataaaaattgcttaattttaatttgaaattagcagataatcaggattaaattatgaaactagattattaattaggatttatgattttatggaaatttatttgaattcagggtgtattatttatgccatatatgaaattttacgattttcatgttttgtgccttacaacatttgtacacagcgtttagccaataaaatcacattttaatatttttgtagtagcgggacaaattagatagacattaagaatgtcgggaatattcgaagttttagaaatgaccaaattacccctaagtagcaaatatgctttttggcttaggcaagagaaaaagggtcttttgccttttatctcttttgtcttttagtaagattaattgtgtgtgtgtgtgtgctgattatattaattagataaaacccaaaaataaatcattttattcaaaattagaaaaaaaaaaaacatcacacctctctctctct

SEQ ID NO: 315005 - DNA, 1814 bp, Cannabis indica
tttttttttcttttttatttaagggtggattttttttaaaaaaagaatattgtgtttttttttaaatactgtgtgtttaattatatctattgtattaagtttttgttttatggttattttataaaagataatatttttataaaaaattttgtgtagctgtcaaattataatcttttattcaaaatttaatatttttttgtaaagactctatttttttttttttttctaacaaatgatccaaatcagaaatcaccaattatacaaatttgaccggagatttttttttttgtcatggtcactgtaatgaccagaaaataaaaaaaataccataaaagatgaagggtctctcccattcaagaaaatacattatttattctaaaaatatgcttaatcaatttatgagtggcaatataaaattacactaacataaaagagataccttaataaaattaaataataaaattttaatatcttaaaataagatatcttgagctcattttaatcctaccaataaagagtttctataaaattactaaagatagataaaattagtaattttttaagaaaacgttaaaataagtaatttagaacttacgacatatataagttaatgagatagtaatttttagaaatggattgtaataaaaaaacttatttcattgaaactttttgaatctttgaataattaagttagtgaagtaaaaatcttactaataaaaaatatataaaattcagttacactttactaaatgataatattcactaaattatgaatttaatcaacaatattaaaaaaatattctaaatttcaattttagtaaataaaaatttcgcttagaaatctctcgaatggagagtgttagtgttgccatatactattcttataatgaacccaaaactaagaattttaaactttaaatcttcatatatggcaaaccacatatatggtatccaaacaattatgctggcacataaaaactaccacacattttacaaaacaatacacaacagctataaaataaatttaatataatattaaaaaataaaaatataaaatgtataagaccaaacaattatgtaattaacaatagaatcttataatcatatatattaaaccactttttaaagtgtctttactaatatttataataaaatagaaattataaaatttaataaaaaaatataagatataaatattaaataaaattaatacaaaaaattagcaaaataagttgttgtctcgaatttttctcaaaatatgtgaccacggttgcgtatgacacgtggatcaaaaggacaccttatccgagaactagccgagtcacatatagacggataagtgtacttcagggaatgagcctctaaggaagtatataaagcatgtcattcctctccgggagctagaaatataacaaagcatctccgggagaaggagaacctattcgaacagtcacttcacatttaatgcagcatggggaaaacgtcttagaacgcccgtaagagaacatgtcagacagtgtaagccttgtttacggcgattacacgacaatcaaaggggctagtgacgacttcattatgaagaatcacatcaatcaaggaaggataaagattaatctcatctaatcttatgatacctacggcataggtcatgcctgccctattttgtatctcttgggaacttgtgctcatacattactggcactcaaagacaagtgatcccttttatagctaccattacaaaactctataaatatcgctgaacaaaatgggaagggggatcgagcgaaaaaagaaaacaagagagagagagagag

SEQ ID NO: 315006 - DNA, 1186 bp, Cannabis indica
catatctctctaacaactagagataattttttttaatttataataataaataatcacaatttttctccctctcgattgggaaaaaccagcattgcaaaacagaaaacaatttggtagagagaaaagctaaaaccctcttcttcccaaaatataaaataattgaataaatgatagggtatagggaacatctaatccctcttcttgactgccaacgattggagatgactcctttcaggtaataaatgattggttgtttgttaatgattgtcaatattgattttttcccaggagttgagtggtgccgcatgaatgatgttgtcaatatatttgaagattattggagttaattcttaatttggttttattatcatttaatttgaaaacttgaatatttgatctattatttttgcatatgttaattttcctgtaatgggtctttggctcacttaggttgtagcaagaaaagttaaaaaccagtatacatggaaggattgctttgaagcagttgaaggtaaagtctagctttaatttgttactcttctgctaataaatatatatatataatcgatagtctcaacatatgtatgtgatttcattacattgcgttcaattagagaccaattttcctttttaattttttttttttttttgtatataattgcattcacaagatcttttttgtctaatttgttttctcaccacttatgacttattattgactaatgatttctcttatcacactcacttctaaaagtgaccaataaaatcaaattactctttagtgaagaaacaaattgtttatgtaattttttgtgtttgtgtttgtgttcattaagtatattgtatttattatgctttattctgtggggttctttacttgtaaaagtaaatctataacttaattaattttgagttgtaaatatatatattctgttgttgaaactttctccaatttgtattttcttacttctaatcaaatacatatattaaacacaatacttaaaagttcatatattcaaattttattttctgtttcactttaaatttaaaacagaaaaatattaaagttcatatattcataaatatatatatattatatgttgttgaaaaattcgatcaggttagcgctaagaaatttgaattttgtcatgaaaattctagaataatagctgggcattgcaaatca

SEQ ID NO: 315007 - DNA, 1240 bp, Cannabis indica
ttatgccactaaaaaaatcattgggttgatgtcgcttacaaactcaaaactttgggtacttatgccgctatttaccctaattatatgataaatatgtatagtgtataatatatatattcggttagttatcggtttaatatgtcggtttgccattgacactagaaccgattgtgttaagacaattttaatcgaaggtagattttttagttttcagttttttcggtattcaggcagtctcattttgtgtaattttacgcttttgtttgttaatatttttaggtttagtatagagaggaagtgaatgagttggaaagaaatgattacaaaaaagatgaattaagtgaagctttgtagctagtgcaccaaaagatcatggaaaaatccaaaagattaggtgtggtcggagctcttaaagttgaagaactgaagaaagtggagtagcgccatggcataaaaatttaatgtcagggtgctaaaatgccaaaaataggcagtaaggtcgagattcaaaggtgtcaaggtgggtgtcaacgttagaatcttatgttgaggcattagaacgattaaagctcactgtctaaaaataacctacacgggtcgcgacattggataggcatgccgcgacccgttctaccttttgttgaaggcttcgtgtggggttcaaggacatgggtcgtggcatgcatatgaccatgttgcggcccacttatggtttttggcaaggaattttgagagcaaaaactttgagagatgagaattagaggtaggaagtaactttggagactatcatcattaattttttgatgagttctttattcttcttgacttttcatgttcttaattagttattattatcaattgttcataatgaaaatgagtagttaaactttttgttaaggtgataatggatattgttgatttttctttatggcttaatgcaatttaattctttctcaatttcttatgtgcgtctattttatttgtgcttaattcttttaattgcatgatcactaattaattgtttatgtttttaattcaaaatataaaaaagtgaatgttgattactctatagtaaaataaacatagattttaatattggacgagagtacctgtatagtctatgtaacatttagaattttcatgtttaatgcaaattgtatgtttaattcaccacagaattataagactttaccatacactttagattctatatatcctaataataataataatataaatt

SEQ ID NO: 315008 - DNA, 662 bp, Cannabis indica
cgcattttcatatcattgtatatgctatattatatacactatatatatactctaacatcactaaccaactaacttggtttactaatcttgataatttatattcaatactaaaaagttgttacatatagtttttagcaaaaacttctatttttagtggtaaaattttttatgaacgatattatcatatgttttaaaaaaatttgatttttatgcatgactaatacttttagctacaagcttgagtaatgacataagtaatataatattttcagtcctaatgttcacaccaggtaaaattttttgtagtgttatattctcaaataattatgatatttgtatatatagtgttacacccttttttttgcatggtagtaattcccttgaattaaaacaattaaaaatatattttttaatttcttatatatataaattattctaaatttatcaaaaaaatttaaaatatcttaaataattataatgtacaagaatataaaaaaaaaaagttttagattaaaagattctttgaaatgacgaaataagtagagaatacatccgtgcattttctttaaaatgtgcatataaaagtacccaatctttttataccatcaatatgtatattataaagtaaaatattatagatgtttggaaaattgttgtgctct

SEQ ID NO: 315009 - DNA, 1293 bp, Cannabis indica
atatgatatttatttatttatttatttttgctgaaaaatatcacatttaattattgctttcaatttttcccaaaggccatgtagaagtcacacacaccaagcaaaagacaaaaagataaaatgggagattttaatatttttaggtcattgaaggaaaactgggaatttaaaatatcaattaagtagtaggcataattatatttacacctaaaaattgtttatttatgaatcaaaatattaaaaaaaaaacttatattaatttataactctttctattattttatgttaatttagtaacttttattttattttttcatatttttttaacaacgtatatttattttaataagagttcatatatttttttgtttttacttttttttttttgttgtctagagtatatattttaatttatatatgtatttcttttacaatgcgaaaaggaagacacaaaaatgtaagtatatattaaaaatatattatacaaaataaataataataataataatggtgatataataaaatgaggtgatttgataaattttgaagtgttaatatatatataaagcccctcagtcctcaaccaatattttgttaaataaaaaggactttattccttatcttttatatttatgatcatatatgtattgggaagaacaatttctattggttgttgggcacctttgtttcttaaacgaaaagttatacctattaataaattaataattaataagttatatatatatatatataagtctgtgttactattatttgaatctcctagctcaggaaaacaaaattttgagttacatctatagtcccattggccatactcaattgcttatactcattgtttttggagaacaataattattttctgaaaaatataatcatttcaattctgaattatttgtatgtattttccatgtctctatttaataataataatatatttttataaaataatgttaattgttgcctatttattagacgcaagctgtttggttggaaacattattaatgttggttatattcaatattttctcttaagtagcttctttgttatattatggttcatttcccgaaaggagaacaacatatatagtccacatatacagtagaacctatatttaagaatactttattcaagaataacctctaatttattataaaaaaatattaagtcccgatttgagcctattataaataagaataacttctaaattgtaattagttatacaatttctaaatctcatattaacaaagtatacctctatataagaataattacat

SEQ ID NO: 315010 - DNA, 1136 bp, Cannabis indica
taaaatttagactttatatgtggcctgtttaaaaaaataacagagtccgtagtgatgaaattagagaaaaattacagttttacaaacattgagtacttatgctgctaaaagtaaatattaggtttatgccacttacaaacttaaaactttggtacttatgccactatttacccatttataaatattaaacatccatataaaaaaaaagtttgattatatttcctctatatatttgccgattttttatgaaagtcttttctctctagagccttctattaggtatgcgatccctctactccttgtgtgagttcttggtcctgtctatggaggatctcgtccaccttgaattgttaagtggtggtttgtcattttcttcttcattcaactgtcaattactttcctctctcttccttaatgagagcatttattgctctgaggcttactattgccttctttaatctgcccttttccatttcctttgtttctcattttactccattaacccttttcgtcttcttgccgtttaattaagatttctcaaatcgctcctcatcattctaccccttggagattgtaaaatgggggcggacgtctaggttcccgaagccatacagaccttcttcatcattgtgctactatggtggaagctagggatgtgactagggagtactcgagaaggattctaagagtgttctgattctatctttatatagtaaggttcaagtatcttctccttcatctcactttttctcctcttattttctttattgttgtttatcgtacttccttctctctgaatagggatgattttcttaacactgaatctaatactttagtcttcccacccgatgaagtactatttttacctatgatgccagttcctctaactcttcccctaccactattagtcttcttcttaagctccataccatccgaccctataatcgcccttctctcatgaaaatcctatctggtatctggttatcacagtgtaggttccctgtttctgttactgagcatgtagatggtctgtttttggtcacctttggttgcgagggtgataagggtgatgtgtatatgtaagaaactatttgtcagttatttttttgtcattgatcgataattacttgtacctt

SEQ ID NO: 315011 - DNA, 2279 bp, Cannabis indica
gctcttaaacttgatatgagcaaagcattcgatcgggttgaatggtctttcatagcaacagttataggaaagatgggatttaatattcgattgatatctctcattatgacatgtctacacactatttctttctcattcctcattaatggtgcaatttcaggatcaaccattcctcagagaggcttacgccaaggtgatccactctctccatatctatttctaaattttttagggtctttcacgtttactccagtacgaggaacaaactggtcgactcaaggggacagttgtgtctcgtcgttctccgactatttctcaccttctaattgcatatgatagtctccttttctgttaggcaaatgatcgatcttgtggatcgattaagagagtgcttgatatcaatcatcgcggctgttaagaattcatttaaacaaattttaggtatgccaatatgtacgaatgtcatgaatcatacctcggtcatcctacttatagtgatcgagacaaaaatcagttgctcagtaacatcaaagagaggatttggaaactaatgcatgcttggatttaaacaaaaaatcaatagggggaaaagaggttttcttgaaagttgttgtgcaatcaacacccacatatgcaatgagctgattccaattgtcttctaagttttgtaagcatattgagactatgatggccaaattctggagaggatcgactgcagacaataagaagattcattggaaaaaatgaaaatttctctactcatctaagatggaagatggcatgggtttcggatcttttgttcattttaaccaagctttattggcaaagcaagcctagcgtattttcccaaacctgaataatttgttaagccgtgttttgaagggtcgatactatcctaacaatgattttttgacatccactggtggtaatcggtctttattaacatgacagggaatcatttagggtaaggaattattagctacaggtttgagactaaagtgggtaatggtacaagtataagatgtggtttagatgcttggattcctaggcattctatcttcacgccactatgttagcccaagatatgtttccactaagggtaattagaaatttaaacaaattttagaaatttaaacacccaaatttttacaaatattcaaatttaatacaataatatggataaacacaagtataaacaaatggcaaacttgaaatgtaaatagtttagggaaagaaattctaaactcttgatttttacaaggttcggtataactaagccacctacgcccttagttttcaaagccatggacctagctttgagttcaactattgagccaaattaataggcttgaccaacccttacaatcaggaaatttttcaccaatatttttcccaaacctctcacaatagctttcttccaaggcctattagcctcatcggaatgttgaagtgccaatctcactaaacgggtaatttttccactggtgccaacttaacctccaccgatagttttctaaacgactataaatgtcttcatatttttgaagtgccaatgtcactctaagtttttttgtagtgccaacctcactcttctcggatttcttacaaaactggtgatagcctcacctacaatcacgttattttttaccagtgccaacctcatctctcaacataatggatatgtaattttgaaatacaaagcatgttaagctttgtgccttaaataaaactccatttcaatgtaatcttttatattcatttatcaataaagaaacagatttattttcattacttatttaatgtgttatttggttcatgttattatttagttattaatttgatttataaattcatccaaatccttatcagattaatattcttatttattgtgttatcaaaacagtaaaaagtaatcaagattatgtgattaaatgtattcctttctggggcatttgttaaagtaagcttgggttggatgtatgaagtgtgcatcaaaagggactgatattgaatttggataagataaaataaacttaccgtaatatctattcaattcaatatcaccaagttgatcttagatcaaatgatctcaatcttgagatggttaggttctagtttagttgtattatttgtgttcttcaatctgttcgttaaagttgaccaatggatcttcccgtgacatatagactaaggacatggtagttcaattgagtgggagcgctaatcataaatacggaatctatagcttctatctgaacatagagagtcaaacgatgttt

SEQ ID NO: 315012 - DNA, 1088 bp, Cannabis indica
ataaatcaagtactagtatacccaacaactctaacatgtccaggatgctctaatggctttaatgcctatgttagtatattattttgggcatggaccttaacctgtccttggttaactttctcctccaattcgacctagtgcacatatcaatgatcaattaatatttcatttatatatattctcattattacgttatcaacgattaatacttactatcttagaggcaatttccttatccaaatcagtgacaagttttgatttcttttattgtgatttgatccaaacttgatggcgtgggagatctcgaatctgaagttctttttttctttacattgttttataaaatttaaatgagtacctttacattttgatgtacatttctaagtttattttattagctgtcaattacttactataacttctctgcttcgaccactacggtgttttgactagtttttttaagtgatcggtccctctgtactttactattttcctacaatgcaaatgtaataagttagctactagtgcttgtatttaaaagtttaacttaacataaaaattagtacctgaaatttcaaagttaggcaacttgcaataaatttaagccaaccatcttgatcaatttcaggatagttttcaaggacgaatgctagctgttgtaactcgttttctttttttaacaaaggtgttacatccatattctgagcattaaatatggacatgacacgtgaatataagccacgaagattggaaaatactataaacgtaaggaataaaagtaagtgtctcacctctcgggatgtgctatagtttatgaggcgttgtctcgcattgtattatattatggctatcaaataaaatcaataaaataaatacattgattagcgagaataacaacatcataagctaatcttagaacctaaccgaggtaaacaagacattcataaaacatgaggggatgagctgagtggaaagggtagtgttatctcaatttttgcccacttaacatggcatgtccacataagtaaaactaaggccacgtggagtacaccatgttaatggttcaacaaagtcaccttgcacgacat

SEQ ID NO: 315013 - DNA, 2255 bp, Cannabis indica
tttattgagattatttagtaggtatttaaattttttagtttttttagttttatttttatacgtggagcggaaattttttttttaaattattttgttttttttttaaaaaaatactgtgtatagtgttaagtttttactgttattttttagttatttcactgttgtttttagaagttctgttttgtgttcaactattgttttataaaaatatagtaattttgaaaaaatttctgtatgattgtatttttgtgaaaattaaccaaaatttcagtatttttgtaaatttatctatttatatagttttgaataaaaaaaaaaaggggatcttacaaaagtgcctaattttttgttatttttatatttttactatcacactcttttttttatatttttattgtactaagtttttaaaaataccgtgttgaagttttaaattacaaaaatattaatttttagtaaaataaaaaaataacttaaaaactactaaaaaatgactctaaaataacttaacaaacaactataaaataacaaacagataactactaagtgacggaaaataacaaaaaataatctaactgtaatatgcaaaacaatatcaactcctcaatatgtttttgtattatgatttttttacttagttttgacaactttatttatctttttatactactacattactgaatttttatacacttaatcccctctttttttttggcaaaattcccttatgttttaatttttatacacttaaactccttatcattttttttgtggcaaaactctcttatgttttaatttttatacatttaacctccttatattttttttgttggcaaaatttccttatatttatttttctttgtaaatttgacacgccagctaaatattatcgttaaatatcaactagaagaccagtgtatacaccaatgtatatgtaacagtaaaatcttgagttagtgatagaagaccagtgtatacaccaatgtatatgtaacagtaaaatcttgagttagtgatagttaaaatgataatttattttttaaaagttaaataaataattacattaataatagaaataataaaatcttataatttcaaaatgaagtatataatataatgagtaatatataattaatatgtcaatatctactactgcacattgtgtcagttagaaaaaacaaaaaacattatctttgtattttaataaaatgtgtccaaaaatgaactaaatatatgtatttaaactacaaagcaacacacatacaaccaaaaaagttatcatgaagaaactaaaaatatatactataaaaaatacatgtgaataaaaaaataactgttgaacaaaaaaaattgtgaaaaccatttaaaataactaaaaaataacaaaacaaatgataatatatatacaacaacaaaaaattgtgtggaataaactaaaaaaatacaccattaaaaattcacataaactaaacaacaactgtacaaaaaataataaaaacaacagaaaaataactataaaacacctaaacaacaatgttatccgtgttttcgacaacagacacgtggaatcctagtcagcatcaaaggtccaccaataggcccccaaggaagacaatttgggccaagcccaaattacataggaccttccaagaacacaccttagctctgtgatcagatggtcttccaccaataatagtccatattcagaagcaattccagtaccgtgatgccaaaaggtcaggcagcgtgttcctggacgaccagtccagtttcctcttatatttgagcacaccaaatgaggaaataaatgctcctcagaactcgacagaagatcatatcaagctaaaatgggaaactacctgaatgaagatcaagcaattaattcacgattaattgcccatgatcataggatgcaattttaactaattcaaccacatctaataagcctagtcagcagatcatctccttcctgggctgaacttcacaagacaatccaaattatgtaattcaatataatctccccattagaggggaaaaaggaaactaaggctatgtttgttaggaaggatggagaataggaaggatggagagttggttgaggatgtagaataagagggagggagaggagagtagcaatccttttaagttgtttggtagaagggatgaagtgatggaaggatggagagtatttatttatgaaattattatattgtccttagatgtaatttttttataatatattatgagggtatatt

SEQ ID NO: 315014 - DNA, 1401 bp, Cannabis indica
ggttgcagattctaaatggaagcttgctaatggggtttttagtgtggactctaatgttgatagagtatggttttgagtgagaccgttgatgtggatatggaaggaagcagtacggatttgatagttcaaaaaacaagttattggcaagttttgctagtcggaccttccatgtctcatgactattctcagttggaactatcgtgggcttggcaaccaacaaaatgttcagttccttaaacacattgttcatcacaagaggcatgtgtttatttttctttgtgaaactttatgcaagaaagataaagtggaatggattcgtagatagctggagtttgaagaaatgcttgtggtggagataagaggtaggagtgaagtgtatcaatgttgtggcatgaggaagatcaggcaaacttaattagtttttctcaaaactatgttgatgttattacaaaggttgatgtatggaggcttggacattaattggactttatggtgagcttgatagagcacaatgtgggaagacttcggatttgcttcagacttttgtgcataattctcttttcttggtgtgtgattagtgacttgaataatgtggtcgatcaggtagataagtggaaaagggcaccgtatcatgggtggctagtggacaggtttaataaagctcttgaagatgtggggttgagagatatggaactagttggtcatctgtttacttgggagcatggcaggggtacttttgagtttatggaaatctttattgatcaggctttagctacatcaacttggctttctttttttgatatggcaagaatttataatttgaaagactcatcttcagatatctgcattggcaaaaaataagaagcggtttaaatttgagaacgcttggttggtcgacccaatgtattttcagctagtcaaggagagttggaaagaagattatttaatgaatatttagcagaaggtgcgggtgtgtagtgataagctacaagtttgggggagggatattacaataaaatttgggaaaaggataatagcgtgtaaagttgaacttaaaaagctttgctgtaatattccgataagcttaatggtaaataattaaggtttataattaaattatgggtttattagataataagtgggattatgatcctactcatctagttcagcataaatttaaaatttcctatacgtggataaataagcgtaatttataaattacagagatttatatggtatatgtgaatgtaatatgggttacctgtgtaataaaaatattttcaggttttgcgaccttggagactcgatcgaaggccagaaatatcataacgagtttaattgataaaattggtgagaatattgtgataagttgataatctaggtattggagtaattaggagt

SEQ ID NO: 315015 - DNA, 2098 bp, Cannabis indica
ccataatgactcaatttgagttttttgagcgtgtttccattgatcaagatagccttttgcagaggcgattatagttgaaataataaacggttttccttgccaaacaacatcatttcttgctccccaaattgcccaacaaagggcagcagccaactctttttttgctgctgtcagtggcgtgaaaatgtgcatacaccagtccataaaaccgcttcctgctgcagcaacagtggtaccaataccaactctttcccacaccaatttgaccactctgcaggtaagtagaatgtgcgagattgtttcgtccatctcctcgcacaaagggcagcgagtattaactggaacacgcttggaagctaactgagcaagggtcgggaggcagctagaaccagccctccacaccagatttttaatttttggaggcaatttcaaggaccaaagagccttccaaaagtcggaggcttcactctcggtagcagtacccttcatttgttgttgtagagcatatgcactcttgacagagtacacaccgtttgcttcattagaccagcagagcacatccgattgctggtgtacacttaaaggaacttgcaaaatcaatcttatatccctctcctcaaaaagatcttcaaggatatccacatcccaagatgtcatgtccatggacattaagttactcaccttagcaaggtaaagggctggatgggaggaagtcacacacggttgtcgttgatcgggcagccaaggttcgttcaacacgtcaatagaagaaccatttcccacactccaacgaactcccgcacggacaagagattgagcttcccaaatactacgccaaacaaaacttgggttgttccctaaagaggccgagaggtatgatccattgggaaagtatctagccttgaaaatccgagacactaaagactcggctcttgttaaaaaacgccaaccttgttttcccaagagagccaaattaaaatcatgtaaattccgaaaaccaagacccccattactcttgctattgcacatacgatcccaagacatccaagggatgcccttgttctcttttgatgaactcttccaccaaaacctcgccctcaatatctctactaatttccaacggaagtaagaatacattcatagcataactaggaagggcttgcgctaccgatttgattaacacttctttaccagcacgagaaaggacttttgaatcccagccttgaagctttttcctcaccctatccttcagaaaccccaacacagctgacttatttcttcccatagtgctggggagacccagatacgtactcctttcatccgcttgtggcatttgtaacagagtattgatatcatctctaacatgagttgctgtatttgtactataaaagattgatgattttcccaggttgactttctgtcctgaagcgcattcaaattggtgaaggaggtccctaattcgattagcttcttgaagagtggctttgcaatacagataactatcgtcagcaaaaagcatgtgagttaccttcggagccccattcgccactttacacccatgaataaagcccattgcctcatatcttctaatcaaagctgataaaccttccgcacacaggataaagatataaggtgacaaaggatcaccttgacgtatgcctcgagacggagtaatcggccccatagttctccccccatgaatcactttgtacttagccgaactaacacacttcatcaccaaagaactccaatggtccgagaagccaatcttcctaagaactgaatccaagaaactccactcaatgcggtcataggctttgctgaggtccagttttaaagccatatacccatccttaccctttcttttccttttcaagtaatgcagcacttcaaaggaaaccatgatgttatccgttatgagccttcccggtataaacgcactttgggcttccgagacaatttgatccatatacggcttcatcctattagccattactttagtaatgatcttgtaaagaacattacataaagcaataggtctcagatccaccatactttcaggaagtttctttttcggaatcaacacaacatttgcctc

SEQ ID NO: 315016 - DNA, 744 bp, Cannabis indica
ctgcttgaagtctgtcttacccccgtgatgctttcttcctttgatcttttcaagcaaattctaagcttgaatttttatgcaacttcagcatttcttcgtggaagtcgatgcttgcttcttaaaaagtcatcatagctctcgctcaccgtgagatatttttccttcgactcttgcaagcaaagtcaaagtccaaatttctcgtgcacttttagcctttcctaagcgaaagatgaaagtttgccaatacaaattgtagcatgactctcgaagcggatctcagcatgaagaaaattgtcagcgcaaggacataagctcgaatttccctttgggaaaccaaaagcctcttgtgtcgcaagaagcctatgatttcctctacgagattcgcgtcgcaaagggatcatttggggacaacaatacaactgagtttccacttactaaccccacgactctttttttgtgaaagctgggagataactgctacacactttcaagaatttccctccaagtggtcacaaagaagaaagacgtggcccaaaaaaatagtacatttcctggaataaagcagaactacgctcaaacctcttccacaaggactggaaaaggacacaagttagactctaagaaaataaccgagaatttgagaccaaaattcccagctcatttggggggtacggtctacccgattgttgacaactctaacagtgtcttacgtccattttgttgtcctcaaaagtgagtgtttta

SEQ ID NO: 315017 - DNA, 1496 bp, Cannabis indica
attaaatcccataaattaatgtagggatttaaccaagataaaaataaggagatatttatgaaaaatattttccaaattctaaattaccacatctttctgggcgaaggatcctgcttagctggcaagagatatcaagcttggaacatcatctgcatctctactatagagacacgaacataattagttttgtgtagactcttatcgatgaagcatttaaaggtgaatagactgtccatgtcttcgaatgatctccatgtgtcacgtttttttgatgccacatcaccctatatagaaattgacataacacttgccctccaagtccatgttggagcagctgcttatatgcgaacttatttggcttgaaagttgtttgaatggttgacacatggctaaccccatgtgtcgtcctttatttgaggtgactttctcggatgatgcaaattcttagttgtcacttcaacatcctaggaatttaatgattgtttaggaaagaggatcttggacattgtgaggacggttacagggaaacatgcttatcatagttatacactttaatgggtccttatgttggtttttatagttgaaagtaaaatttgttgttatacccaaaattcggctggaggacacgtgtcaagataaaggaaatgtgaatcggtgccatatctttttatagaataactcattaattgcgtaagtactagagtatatctgcaactcgttgactgtaaagtcttaggcaatgaatcaatatacgaactagtacatatagtattaacgagaaactatatgtcgctaagggataaaatagctgatagcataatgtatcatgataatgcagcttagatccaggaagaactgcatgaaaagttcaatgaaaagaatgctccaatgatcttcaaggcaaagaaaaccatgcagagtcttagaaaggggtcaaatactgttactacatacttcactcacctcaaatctctatgggatcagatcagggagtatagacccaacctatttatagtcgtggttctatgaagactattcaggaatatcaagatgaagattgattacctgaattccttgttagattgaatgattcttatagcatggtcagatctcaaagtctcttgcgtgatcctctacctagtgttaataagccttatgttgctgtgttcaagaagaaagatagagaggtttaactaaaggtaataatggatgcacagaaggagataaatgttcttcaaataatgttgacaatttgttggaaatgttcagcctttttccctaaatacacttgcaccaactatggaatttctggtcatactgtcgatagaagctttagaatcattggttatcctcttggtcataaacttcatgggaagtttcccaacagaaatgccaagggacctccaatgaagtctgagttgggtttcatgccctaaataaaactctttacaatctgattagtaatcaatataagaaatttgaagtgattaatgttt

SEQ ID NO: 315018 - DNA, 487 bp, Cannabis indica
tggggagaatatatcattgtaattaatgccttcttgttaagtgaatcccttggcaacaagtcttgctttaaacttttgactctcactccctggtaaaccttctttttatttgaatagtcatttgcacttaataactctctggtttttcggtttgttaaccactgtccaggttttgttctttttcagtgatagtttctcttcctcaatatcctacagccatgctgcactgttcttcccagtaatagtatctgtgtaactagatggtttaactacttatgtcttcagcaacactaagagcataggtagtgaattcagcatagtcatacttatcaggaactttttgttagaattattttactaggatcttagatctactcacaagtatgttgattaacaccctaaatatgaacttctaaaacgattctatgtaaacacaaataaagtatcggaaaccttacattgggtgcagcagaataatatgtctcct

SEQ ID NO: 315019 - DNA, 915 bp, Cannabis indica
ctctctctctctctgtttgtgtgagtgtggtggacaaccggaccacactctaatctcgataattattcactccaataatgggtaagtttttttctaacaatttcttaaacattgggaattgtatgtagtttgttttcgttatatgtgtggtgcttatttgcactggtgttattttgctatttttttgtctgaaataccgagatttgattttctcgcagttgctggcttttttatggtttatcgatagtatatcgatatattttgactgataatcaagacaaggtcaggaagaccattatcaatagtatgttgatagtttctagatagtttatcgataatttgccaaaatcaagttttagcatgaattaccgattgtatatcgatagtatgtcgataattttttaaaactagtttttcacattaattgtcgatggtatattgatggtttgtcgattgaataccgataattttgtctaattttcaatttctcagcttcacgcttgtgtatcgacatgtttatcgattggatatcaaagggatgtcgattgtttatcgacatgtctttcccttaaatattgaaaaaaatgactgacacaagtaaaactttaaaatataatctttattcagcctaatttaatcataattgtattaatttcctttaaaacttaagatttcactgttcacattcaaaaatacattttttctaataccacttaatcatacatttaattaatattaattaattcaattaagtattataacataatacttccctatttattatttaaatagataatcttctaattattataccattcaatttattataaaaaccattcatattaatatcttcctatacaactaataaggcaataacctcaatacttaattaacatttacttcccatttatttca

SEQ ID NO: 315020 - DNA, 668 bp, Cannabis indica
attggttcaatgatctataatgtacaattgtatagaaggatttgttgatgtatagattgtttaggccccgaatggggtgctaataggttgtaaataccgttttgtgcaatatattgtcatgatttataaaaaaaaaaaatggatgaaaaattactaacatgaagggccaaattattccagaacacatttggatcacctgggactggcggagcatacacaaacacctcaacccccgtggagcatacaacagtttgtgctcgagcaatgtggttgtgtacttgaactaatccaatacatataagcctatattgtatttagtgtggaaatgatggtgtaacattgatttaattttaaacttgccttctaaatttggaattattcctttattcttttactattttcttgacagctgtttagttttaatgcaagtgtttatttggcaaagaaaataaaaaagaaagaatgctaaataggataggacaacatagttgttgaagatatcacatgatgtgatatttaattatgatcatttgttgataaacataaagaagccgtttcgggttaattcagtgactggtacgtttttccgcgtaataagatattattatatatttttctctctccatatatacaacacacaaaggcagcaagtaaataattggaagaag

SEQ ID NO: 315021 - DNA, 2570 bp, Cannabis indica
cacatgatcaattccttccacctcatcttcctccattaattctttgccattctgtcccaatctcctttttttagaatcaacgataatcatggcctcagtaaggaagttttcagctagtgtttccttattggcattgactaacgcaatcctttgttccttggcaattcctttgtgaacccccatcccctgattgatgctatttattgcaaaatctccttcaacagtagtgtttttatcttgcaatccctgattgctcgttggagtaattgtaggcgcattaactgcagtaacatcatcagcaaattgaacatccgtcgtcgtgcctgttcggagccatctagctccgatcaacttattcttccgtttaggctcagctttcatccacaagccatatggtttttgaattagttccaaaggagtatcgtagagacgcgagcaaaatctctcggaatggcctataatgccacagataaagcaaaatgtggggatgaactcgtatttgaaatcagtccataaccagtcaccatctggtttcttcaacttcattctcctcttcaacggtttttcaacattaatactaactcttacacgcagataagttctccaaattccattaaagttcttaggatccgacttaacatacgacccaatataattagcaactctctggactatagagtcagacataaaaccaggtctaagattatgcaactgcacccatatatctagacgacaaagcttcactaacataggttcctctcccttcttgagtcgttcaaaaactagttgaaacttattaaaagtccagggactcccctctatgactctttcaatatcagcttcatgatagaattgaaagaggtacagattagtttggagttccttcacgaacatacctttcccaggttgccataacgatgccatcgtgtgttgcatggacagaaaatcaataactctgcttgttaagaatttacccacgagacaccatctatcatcaattggttgacccacatcatctgctaattcacataacagggcttcttcctcttcttcttccagttgtatcttcgaacagctatcctcaaaatctggtggcaaagtactactagaagccataacaaaacaaagtttctgtctgtatcacccaaggattgaaataacgtcagaaaatcacttacactcacgctcacattccactcatgtcataagacaagattttttttataattcaatccaattataattgatcgatctaaacataattgattaaataaaattgaatcgaattgaatgtaaattttaaaaatctaattgaatcatatcagtttcaaataagacgtccaatctaatgaaaaaccgatcaaaccgatttaattataattatatttttaaaaaataattattaattttattctaaattacagatgtgtttataagtaaacatatattttcaagtatatatgtgtagatgttaagacgtataaagagtatgatagcattattatatagattgaattagatttgtgttgtattatcatattttaattatgtgatcataaaaattaaattagactaataattattatctattttagatttgtgtgtttatcagaaacatgtttaaatttttcttattttatctttttatttttaatgaaatttaccctaaataatgattaaaaatgattagatagatttgatctaatccaataaataactagttaatgcatttaatagttaaaatcgatccaatccaatatatctattggtttagatcaattgagtcaattcgattggattggatcgattgataaaattcaacactcaataaataggagtttttacaaaaatactgaattttgagcaaactttacaattttactatcacatgaattttttttacaaaaataatgttcatttataaattaaccgtaaaacaacaaaacagaacaattaaaacaacagtagaacaactaaaaaataatcatagaacaatagtaaaaacttaaaacagtatacagtataaaaatacacaatatttttgaaaaaaaacacagtatttataaatccattggatgtgaactccgatgaacaatcctagtttggctttggcgtgtttgtttcaactgcactctctaattctcattcttatgtcgcctctaagaattaggtagaattacattagacaattacaaaacatcaccattttaagctaattaatgtgattaaactatgtaattattaggggtattcataaaatagtcgatccaattcaatccgcaaagtgcagatatctacacttgtgtagattggattggattagaaaattcaaaatctgcacttgtgcagattggatgttgattgacatgtaaaagtaaccgatccgatctaatccacacatatttaaaaaaattaaaaattatatatacaaataacattttaatgtaaagaaaatagtaatttaaaagtctaatatatatataatacaattatatttcaaaacttaataaatcaaatgtatatttcatttttatatattatttttttcttacatacaatttaaaacaaaa

SEQ ID NO: 315022 - DNA, 576 bp, Cannabis indica
ctaaaagtgggataaaaagttgtacatacttttatcccactttttatttttgttaaggataaaagtgggataaaaggtctcctttcttgtagtgataccccttccttagatgcgatgggggtttggaaaattattcttgtaatcaccgtatttagagtaatagaaattttttattttctctctaggttgagatagacacttgaatttatattcaatctttttcttcatcctagttctgcgtttgaagtagagtttgatattacggccaaaaagttagttgataaattctcactgttaatagttttgagccgtctatgagaacgaaaagcttaggccaagtcatttctttaaacataatcaatacaaaatgcctagatactctcgtcgtcttcaggatgtggagattcaccttgatagtaactagttaatcgctttggggcgagacccaccaccacctatcgtcggagaagaaggtactaatggtcacataactcaagtaagacaagagaatgtgatcgttggtaggccttaagtaggaggagagggcacgagcgggctgttagaaattattttacc

SEQ ID NO: 315023 - DNA, 916 bp, Cannabis indica
atagaggttctactgtatattagccttcatggaagtattgaagctaagtgtcaaattttaacatccatctaaaattaatacatctatatcttccaatcataaatctttttagattaggaagtgttgaacttgaaagttccaaatctttcgatatgcaattcaaaaataaatctaagtacataggaaatggctccaactaagaacattctctgaatactaaatgttgtaaaggagtgaatgcaatttacaatatgtgagttcaagtcaagtcaaaaccggagagtgaagatagaagtttaggaaatctagaataatttaataacttggaatccaacaagcttagtgctgtagttaagtgtaattggcaatggcatcattatgactgaagaagcaagctctcaacatagagacagagaaagctcttttatctcaagtttccttagctacaacattcagattataaatagaaagtaaacactcatttgtggtgtagaatgagaaaaagagaaaaagaaaaaaaaacccaccttggcaatggcaccttctctattccatcaaagcttacaatcaaaagagtttgaatggagggtaattccccaaatggtataaatggaataggtataataaagcctttgcatttcttaacaatttctctgcctattttttccaagctccattaataacaaatggatatcaattaagattaatctttcaacaaatgagatttcaaatcaaaaacaacaactcaaaattggtatttgaatacttggaaaatacctcattcatattgaaattagaataattacagtcacaagacaatccaaacattgtcacattcgaatattcaaaacctaacactaaaaagatttattcatcagcctccaaaaccgtatagagtacggccttgtctcttcaa

SEQ ID NO: 315024 - DNA, 542 bp, Cannabis indica
ctgaacaagtactacccaccagatttcgatccatcaaagctccctcggattcggaggcctaagaaccagcaaattaaggttcggatgatgcttccgatgagtatccgctgcaacacgtgtggtaattacatctacaagggtacgaagttcaattcccgcaaggaagacgttgttggcgaggttttccttttctccataaatatccttatgaacatttttagtacatttttagggtttaagttgatttttgcatgtgtttgagcctcaaagagtgaacacttactatattgttatgtcttatttttgcagacttatttgggtatccaaatatttagattttatttcaagtgcactcggtgctcggctgagcttgcaatgaaaacagacccacaaaattcagattatgttgtggagtctggtgccatgagaaattttgaaccttggcgtgatgaggacgaggttaatttcttggaattttgtagaactgattatatcaatgataaattttgattttcttttagtttttctctttcattttctaa

SEQ ID NO: 315025 - DNA, 1067 bp, Cannabis indica
agtgatggctcacactaaaagatgatgcaatttcttgccttcacgaaaaattgagccatctattcttccttctatttatgaaccagccaccttcttcttctcttcatattttcataccttgagtgatagagtgagttcccacacacatcaagtggtatctcaatcatagtgtttaaggctgtgaagagtccagaattaagagaaggacattcaacctcagatcttggtgatactctgctacagacaggatacaagtgttagagatctgagcggacggagccattaatattctgctgcacccaatgtaaggtttccttaaatttatttgtgtttatttacattgttttagatattcatatttaggatgttaaataacatacatggtagtaaatatagatcctggtaaaatatattccaacatagtgttcatacaagcttgtcactggtagttctgtcaaaggtgctctccattccaaatatctttataggagaactaactctatgttctcattgtacctgccaagcttgtaggtgcctatacttattatatttgtaacttggtaagggccttccaagctaggtgtgaacactcctgctgcgcgatctttggtgttcaacagagctctttagagcactaagtctcctaggaagaatctccttttcttaacatgtttgttgaagtatcttgcaaccttttgttggtaggcctatagctttaggttggcttagtctctcatttcttctattttgtcaagggattttgccaataaggtgttgcttactttttggtaataggtcatcctcctatgatatggtggcaccaggtctacgggctgttgggttttatgccataaataaaactcatttcaatataatcagatttactaattaataaagatcagaaatcattttatgttgaatggttcacatgatttatttcatgattatatttaatgtataaattctattaagtgtaaaatatatgtattttttcatgattatagtgttgtcaccacagtggaatataatcatgattatatgttcaaaagtttaatttcgtgatttgt

SEQ ID NO: 315026 - DNA, 834 bp, Cannabis indica
aaaaaaaaaaaaaatactacatagagagtactaatatatgataaaatccatatatatattaactacctttgtatctttagtattagtatttttcattagtttctttactacttctgttgttttgccttgtaaactctgtatataaataaagtgatttgtgctctttttttgagctaaggctttcagctaaatctctttctctgtttctctttctctctgattttttctctctggtttttaccactctagtttagcttgataagcttctacatggtatcagtcgccttcaatggagtcttcgattccaccttccgatcctgctcgtcagacagtcacaacccctgcaccagatctgtctgctcaaacatctgattctgcctcttcttctacgtggaacccgttttccagttctctctcaacctctctcacgatcaaacttgatcgtactaacttcctttcttggaagtctcaagtggtgtcgactgttattagccatgatttggatgatattcgcttcagtggcatttcacctcctcaattcttggtttctggccaaaccaattctgcttatcagcaatggaagaaacgtgatcaattgctgctatcatggcttcgttcatccatgactgaaggggttcttgcctcagttgccaatcatcacacatcttctgctatatggcgtgcgttagaacatcgatttgccagtcaatctcgtgcaagattgcttcaattaaaaggtcagttttccagtattcacaaaggaaatctgtctatttctgattttgttgataaagttcaatctcttactgattctttgatcatcgctggtctaac

SEQ ID NO: 315027 - DNA, 511 bp, Cannabis indica
attaaaaataatattataaaataacaaaggaaattagttaacgatcatctataatttttattaaaataaaataagtattacttataatattaaattgcacaaagtcatattacaaatttacaatgtcaacttggcatttctcattaatgagaaacaattaccattgcggcttttaatggagtgaaataaagacactttgaaggtcatatgtactgtgtagctaacaccattaaatttgagtttgacatcaaaattacataaataatacacattgaaaaagcattgctattgcggactatccaacactttttataagtatcacccttgttattaactaaaataattttttttaagttatatgaaactcgcttattaattacaccaataagagtttaactgccacgaaagaaggtacttcattaatgcattttaacaattaaaccatatctcgatcgatctatttctctctctatatatatttatatttatgtaaacaccaccaaattaaatt

SEQ ID NO: 315028 - DNA, 1413 bp, Cannabis indica
gcagtcttgacgtccattgtcatatcttatattcattagttgtagttatagaaagaagaatgcgagtgaatttaagcattgtcacaagagagaaggttatgtcatagttgatcccttctcgctgtgtgtagcctttggccccaagcttatctttaaaggtctttacatttcctttcagcatttctcttctcttgaaaatctacttacacccaatgggtataaaatcttcaggtggagtttcatatacccagactttgttggtgtgcatggagtccatctctgaatacatggcatggcatattccacttgtttgagtcaggtcattcattggttctttgtaagttaatagatcgtctttgtctatgttagagacaaaaaaatgtgtttcatgttcatagcggacatgttgtctcataatcctctcactacgacaatgtatcagggttttctttttaggaaccgtggtaaccgctattggtcattcaactaatagtgcttaaattattggttcaaaaatcttattattgatttcctcaaattttctctgaatatcttaccatcatacacttcaactctaggaacaagtttcatgacaaaaaaaaaaacttaatagtaaaaaagagtaaagtcctcgaaacttaataaaaataaaacttgagttgatattatttgaatatgacaatgggttcacttttttgttgttttgtagctatagttttattgttttttaattatttttttgttattgttaagatgttttatgttgttttctagtttttttttttattaaaacaaataattttataatttgaaacttcaaaactatttttaaaattttgattttgtagaatataaataaaatataaaaatagggagagtaaaaatataaaagtaacaaaaaaaaagtaattttgtaaaaattctaaatttaaacaaataaaataaggtcttagaacgtagtttgggccgaatcagttaagggcctataaagtggctttcggacaccaatcagtaagtacagattttctgatcaacatgttgtaactagtaatgtcatttctcacagaaatgatcaaaaccagttgggcccagttaaatcaacttcacatcccaactttaatgtttgcatatgctctagagcttaagactaaagaggctaagaggcccaagtttcatacacaccttttaagaaattacacatttttatgagtttctatacaatgtttgcaaaaatataaattattttaaaaaaagttattttataagaaaatttcaaaaaagaaaaagaaaagaaaaggttaattagcattttttcctcccgaactttgacatgtaccaaataatgccccccgaactttttgggccgttaaaaattacccctgacctatcgagattgttagatttaatgacttt

SEQ ID NO: 315029 - DNA, 958 bp, Cannabis indica
aaattattaaaaattaagctcataatcctatttttaccattttagaaaatataaggtccattttgtcatttaacaacagatggtccaattaataacttttgcaaaatacaaagtccaaaataatatttattctggaataaatcatcctgtcttagaaaaaacaaattgaggtaagttttggtactatcttggcatatatatatagaacacttctcaatgggtattacccatgaatggttactaaacaaatttaactataaatattagttttaagagagtattttagtgaattaagactacatgtaaaatttggcaaattaagactataagagagtattttagtgaattaagactgtttgtaaaatttggcgatttacgactaatatggtaaagtcgatttttacttaccggcagtatggttgtttataactacttttatttttactaatttattttgtaataactgtggtctaaacattttttatttatgcacgcttttaaataaaaaaaaaggctactatcaaatttaagaattttaaattatacatacatataatgtgaaaataaattcaaaataataattataattaatatacctataaaaaaaatattttaatcttacttttgaaaatataaactacgtgatttttttcaaaatttactggtaatctcaaataattaggatgtacataaatataaaagtaaataaataaaaaaataatttcttaaatatagaaacacataagatgtacacaattataaaagtaggatgtaccggtagttttaaataattagaatggacacaattataaaagtaaatatataaataaaaaaaaaactcacttaaattttgaaacaaataggcgtgaaccaaataaaaactctcttactatctatcaatattttagaaagaacattgttaagcaaaaattttcacatttaacatattaaaataaat

SEQ ID NO: 315030 - DNA, 1178 bp, Cannabis indica
cttgggagaagatcttgagttaggaagacttagagagaccgtctaccaagccaacctaattgaagaaccacacactgctgattgtgatatatttgctcagtagagatgtgaattccttgaagaaccacatgctactgatttcgatatattcactcagtagagacgtgaattcctgagatggatggatgaccaagagtatattttttgatctcaccaggcaaagttagatcaccgcaacagagaaggcagataggcggttcaaccagagaactggtataagaggccaggatctcatcagagatccacttcaaggaagactagttgatagatcaaagagggtatatcaacaagctaaccaatctggcccaccaaggactaggacagatcttcccttacaagagggaggacataccttacctcaaaggtctaacggtgagaatagccagatcccgacaaccaacggcatgaggggtaggccagggatctcatgctcaacagtagcccccgctatctttcctatgaccgaccaaccaccagtaggagtccctgtggccgactagccccctagagaagtcaccttggctggccaaatatctttagaagtcctcatggctgaccagagaagagcactccctccctgaggggagcgggtggaaacacccaaaacaacaatttgagaagtgaaattaatcacttcaaacaattggatccactaaacttcaggaattggtgtgatctaccccatgtcaacgcacaaactccaccatccaggcaaaaaagtgtgggcggccaggccctgccaaacttagggctggccggccatgtacaagtaccagactcaggttgtggccgaccttgagtgcaccctttcccatggtattgccagccaggctcttgccaatgtgaggctgcaactcaatcaaagaaggttaatcaaccaggctcctacaacaacagatccttctgtgcaagcacagttagatcaaatacgagacatgatcaagggcctcactggtccaaaaccttcagaacttgagctagacaagtcaaggggatcaccattctcggcatacatcaatgccttgctcttgcccaaattcaagatgccgacttggaagatgtactcggggaaagaaggtcccttagtacacctaaaatactttgagatccaaatagat

SEQ ID NO: 315031 - DNA, 1250 bp, Cannabis indica
ttttggaatattaagtttaaaaaaaagggatcccgacacttgtaaatattttaatatattataaagtttattaattaatataaaagttttagtttgacacgtttttcgagaaaattctttgattagcaaagattgcactgtaattgaaaaagcactgtagcatgccttagcattagggcgttacaagagcaatgcagtgtgtatcttgcattgcagaaattcagtatttctctgccaaatattgctgagtattagtgagagagcaaacttggtttttcagagctactaattgcctccagtaccagctcccatggcatgggatagggtagctccaccagctttcctctttgatgtagacattgtgaatccactttgcccatagattttcttcttttttttgctatagcccacacatatttgatcattgtagctttattccattctttgactctcttgaatccaattccccctgctgtttttgtttggcatacgttgtcccaagcaatggaaccaacaccttgcaataggtgttggctttccacaaaaggctttacatattgcttcaatgtctttaattactctcttgggaagaagcatgacttggctccaataggcatgaatagttaataagacagagttgtctccaataggcatgacttggcttcaatcaaatcctaggccaaaaaagggaatgggggtcccctaaccgctggaaagagaccccttctagatgaatgtcgaagggaatctagcgattcgcaatgacagacatcgggtgcaaagcatcaaagcaatgtgggaagatcaagagaaaagaataggaatgtgcaagaacaacttaaaccgccagaaatgcagaaggaaagagggacagaggacctcagccctcgcttcccttaggaaataataataataccaaaaataatatgcatatgatttccctcaagaaagaaggaactattatttgttaccacttgccctagtgaacaaagagaaaatgtatatatatatatatagaaagagagaagaacttacaccatgaagacaaggcaaaggtagaggatgttgcacaatggtaatactttgcttagcaacggaggaggaaaagtataaggaaatcggggaagtttggaattttgttaagagggttttgaaagcctgaaagtcaaaaagtagtgtgagtgaaccagtcgcgagaggtactggtttttataaactataatatttaaatacacataataataatctca

SEQ ID NO: 315032 - DNA, 1745 bp, Cannabis indica
aaaatatataggataaaccgcccaaactgaccgacgtacaaccctatcctcaatatcctccatagtgatcctaacttttgctagtctattcagaactcttaagagaattctctaagttgtgaacaactgatccagatcgtaagattgcgggtttcgaagttttaccttgagcaatttcattgttacattgattattttctatcaaaaattacacaaagtcctgttaaatgtcttcacactttctggtgctgcgtagttaggatcttggagaaagagacgactgaaacacattacgaatagttggatttaaattagagactcttctcccttacatatctccgatagaagtttcatcatcttcggaaaatttcattggctcaatggtacgcactgcatccatggacttcattctgataatattagtagatgaattcagacctttcttctttgatttatttgctacagatttgagttttccttgcacttttaatcttgtttttgtcatggcaccaactcaggagctgcaagagcaaaagcgagagaaaactcttctttatccaattacaattagattcatttgaatgttaaaagttggattctaattgaattagatcaattattggatgtcaatctcaaaattcaattaaaaactgatcaaatctaattgcaattaatatactttaaaaaaaatattcatatttatttttatataataaaaaatatttattaattatatttttattgggtttctttttgttaatttgtaatacttgattgttctatatatttattttcatgatttttttttctattttattacttgacaatattgttgttttacttattttaaactttttgttgcgtgcattataacttgcaaggataatatctttaacgagtgttaaattttgaatggtgatatttagtttatatgtatttttcttcatgtttttaaattaataattaaaattaggggtgtaattgatatccaattggaaaactgatccaatctaatgagtaattaggttagatgatgattttctaaatctaattactaattagattggatcgaattagaagaaaaatattgttagattgaatcgaatatacaaccttaattttactatcttcaagaatttatgttacaaactacgaacataaattgattctatacacttgaatcttcaaaagtaagcacaaaattaaagaatgagactattcacttttagagttcttgaaccaacacttgttgaagactcaaaactctcccttacttttttggttaatttttgacaataatttaattaattataattatttaaataaaaaatattgattttagataattttaaaaacaaaaaaaatggctttcttatggattttggccatatggaattactacacaaacaaaatagtgagttttaagttatttattttatctatttaataattaaaataaaaataagtaactaatcaaattattttatgtcctacttataggatgcataaggttaatgaatagttacaaagtaaaattcactcacctaatatcctataccctaggtccttagccattgtgtttaagttttcgatgacttcatctctgtttttgtttaatttcatagtaacactaacatgattctagactttcttttttatataaataacataaaaataataatatcacatataaatatctcatacagttagtataatattagttttaggtaaagtttaagtttttt

SEQ ID NO: 315033 - DNA, 727 bp, Cannabis indica
ataataataataattacaaaaaacggacaattctttccaagtgtattaaactaatttttcttgagatgagaattagtttatacaaatacaatgctaatttgaattctaacgtagaagttaaattaaattaaaatattatatggaaagtagttgatctttttgattgacattcaaaatagtgtaatatatctattttatataaagtgtgcttatataactgaaatgcttatataactgaaattcttggtttatgagaaatttatggatgacttttgatttttatttaataaaataataaaatatccattctatataaaatgtgcctatataacagaattctaaattattagttgatttttttttaaaaaaagttttctattctgtcaaaactctgacgatataagatcgaaactccaatcatatctcaacgcctcctctctccttcccagatctctcgcacgtcgatggcgattcaaccgtttccaatcagagtctcctaatagctctattcgccagcaataacagtgtaacgaagcttgtttaaagaatatatgatcgatgagtatgaatcgttcgaggatttggttgtttccctttgcctgtaaagatgagggaataataaatttggaaaaggcatgaacctataacttttaacttttaattagaagaaaatatatgtatagatgatgatgcgtcgtgagaataactaattgtgaatatgaatgca

SEQ ID NO: 315034 - DNA, 604 bp, Cannabis indica
agtgatttttttttttgttttcaaaattttgatttttaattgaaaaattaaaaagtgaaaacagatttatagaacatatttttcaaaaaaaaatttctactttcttaattttaaaaattataaaactaattaaaaaatgttacgaccttaatttttacttttgtttagtcttattaaaagtatgagtttgctttagtattacagttttcaatgatgtacacatatatttgtattaatgaaatgaatgaagtaaacatgttttataaattaagtatattgagagagattttttttcttaaaaaaatatatttaatgtatactatagtttatactatattatttattgaattaattttatactatattagttattgaattaatattgcattttgtatcatagttttatattatctttattgctttattagaatagctttagttataatttggtgtattatatatgaaactttattgtaatatttaattattaatttagttagcaattattacaaactatccacactatatcgcactacactgtattttttatggtacaatttatacaattttggtctcgtttggaacgccgtattaggtcgtattg

SEQ ID NO: 315035 - DNA, 784 bp, Cannabis indica
ttgatagaaatatttaaactcgctgtcacataagcgcatgtgagataagaataataactatcaacaagtacaactgacgagataatacgtccatctcgggatagacaaagtatataatagaagtgttcaagacaaaataacaaagagcttgcaacttattgacccacatacttgggagtaagagcttgtaacttattaatctacatatttgcgcatggagagaataactaaatttatctagctcgccctctatgtattgaagtaactacctcgctaataccatcatggcaaaagaagactgtgaggagcagtataccaatacttagcctttttcatacaaagacgataaataaggacaactcacacttagcgagaaacaaccttcatagtcagcataataaccgttcaaggataaagacaaaagagtggttggtggttattaaatattatcctatgtgcataaatatgaaacgtggagaatgtccatgtttcatgagcagttataaatgattagatcccaagaaaaaataattcaccctatacacctataaatttggacagaatcgaatataaaagggatgacaaatttgagaaaaaagttatctattagattgaaagagagaacttgtactttatatcaagattaatcatttatagtaagatggactcgtggagtatgtagattttaaccaaaaaaacaaagaaaaatatctggtgttcatttattgttattattaactatgtagtatatttattacataaaaggttcatatatttagttaac

SEQ ID NO: 315036 - DNA, 1099 bp, Cannabis indica
tttattatatatatagagaaaagataaactttgaattaaaatactttctaactttgaattaagatacattatagaaaattttttaaatgtgtttcttaaaagcaatcccaaacgcacactaaatagattggataagatgaggaaaaaaatatgaaattgaatcaaatattatacatatataattttagggatatgattttgtcccgttattgtacttttacggattgtaattcatgatgtacggcagccgtcagatgagggagttatttgatctgacggttgagattgatgtaggggtaattagggttaaaaagtagaaacgtacctgacactcatttaatgtaccctaagactcatctaatgtaccacggaataagtacatcacgggaaaaaatcatatccctataattttattagcatgatattagggttggctttgagaatatatagtcctaaggctagttatatttttgggcactcactctaaaaaaatatacataaaaaaattattgaaaatgagtgtcatagaattcaaactcataacattatatattatacacctcaaccaactaaattataaatatttattgtttataagacatttaattttacttaaataaaaatttaataaaaaataaaattttttattttgggctcaaaaaaaatataagccctaaatacggtaagcccgcctatgcctagaccagtcttacatgctacataaatttaattgttagttttatatatctaattgtatgatatatcaattattttggataatattattagtatattttattatatatactatttccaacattaaagtttgtctatttagcatgtgcaccactacagttgtatacgtgatctgaccattgcaaacttggcgacttggaaccagtcacttcggtctaaattctctatataccctttatgtgcacctaaaatcaaaattttgggctccaaaatattttctatttatttttttaatcttcactctcttattacaatcatataattatttaattttttttataaaactacagtgcatatttagtattataactacaaaaatattatttatttttagaaataaaaa

SEQ ID NO: 315037 - DNA, 817 bp, Cannabis indica
gttcatctaggttctagttgttctatttctgttcttactctatcctagaggttgtgaagaactacttgactgaacaagagattggtcttcgggagaagacttgataaagccttacttcgggaggaagtaagcacttggtcttcgggagaagacttgttgaagccttacttcgggaggaagtaagcactcacacttcaaagacgaagggagttcgggcttgaaggtgtttcaagaagtcagattcataaagtggattacaaaggattgcggcaatactttagagggagtctaaacttgtttaagtcaattgtctttgtaattttgatactttattaattgatttcattctctgggcgtggccccgtggactaggagtgttcgtgagaacactgataccacgtataaatctcttgtgtcaagttatttatttttctgcaaatattttatattctgcctgttcagttttgctgtagcagaattactttctgctgctgcaaacgcttacagtttttatattttcttatatacaactgacatttgcaaaaacacggtttttcaaatagtgtgaatgatagaagaagaattaattaagttgcatataaataataattttgactatctaccacttttcaattaattaagttgcatataaataattaattttgactatctaccactttttcaagtattatttgggcatatatattaatagatttttatgaacttggtttggtgatatatatagggagagtttaggaatctttcgatcactagcttgtaataataatgtgacattattggaaaatctttttttcca

SEQ ID NO: 315038 - DNA, 1485 bp, Cannabis indica
aattctcatggcctccaacaatgagaatttagtataattacacggtaattatccaaatacattgtattttaaatagagtttaattcttttatgtgcatttcacttaataattaaacagtcacttacaaacacaccctaaatctttaaaaaaaaaattgcttgtgtatggtttcacattactcatattcattccattttaataattaaataaatattatatttaatataattaaatctatctcaaaagaactaaaaaaatgaagtaatttctacaaacaaaaacaaaaaccaaacctacaatttcgaaaaagtccctaagtaaatatgtgtgatatgcgagtttatattacacttagtagctactaaaccttaactcaacttttggtaactaggtggtaaatgttgagtttggtgtaatctcataataatttttagtaattagacaaatattatatttgctataaatttaagtcacactactcatacagttttgctaaattaaatcaattaaaaaatcatatttgattaaaaaaaaatcaattgaaaaatcaaaaaaaaaaaatagtgtaaatttctacaaagaaaaacaaaaaaaaaacctgcaatttcatccaattgaaaaaatccctaacttgcttccaacccttttgctccttcaacacaatacacatctctctaaagctaagcttcccaacaaaagaacccataaccaatctcatatcatattcaccttcaaccttctgagacaaagacctaacctttttaatggcagccacaacatgtttcccataaagcccaccatttctatcatcttccaagtactgaaccatctgttcaggagttctcttaatccatttgggtgtttgagcttgagggccctggttcttccttaggtgactcaagtacctagctttggctttgattatgcggcgagcgttgtcgtctgaaagtgggtttttggggtttttggatttgggtttgggtctggttgggtcgcctgagctgagtgtccatgggtctggtgtgatggaggagtggattgggattggggttttgtgtttgggtttgggtttaggtttggatgagattggtgatggtgtgaagagattgttgtagaggaaggaggagctgagagtgagagactccattgttgagtttgaagttgaaagctttttttttagttttccatggaagaaagaagctttgctcttgcaaatttttatggatattttaattaatttattgtttgaaaatgatatttttaaattataggaaaaatatatggttaaaataaatgttttctttccgttctttataaatactattttggaacgtgttttgcgaaagttaccgattgattcttattttgttaaatgataaaatggatcttatattttccaaaatagtagaaataggactctaagcttaatttttgacaactttttttttttaatataatcaacttgaaaacaattcttaatacga

SEQ ID NO: 315039 - DNA, 644 bp, Cannabis indica
tggggcatctctttctcatgttagccgcaactttaatgttgaggctcatagattggctaagcatgcccttaggatagacaatgaactttcttggatggaagaaattccccctccttctgtgtaacttttgttaccgttgttatcttaacctttatcggttacccaaaaaaaaaaaactttacacttatttaagactctaatcaataacaataaccattgtattagcagtagatgaatacttttaaattttcaatctcttaggaagaaaacaaaagaataataaaatattttctcaacactattataaaaataaaataatataaaaatttaaagtctgaatgtgtaatataacatagtttcatagcattagcataaataaaaaaatattgaaaataatagaattaacaaaaaaaatcaatcattcatctatgaaaaaaatataaatactccaaaactataaaactaaagtaatgtcaaagcaaaaaaaaaatgaataatttaaataaaaaatatgatgtgtttattgtagattgtactttgtagtgacaaaatgttgggttttatgccttaaataaaactcatttcaatataatcagatttccttattaatatagatcaaaaataacatttaatgttgcatggtt

SEQ ID NO: 315040 - DNA, 964 bp, Cannabis indica
tttttttttttttttgttatacttgatcaatatctacaaacttgttgttgaagctgttaaatcttcatcattatcatcattaacatcatctggttctctgtagattctgaagaggagtaagcatttgtgaccatagatagcatacttctaacttctgagttaccattaagcaacgagtagtcttggcgttttgatatgtctagtgctgtttctccctttaaattcttggtatttgcatcaatgccacatttaatcagcgcttccacaatctaatagttaagtagaattgttcccaccacaacataagtgattaattgttataattaaacaaattaacaacctagtttatcaatctttctactcattttcactgcacacaatacacaaaaatttaacaatagtgttttgcaaaaacaatatgattaaatttggcgacctttttaggtatagcatcacttatatatatgagggcattttttattttcggtaaattattcaaaatttctaaacaaacagacacataactaataataataataataattgtaatttctctataattatatgtatgagccctttatgataaatcaacaaagataactaagagtatgtttgacactgcttttgttttttgtttctaataaagtattttaaaaaatgagaacaaaaactattttttaaaatttttcaaacacaagttgtgtttggttaatgtttcctaaaaataattttaatttttattttattttttgaaaaacactttaatactttaagatttcgatatgaacaagacctaattaggaccctggactcggacttcggccccgaccttgactagacctaaacccgtacctgtacccggaccctagacccaaaccccgagtgcgtgaattgttttctaaaatagaaaaaaaaaacattttgttcttaaaattcttatttttttgtaactttattttctgaa

SEQ ID NO: 315041 - DNA, 1220 bp, Cannabis indica
gtaaaactggttatattgaaatgagttttatttggggcataaaacccaacatagtatacaagagctatgtacattatatgagtattcagaaaaaaatatggtacacgagagccatgtatgtcacatataccttggtatataggatctaggtgttatcctagtataaggaagccaggagttgcaaaggcattcaaaaaaatttgcacaccaaagttagtatttctatggtttgatgaaatgttgacgttattcctagtaactgagtttcttaatcctaaagagctagtgtgagtgctggtaagttcattaagttgatctaccacacatacagactattttcacgctagagttcagcactgctattatataaatgcttaataggtcgcacaaaaatataatgaacgagtttgtaaatctaaagttctagtgaaagtgttcttcttcagatcacaaaaataaaaaagaaaagaaaagcatcattaattatagaaaactctctagaagcaggatgctgcatccagaagagactttctaattgattgaagaaaaccctccgggactgggacgctaccccagttgtgttattcatttagttgctaaactccttctaagtatgggacgttgtacttagcaagggtctagtgcaatctttctttttccttttcctcccttcaaattttttctttaaaaaggttctatgagttgaactcatcaaacaaaggttcttcaacaacctgtgattttgctcttatacaaaacatctggcaggtttttccacactactctttgacagtgattcatctcacttaggatgataaattgaaattatgttcgagcactaatcacacaagcaataacccactacacctcaagtggtctatcttgcttatagttgatagcttcaacatacaaacttcaaagtttttcaccctaataactaagagattaatgcgaggggcagagcagacaagctcagacagtgtaaatagaatttcaaacataatggtggcaaagttgatggttaatgatagagcatcaccaaatattctaattaaaacaaaccataaaaagagtaggtcactccttaagagatctaaagccttgcaagtagctcatgtatggttttaggtgagcttattgggttttgtgccctaaatgaaacacattttactataatcagatttacttattattaaagatcagaaataacattttatgtt

SEQ ID NO: 315042 - DNA, 6025 bp, Cannabis indica
ccagactcggatcccaacccaaacctaaactcgtgacccgaacctggacacgaacttagactcaaaaatggaaccagacatggaacacagaattagggccgggacctagaactacaccctcttttcggtcctaaacccaaacaaggacctggcacccaggacctaaacaaaacccggtccgggacacgtgatagggatccaaatctgggactcgaaattggaacctgaacaagaacaaccagaccagcaccctcgaaccagacccaaaccgtgacaaaaacttcggcccaaacatggtcgtttacccaaaccgggatcgagtcctggaccccgaactagacttaagacccgatcccaaactaagactctaacctagatagggatctggataggaacttggactcgaacccagacctagacccagaatgggatcgaaattcaggacctatatccagacttagaccctgacccaaacccagacttggacccgcaccctggacctaaactcggacctagacccaaaactagaccaagatcggtatttggacctcgatcaagaccaagacccaaaacctgaaaccagacactgaatcgaaataaaaactgggactaggacccaaacccaaacatggacctagaccgggacctaggacccagacctagatggtaaaccttgacttcggcctcaaaaccgagacacagattggaactcaggactcggactcaaacccgaaccttgacctagactcaaacccagatccggacccaaacagacattggaactcgaactcggactcgggaccaggtcatgaaccccgactaggtcctagactcggactggcaccttggactcagacctagatagggcacctaaactcgggacacgggcatcagaactgggaccgagacccaggacccaaccccaaaccacgaccctaacctaggacctagaccgggatccataccggagattcccgctccaattgcgattttgagttctagtttgggttagagttcaggtcggggttcaagtcctagtcagagtttgggtttgggttcggatctcggtccacgtccagatcgggcaccgggtgtgggttagggtcctgggtttaggtccaagtttgggtccaagtctgaggttttgatctcgatctgagttcgggtttagttccaagtctaagtcttgagttccaattcaggtctaagttcgagtttgggtctgggtccaggtctaggtttgggtgcattctaggtctcagtctgagttttggtcccgggtttgggtccaattttgggtttggttttggtccttgtagggtttcgtgtctaggttcctgtgttagtttgggcccgaggtaggttttgggtctgagtctggtctgatttttgattcctaggtccaggtctggtcctggttcaggttggagtcctggatttaaatctgggtcttggttctggtgcctaggtccctggtctaggttccccatccaagtcttgttcctaggtcctagtctgggtccatgttcgggttcaggtcccgagtcttggttttagtccaggtcgcagttcaggtttgggtccaagtttccgtcccagtctttgttcgggttaaggttagggtccttgtcagggtcttgatcctggtctgggttgcgggtgtcgggtccttgcgagggtttaggaccaagtcaggtctaggtcccagtcaggctcccagtccatgttcgggtcccaattttagtcaaggtctcgatctagaatctggtctgagtttggattcgattctggtcgcaggtacgggtcctagtcacagttccaatttttattctcgggtccgagtttgggtccagataggggtcgaggtccgagtcttagtcccagtctaggtacaagtttttgggatcccagtttgggtccaggtctgagtccaggttcaggtttgagtcctaggtctggttcccaaatccaaacactaactacgggttaggtccaagcctcaggtctagatttggatcacggtctcgggtcccaatctagttccacttcgggttctaggtctcggtccgggtcctaggttagtgtccgggtttggggtcaggtcctgggtcttgctcatagttctgatgcccgtgtcccgggtccaggtcgcccattcaagtttgagtcttaggtctcggtccctgtccaggacccggttaaggatcacgtcctagttcgagtctgaattcaggttccaatctcggtctaggtcccaatctcgtgttggaatctaggtccaggttcgggtccaagtcgtgagttccaatatgggtctgggttctgaggcccaagcctaggtcccctatcaaggtataggtcctacatcccagtctgggtccatgttcaggattgggtctgagtcccaatttcgattttgattcaatgtctaggttcgggtttgggtcctggtctgggcccgggtctgagtcattgtctgagtttgtgtccgggtctgggtctaggtccgaatccccgtctgggtctaacttcgggtcctagtccgagttcgatttccaggtgctggtctaggtctaggtctgggtcagggtctcgggccagatctaggtctcgagttttgatccctctctgggtttgggtttgggttcgagcctaggttcgtatccggatccctatctaggtctgagtttgggtttgggatcaggtcccaggtctaggtctaggttcgagttcaggtctggttctcggtctcggtctgggtacacgaccgtgtttgggcccaattttcagtctctattttgctctagagctaggtccaagtttagttctaggtctggctccgaaacttgatcacggtcttagtcttgttcgattgtcttggtctggtggttcttgttcaggttgcaggttttgggtcccgggtctgggtcagggtccaagtttggctcctggtcgaggttcgggtccttgtttgagtcccagatgtggatccctatgatgtgtcccaatctggatcttgttcaggtgccgggtgtcaagtttgagtttaggtctgggaccgagattaggtgcggttctaggtaccagccccaattctgtgtcccaagtctggttccatgtttggctctgagttcgggtctaggtttgagtcccgagtctaggtctaggttgggatccaagtctgggtcccagttcaggtctaggtttgggttggatttcaggtcctggttcagttattgtttcaggtctaggtctaggtccggttacggatctaggtctaggtctaagtcctagtttttagtcccgttcttgggtcctagccttcttctagtttcgattccaattttcagtcatagggtacggtttcaggtccaggttttggtttgggactgggtttaggtccgggtttgagtttgggtcctcgtctgggtttgggtttggggctgggtacctaatcctgacaccgactatgggttcggtccaagccccgagtctagatctagatcccaatctcgggtcccagtcttgttccgattcgagtggcaggtcacgagctgggtcctaggttcaagtttgggactagggtggggtctaaggtcctggtccgagttctgttgctctagtccctatcccaattttgggtctaggtcccagttttggtttggatttgggtccctgtctaggttcaggttttggaccttcacggtatgggttttggtctaggtttgggtttttatttgggtttggtttgggtctggatcctggtcgtggtcctgttccaagtcctactccagttcgagttccagttgcgattctgagttcgagtttaggttcaagtttcggttagggtgcgagttcgggtcggggtttgagtcctggtctgagtttgggttcgggttcgaatccttgtataggtccggatcaggctctgggtgtgggttaggttccagggtctgagtcccaggttttgatctcaatctcagtctgggtttagttccggttctaagtctaaggttccgatcctcatctgggttcgagttcgggtccaggtgcaggtctaggtttgagtctaattttgggtttgggtctaagtttttctcctaggttcgagtccaattatgggttcgtgtcaaggttcctgtcctggtttgggtctggggcaggtttcgggtttgggtttgggtccaacttcagattcttgggtccaagtttggtcatggttcaggttcgagttccggatttagatctgggtttgggttccaaggcctaggtccctagtttagggcccctattcaagtcaagttcctaggtcctggtctgggtccgagttcaggttcgggttacgagtctttgttttagtccaggtcttggtctgggtttgagtccaagtctcggttccaatcttggtccaggttcaggtttgggtccttgtcagggtctggatcctagtttgggtcacaggtctcgatcctggcgagggctaatgaccaggtcaggtccagggcctagtttgtgtccggtcaaggttcgggtcccaggtctcaggtcccagtcctagtaaaggtctcgatccaggttttagtatgagtttgagtgatggttttcggttcagtttatgtctcaggtcgggtgctactcacagttcaagttttgattcaaggtccgagtttgggttcgtgtccatgtctaggtccgaaccctatttaggtcagcggcttggtcagggtcttggaatgagtcccgagttcgggtttggttcggtctcagtcctagtctggttccgggactgggtgtgggaaaaggtcttggtcactgtcccggtcccggtccaggtcctggtcacggtcccgatcctgttccagggtcctggtcaagttcttgctcaagtttcgattttggtaaccatatttgggtctgtgttaaggtcttggtccagcttcgggtcctcgtctgagtcccagatcaagacatcaactatgggtcttgtccaagccggggctcttagatcccaagacaagatctggatcccaatcaagggtcccaattttgtttcagttcatgtcctagttcctgatgtgggtctgggtcaaggttcgggactgatactggggtccagtttcgggtctcgatccgagttctgggtccttagtcctcttcaatgtttgggtctgaaatcaggtctgggtttgggtcccaagtcccggttcgggtttagattcaggttttggacccaatcccagggtttgtctgtgttcgagtctggttcctagtttggttacagttttgggtctgggtctaggtcctagtcgtagtcctgttcctaggcccgatttacttcaatttttggttctagtttcaagttacggagtacgggttcgggttgagttcgggtccgagtctgggttcaggtcttgatttgtgtccagggcaaggttcaggtctaggtttaagtctcggttagggtccaaggctaggtccggttttgggttcgtttccgcgtcttggtagcgctcttattccaagatcccattccagttctagttcattttcgattttggtatgtgtccgggtcctggtttgagtttgagtttgggtgcgggttctggtctaagtcctagatccagagaccgactacggtttgggtccaagcattgagtcctggatcccaagtcccgaggagggtcctagatcaaggtttgggtatggggtcgggtcccagatcgcgatccaagttttaaggcccaagttctagtcctagttcgggggtccaattcctaggtctgggtcccccatctatgttcgggtcctaggtccgggttgggtgcaagttcgtgttcgggttcggattcgggtctggtctgagtccaggtctcagtttttgttagtgtcccaattcgggtcccagcccaggttttggtccgggtttcgggtcccaggtccgagtcttgttcttgggtcttgggttcggccctagtttttgggtttgggtgttggtccgagtctcggtcttggtttaggtcccaag

SEQ ID NO: 315043 - DNA, 645 bp, Cannabis indica
gccgagttagatagagaaacagaggcagccaaggctacatagggagcaactcctcaaactcagcttgatacatctgcaaggcgaccacagggaaggcctcgaggttctaggactaagagataaaaaaataattagggaaatcctacaaatgctcaggaagaacaacctgggaatgagagagataccccaatgtatagagaaaatccaccaaagattggaaatacgagaaatcaatagcatcaacgtgacattccaggaacttcccatggattcgtaaattaggggaatgaacaacctgatataccgaaattatctctcatgaatacaaatgctaggcagtcgctactaggaaatcaggaaattccacagcatgatgggagtgttagagatattattacaatggaagaaaatcaaaatattacaactctattgtaatacaatacaaggaccaacaaagagattaaataaatgttacaacaacataatatacaatatatatacactatatatattatatataagaaatgtagaagaagataagaacacatgcaatataaaatatgtatatatatataaacactcactcacaaccttgagtgtagattagtggggatcaccatgacttgaacaaggtattacaccttt

SEQ ID NO: 315044 - DNA, 1171 bp, Cannabis indica
ttggattggtaggtggtatttttcccatatggcatttaaaggtatcagatcgtacaagctgggccccatacgcgtgtcatcccagggcctttcctttttgaatttcccttctacctagtttttggatcatttggttaggtacataaagatacgcatgctctatacgatatcgtgtcgtgagagacaacctctgacgtcatatctgaaaaagcccggtcactaggtgcatagtctgacacatacaagcagagcctccgcgagctaagggtgtagcccggtttggcgcatcttagcatgccttggtccttctaggagaaactcgtagtcttcgcgggaacagatggcttcgattcctgggactggggaagactttagctcatggatgccctctgcattgctagcagttagggaactcccatatacgaaagccctttctgtgagatgggagctttatcgtcccagagcataagtttaagaagtttttcggctaatgactccttaatgcctcttgatcaaaatccacatgttatgattacaaaaatacagataacatttacctccaagctttcgtgacatgacatgatctgggagcttgtagtatttcttcctgagtgagcacgtgggatttaagacaagccctttattatagcacgtcatcagccaccaattgaagtgtcacgttcagaatgtattatttcctttttctcgtgttgggcgcgtgctttgtgggatgcccaaaaatgacttgattggctttgagtagaatttccatttgcggagaacttttcacgaagcatgcaaatgatggaagccaaacgttgagaggcaatacaccttcttagcttcccactcatccaacccgttagacgtcccttgggcaaaggagtcgaactatttgattctcgtggaaggcaccccttcctggtaaatactttcagcagtcatttcatatttcacattttttctgcctgtcgtaccagagttttagcatttggttccatctcttcatctgccttgcaagatccttctagcaactccattctcaaggacgcatttcgccgggcaagatgcaacaccaagatcacccacctcatttcctctttacaatctggaagtttgtttcacactactacaaaaaccccctttagaggcggtttttaagccatttcag

SEQ ID NO: 315045 - DNA, 740 bp, Cannabis indica
attcaaaaaattccaacccccaactaaattcagaaaccaaactaaaatattttagaaaatatgagcacttttccaagaacatttcaatgcaaatgtaaataagtagtgaaaaattaaaatataactcatttaacaaaaaaatgtacttttagtgtgccaaaaagtgatataaatttggcacataataaattttgtgtcaaatttagcacaaaatttgttatgacttaaaatttacacaataataaatgtattactttttcatttatattcatgttatttttattattttattaatatatttaactatcacattaaattatgaaacaatttaaattagtattagacctaaataaatataaaaattagtatttttataatatctggtgcagtttgaactgcatattaacaattcaaaatcgcaaaccacaccgcaccgcgcagtttagaaaaaattcaaactgcgaccgcaccgcaaaaaattttaaaccgcatttttttgcggtgcggatagtttaaacggtttgatgaacagtcctaagcggaatgcaattctccccctcattcctgctacctatttatattcccatccctgtctaataactagtgaattcggggtaggagaatacctattggttatgggaacccgtcaggtatccattaagacaaaatggaaaaaaaaataaataattgaaaaaaaataatttaaatttaaattaaatcaatattctcacaaatattta

SEQ ID NO: 315046 - DNA, 1872 bp, Cannabis indica
agaatcacatggagagtatcttgaagtgacaggagcaaaattggtacaatgtttaaaaaaagaggtaaaaatgatagattttagaaaagaaggtaaaaataaaaaaggacaatataaaaagggtatagagtgtaatttcctctaaaaatttccaatgaaattgggccacagttgtgctccttttgtaacaactgcagcctttactttccccaaaatataggaaattgggcccagtgttgtactcatatttagaaggaaattatattgtacactcactttattttatttgtttttaatttttattttcattttcatattctttaaatgtttaaatgagtatattttaataaaatatagagtattttttattaataaatacaaaaaaataaaaataaaataaggattcctcaacttatcccacatttagcttgaacttagatcttctttctatttccatgcttaccactttttatttattatttttttttaaaaaaaattagaaatatattcaaatttgctcttatcaactaaaagtaaagtatgtagcttgggagatcgtgagaatgaggggttgaagatgtggtagaagaggatgaatgtattttggtaaaagtaggtaaaatgtattataataaattgtttttttttataaaattaattttatcttttttttacaagatatgtccacaaatatgacttttttctatgtgttttaattttccatgttattgtacaaaattcttaagctaaggtttaatcattagtgaggattcttttcttcttttttgctggtttttcagtgaccagaaattttggtaatttttttttttgacgcggtgatccaaatcacacataattaacaaaacagcaatccacaatcggcggcggcacctcctcaaaccaggatagctcattgtctaaccgaagaacatattttgtcaaaccatatgctgcagaattcgcatcccgagccacatggacaaaactaataatgtgagaaaattacaattaaagatacagaatcaaatcaactaaactttaaacaatcaaacaattcataatgacaattaataaatcacgaacaattaaagcagtaaatcaataaaatcaacaccaagatatatactggttcatgtctgatagatcgatgtgatctatggctctactccagttttagaacaccaccaaaatcctctttaagaataggtaccatacaatcgagatcgattctctgatgagttttctcaaagtgtttcaactctcatactcttacccaagtatcttcttcatctataatagattcttcttacaaaacctaaactcaatctctctattttctttgtacctctctctctacctctcaatcttctctctctctctcaatctcaactcgatcgctctctcgaaatgataagtgaatgtggtatttgtagccttaggatcaagatcctaaagtcgatggctgcaagaagttaagttgttatgttagttagacaataactaacttaacaactctcttttaagcgagaactccgcatcagcataagtaagagtgcatccgggatgagtacgaggactcctagagtcacgcatcaaggcactctttgaaagaccttcccggataggaacaagctagctggagtcgactatttgagagtaccttcccaagaactcctttccggactaactttcttgaagactaccctcgaagtggacatgatagtcatctgagaacatccttccaagaggacaactatcattccacgagactacttcaggagagcaagaaagctatccaagaacaaacttccaggcagggtcggcccaagcattttggggtcctcgtgcaaattttaaaattgggcttttttt

SEQ ID NO: 315047 - DNA, 944 bp, Cannabis indica
tttaattactagaggtaattaccacaaaccaaacactacctaattagagtattctaataattactagaggtatgttaaaaaaaaataaattactagaagtaaagctataataataaggcttgagaaacttgaaccctctcctcttttttcgcttttatctctctttcttatttttttggtttgctaacccattattcttcttccaaatacgtcggagatggaatacagacccacgatcatggtcaccaacgacgacgggatcgacgcgccgggcctacgagctttggttcaggttctggtctcaacttctcgctacattgttcaagtctgcgcccctgactcgtacgtatttcaatttcactatcattcagctaatatatttattcttgatcgttttgtattcgttttcagtctacaatagaattgtttgatgagataagggtgtagttttcttaatctagtattgtttgattagaaatggctcgaatgtgtttacagtgaaaagtcagctgttagtcacagcatcacttggcgccacccacttgctgttaacaaagtagaaattgaaggaaccactgcctttgcagtctctggtttgcctcgaaagacctgtctttaatttattacattaaattactcatataattaatggttttcgttttcttttttcatgtgttatgcttaatatttttgaagccgcgattgttaaaattttgctagtttcatgggcaggatttgtttgtttgtttgtttgttttccaaggaaaattttcatgtttcatgcatctttttatgttcaggaactcctgcagattgttcttcaattggcctctcgaaagcattatttccttcaattcctgatctggtattttactaatttatttaccagttcattgttttcttcatatctgtttaatcttaaaatactttgcttaaaattgatg

SEQ ID NO: 315048 - DNA, 614 bp, Cannabis indica
aaaaaaaaattagtgggtttgtttgtgtgatgctgtaattatatgggagccaaggtttaggtgtagcataaagaggaaagcatggatagatagatggttaatcatcaaacctataaaaatttggtcaaagcaataataggaggcacacgtggaggttataaaataaatagctaaaaaaactaagttgaatgcttattaatcacatttggcatgtaaacctttaggaggatattgttttgaaatggagtttcactcattatttaattaatttgatggtgtgttggagttagtgggtaactaacttgggtttattactttctcttcaacactctcagtatcatcaccacctctcaccatccaaagtttcatatctctattttaattttaagagttttcgatcatcttatttctagaaatttatcttgaacaatttggtaaatctctaaactgaaaccttagagcatatttggtattgttttctattttttattttcaaaaaattgtttttagaaatgagaacaaaaaatagtctttgaagtttttaaaaataagtcatgtttggttagtgttttttaaaaacaatattgaccaaaagtgaattggtttttaaaaca

SEQ ID NO: 315049 - DNA, 1695 bp, Cannabis indica
taccatagagaaaaccttgttgagagaaggacatggatcaagaagaagaatttgatctcggattgcatgatatgactcattcaaacctttaagaaattgtaaaacctgatcatgattgatataatcttgtgattgggcagcagctacacaagtgcaatttattcgaagccttaactgatttatttcatcccacatggttgttaactttgtgaagtaagaactgacagattcttcaccttgatgaaggtaagtcaaggattcatttagctcaaagattcgaggaccgtttccttggttaaatcgattattgaggactatccacatctcagaagtagtatcaagatacatgatactgctcttgatttcaggggagacagaatgtaatatccaacacattaccatttgattgcatcgtgtccatgaactgtaaagagaatcagttggaaggggttgaggtaaagtaccttcaagaaaaggagttttatttcttgcaccaatggagagtttgaagtctcttttctagggttgaaaattccgatcagtgaggagaggggttgccaaggctaggccaggatgatcggcgttgctgaggtaataaggggatcgaacgtcttcataagcagggcgttcaattgaatctgatcgaggaccttgtatgggtggtgcagattgaggcagagtcccgacgaaagtatttgatggtggaggagcagtagaagcatcgaccattggattttcaagatctgtggaagtagctgatgaagtcgctcgagttctcaccattgttggaaccttgttgaagcttttcgaatgatcttgaagaagctttaattggttcttgaaattgtttctgctgataccatattagtagaaaggcagagaagaaacagagaaaaagaaagacatctttcattgaatgagtgaaaagtgaattaattgaattgattgatacaataatattcagctggacttacagcagtgtacatcaagtaacagaaataacgaaaataatagtctaagaaaatgagcatgatctttgagatcaaataaactaaaggcgcttagatttacgttaccagataagtcgaaatactccagacatatgggaacaattgaataactatgctcctaataaccattgtgaccctgtctagatgaggattcaacaatttgaggaatagattcaaaaatataaagatgaagaatttgggaaattgactaattacgattcaaatgaagaactcaagtcatttcatcctgacattaccaatactccatatccaagaggatttaagaatccatatgtggcatcatattatgccaccacaaattatgtgagtcacctaaacaatttcaatactatcattgtaatatcttgaaaatttatttaagaaaatataaagtaaatgacatattattaaatatgagagagtttaatttagattatattataatatagttgggtatttaattattattatttttttgaatggtgggtatataattattaattatgtatgattagttatataattaaaagatttgttcaattaattatgtattctaatattagattattatgtgatatatttatggctaattagtaatttttcccttgaattttgacatgtactaaattttgctccctaaacttttttagccgttaaaattttctcccgaactattgagattgtt

SEQ ID NO: 315050 - DNA, 1296 bp, Cannabis indica
gttattaggatttatctatgttagagatattagaaatttaaaaatcataagcaaggaaaggattaggaatttccaaccttcttctctctcatattgggtctgtcacctagaacacttagggaaaacaacaatttcttcttcaagtcagacaatttttagaggaattcaacagttgtatcttaagtaatttttgaggtaagcttttccctctttttctctttgaattttaagcttgaaagttaggtttttatggaagaatttggagttaggctactgtaggtttaattcgagtttggttatgattctagaagttattttgatgttattttagctaaattaagttttgtttgatacttatagcgttttttagagaaagtttgagcataagagctcaaactttgctcttccatggtgatttcattatttgaggttattgcttgggtttattgcattatttaagtttgttatggtatgtttagttaatttagagaattttttatgatttggggttgttttgagcatgtggtggagtttttaggattcttgcactaaactggtcgacccgttaagtattatcctattgaaccagtataccgattcacccaggcagcacccttaggaaatggtttttcggttgggatccagtttaccggttgtagtaattttaggcaccctagattttcacatttcaactataattagggtacttccatgttatccatcaatagggaaacctttagttttgatatttcatccccaaaaagtgatttagcataccacttgtcagttttgggattattgggacttaggggcctgtaaattgtcaaacagcagtttccactcagggttaccgacatacttgcattcagaaccaaggtaagattagtataatgatatgcatatgtgagtacatgtttagcatacatgtttatgattgcctactagattacattagaatagtagtatcagtatatttagaattgtattgcataccaatgaatgtatgtttggcataagtactgattgacgctatcacatcggtacaactagagtacgattagggtaccaagtataggctaatcttatggtcaatagtacagtcatatgaacgttcttgacttaggattgcgtaggatgcggggaagggttatggttgggggtatgggtgcctaatcgtaatcctatttgtatctatgttatgattatgattttttactgtgtctttgagataatgttggctcattttagtagtcgcatgatgacaacttttgaagtttaaatattttgtaactttta

SEQ ID NO: 315051 - DNA, 1364 bp, Cannabis indica
ctattgtcaagattttggtggaatggttctcccgagtgcaagaattattgggctgctatctcttggaatgctctttgccaaccaaaacagagaggagggctgggctttcaccgttttgaggacatcaatcatgctctccttaccaaactggcctggcaattggcgagtaaaatggacaaaccgtggtgccatttgttcaaaggaaggtactttcctagggagtctttttggagtatcagtgagaaaaacagtgacagctttgtgtggagaggcattttaaatgccagaaaaaccattgctcatggggcttgtactattatcacttcgggggaggatatcgatatttggtggcaaccttggataccttggttgggttatgatgaattcagggatttaatggaaagtattagatccaaggcgcctagccttagatgtgttgcagatttgatgtatcgcagaaacagaatttggaatattggctatcttcgctttctatttggtgatgatttgggtgatcgaatagctggaattcaaatagtcaagagtgaagaggcggacatgctgatttggaaagattctacctctggtagttatagtgtcaaaggagcctattgggttgatcaaaagactagatttggggtttgtaagcctctctggaagtggatatgggacccaaaaattcaccccagagtaagcatgatgatatggcgctcttgcctgaaaataattcctacaggtgataagttcagtcctagtaacacttgccctgtatgtctctcggttcctgaatctcctatccatctgtttgctcgatgcgcctttgcctctgtaatttggttttctggtcctctttcggtcagaattgagtcaattcctgggaattgtatcagttctcttattactaacctttgctccaacttggatcgttttttgagaaccaggatgcttgtttatgcgggtgtgattatggaaagtatttggaagcatagaaacctgatcactcattccacgggtcctcttcagagtatcgaatcggttcgcctggagcattaattctccgctcattatttacccacattcctcccatacaacaatgataaaaaaatataattttatacttgttatcccaaaaattacccaaatgatatggcaatgataagatgatatggcaatggaaaaggaggctagactacacataataagttcttaaaagtcgaataatggacatagcatctagagaatatggagatattgcataatgtataattgagactgtttggttaaattaataaaatcgtattgattaaattttattttatggtattaaatatgtacaatttaaaaatatgaggtacaaattaagt

SEQ ID NO: 315052 - DNA, 1521 bp, Cannabis indica
attattattattattatttattcttttctgtgttttttttattattatttttccactttccataaattcttttgcatatgttgactctataatattatccaataatatgtttatatgtatgaagagagatgttattgtcactatggcaatagaacctttggtaatttatttattgccaaaaagaaaattatttattaacttgtgaaagtcgatcacaaaaaattgtgtcctatatatatatattcggtattccttcaaagaaagacaaattaataattaatcaataaaaaattacttctgcctagacttttgtagtagcagctatatttatacatatataaatatagtttatgttttatccaatatattgatcgttaactttcgagggcagattctaaaattcaataagcaaatccaagtggatatctatagatccaatcaataatataaaaattttgtacgtatattgaaaaaatattgttcattattattgcccatatgatatgacctatatatgtttgttaactatttatcccacactttgatcacttgcattattaatatatttaattgtcccattttaattaacacctatatgattttatacatatattcataaaaagggtattattttatatttatatgtggtactgcaatatgtccaaaaagttggaacttctcaaaattattaataattttttttaaaaaaaaaatcagagtcttagtgtgtataataaaatgagtctcatgagatatgagttcttatttacaagatatacagaatgtaattttggcgacgatagggttccaaaagacacaaatttttgtgagaataggtaggactaggagacacacttgaccaccacacacatgtgtatcgttggaccgagagttggctaatgtaacacttttattttttgagaaatctatttattaaattattatttttatttagttaattaaaatagtttttaacatgtttaattaattggtaaagagaaacatgttatcctccttattttcaacatcgttcttatgatcccacttaacgttctcatgatcaacgacttttttcttattacaatattttgtacattttttatataatgcattagaaccaaaaggaaaaatacatctttctcaaatcagaaaaaagtcatttatagtttattatttacgattatattatatatatagtccgagcagtagatgtttttgagctgatgtggtgttttgacggttctctattgtgtagtatagagctctgatacagtgttatttcgactaggtcgttttatcctgagacgatcggtaatttatgactacttgcatataccagggaagtgtcgcgaacgtcttaaaaagagccacctataactcgcgactcaacctaaaaattttatttagtaatatcattttagtagcagtttactcaatacaaggtgtgtagaatatcaaagaatgcgaaagaaaattatgtagaaaggaaaaaaaaaacataaaaattaaaatgttgaatca

SEQ ID NO: 315053 - DNA, 1937 bp, Cannabis indica
tgtgcttgacacgtggcactttatagttacttttttttgagtgaaaatacttgttattataaattaagcaaagagttcatctacaataacagagtatataggctgagggatatcctcaaaccagtaacatgcctcatccaccctaacgcaaactttgccaaaccatgagccgccatattggcagtacgtttgacatgagatacaattacgttaaggaaaaaggacaaaagacaagagatgtctacaagtaaatcattaaaagatgactttgaattgaagggagcttgtaaagcagaagcaaccaatagagcatcagtttcaatttgggacaatggcaattgttgttgaatggcccaatttaagctatggaaaatagccaatgcttccatttcatgggatttgaacttgcccactaatagcccctacaccaataacattccgtgagacatcgacaacagcgtcaacattcaatttgaaagcactagcagatggaggcatccacggttgagcaggaggagcaggagcaggaggcagtggctggtgtcgtggctgctggtttggagcttctgaagttgcagcagaatggtatttgtgttgggctgatctgaagtttttcaaatatgttatggcatagttagccgtgtcctttgctagttttgcttgtttatcatgaaccacacggttctgttcagtccatattgcccaaagtgtgcacatgatttgttccatttcagctttggaataaattgtggacagatggtataagtagtcaccttcatgcattgaggaggatagacgccaatcaaagaccatttcagagtgcctccaaactgcacgggcatatttgcaactgaagagtgtatgtctaaccgattcccacacttgtttacaaacagagtaggttgcatctgttattattttctttttaaccaaagatgtggcaattggaagtgcatcatgtattgctctccaagtaaaaattttaactttaggaggtagttgcatggaccagaaaaaattccaccaagatgaagcattttttgaggtcgaactttgatctatttcttcaagggctactgctaagtggtagtcagtgctgaccgtgtagatccctgagtggtgattgtgccaaattaaggtatttttgcttgagaagaagcttataggaatagtcaaaattctctccacatccaatggagtaaaaaactgttgtaaaacagggacattccattgcctctcatctgtaattaggttagcaacaacaccattagatggtccggagtagtggatatgaaagaaagaattatgccccagtatccatgggtcaaagcctgattttattgttcttccatctccaattttccagcgaaggcccttcaaaagaagctctctaccctaatgtatttcttgccatgtgtatgatggtgaatgacccaaggttgcatcaagaaaaaaattgtgaggaaaatatctacttttaagtaccttaccgagtaaagagtcgggttattctaggattcgccaagcttgtttagccaataaggcttgattgaaatagacaaaagactgaaaacccatgccaccatccgatttggacttacaaagaaggttccaagagcgccaatgatttttgatccattttcattcaaaccccaccaaaaattggccatcatggactcaatttgattgcaaaaatagataggtagacggaaacaactcatgtcatatgtagggattgattggactacaactttgagaaggacccgtagcttaccgtctgacagtttctcatgggccacgacgcattggagttggcctaataattgataactctaaatgttgtccaccatagttccacatcacgttaaattaatgtctttttaaataaaaataattttttctaataaaaaattaaaaaaaatatcatgtagccattg

SEQ ID NO: 315054 - DNA, 991 bp, Cannabis indica
aaatcacgttaacatgcctaataagttagggtgttatataaaccattggaaactataacttcaaagaatgtcctcgactttgttgataaaaacatcatatgttagtttggactcccttataaaattgtactagacaatgggaaaaaatttgacggctacatgttcactaacttttgcaatagacacgacattattattagcttctctgtagttgcacaccatcaagcaaatgggcaggtgtaggttgtaaacaagaccctcaatgacactatgcaaaagcatctagaagaggcaaaaggtagttggcccatcctcctcctaaaggtactttggtcacacaggactactaagaagacaaccactagacaaacaccttttgaattagcctatggctatgaagcaattctgcctgttgaatttgaaccgccgtctcataggaggataacctatgaccaaggaacaaacagcaccttgttggaagaatctcttgatgaaatagaaggaagaagagaccattactttttactgagttgttgacgtaagtcaagttttttctggttcaattgctcacggtgatccgaccgttgtggatcatagttacttacagagctcgtccttgagtaactttcagttttggttgtgcttgtactctctcgattagtactgtgacaagttctatcccctcgcgtaaatcgactatgggtccttgtacgtctcgagcatgaacttgcctcatcacgtactggccttctcctttgggaacatgttgatacatgctccctgctaggatttgtatgcgccccttccctatcagctcgagaagggcgttggcagtgcctcggtggcaacccacctgctctaggttgagtcccaggatctctctcgttactcttaacgcaaatttttgttaaccaaatttaagcctcatgatgataattcaacatagaaaaataaaagctatagaaaaataatatatgaacacagggttttt

SEQ ID NO: 315055 - DNA, 934 bp, Cannabis indica
ctttggctttgttctagagctttgacatactcctctactttttgctccgaattagcttgttcagcctttaggatctccatctcgtggtcaagttgttcactagagtagaacacctctctaccatcagactcgcctaagagaaaaattacatatgatcaaatacagaaaaaaaaactaagattacaatcagggcaaagattgatgtacttatcacagcagcatggctcttaaggctgacagccataaagttggatccatgctcgccaaagtagcatatttgtcaaaacccaacctattgcaggttacaacaatttgctccaagagatccgccacaaatagagcaagatttgagcccactctaggctgaatttgttcggtgacaactgagcggtcgaagataaaaggaagaggctaagtccatcttgttgaatctacaaactcaggaccccgtttggttgagagtattatagttctcctctttatgtgaacaaactcatcatcgaacctctttacaaaaatttatcagctacctctagttgagcacggtcctgttctagaattgaggaaggacgaacaggcaaaataacccttgaaggtggaaggggaggaaggttagtcttgtcttttggcaactgggaagaaggagcgttagattgtttttgtggcagaggctaggaacttgaaatcactttgttggagtgtgtggtccgcctgcttgacctctgagtttcctgagattgtctttatctatgcccaaaagactctaagccctgcttcttggaagcagttgatgcgtgtctgttgtgaaaattagtatttatatgcaagtgcacgcaattcggaacaagtaatataatgataagttgagtattgtctccacagggattgtaaattaaaataaatgtaaaatcaactaattaacaacttagggtct

SEQ ID NO: 315056 - DNA, 1974 bp, Cannabis indica
agctaagcggtctttacactattaatttatgacaggtcattaagttagttacaaagtttgttataactttataactaactctctgagtcactgttctcttctacgatatataaaatacaacaaaaaatattttataacagagaacaacacaacaaaaccagatttgtacacaggaaaaatacacatatcagattgagttttggaggaggcttacagtgaggtaaaccttggaactctagggttagggttcggagatccaaatttcagggagagttgttcatgcaaaaagaaaggagaagaagaacatcagtactgacttagagagaaacagagtgaaaagagaggattaaaacactgtaaacaattagggattaccaattcgtacctatgtgttttggaatactagctttgtaatctttgatctttgaagatccatagtggaatcaaggcaagctcgaagaggacgcacccaacacaattttggggaacctctataaaatttggtgcacactttccagttttcttctatgtttttctttcattgtgtttattgttttgtgtatgtttgtgtggttcgaatcgacttcggaaggggttaatttggttctggtttgtggttgctgtcttcatgttcttcagagaagaaccacgaagaacagctctgctagggttattgtttgtgagtcgtttgagtgtttgtgtaaatgaatggggttttattttgttctgaggtattagggctaaactagggttatgaaacgacttgtagctcatcaaaaagggggctgtcgtttgggcttaaatcaattgagtcaacctggttttgacccagtgggaaaggtcagttttcaccttgtatcgtgattatttcttctttgttgtgtgtagggcagaagggtaaaatccctacatgacgccataggtgcactcgttacacgacacgtgtgcacctatggcgtcatttaatacccaataactgacgccatagggttaataaaaaactctgaatatttcccaacccccaaccgacgacataggctatatataaattctatacttacgatttttattgaaaaactgtctctaaatgtgaatttcatactatgtgagtattttcacaccctttagctttcctttttataaaatgggttgaaaaaacagcctctaaaagcccatattgtagtagtgcttctacattgttctacataagactctctactaatagatgtgaaagataattctagaaaattcaagagtacttaaataaataagaaaactctagatgttttagtaaatataagaatagtctaaaaactttagtagcaacaagaaaattctagaaattaattatattaaatcaaatttaatatttcatagatatatgtatttgttggatatccactactctactacgtagacataagcattaattagtaaattcaaccgtagaaaatattagatgatcataattctatgaatgatgatgaactcttgaaagtgacattttctttattcttcttatataggagatagagatttttacttgttatatatgaaagtgacttctatcatatcttctttgatatatatagtttcctcatggtaaattaaaaaattggtcatttatgaaataccattttgtcttataatttattaaagtagtgatgaatatatatagggacacaattttgttctgttattgtactttcacgaaatgtattctgtgatgtacggaatacattagatagatctcagggtacgtaataatgcgtctcaaggtacattactattttttaaccctaattatctctagattactctcagccctcacatcaaataactcctccatttaacggctaccgtacatcacgaaatacattccgtgtaagtacaatcacggccagattaaaatcgtgtctcaatatatatatttttgcaatggtagtgatgactatattattctatgttatatgt

SEQ ID NO: 315057 - DNA, 1033 bp, Cannabis indica
tcttcttattttggatttttattatttggtctttttatatatacaaggaatattatagttgaattgaatatatatttgaattaatgcaaggtcgtctatatatccacatccttaaaatattttcaagtgatgtatcatatatgttatattcctcgaaacttcccaaaaatatatgattatgcattgtcttttttttcttaattttatttgttagaaatacttaaaattaataaattagctatgaagatatatattagtagtgattcttaagaaataagtatcactctattctcatttttcctattaagagaaaattagagaaatccaaggtcgaccctgaaatatagtggaatatatgaaaaaaatacttttggatccttatttagaaaaaaaggttgtatttttcaaaattattaataaaaattataattttaaaaggggagaaaaatttaggcccctacactagctaggccctaggcacatgcctagcccacgtatacctgggatatagattaagatcattaataataaatggattaaggtacgcttccgctatttgagttattctctttgaattaacaaaaatacattctttaaatctatgaatatacacttataatattatgtaatatgtttgtttatagaattaaatcttgatattgcatattatataagtgataaaggaatttaatattattgatcgattataaagtagaactatacgttcatggattggtttagtctaaattttaattttttttaaatcaaataagtaatattagatttttaaaatttaaaactaaactagaataattaagtgttaaaaccaaactaaactaatccatttaataagaatgaattagtttgattcgaaacccacggaatgaatgactcttatacacgagtacgtcactctggttgcttcatggactgatgactgaccttacagaccaacacgagtgtttccagcgtgctttgtcctcactcgcacgcttcttgggaaaacttcccaggaggtcacccatccttgaaa

SEQ ID NO: 315058 - DNA, 2060 bp, Cannabis indica
ttacggcataaaacccaacacctactgttgaagctagtttcctaaatgaaggcctctttgatcatacaccggctgtcctaactttgtatccccaatgacaaggtggtaagaagccatttaaatatttcagaatgtggaaaattcatcctgagtttgactctaaacttcaagaaatctggacacaaacaaagcatggctccaaaatgtacacactggtcaaaagacttaaagctttgaagcaggtgtttaaagatataaatcagaagggttattctgatctacaggctgctacgctaaaaacaaagctagaattggaaagtattcaagagcaactactgaaggatcctctaaataatggtctgataagtatagaacaggaaatgagggatcggtatgtccaagtgtagagaaattactccctatttctgcagcagaaatcgaagtgtgcttggattcagaatggagactcaaatacagccttattccatgcaagtatcaagcaaagaatccgacagaatctgattttttaaatagaataacaggatggagcaagagttcatgagcctcaacaaattatagatgcttttgtatcttactataaagctttgctaggaactaaactagaagggaggagcaaagtatcaagaagaattgtaggcagaggccctactctctctcaaagccaagtagaaatgctcacaaagaagtacattagggaggaggtgaaagaagctgtgtttggaatccctggagacaaatcacctggccctgatggatattcaagctttttcttccaagataattgggaggtggtgggagaggaagtttttcaagctgttacatccttcttggaaacaggtagaatacttaaagagataaattctactattcttactatagtgcctaaaatgaaatgtccaaacactattaaagactttagaccaatagcttgttgcaatgttgtgtacaaaattgcaaccaagctattgtgctctaggcctaaagtgattctccctgatttagtttcccaaaaccagggaggctttattaaaggaagattaattgagcataacattatgatatgccaagatctagttaggcactatagtaggaaaacaaacaaggctagctgtattgtcaagttggatctacagaaggcctacgacaccattgagtgggattttatagaagaaatgcttcaagaattctagtttcctcaatctttcttctccctggtgatgaattgtgtacgaactcctaaattctccctcatgtttaatgggacattacatgggttctttgaagctaggagagggctaagacaaggagatcccatgtctcctttactctttgtcctaggcatggaatatctctcaagaataatgggaaaagtgggagagaaacaagactttaaattccatcacaagtgtgctagaattaaattgaatcatcttgcttttgcagatgatgtgcttctcttctgcaatggagatttcaaaagtgttctctacatgctacatggcctcaagctattctcaataacttcaggcctacaaccaaatccctccaaatcagttatctacagtagtaacatgtctaaaactgagctgaaccagattgtaaaagcatctggcttttcagttcataacttgcctttcacctaccttggaatccctatatgctctaaaagaattttaaggaaggaatgtgccatcctagccgataaaatgacagcaagaataaaggtatggagctccagaaacttatcatttgcagggagaggaatacttgttaattctgtgcttctaaccatacactcatattggagtcagatcattattctaccaaagaaagtgatccattgtaatgcccaaatctatagggacaccacgtgtgtgattttataaattagtttaatactagtagaataattaattattaaaaagcgtgataatattaaaatcttgactaaaataaaacactaaaaacagacattataacgacataaaaagtgtgttccgggaatccctgttataaaaagttttgctaaaaaatttata

SEQ ID NO: 315059 - DNA, 1659 bp, Cannabis indica
ctaattctctaagtcactaagtctctagctccttaagctctcagttctaactctaaaactctaagtttaaaactcacttctctcttctcctttctcacgcacgcccaagcatccttctcactagagatttgccaactttggtactcacattgtaatattaagagagccactccatattccactactattgtgatttgagtggtattatctctatgccaatacaactaaaagaggagtaggtcattacccgttaactcagggagctgaacctctataaatctggtgtctattttactttattattcttattgtgtaacacgtttgacaagtatcagtattaaatacgactccgctatcggttggtcaaatttgaggtcaacaattacacaattcataattgtcataattaatcaaaataataatttcacaaattactattttgctcttaagaatttattttccatagaaattaattctcactcaaaattcattcatcaaataaaatcttccctttgtacagtgttgtatagaggtgacttgaggaccatggacctatatttcaaagctccaataaacacttgattattatcgatctcatcaatagaataattcgatttattacgttcattattactccactataaatatagaattgcactctttgatcccagacgccttttcgtattctgttctcagctgaccactgatggcatcctccttttgttcacacctttcctcctgctaagtgctgattattaatctgggacttgatgtctgaccgtgcgtccaattttactcatccttgatggatgggcgaagcacttgactcttatggatccagtaaatgggattgccttcctcgatgggcctccgtaatggcccatgtattagctatcctaaaatacgataacatatattttttaggttttatgctttaattagacaatttaaagtaaataataattaagaacgattaaactaacttaaaggtaaacagacaaataactgtttcaattagataataaaaacctagaacatttatttctctatttcaaactatgaatcttagtttgccaattatcccaatttattttataatttgtagtttcaagaaccctaatgtaatctattaacctctctcgagcgatgatagaattaactaattaactaacaaaatatttctattcaatatcaatcaatcaaacaatagtaagacaatattattctctttaaataaaactcatatagttaatgagatatctcgatctcacactttttctacgtcacacaattctaattatgattttagattacaactctaaagtgtaaaacctaaaatcttattactaattaatggtattaagcattactaagatagtaattcagcacaaaactgcacaaacaaatatcaataacatatatgagaataatctaaaaacttaaaataatagtctaaaatagtttcatcaacactttagaaaaaagtgtttagttcataatgacaaacaaaataataacaataatcatattcataattaaacaattaagcaaaagaataaagaaaaagaaaatgactttaatgatgattgattggaatctcttatttattgctcttcaatgtgttttttggatctaaaaaattgctctctctctctctct

SEQ ID NO: 315060 - DNA, 4893 bp, Cannabis indica
aaggccacctgacgttgatgctaacaactttgagatgaagtcgcatacagatggtccaatcttcaagtttggggggctgccaacagaagacacaaacatgcatctcgttaactttgaagaactctgtcagacattcaagatgaatggagttagtgactacgccatcaggctgaggctgctcccattctcattaagggggcgagccaagagttagttggtacttttgccacccaattctatcaacacctgtgaggaattgactctaaaattcctttccaagttttttcctcctgtaaagattgcaaagctgaggtcagaaattaacaacttcacccaacaagacaacgaatctctttatgaagcctgggagaggttcaaggacttattgaggaagtgtcctaatcatgggattgaaaagtggctgcaagtgtacaacttctacaatggattgattaacaacacccgaacactcatagatgtcgcaactggtggggcttttatgaaaaaaagtgtgaatgaggcctttgaactacttgaagagatagtcatgactaaccaataatggtcaacaaaaagaggtcaatctaaaaaaattgcggatatgcatgaagttgatgctataaccaagttgacaatccaggtgaaggccttaactaagttggcgactgctcaagcaaagtaagctcaagttattgatagacattgggatattaaataaaaaagggcataagtgtaattgtaataggggtattgttattatatataggactcaatagtgaaggaaaaatgtgtgaagaatttggtttagtttgtaacttttgggagagaaccaagctctcaaaattcggggttttaatgaaaggcattctaccattttatccaaacactactgctctttctctattttctgcaattgactaatcttgataggaaaattcctaccaaatggtatcgaagcataagttcatgggacctgagaaggacactagtatggagctactgggtgaaagaatggaggctttccgctcaaaaattcagaaggagattttagacgttagatctcagttgaaaaaaaggtttcaaaaacacgagcacaaatttagcgtttactggagataatgatggctcagttaacctgtttctttgcaaggggaaaatagacgatggagccgaacaccgccaacaacgaaattcgtcctccgaccttcctctaggatggctctccgtcctcggccctgccaaaagtcactcccgcactccaacacgctccaaatggcgccaaaaaagtaccaacagatgaaggtgatgccggagaagacccaattgctagggcaaatgttggccatggtgaggatgaaatcgctaacgttgagcatacaagaagtctcttgcgagaagaagacgattgaaagaaaaaggcaaattgatcagatccccaaaccctgtctaaacaggcccaatccattaactcattacccaaatctggcccacatcaccaaaattctaaatttaattaaccaagcttatgggccagccctttgggacccaggtaaggcccaacacacttctcagatttcttcttcgtctctttgtcatgagagggttctcttttccaatagcttctctttgtcaagcggctaagacggcaaccattgggttactcaaaatcaaagatgtcgacttctaagtcgtaggatcggagatacaatcgctgctaacgagttgctggcggcaacaagcggatggcgtggtggtcagtgcgcaagttctatccatagcttcacacgtgtgggatctaggttggactcctaacatcaacttctcttcttcgagtgttctggttttttccctttgccatcaacgacttaggaagcatggtaaacctagtttgaacgtcaccttcctcgtccaagatcctcctcatgttggggtgtactgcccatctatcaactaccaccacttagtgacggatgaatatgtttggctactacaagaatggaattcgggtggcaagaggttatcatcattgtatcgcacgattagagaggaaacagtgcgacttacagactaggcatctcaaggcagccgacgaagaaacaagggaggggagactccatgaggtggttggagggaagactactcgtcgagtctttgacagagaaagaagaaccactattagaaagtgtgacccattcaagagcatattcttccctcaccttggggacaagctcctagtttatggcacaggcaaaattatacccgctttactcaaggtttcgaaatctaacctgcaatatctttttgttgtgagttggtcatctctagttgaagttgcaagtttggcaaaagatacaactatctgcattaatattgctggaaacagtttcattatagcaccccataggaattttaacaaaataagaaatgtatatgtggacataaggattggtagacaagagaagctacttgaaattgatgacaaaaataaaatagtgttggtatctacaaagaattttgatagaggaaagagaatcgaaatgtatatgtggacataaggattggtagacaagagaagctacttgaaattgatgacaaaaataaaatagtgttggtatctacaaagaattttgacagaggaaagagaattgaaatgggtgtgtcaacccagaattggtactcaactagccaactagtgattcttagaaattttttctcctatccctatttcttttctactggtttggggcaagaacaccaacaaaaagcaatagattttgaagtatcccttttgaaaaaaaagaatctatggactttgggggtgtatatcttgttattttttgtttatccactggaatgggttgttttcgggtgttcgataggggcaagacaaggtattttgggaaaaatcatagcaccatctgatggcaaggcagtggctctctttcaacttgttctgtacaccaagagagcaaatattagctggctttttgatcgaggtagactcgttgagcagtagcgtctttctcatgactcgaacaccttgcatttgttggcttggttctttgacaaggggcgattacgggttgcacctactgatgttacaagttgaactccaacaccttgaggacaaggtaattttttggcgactggtattgataggcattgggatattaaataaaaagggcataagtgtaattgtaataggggtattgttattatatataggactcaatagtgaaggaaaaaggtgtgaagaatttggtttagtttgtaacttttaggagagaatttggtttaatttcctcttcacattctatttagccgaatagaagtaagaatttaattttaacgtacttaactataatcctcatgggatcgacctcaatctttgtgagtaatacttgttcaaacgatacgtatacttgtgtgttacaaaatatccaaacaaatatctctcattataaacataaaaattgaactatatttcacataaaatataaactcgtaacctatttacatcaaattttaataatgtagtctaatgtacaattgcaattaataattttattcaaaatataaaaaataataatttatcattaattttattatgtaaaataataataaaaaaattctgttaaatttaaaagtattaatagaattagttttataaatattaattaattttatattaatttaaatatatataaatattaatattatttattttaggttaattgaacttattacaattttagattactttaaatatatataaatattaatattatttgtaatatcattatttttaatatagggagtatgttcaattttaatattttatattttatatttatttttctcaaaattttaaaattttaaatattacttttcaagaaaaataaaaaaattaataagtgattccctttaatttataaaattttaaaaaatacacataacaaaatcaaaactaacaatataattaagtatacaacctagtacttactaaaatatactagtaaaaaaataaaaatgacataaaattaagtaaaaaaagaatatatttatggtgaactttggcataatccaaatttgtatcactttcgtctttcttttttttttttttagctaactcagctacatttaagctattagcatctccattggaaattctttaaggatagaagtgtaaattgatgatttattgttaaaatataggtatcttctaaattacttgctccagtggcgtgccaacatctaaaagttaatttaaatttggctaatttgaatttttacctcctgaactttgacacgtaccaaatcatatccctgaacttttaaggtcgttaaaaatgccccctgaactattgagattgttaaatttaaggactttttttccaattttagtaaaaaagtgtaatatggatgaaattttaagagcataatttagtacatgtcaaagttcgagggacatgatttgttagatatcaaagtctggggagcatggtttagttcataaacaatcactgaaatagtaaatttgaatgaaattagacaaaagtccttaaatcaaacaatcttaatagtttagggggcatttttaacgaccttaaaagttcaggaggtaaaaattctaattaaatttagaagatataatacaaaatttgcatcacaataaatgcattacttttacatttacttttatgtcatctttaatattttatcactaagtttaattattgcattaaataataaacattttacattgttttatataataaattaataataaagttattagttttatatttttgatgaaaatattaattaaatattaaattttactatcaaactttatattttgtattgaaatataatactaaatattaatgtaaa

SEQ ID NO: 315061 - DNA, 504 bp, Cannabis indica
aaatagccctacacgcccaagctttctttggccacaccagccgcagagtctctgccgcattctgacactgtagttctgcgcacgtcagtaaatgactttacccttcccactaacgtgtaaatctcagtcgtctgtcgtattcattttacacctgaaatttatttctctattgtatttttgtaataaagaaattttataaatattatttttataattttttttagtgtaaaaattgatttatttttaggatgatataaatatttattttagataatttttgccaaaaatagaaaaaaatctcatttggtcaaattgaaaaatttacccattctcctaatattagttaaaataagtttagggaattaattcaaacttccctttacataagcttatttttattttaggctaattaggattttttctatctgaagtttgacatgtactaaatcatgcctcttgaatttttaaggtcgttaaaaataccctctgaactattgagattgt

SEQ ID NO: 315062 - DNA, 1931 bp, Cannabis indica
tttttgaagacctttataatgtaacattgaagtttagtgaatctacttatgtaactgtaaataagtacttcatcaagatatgcaatattcaccaagagttggtcgattcttcagttgatgaagatgaggatgagttgttgaggaacatggcacataacatgaaatccaagtatgacaagtattgggggaagcttgatgattgcaattaggcacttctaattgccttggttcatgaccctagatgcaaacttgattatctctatcattgttttagctttactcacacggagttagaatgcaaagagatgatgaaaggggtggaacaaacgatttggagaatgtttaatcaatataatgattctgcatcaagtattgatccctcaatcactcaatcacaagttcagcctattgatgatggtggttcttcctcattcatcgtttctagtcgacctaaaggcaagaagtcacgtaatgtccatgatgagttcgtggcacgaagaatggagaaaaatggcagcaaaatgaaaaatgaacttgataagtattttgaagaggaagctgagcaaccaactcaacaatttgatattttaagatggtgggctagtagtgggtgcaaatacaagatattgtcactcatggcacgtgatgtgctagctataccggttcccactgttgcttctgaggcggcattctctgctgggggtcagactttggatccttttaggagttcacttagcccaaggatgattgaagcattaatttgtctcaagaattggtggagcggatcacatcaacccactgttgtgcgagagtacatagatgaagaagaaatgctttaaacacaagcattgctcgaagatagtaattttagtttgttatattttattttgatttccataattcaagtctaatatcataatatttattttacatatgcatatttattattatacttttgttttatagagattctcaatgacaatactatagacactctttctactccttcaacctcaataactcaacaacaagacacgaccttggattgaaaatgtttattattatactttattacatttaatttattgattttatttgctaatttatctttcttttttttatttcaagaaaaacattgaaaggtttggacttggaggactttagagtttgttgaattggacaatggacattaaaaaggaagaaacgatagatttaggttacaccaagcaaagcaaaggaaacacagagagaagaacacaatatacacaagggaagtatgtacttttgaatagttatattctaagctttagtttacactttagatatgaacatggattattgatacttttggttttgaagtttgaatagttatgttttggacttggagactttttgatatgattcatatggatatagattagatttggaattttggatgattgatatttgacaccttgttgatcaatagctatattttgaactttgagatttttttttatatggtccatattgtatagattggatatggattagatttggattgttaatacttttttgattaatagctatattttagactttgacactttttttgatatgatccataattccatattgtatagatgggatatggagtagattaaaatttggattattaatattttttattaatagctatattttggattttgggactttttttttatatggtccatacatattgtagattagatacggattagtttttttttttttttgtgggtttatgattggtatctattattgtgttgtttattttgaatatttaaattggtaaataattgtgaataatgaatgattatttagacaggtagtttaagttttttatgaattgaatgccattttcttaactgggtatgaaccaaattcactatttaggcccaaaaaatgtt

SEQ ID NO: 315063 - DNA, 536 bp, Cannabis indica
gatttagagatctagggaggaagacttagttgatagtattacactatcaaattgtgataactgttatggttcaatcaggtacgcatacctaattattatatatactattattgtgttttatattatatataaattgatcttgagtttattattactttttctaagaggcctaccattagattttgtatagaattttttttcatgagtcactcaatcatcatcccaaatatatatataaatatatatatatgtatagtagtcgttacatttgttactgacattatttttttattgtaaaaatacttaaattgtgatggtaagataaaattgtattgcacaacaacaaaactctatcgataaaaaagtaaaaaataaaaatctataatcatttatgtaagttctatttattgattttcataattattaccgagttgattatctttgaatagattgatttcaacacatgtattttagacttgaattaagagtaaagcagtaaagcacacaaagatttacaagcttcatctgcactgaga

SEQ ID NO: 315064 - DNA, 512 bp, Cannabis indica
agtcaatacatgacatgatctttcgatcaagatgtccccaacttgtagaagcctctcccaattaaggcatggtcttccgatcaagacacttccagcccttggatgcctttcccaaccaagacatggccttccagtcgagacacctccagccctcggatacttctcccggttaaaacatggtcttctggtcgagacaattccaacccttggactcctagtcgagacccctccagccttcaaatgcctctcccagtcaagacatggtcttttggttgagacacctctagcctttgaaagcccctctcagtcaagataaggcattccaatcgatacgcctctcaacccttggacgtttttcttggttaagacttggttttctgatccaaacaactctactcaggggctctacatgataaagagatacatcttgagcaagataaaaataacaatgccctctaaacttagtgcaattctctccaagttcttattccacctagccctctagtcttggt

SEQ ID NO: 315065 - DNA, 1214 bp, Cannabis indica
tttgtatgggtttttggagcggtcgttcaaaacgtttacaggacattgtgtgccgcctacagcgatggtggatgcttttagttctgtctgtcgctgaagctatggctatgctggttgggttgcaattgtgatatcatcttggatatcataatattgaggtagagatggattgtcaaattgttacaaaacttgtgaataaaagagagacatgtctgacggattatggtttagttttacaagatatttatttagtttgggataagcttaatgtttcttaatttttgttttgtcatcaatatgaaaactctatagctcataatcttgtcaaactcgctctttcttctcattaggcaagagtttgttggcataattgtttttgaacttatgttagcattgacctaatgatacttttcttttattcaaaaccaaaaaaataattttgtaatcaaattttcttatattttaatttgtatacagtttaccttctcatttttatggcaataatttcttaattttcatttttatttataaattcgaggtatcaattacttttttattatataaatactaactagaattatcattttatgtacctgtgatatatttaaatttatcttagatttacaaacaaatgttaagttaaaaggaaaaggaattaaaagattaattatatacaaattgaaacatgaaagtttaacgacaaattacctttaatctaataggtaaagttttattgtatgtacatgaaagtttggtggcaaatttaatttgattggcgaagctggagcgtgtcggttagtattggattcggttgcttcgatgaagcacaattttgtcttagttgagagtaattcgaagaaaattatcaaagcgttgaaaagaatctactctatttggaacattgataaccctctaaatatttttatgctgtaatttctcgtttatttccagatgttgtaattttgcggcccataatgtgactaagtagacttttgctcagaatgtttcgggtatggtagaaccctcctctatagctgactttatcttttgtaatgaccaggaggtctaactctttctattttataaacgctttattataaaaaaaagaataataaataaatttaaaattgaggtttttatatagaaatacatagaaactaacagagcgacttaaatcgcaattaaaatctatttagcaattcacatcaaaatta

SEQ ID NO: 315066 - DNA, 534 bp, Cannabis indica
ttttttttttgttttgaatatttgaagatatgctttaaaccttagaagttacaggttatgttaagtcaatattttactaaaattggtaaaagtttttacatttgtgaatagattatgatacttgtaaagtataattattaaaaaaaaaataccccgattactaaaatcttatctatgctatgtctactttgttggggagaattttatgttgagattgtaattggcatattcctaaacagtaattaattaaagtattagagcataattataattataatgtatggtaattactaatttgaaagttagatattgtccaaattacacccattcgtgtagaaacgaagcaaaatggcatgtaaagagatgatgtgcatggcttatgccagatggggtgcatgcatgcagtttgcaaagcgaagaaggtgtgtcaacgtggcatctatttgattttggaagcatttatagtggacacatcaacttaaatatcgtgtattatactacgacgtaggaaacgtaataccaaaacgataaaac

SEQ ID NO: 315067 - DNA, 1263 bp, Cannabis indica
catctcggttcatctagtgcctcaagtatacttctaggcacaacaatttcaaaaatattagtaataaatgctctatagttatcagataggtgattgtacgagatgtatttggaaattggatgctttgtacaagcacgacttccttttctaagagaaataggaagatctagagtttcagatgtagggcttgaaatagattgtgaagaaaaaattttacttggagacaaagaagaactagggatagaagaagaattacctggggtacttgaagaactattatttggggattccatttggtcttgtgcagggatgattggatggtctctacttcttttgtagatgttcttccttgaataaaccacaggctcaagaacattacaatttttaatcaatcgtagcatttatgtttttgacaaaccaagatcggattcagattcaatagatgtaggttgagttttcatgtgaaaggtttgcctccccaaaaaggtaggaggagttcggttccgagaaggaaaaaagtgcaacaaagctcttatggcaaagttcctttgggccttggcgactaagcaagatagcttatgggttaaatggattaactctatttatctgaagaactaggatgtctggaattatcaaaaaaagcccgatgttagctggtatttctctaaacttatgaatctccacaacaagataaatgaaaccatgctgaatcttgatgtaacaggaggacaatgtaaggaaaaaaactgttataacttgcttgtgggtgagctgaaagtggattatgcaggtgctgtttgggataatttgactttgccgaaacacaggatttatttctggcaggtcattaatgaacacctcctcaccagagacttcttaagtaggatcataaacatttaggtggagctttgccgggtgtgtgatcaaaagactgaaactcatgatcatttgttttgcaactgtaccttcacaaagcaggtaggagctgaaattaacaagtggctggggtcctttcactactacaaaattggtttttctcgacatttttaaacagtcgtttaaagtattcctgtcagtttctataatcgtcgcctatacgaccatcgtaaacgggcaaaatagctctcgacggtttaaaaccgtcgcctataccctactataggcgacagttttaaatcgtcgggaatgtaaaaaaaaagagaaaaaaatacagatttttctaccatttttttcctacattagctttataattttacctaaatt

SEQ ID NO: 315068 - DNA, 3119 bp, Cannabis indica
atatagttccattaagcacgtaactaaattaattttgtcattttacccttctcgagtcaaaattactaaaatgccctggctcaccaacggggtctttacatagcataaatcatataaattttcatatattacattatataataatataatttcttaattattcataattatctaattaggattttgctaatccatttcttaaatctagggtattacatataacgtacatcagaagcggagaagagtctctctctaaaaatctcattttttatcactgctccctattctcctcccttacacacaattatcccatctcatcaattctctttcatacacatccatctcgttcttaataactctctttaattaatcacaccattaccattcaccaggttgcctatttaacaagcttccatagaaaccagactactcatttaatgagcttctataaaaacccggctgcttatttcataaccttctataaaaactaagctacctatttcataaccttttatgaaaaccaaactgttcacaccacctttcaacacgtcaactcactaaggttgttcatgaattataaattcctctattcacaatcatttctctcttcttacaaacacaattatattgtctaatacaccccatttatccaccaaatatacacaaaaaaccaacctaatccaagttatcacatgtgcccaaaattaatctttttgcaagaagatagacaccatttgctcttgatctttgtaatctttcatattaataaagatgcacaatagactgcctgctactgtaaacacaggcaaatacaatttgttgtactacataaatttttttttatttaaagcaatatataaaagatatgtgtctatatttgaattcatacatatgctatatgtgtatatttaaagcaatatttatatccatattattaaaaatttaggtaacttctgaatattttggcaattcaactagggagtatttttcttaaaatatatatatatatataaattcctgtaaatacaaaaaggaaaacgctcaagtttgttctcttatttgaatcgaaattcctatcttcgatacccgagagcaagacaattggatcagatcagaaagcttgcgaaatgacaacaacaaaaataatagtactaatctgacaaacacagatgatgttgtgttagctagcttggaaaagcttcaaaaatcccaagacggcatgatgcaactgttgagttcacttcagccacaaacacactaagaagcatctgttgacagaagcggcttacctgaagagcgtgtgatgaatgaatatccaataaggcaagtacatactattgaacaaagaacttaagcaacacctgataatgttcgaggaatcgaaacttctgagattgctgaaagggtttgtgaagaagcccaatcttctttcgattttgtcacaaaagtcgagtttatcggtcttcttaaagctgaaagaggaaagtcatcataattggtaacttctatcgattttcacccaccttaccccttggaagttacattgaaaccttacccacaaggttatatgaatcccgtattctgaaagtacaatgagaaatttggcaatgctaaagaacatatcatccaattcattgatgatttgggagtctacgcacatgattttgaactaaggatctgagagttttcaaaatctttcactgattacactcactcttggtacgcaagcttgacttcagaaagtataaggagttgggacgatatggtctctcaattctgcgccaaattcttcatgattgaagacaaatggagcatagttgacttgttaggagaaagacaaagctttggagaaaggcttgttaattatgttcaaaagttttgagaaaaagctctcgattgtgctgaaaccatggctgaaaaagatctagtcaaaacttgtatcaaaggtgtgcttgatgaatatcgcctacatatcgaaaaccatgctatatataattttgtagagcctatagctaaatcaaggaataatgaaggcattgtttgtcagctggccaagccatccgaccaaaacgattaaaattggccatgaaaaggttcaaaacgtggtgttgacatagcacgggcacaagagaaacgaaacttttatgttcataaaaaaggccaacaaaatgataaaccgacggagtttctttgtaacaaagaaagaatctgtagtctactggaagcatggatcggggatggagaagtagtactaccatttgtcacaaaactacctactctagaagaaaagaaacacaaactctactgtcacttctaccaaaagattaaccacctaaccatgggatgctacactctaaggaagattttttatgagcgattagcaaaaggggaaattatcttggatcaaaatgaagtggaacaaatgtcgtttctccaacatcaaaacgaaggagccactatgacatcacataagagtttgtcctcatttcaagagggatatcacgaggcatacatatcaaggaaattatagaagaaccaccaaaaaacagacagcatgctagagctgttgttaaaaactaaattattttgtaacttctttgattgcttagaattcaagcaagatgcaagaactgaggctacagaagttttgcttaaaatttcccaacaacacgacctttcttgttatatggtagagcgcccaatgcttaatattgctaaaaaatttgaaggagcgattgtttcaccaatgctgacatacaaacttctctattccttcacaattgaccgttatacgtcgaggcaaaaatcaatggaagtgaaacgtgctttagtagataatagagcttcaataaatctcatgccagttgaaatatattctgctataaaagaggtaaaagggggattgatcctacaaccaatcatgctcactagatttgctgccaagtttgtacaaactatggggtatgtaattgttgaactagaggttagaccaatcagaggacccactcggttccatgtgatataagcagacacttcataccatctcttgttgggatgacagtggattcatatacatcattacatgccatcgacaatgcatcaatgtgtcaaggcacaca

SEQ ID NO: 315069 - DNA, 937 bp, Cannabis indica
ccatggttgagaagctgggactttcaatgcataaacatccacgtccttacaagttgccatagttgaatgatagtggtgaagtgagagttacctataagttttggtatctttctgaattggcaagtatgaggataaggtattgtgcgatgcggtccaaatttaagctggacaccttcttctaggaaggccatagcaatttgattagcaagtccaccacgagggcttcaccaataagtactcattcatgttccgtcaacgaacaatcacgctagctcctttgacaccaaaataagtctatgaagaccaagtgagattgaaaaatttgagtgataaaaataaattgagtgataaaaagaacttgagtgaacaacagaaagagagtccaaagataaatgagaatgagaaaaaagagaactaaggagagaaaataatcgaagcgtacaaaataatttttatgctagaaaaagttaaattacgtgatcttggcgtacaaaacaaccaatgattctgtttgtttacaaggaggctctttgaaacaataaccaacttattcttcgttgcctagtgttgttatttatattttgcaggaattcgaggatgtgtttcctgaggaggtaccacatggtgtgccacctgtttgagaaattcaacatcaaattaaattaattccagttgcttcaattccaaactgcccagcatatagaactaatcctgatgaaactaagggaatacaaaggcaagttgaaggattgatgaccaaagggcatgtgagagaaagcatgagcccttgtgttgttccagtaattctcgttcctaagaaggatggaacttggaggatgtgtgttgcttttgagccatcaacaacataatggtaaaatatcgaaatcccattcctcgtttagatgatatgttagatgagttgcatggttcttgtgtg

SEQ ID NO: 315070 - DNA, 635 bp, Cannabis indica
aaggacatgctgggtggttctggtgaagttgcttctcgcaaaattcagcgtttgccttcagatatttattgccagaagcgcctgtagcgactggagatatcttcctgtttggttctcactatgtgttccctaaccctagcttcatttagctctaatttggaggtgggttttgagggattgggttgatatgggatggccaactctataggaaactcaacctctaaaacttccggatgataaattcctaaaccagagtgggacattgctaccagcaaaaagcaatcccaatccctgcagagaattttatcaaaccagaaggtaatgagttggagatcttaaaacaacctacatatggcctgaatcctagtatgaacagttttaaccctaaaaaactacctaaaccagatgggatcataacgatacaaacgaataaagtaactgatccacactacgtaataaacgtgaaaaaaggaaagtaacttaccgtttgaagttagggcttggggcaatgcctgggaattctgtctgcaaaccttcaaacgaagcaaggattgcttggagaaaatgaagtcggagaaaactcgcaggaaaaaggtcaaggacaaggatggcatgcaagtctttggacgaattta

SEQ ID NO: 315071 - DNA, 1696 bp, Cannabis indica
taatttttttaaaatattttaataattcaaaatctaacacaaaatttaatccacaaaaatattcactgaataccaattcataatatatattttttttgggagaagtcccaaaaaagttaactttgatgcagattagttcctaaaattaaaaaatagcgacaatagttctcaagctcacgttttttataagtcagtcgatacccaatttaacaatcccgttaagtactggcaagaatgtcacgtgttgaagtattattggtccaaattttaattttaattaaaataattaaaaataaataatgaaaactttaatatattttttattttcttatttttttctccactgtttgtgtttctccttcttcttcatggggcacaaatccaacccatccatggccatggaaaacacaacaactaagaggcccaagaacatactgctcattggccacccgatctcctcaactagctgcctattttcctttttattattttcaatctctatgctcatcatcttctctctttttcccccttccaccatcattgatccaaaattcaaaaatagaggttggctcgtcgagcttcaaaaatgcccacattagagccatggcaaggtgaggcttcgacggcggggctggctacagacaagggccaaagctcacggtgacagagaaaattagcatatcggagcttgggctttcatgaatcaaagatggcggtggcttgggatctcgcgagtttcccttaactagtttttcaatttgggtttcatgaatcgaagctggatatggagacctggacgatggagtttcaggtgacctaaggcggttgcgatttatagatagatgatgtggtttcaccattaaatctgacaggagaacggtgtgtggggggggggggggcgttggaagttggagtgtggctggatgaagaagacgttgatggtgtggctggatgaagaggatgtcgatggtgtggctgggtgaagaagatgaagaagggaaaaaaaaagaaaaatatattttattactttaaaatatatatatttttagtttttttttattttaaattatttttaattaaaattaaaatttggaccaacaatactttaacacgtagcatttttgttagtacttaacggggctgttaaactgagtatcgacggacttacaaaaaatatgaccttaaggactattgtcgctatttttcaagattggggactaatttgcatcaaagtcaactttttggggactttgactgcacatttccttttttttttttgtaagggcccattcatatattttttttgaagaagaccaattcatatatatccgtctaaccgaaggacatgctttaccaaaccatgtgctgtataaagctataacgtcttcaaacaacaccacatcacattagaaaaataccttcctattattaactagttgtcttcagagcaaagcgaaactgaaaaaattacaacaccaaactaaaaaatacaattatattagaatggtaatcttcaaaataaaaataatttacaaatttagaaattaacacacacttcataacactagctctcaacattactaaaaaacttaaaaataaaatttttaagaataactagccaaaggtataccctttggctagtaacaacaaactagcaccctaatataaaaatgctgaaaaacaatatcaaacaaat

SEQ ID NO: 315072 - DNA, 1874 bp, Cannabis indica
tatgtttacaactcgactgactgaatcgtctaatgcgagataaaaatatacaaactgttgtcttgtgcctcgatgagaaaccatgtaacttcaggtgtacaagatgaggcactaaccccgttacatggaggagatataatgacaatggagacacttagcgaataatgtacgatatacaaactaagtataacagataggtgaaccaaagcgagagctagcgaggcgtccacctcgctgtaggaagccaagcacgcgaaaaagatcttctcgccaccagaaactgcagttgtcagatttaaagtaaaagcattatccaccttagaaagacatatgacgagctccaactcgctatcaagattacctctactctattcccagcgacaatatggcctacaatatatttgatacacgttcattttgacccagtaaaagtgggatattcacagttttgtgaaatttaaataaaaactgtatttgcttaacatgatctgtaatcagatcccatgatttcagggaataatcgttgtaaaaattacgataaactttgtaagttaactgcctactatgtgattataaatagtggcaggttggatcaaaaaagggcaggccctgaaaaactatcagaaatgtaataagattgactcgtggacaatgcagaattttaactgcaaaaccacgtaaaaaaatcccttgtgtttaaatctcttacttgattgctttcactttttctgtgtgaaattatcattgtttggctcaaatttttgttaacgaaaatctgcgttaacagaaaattttatggttaccaattcctaatatttctattcaaacaaaaattaataacttttcaaaattttcatgttatttttaaaaaaaaaaatatatatatatatatatataaatttttgattaaaaaaaaatatccaataacattaaatgtcaaaactaatatttttctaatcttataatttaatttaataaaatatatttcaaaaataacaaattttgaaaagtcgatatggttagcaaatttaaaattctagctaagattatttttaagttttattaatatattaatatcaaaataagatttttttttcaaattttaataataaaagaagtaatatctgatcttataattaatataaataaaaaaaacaaaaaataatcagaaatttaaaaattaaccataagctagtttgttgagaaaaataaatttttaaattcaaaagctactaatatctaaacaaattttaattaattaaaaaattattaaaaattaattttattctgataattagatttttatttgaaaaaatgtattttacacaaaactttaccaaaatatgaatttgtttcacagaaaaatgattttttaataaaaaaatatcagaaattgaagattggacacaggggtgtgcaacgccctacgcgcgtgtttgtgcgcaaatgagcgtggcaaaagggctgcaagcagcctcgtgtgaccaagaattcttggtgtgactgaggttctaataagccttgtccaagaaagctcagacaagtccctatctgaatctcggtcatgaccgagtgaccactaggccatccgcgcgtgccaaattttggatattttcttccaaactcaaaaactcataactaattcataaaaatctaaattaagttttgtaaaaagcctaatcttataaatttttcatctactttccaaaaaaaaatactttcaggacgaaactcaaaatattttcatcgtaaattgtgattttcataaaatcatcaaatatgttcataaagcaacatgaacacatccaaatcaacacaatcattgttttaaatccatatttcatgaatgttaatcattaccatggatctaatac

SEQ ID NO: 315073 - DNA, 952 bp, Cannabis indica
aaaaaaaaaaaaaaatctattcaattaatctcgaaatatattgtcattagtaaggccaagaaatttgaagtatctataattaaatttgcaactataaaactatagactaattttttttttctatgtaataacttgctagctttaattactaattaatgcaaaacaagaaaaaaaaaaacaagtgaaactaaaaatgaaaaggaaaaagagacatatcgtgatgaagaaatattaattaattagagttggtattagagattccaaccactaattaatgctatatatttacataaagttgatatattgtcaagtagtaatgggaaataatacattatatatatggttttaagtgtgatcacatcacatgtttttccttaacattactaaaagtaacacaagattgttaatggttccacaagttaaatattacttttttataaagttattacaacaatcatatgaattaatgttattgttagtaatgaattgaataatagccacatatatatttatgggttattatattatcaataaatgcaagcatcacacataataaaaaaatccaatacataccaaaatgaaaaagttagttcctatcttccttattactaaatataaattttataaaaaaaaaataaaaataacaatacatagaaaaattcttaggtgagaccgtgaaaacaataattttactctttttatattgatattttttgttttttgatttatgagaaattattaactaaatttgtttatactttatatgatagtatatattatagctaatttagagtatcaaaaataagatttaaatattcaataattgtacgtatttatattattttaattatgctagtacaacaaactattttgaaatttattttcaatattgtaaaatattcaaaatttattaaaaatgaactgtctattacaactatatataatatacaac

SEQ ID NO: 315074 - DNA, 982 bp, Cannabis indica
tatttatttccttttaacttttttttttaaatacaaattagtctataattctaagctattagaatatataatataatatgtatgtatatcttgactaattataattaatgttgattaattagtattttgggtgttatgtttttttttaaataatacaaaattgtaataatgaatgtaatgtggctttgtttaatagaaagtcaatataaacaaatttttctacacaattgttttatttattgtctctatggatgttgatcaatgatcattgtgtttttacaagtagaattgcacaaaaaggattaaagtgatcaccaagagaagtgatgagcttaattaaaccaaattaagcaaacatataaatacacatcaactttcaaaatggctgagcatctcttgtggtgcaaactaaattgctttattataaaaccataataatttatataaactccttaatttaagagcctcctcagaaaatctctagtcttcctgaaatagtcccaataaataaataaataaataaataaataagttgggtcttttaaaaagtttaataattaattaataataatacttaaaaaaatgtttacaagaatattggaacttaccagggcttccccaccagagacacaagcaggccttcttggtgggagttgttgatgaggtgttctctgcaaatacatgtaaaattaattcagtaataatattttctacatttatataaattttttgaagtaatgtatgtaagaatattttttatttaaggaaatctatttctatataaagaaataaatttctatttaaggaaataaataaataattgattttctgataaatgaatattttatattcattgaatctggacaaaatcaattacgtaatattctatatatggtcagatttctatattcattacctgatttgatttcctgaattaattgtcaaaatattctgacaattaatgtggcgcagatactgatgg

SEQ ID NO: 315075 - DNA, 951 bp, Cannabis indica
aaccatgcaacataaaatgttatttctggtctttattaataagtaaatctgattatatgaaatgagttttatttagggcataaacccaacactaagctcgcataatcactgggtgtttgttgaagaatatgtatccccctgataggacttgatctcgatctgcaacacttctaaatcgcacaagaaaaacaccataagaaatcattcccactttgtcaattttatctttccaaacccgcctcacaaatctatccaaaattgacattgggagatttgctccaagaacacaacagacaattgagggagtccaaaagtctacctcttcttggatatcctcctttgtgattttgactctttgtttggatggagaaccagcaaatttggagtccaaattacgaattatattcccaaatctaaggataggaggtaaaacttccttacctcgagcaactgcagcaggaaattaagtttgagcttctctgtattgtttagcttccatgaaatgtgcaaattccatacgaatctcttccctcctaatgctgtcatttgtgtctagagcaggtgaaagtacatgctccttctcaacattcatcgacacttccgtatcgtcttcctctttagagaagagaatgggttcaattccaagaacttcatccatggaattggtcttcttcacatccatggttgattcagggccgcgtttcttcttcttcttcacaagagatttaggtttgctctgtttcgccctcgtcttcgccatggcaccaactcaaggaattgagagaaagctagagagagaaaacccttttagtatctgtaacgccccaatattttgtcttattttacaaaatactaattttgatgcattagttaaaaagattcaaagctgtttgaaaatacacagtgggttttagaataaatatgcaaaaaggtgaatgatcattcatatta

SEQ ID NO: 315076 - DNA, 1060 bp, Cannabis indica
gactacttttgtgacttaatttttctagaacaaagaaaaaaatggtttctgagaatcggattgttgaaatatgcattatgttttattctttaaattaattttaatagattatgtattttatgtatgatatatttaattttcacacgagtttgcactgaaaatttttaccccgtggctcacttgattattttagtttaaaaccctaactagttccattaaaagtgtctaattcataatattaaataaattaacattattactcatttttttctcttacaaaatactaggctgggtttctaaaacatgtaactacttactttagtacctctccaatatatgccaaattaatacataatttatttatatatatatatatatttctatattctatatattatattacatgagagattgagaataatgaaccaacaattaagaattaatttaactagaactattaggttgtgtttggttgaaaggattgaaaacacatataattagaaatagagtgaaaattattaaaataaaaaaaaattgataaaaatatatattctattagaatatttttttcttttattttaaaatagtcatttctattaaggtagtagtgaaggaaatcaatattggaataaaattgatttctattctaattctattctattgatcattacctcaaccaaatgtcaccttaatgcatatatagtttatagatgagactgcacatatatatatatatgtataatatatataacaatgagctctataatttggctacatacatgcatatatacatgacatgtatgtaatattaataataaaatcaatttaaataacacgttcttgacatgccctatccctttcctcatactatttaaattaattctatctaactacgtaacaacaattatataatataatgtattttatatatacataacatacgcaatcgcaccacttattctccttcattttttttttatatcaaatttttgcactattcacccacgcccttgtacaatataacactcctagaattgtatttgtttatttatatatatat

SEQ ID NO: 315077 - DNA, 1346 bp, Cannabis indica
gattattaaatttttattttatttaaatatatcaataatggcacgtagatatattgatttaatttgacacttaatgatcaagtacttacagaaattatagaagtataatttaagtattattaccgtaaaaatttaaatttaaatatttatctataactgaggagagttaaattattcattttttaaaccttttaatttttgataatcttattttgatttttttagtatttattaaaaatttattataattagaaggattacactcatacaaagttatattagtcaataaccactaaacttaatttaaaaaccgtatttttgtaatttagagttttattttgataaatattgtatgttaactttctaaattatgtataattgtttcaaaatagtcctctaaattctatatctagaaaacaatcattagaaaaaaaaatgttttaccgtttaaacaggccattgtgaatcgatttgtaaaatatgagggctaaatatatagtattttattaaaaaaaaaaaactataaagtccaaataggtatttatataaggtctgaaatattagtatatatttgatataagattttttttttctgctaaaactttgtacaagatttaagtagttgtaatatgaacttgtggagcacaaattatgctatataaatattttatattaattggaatttcatattaatattttttacaaaagttatgtaattcaggtcatatatttagcttagcttgtaatttagttcactttacaggttataaaatattcctctttaattttataataattaattaatgtcaatcttctttttgaataataattctttgcttcttaaatgggttaagggtttatttgtaggagaacttgcttgcaagatactgttcattttgtttcattatagtacatttgggaggcaagaaaattaaaggaaagaatcaatactattactcttcttgtatatataaatgggaataaataaagaagaatgagagtcatcaaaagagaataattggaaacttttgtctttatacctatatccaccattttattacgagtatatacataaaagataagtgtacgtaatccataattttactttaacacttggtaggagggggagaagggtggaaggagatggagggagagtgatggaatgagagattaaattatttgtttggcaagaaggagagaaagaggacgatattctccctctaaaccttcaaaatttaatccttccaaatttagaagaatgtagaaaaagacaaaatacattttacaaaatacaataactacccttaaaataataaaattttgtttttaaaaggacaattttgtaa

SEQ ID NO: 315078 - DNA, 1525 bp, Cannabis indica
ttaattcttgtacaactgtgcaaatagtcatttaaagttttttagcttttttctttcctcaaaaaaaaaaaaaaaaaaaaaaaaaaaagtttttttgctattttctttatgtctacataattgagaaattggcataataacttgagagggttcaaatatttttttcaggcgaaaaagagacttcaaatattattgtcttttaatgtcctcatatagttgaaggtacagcacgagtaatttgacgtttgaatactgtttttatgaaatttgaattaactttatatttagagatcgtttagtcagcatgatttgactggattgaattattagaaataatatttaatattaggtattctatttaataaatattttgaaattaaaataatgggatatgattttgtaccgttattggactttcacggattgtaatccgtgatgtacggctccgtgaagtacgacaaccgttagatgacggagttatttgatctgacggctgagattgatctaggggtaattagggttaaaaagtaaaaacgtaccttgacactcatttaatgtaccctgcgacctatctaatgtaccacgaaatacattccgtgaaagtacatcacgggacaaaatcatatcccttaaaataatatgtaataaaaagttttgatatatatttcttccggactattgagattattaggtttttgcttcttaaactttacatgtactgaatcatgtctccaaaactgttcaaggcgttaaaaatttctttcggactattgagattattggattcaaggacttttacctaattccgttcaattttactaatgtcttgattctctatgtacttaattatatcccctgaactttgatattaactaaatcatgtcctctgaactttgatatgtaacgaatcgtgtccctaaatttttagttatgttagtcttctgttagtaaaattagaccaatgtttttaaatttaacaatctcaattgttcaggagaaatttttaacgacttgaaaagttcagatgatttggtgtcaaagtttggaggtaaaaatcttaattagcgatatttttatggataactaagaaatcgtgtagttactaaaatactatgacacataaggtttttatgatttggtttatgattaataatttagctatgagctaagctattgagaattaaatggttaaaaaaccttatgtaatagtatttcaattttaaatgcattacttaagctaaattatcattgttcattcaagtgttcttcatgattattaattgtcattgtttggtcaataataaaaatttattaagctagatttaatatttgaaattgtggtatttttaacataagtctataagtgccaagtggcgctctcgggttttgtcattttaaatgacagttttgttagttagttttggagggaattactttgtcaaagctatatatataattgcccctttccattatttagtgagctgaattttgatcatcactgttagagatagtaatgactaactgt

SEQ ID NO: 315079 - DNA, 2007 bp, Cannabis indica
ataataataaaaacaatacacttttgttggcgacaattaataattgtccacaaatatttttcccttatagcaattaaatattattttaaattgttgattgttgcaattgagtgacgtgaaaaacatatattgaaattgtgtcaatcaatttattcactatttacaaggtatttcggttattatcaaaacgtattttaaacccatttataaaaaaaacattttaaactttttacaaaataaagagtctaaaaattaatttttaaaatatgttcaaaggataattatgaaaaacataatattgtatttttatttaactgacgatattttatttattttaaaattaaatttgatcgatgcaaattgttttaaaatgcaaaaaaaatatagctactgaaattattaaggatgagaaagatttaatgagtatttatctaaaaaaaagatgaaaaaagtataatgaattggtgaattttgagctaaaaaattgagcatgtattctctctagccgtttagggatatacaatagtgtcattttttttgtggcgccattcctcgttcttctatccaagcaaggtttgtggatgtaccgatggcgatgatgaatgacagtgatctcgaggccttctacaattcgatggccctcagtgatgaggatgatgataagtattgtgatgttacaaatcaaatgcttctcgatgaagggactaaggtcgtggctaagatgattgttagacgagttatttcgacgtgtttggttgattgtgatggtctgatttattcgacaaatatcttttggaaaatttagggagcattcacggtaaaattgagaggtaagaatatattttcagtttgacttgattattgatagaaaaaagattttggaaggtggcccttaggtctttgaccattttctccttgctttgaaagagtcaaacaagttgatagacccaaatgagatggtttttgattttgcacccttttgaattcaaatccataagattcccctgcactgtatgactaaagtatggggatttgagtttggaaaatcggctggggaggtgcttgaagtactttttgggccatctggcttgtgtcatggccctttcatcaaggtttgagttagtgtggatattcgcaagcatctgactcgagtgattaagagaaggctcatgcctgataagcctgtgatccaaatattgttgtgttacgagcgtctcccaaatctttattatttttgtagaatactcaaccatcctattaaagaatgcttgttgaagccaaaaaaaattgtagttgttaaagaccagttgaactatggagactaaatatgtgtttcatacgttgaaaacataatgggtcaattgctaaaaagtctcgtggctgatataatggtggatcgtcagttgttgtgcatgatggtaggacgaggttggtaaagggtctttgtctaattctgtgggtagaactactgataggtcaaaagtggtggaggtggaggtggaggtggtggggccgacggtggttgatcacaagggtaaggcagtgtgttataaggaactagttaaatggcacccaatttttggggcatttaatggtgatgacagtaattattttgctattttggaaaattttgaatcatgatttcattgtaataaggtgagtgatgatgattcatgtaaagaccgcatatgattaataccttgtattattaaataattaaggtttatgtatgagattaattaataattatgaaatataaattttagaaatatatttaatattatatatgttattatgctatttaatgtaaattatccaatttttgtgattgtgttcgggagctatggaaagcgacgttgggcctttagagagtcgtattttatatgttatagaataatatcggagtatcattgttaggttttagcgatgttggaattttcggggtttggaaagtgactaaattacccttgggagtttttatttttgttaacttggtcaaaggttaaa

SEQ ID NO: 315080 - DNA, 1387 bp, Cannabis indica
tgcgattagtcttgtcactgtgatatggttttgagtattttagtcttatctctgtgacatagttagcatttttatcttgtctttgtgacatggttttgagtgttttagtcttgtttgtgtgacatgattttgttttgtttcgttgttggtttttctttgttcttcgatggctccctatcaaatcattgttagtagttgagaataacaagttctctgattgaaggggttgttagtagtgcaattatgtaccttacacaatagttgagtgttcaagctacgaggttgaatgaacctactgcaatagtttatattgtcttctgagcagtggatgagacataatatatgtgttcttaaggttaattgtgattttgcaatctttttcatctgattttattttaattgttttgtcaaacgatttgggaattaggtgactgattatttcactcgtttttctaattctaatcctggtcgtatctccatcaaaaagatgtcctgattggattgtatgctattattttaattgattactattaataaaattctactatttatttttaaaaaaaaaagtaaatactattttgaaccttgtgttttgcaaaaattaccaattgaaccatctgttttgtaaaatgacaaaatggaccctgtatttttcaaaatggtaaaaataggaccctgagcttaatttttgacaaatttttttaatataactaatttgaatacaattcctaatacgaacagatacagaaaatataaacagttttgtcatagcacttttagatcggattataattaaattttattttgacaaaaaatcaatttatggtcctatttgtatactattttaaaaaatacatggtctattttatcatttaacaaaatagagggtccaattagtaacttttgcaaaataaaagattcaaaatagtatttaccaaaaaaaaaaaataccattagaattgttgaaaaactagtcaacattagaaatgtgtatcaatgcatactatactaattattaccttaacccaaaatagcgtggagtaaaaacaatctgcataacttttttatattattttttatacagatctccaaattctttatttcttgaataacaaaaaacataattttcctacataaagtcatgaatgcgatacatgactttagtttgagtattagtatacgatatttatataaatgcacataaaatttaatttatattatacactacgtaacgtaaaaacaaatgtctattattgatccaagatgtatattataaatttcatgatagtttattaattgtccccttcttagttggcaaaagtgtgtctatataaccgaattcttggcttatgagaaattcatgggtgactttttatttatataaaaa

SEQ ID NO: 315081 - DNA, 2605 bp, Cannabis indica
gtgtctttaacaaccatcatgtctcgctcatgtcttgcctacgtttcctcctgcgtggtgaggttgatggctcgctttgcacatctgatgtcgcatggcttcacatcaatgcatgagtcaacagtttgtatatctttatctcgcgtaagaccttacagtcagcaagttgtaaatatactctgctaattatgcatttaacgagttattccattttctaacataattgcatttgctgattcgtattcttcctaatttgacacgtgtcctcctctgaagtgctagctgaatttcgggtataacactatttctgaagaattggtataaaaatttgaaactctcttatagaaattaattttacacttcaaaacatccaacttacataattgccattcagtcacgtacgaaatatctcaccgagaccacaagtagtctggtcgcagcgagagctttgagtcaaaaaccacgattctgtaaacctcctttgttgctattatcccaaatttagttcgagtgatgtggaacatttcgtcgagtgacacgtatcaccacatcaaggttttggcataggaaaaagcctcgcaaaatgtccgcccaagatatatactcagtcggatgtaataacagaaaaccaagtatattatgctgcataagataagcatcagctgacttggtggaaagaagcggtctgaacctcatactagccgaccaaggggaaaatgcgtgacaaaagacatttaatatagttttctcataatttaggaatgttatttatttcataattttgtggattgacaacttttaggaaaccaatatctattgatcacctctcctataaatagtggagcgattccattataaaaggatctgaaatcatttgtttgagagcgttattacgctgcttatttcctctgtaaagcttttaagaaagaccaaatcttttttgcttctctactcacaattaaaatacaacaaaaaggggagtaagggattacaaaaatcaattaataagcgataagaaatgtaattacgacagagcaaaaatcagtaaacaataaagagcagaaggttttaaaaaggttcgacccctttagttcggtaacagcctactccccttagattgtattgacttgagaacaaagaacacattgtttcctctctcaacggtctcacaatgaaatctctgagtgttttctcttagatctctctctaaaggaattctttcgataacctttacagtgaagatagatcactacttatagggttaaatgcataagggaaggtttccttttttacttacaatatctataattggtaggaacatacattacatatttagaatacatgaaatgggggattgagatagcttgccgtatccctttgatacaatctcatgattgcagggattgcctttgtgctttgtatccctttgatacaatctcatgattgcagggattgcctttgtgcttgagcttcacaatatcaactctgaagtagctaagtcttgatatgtaggttaaagaactaacttcacccttggctcaaattatttgtcctttactctgctcggtcaagcagactttgtgcgtgcagatcccttgcttgaagtctgttcggaacatttctccaaccaagtgtaaagagtaacagacacgtgtcgctagtatatgctgccacatcatggtgcgaaaaatgggataacaaacctctataacatatcgtgttcttagttttactacaataaaaaacatttacgatagcactaaaaaatgtaattaaatgtattttataacattttatcaactgttaagacagctcatgtaattaaaagtattgacatttaattatatttttcacatgttattaaatggcatattaaaatattattttagtgttatgtattagaaatagttaacattaatttaatgttatggttcattatgttatatttgttaataaaattatcaaaatgtaattgtataggttttaattatattattattatgttataaataaagaaatattacattttaatgttgttaaaatttcttaataataactattttttaatgttattattcctcttatgttatattcatttaataatatttttaaaatgtaatcgtataatttttaattacatcattattatgttatattaaaaaatattacattttaatattgttataatttcttaataataacactttgttaatgtttaccgagttttttggtaacaaaatatttttagagcttaagaaactaataatggagtaaatagtaaaataacaaataagagatttttacgtggtcaggcgttaattatttttagtctatgagtccattttataaggctcattggctggtaactgtttatacaaatagagatacaatggacaagaactcatttccaccgtgttcctctagaaaaagaggaagcttagtaggaatattttggagttgatagtagggttacaaaagtgtgttttctcaggatgatcgagaatgagtcttctttttcttgaaagagaaattcctcttccctcgtgctttgtctggggtatttataggttcacttctatgcatgggattgttgggttttatgccc

SEQ ID NO: 315082 - DNA, 1442 bp, Cannabis indica
actacattttatcaatttaaataaaatatattttttatgtacatttttataaaattaattcttttttatagaagtagtctccatagtgtttgtcaaaaccaatgaaattaaataatagatcttgtcaattaattttacacgtggcagattaataatttgcatgtattaatttgtttgagcacttttcccaagtcgagcgtgtctttcacttgctcgcctaatcactatcaattttattttttttgtctctactgtatttttgtaaataagaaattttaaaaatagtattttagtaaacattaaatcctataaatatctattttttattatagtagtataaaagtttattttaagtaattttagcttaaaatagaaaaaatcccaaattaattttctaatttaattttattactgttattataaatattttttggtaactttttagattaaactaattacagattaacacgtgaaattctaaaaatatttaacaaatctattaaaaagagtacttataattaagaaaatatgaaatagagttttgggtatttttactgttatttttaagttttgagtatttaatagcaacaaattaaataaaatgagcatttatgtagtaaatttttctaaaaaaatattggagctatttgagcatttttacggaattctacatagaaattttattgcaactagcattgcaatcttattaattataataaaaagtcgtacagaaactcctattgcactagcgttgcaatcattttagaaatccaaatcgtatatttggaaaaaaaaaaaaaggttaaaaaatagtatatggaataatttctcaaaaatattgtagtaaaaaagaatatcaaacaaagatgaacatttttattttaattattattattctattagctggaatataataaataaaaaagatgttgcttaagtaattaataagcaacacaatacaaacaattaaacacacattattaattatgaaacaaataacttactgtgacaaaatagatattattaaatgcaatttgaaatcataattaatattttgctactcaagttcccatagcttaaaagatccacccacaaaatcgtagtatccacctctaagtgttattgttttctcttcaactcctctttgaacaaagggataagaatgaagattctttaaagatatattcaccgcttcctgcacataaaataataaataataatattataatcatatatttatatattcatctataacttatataaagagcattgctattgggcactagtggtgcctagcaccttctaaatgtgtcaacttgcaattggctagcgatactctataaaaattattatattaaactatatgggacccgatacttaattgcaccaatagcgatattgacacgtaggagggtgctaggcaccagtagtgccctttagca

SEQ ID NO: 315083 - DNA, 3472 bp, Cannabis indica
atgtggaaaagagaacggtatggttggatccgtcttggtgccggaaagattgaaggtggtagccgtctgagtcaaggtcggagttgaagatgagaaaggcggaagcatggttgatgtcgaggccgacgccggagcggagctggagatgaccagtgctgtggagatttgttgaatcggtccagaacttggaagaacaccatctggaatggagtcgagtacagtggtggtggaaggagcaaataatgacgaatcgacattgatattctccgagatggagttagcaagtgatgaggaactgaacggagtatcttcatgaacagcaatggaggaaggagcttcaccatgggcgacggttggagatggcagctgaagagatggaggctcactgacggaagcggcggcgacagttgagtttctagttcttggagccatggaagagaagagaagatggagaaggggcagctagggttttatggaagaagaaggtatatcactgataccatattagaacatttgagagggaaatctctctgttcgagatgagaggaaaaagtctgaaaatgacttattattttattaagtgtattctgtacaaaataagactatatatataaggtagacaacccaataaacaagtgggcttaagtcattgggcctaaatatctaataaatagagactatatttgcaagcaagttctgaaaaatcataataaaaaacccacactaactcttatcttttccaaaaatgtgactaagaacttcaaaaactaaataaaaaatgaaaagaagatgatgaagaaaaactgaacaagaaaaaaattaaaaattatatgttaatggagaaaaatagagagactttgaggaagctaagagtgaaaaaaaaaaagaagaagatgatgaataggaagagagaataatgggaaagtggaattaaagtgaaaggaatgagtattaaatatatagggtatcacattttttatcatcaattttaattaaaaaaaatttaaaaaaataaaaatgtgacaacgtaagtcaaatcacacttttataacttaaaatataatacaattttaattaaaaaattaattaaaaaaaaatatgtcacttttgtgatagtgacaacattacatattcaattttttgttaatttatatatataaatatatatatataatgtgagtggattgtagctcaaaattaaaaaaaaataataataaaatatagtatgaaaaaataatacacagtataagaaaaaatattagaaaagtaatatttttcttacaacaataaaattaaaagaagttttgctaggggcatgtctttttggcctaatatcaatatttttggcatataaataaattataattcaaataattttgtaagattttgtaaatagtagcattttaaacctcctagaagtttgacattttgtaattgaattcaaaacactaaatttcatgtgcgtatataggaggcttctaaacaattttaggcttctaaacaatttttttttatatatatttatatatatagtttacaatataaaaaaattatatggccgaacatattgtaattattgagatatatttataaatttggaagatattttaaataatttccaatacttttttttttttgaaaaacactgttattatagaattcaaaacaacaacagagtagattggaaaaggaattttccccaatcaaatacaatatcattatccaatcgaagagcaaatctagctaagccatgagcagcgttattagcttctcgcttaacatgagaaaccattactctaggaaaagaggataacaaaacagaattatcatctatcaaatcatgcaaatgagatacacagccaatagaagaaactttgttaattacattaaccacaagaagggaatctgtttcgacgtagtggatagccaactggtttgaaagagcccattttaaactgtagataatgacattagcttccatctctttagtaaagtaacaaccccttagatgttttgagaaagttgcaatcacatctccaaaataatctcaaacaacagctcatataccaatgactgatccttccacatcatatgcaacatcaatattaattttgtaagagcccctgccgatggtagccatttaatttgtggcgtggggctattgtcaactgccattggtgaagcagatgtgcagcacctagttttttcctctaatgcattcgaaagaagtatcttagctctctgaaattgatcactgtaggcgtctgtgaatgtacaaataataggagctggtttgggtttagttccatgtacttccttgtttctttccatccatatgcatcattatgagcctctactaaatatgagtagatatcacggccattaaggttctgatattccaaaaacaaaacaaaaaatgagttagcttccaaacagcatcagctctagtgtaccgaaataaagcatggccaaccgattccccccctccccaccgccggtacacaaagagcattgatgactctccaagcaaagattttaatttttttaagcacatttagagaccgaaatctgtcccacactgtggagagttcgaaggtgaagaagtatctttccattccaagctttcggctaagtggtatcccaatttagtattgtatatcccagaatctgaatggtgccaaaatagcttatcttctctaggataagaactgagaggaatagccataattctgtctatatcgatctgtccaaaatgactctttagcagactaatgtcccattgtctttttggtttaatgtagtgttctacagtgaagtcacgatcaccagaaaaagaaaatggtttcaaagtcgtattacctgacagctaaggatcaatagcacatcgaactttatttccgtagccaattttctagtgaaggcctttagccaacaactcttttccatcgtaaatactttgccaagtaaaagatggcaagacacccttagtagcagtaaggaaatctccattcttgaagtatctagctttgagaactctagccaatagagaattgggatcttcaagaatgcgtcaaacttgctttgcaaggagtgcttggttgttttgaactatacttaattcatacacgtttgaaataacttgtgttgaagcaagattttgacaccaccataaatgatttagaaattcacgaaaaaattgtaacactaatatttagcttcatataaaaattgccaaaacatatacttatactgctagtgagaaaatgcatactcatattatcatatatttataactgtttattttatatgccttaattaaaatctcaatttattgtacatattttattatcaataaaaaaaacaaattccacttttaatggtcaatcacattgttcacatgtctaattttattagggctatttttaaaaatatggaaaaaaaaataaaagtttgatatatatggcataaaaat

SEQ ID NO: 315084 - DNA, 2337 bp, Cannabis indica
caacatattttttttttgaaacgaaatatcaacttcattgaattaaaagcattctgaatacaagagagccttcaaatcaggccagacattacactcaaaaatacttcaaccagaggaaaatcgagcatgcctagcaatagcatgagcaagtcaatttgctgaccgtttaataaaacgtaacttaacatcaattagagacaacaataactcatgacagtcttcagtgattaaaccaaaggtggagaacatattttggtcacttcgaatagcctgaacaacaaggaggctatcggtctctagttcaattttttgcaaaacaacatattgggtgatataatagttacacattatttattaattaataaagagacatttttatttcaatgactggtatattgttaaaggattaacaagtttattttctacaatttttagggggtgtgttgaaaaatatcacttttattaatcaatttatcaaatttacctctaattttatgaaacatacctatttttatatgtattgtacccaaaataccgtgacatgagagagtcacatggagagtatcttgaagtgacagagacaaaattggtacaatgtttaaaaaaagaggtaaaaatgatagactttaaaaaagagggtaaaaataaaataagacaatataaaaagggtatagagtataatttcctcaatttttggaggtatttttgatttatttacgaaagatgaccaatacccaatatgtagattaattatgtatatttagatgaataaataatttattttactaaatgattataatttttgggtaaatattattttggatcctgtgttttataaaagttaccaattagatcatctgttttgttaaatgacaaaatagacattgtattttctaaaatagtaaaaataggacactaaatttaatttttgacaaatttttttttaaaatatgaccaacttgaaaataattactaacagaacagatacagaaaatgtaaataattttatcataatactagggttcgtttgttacgtcgtattgtattgtattgtacatgttggattgtgttgtattgtattgtattgtattgtattagtattatttaatacaacacaatgtttggatttgacttgtattaattgattgtgtaaagttataatatatttttaatacactcgatcccaatatcaactacgggtccggggtctggggtccggggtccggggttcggagtctgggtttgggtttgggtctcgggtctcgggttcgggttcgggtcctgagttcggtttggggtcggagattggtgttaaaccgaaatcttttgtaaatattataatacaagctaatacagagcatttattatgtattaaatgatactacatagtattaaaaatttagtcgtaataattaatacaatacattgttttatcaaaacataatattatttattatttaatacaaaatgactcttatacggcgtaccaaattagcactttaattgtatagtgttgtaagctgtttgatatttttttattttacttaatgatattagttattgtttgaaaataataataataataataataataataataataaagagcatacatgtatatatacacaacacagactgcggccaaaatcaacatataatagaagtactttacctccttcatataattgatggtcaactaagatttaggattatgtactgtttaattataatatacatatagttgtatgtaaaagaagaacgtacagatcatctgtattcaattaattaaggctcattatatataaatgaataaaagcatattcccaatacaacctactcattaattagtatgtatataatatatgtcacatgtacagcaattagcaagatatttggaggaacacacaccattttctatatagtttgattcttagttattaactactaataattataagctaggaagaatccgaatccaaatcaaattatatattcaaagatataattaattaatttataataaaccatttcctatgctatgcgtatggggataatcaaacaatggaatatatagaaaattcagatgaaagaagaaaataattaaagattccaccacaccacgtgttttgtcagggtctgactgaaactctagaaattagagtcaaaatcaaaatggctaatattcttcttacttaaatcaaatgactagtctttgttgagtatatatataatatatattacttaaataaataccaatacaaaaatcgtcaacgccatcacttccacgataccttccttttagtctctcgaaatgtcttattttatgatgtatttgct

SEQ ID NO: 315085 - DNA, 891 bp, Cannabis indica
gttgtacttatttaaaatattttaccaatttttttttttttaaaaattaatgcgctgaaaataaggttcaaaagtctattgcactcgtacattttttattttatacacgtgtgaaataaatattttgaacactgcttaattattatattgtaaattattcttaatttctcaaaaatttacaggatgtcttaaataattatgacatacatgaccataaaaaaattgcactactcttggatgtcgaaacagtaggggatgcatcaatgtaccatttttagggggttcaccatggaggcttccaaaactatttaattgcttatatatatatattatagggtacttttacaatacacccccaaaagaagtgaactaatacatcttctactgctttggcatctacggattttttagtttaatttattttcatggtcatgtacatatagttatttaagacatcttgcaaaattttgagaaattcaaaataatatgtatgaatcgaactttttgacatagcacgaaactgataggagcataggaggcatgatcacgactaggcgcaaaataatatagacttggacatgatattatccaatttgttgttaggattttcttcatttttattgtaaacgacttggttggcctattcttgattattttgctctatcagcattattttcattaggggtatttataaaattttataaaccgtctaatttgccaaaactaagccgagataacccgacgaaaatataacccacctaatctttatattgggcgggttgaaaataatactaatccgtccaatcaacccgaactaacccgaccaacccaataaagaaggtttttttttttttttttattatatatatttatatatcatataatttattt

SEQ ID NO: 315086 - DNA, 1522 bp, Cannabis indica
gatatagttttatggaactccataatgataggatgttcccacaaaaaaggtgtagaagtacttaaattttttggcttaatgcaagaaacaaatattaagccagatcatgtcaccttccaagccgttttaactgcttgtttgcatgaagatctagttgaattgggtagtcaatattttcattcaatgagcaccaactatggtatcataccacgacttgagcactatgagattatgattgaacttttcagtcgctccaatcaaatggatgagcttgatgtttttgtaaaagagatgccatttgaacccacaattccaatgctaacaagaatgttagatgcttgtaggaaacatgggtgcatgaggttgggaaattgggctgcgaaacaactagctgaaatgaatccgtcgagtgaacttcagttttagataaaacagtggtgtgttgttagacaattatcatgatagtacattgttcagaagagtgagattttataacgaggaattagtacagttgacttgcattttggggtctaaaatctgtcctgattttataagtgctagtatttgtgagcttaatgaatgacaatgcgtctcaagaaactcaaatactgccaacaccgatatgcaactaactgtacaggacatatggccaagcatgacgagtttgcttaagaccgaaattctacccccgctcgaactccataactaaactcaagtcattgctcattcccgctcatctttgcgagtcctcaaatgagtctattgcaagtcaaataaaagtgagcatgccacaaaaaatatcaggtcagaatatattgtattttccaaacgcatctctcataacgattttgctatctttacatgaattcctctttttatagatttaatgtacattgaaaactgagtgttgcgtattaagctacaaggccattatctaaatgtgactacaataaagcttgtctaatgtaaaatttgataccatgttccatcgaaagtaagattaaagagaaacgaacgatttatattctctatttgattcttaaaattattgacgttaagtttgatagaatgtaataagaataggaataggcactataatcaaaatggtcagatgtgaaattgatattttatttcttttttaaattacttgtagaattaaaaaaatgcttccagtagagaatgattggaaacttgtttgtattaaataatgaaattatattccattagaattatcatccctttaattgattagcaaaccaaattctaggatgctgaatgaccattgttcgtggataattattccattccaaaatcccttccagccttccaaagatgcattccgttttgagcattattttcctacacatatatcctttcttatgaacatgaaattagtggaatatagaagaataagtctgttgtcgagtgaatttcgcaacaccaaaatatattatttaattaatatagaaagagaaatttcagagaagtgacaagtgcgagtattcgacctagaatggcgagt

SEQ ID NO: 315087 - DNA, 1311 bp, Cannabis indica
gactttttaccaacgaaatgtcctcattgatgagtaatactaacgaaaatggggggtttttaccaacgaaatttgtcctcattaatactcatttttcttgtagtgtgccgtgtgaacattgacttgatacttaacagtcagatcatacaaacagaagttcgagatatataacttatgtattattacggtcaaaaattaaatttaggtatttatttatagtcggaagttaaatttaagtatttatgctgtaaattattttttaaaaatatttgaataactgaattgataactaatttttttaaaaaaatttattatttatattctatcttcatagaataatatttatttaaaaatatatttttttattaattattttattagggtttatcacatttctttttatatgtaaatatgtgtatattaatattaaaaaagataaaatttttgtgatgtattataaaaaaattaatatatgatataaagaaaataaaattttagtgatatattttgaaattataaattatagaaactaataagaatgttatgagcattgctaataaatattagtggtgtccaacgtcattagaaaataacattgtacaaggggcaaataattgtcaaattaaaatacataaatttgatattaaattatactaataataataagatacttttaattagtgtttagttctctttaacatatttctttttaaatagggtgtgtgtttgaaagtaactgtataattattagttactgtaatttttaccttagtaatagacatcacagtaaatatactgtatttaaatatcaattagtaattgcatatgaatttttattttcatgtttggcaaataaatgtggcctgtaatgacttagtttaataatattaatcagctaaaaataaattactttgaattacactcacttcgagttacatagtagtttttcacacttctctagtgttattcatattttggaagtgttattagggagtgagatttgaaaaaataaattattgtggcgtatcgtaaatacttaagtttaacttttgggtgcagataaataccgaaatttattttttttgtggtaataatacataagttatatttcttgaatttcggtaagtacctgaccgttaattgtcaagtcattatttaggtgtcattttcttattaatcttcttctgtaggtatattaattttaaataaaaacaaaaatttaatgacctagactaatcaatgattatcacgtggtcattgacttgacacttaaagtaaacgattataattacggaagttttaaaaatataa

SEQ ID NO: 315088 - DNA, 672 bp, Cannabis indica
atatatatatatataatttcttaactatattaaaaagaaaaaaaatctaattcttgtagccatttttacaaacactttgagtgcaactaaatgattccgctcagtgcacaactaaattatttctcttttgttttgtctcaggaaagatttgagaggagactctcgatgcttgagtgttgatttgtaattatttttcaaatccacaaaaacatttgttcaattcataattgaaatatacaaatttaagttacaaacaaaacttttataaaatctaacctgaaaattgagttaaaataaacattagaaagctcatcataaaactcatcattagaaaacagaacaaacaacatttacaccagaaagacaagcaaaaaacatgaagatgaatgtcatcgtacttcctcatatgattaccttgtccctctccttcatcaaagagcttcattacccagttgtagccgagatttgctcaccttgtcattgccgaacccctccagtttactgagaaaattgtgacagaaatcgaataccgcatgtttaaccaaaatcgcactatcagaaagaattaatgagcttcgttcataattacaaaaacttaaaataccaatttaagaaattcataatactcacaattatttatctacttatatatacaatgaaaattgaaagtta

SEQ ID NO: 315089 - DNA, 1712 bp, Cannabis indica
ctgctgttgcacaaattgcagattgcttgacaaaacctatttctaattctaagttccctgatctaagagccaaactcaatgttgtttctcaacacaccttgagtttgaagggggctgttaaggacaaagttagtcaggcagttacaactgttagttaagtctgttatttttactgttatgtttgtatccttgctgtcatgtgtgtctaatgacagctttgcctttatataccttgtactcttcttcaattgatcaatagactaaattctcaatttctctgttttcatctctctcgttctctccctgtatatacaatctaacaatgatcatgaagttgaggagatatatactatggttttggctcagctacaaaaactaagaaaagtgagtataagtttgataacaatgctatgagtgatataagtttctcctcattaatccacttaattttggttgatatattgaaaataatttataaaaaaataatataataataaaatttggattaatacaaaaattgcaagaaaaaacaaacactgtttataaacatacccatatgtttcttcttattctttaaaagagtttcataaaaagattgtacaaatggacaatactattcataaactcttacttattcttcttcaaaatgaagattaattgttgttattgtctctttacctattcttcttcaaatcacattatggagcaatgtgctttgcttttctttttcttctgtttagagggttgaaggactacatttatggccacatcaaagactgctctcacattctgtatgtatacaaaatgagtttattaataaaaaatgaagaagccattttcatgcgaaagaatagaaaaaagttttattatgtttgtatacctgttgtgttttcgagctgcattcgatataagcaactgctccgataagtttttgcagttcttctcccttaaaatatgatagacatgtcaatataaactattaggtgtggtttgatttgaaatgaatgaaaatataataagaatgggaatgagagaattagaataaaagtataatagaataaaatttaaaatgcataaaaattaataaaaaaaattattatttttttttttaaatcttacattggaatggtggctaaaatggttaaaagatcattccattagaattatattctaatactttaaaatgtaaccaaacaaataaacagaatacctccaaccaattccaccttaaagtatctaaagattttacctgagttgtagtaattggaacagcatcaggatggtctatgaagaattgtgtgtcatctcgaaggtctaggttgacaaaaccaaaaggaaaaaaatgaaaaaagaggaacattgttattcatcctatattattaccatatttgtttaaaaagaaaatcaaaatggtattaagtattagaaagatgaaaaatataccaagtttagttccaacaagaataattggaacacctggtgcaaaatgcttcaattcaggaatccactggaaattaaaaaacataaaaataaaaaataaaaggcatcaacaacacattaatgggattaacaactctctatatagaaagatattttaataaagggtaaatactattttagaccctgcgttttgcaaaagttacagtgttttataaaatgacaaaatggaccctgcatttttaaatagtacaaataggatcctgaacttaatt

SEQ ID NO: 315090 - DNA, 1416 bp, Cannabis indica
tacccttctaagcgagatttatatctttcaagttcaccttgggaattatattttattttatatgcccatttgttgccaatgaaatggtggcagcaggaagagagacaatagtccaagttttattggctataagtgcaatagttttgatatccattgcttttatctacacgggaaattttgaagcttgggaatagttggttggttcagagaccaaaaaaacacttaaaatggtagcatgaaaacttggaaaaaatttgtcataagagatgcaatttgatatgggataagtagtagaaaactcacaaagatagtcttagagatgagttgggcgaatgacccaaatttttttgtgacattaggaccactcatgggggctggaacaaccgccaaaggaggtgaaattgatgcatttttagtggttggaagagacacttatgatggctgcaatggtgcatttaaggtgggaggaacacccatccgttcgggcagcggtgaggggctaagagtggctggaataggccctattgtgggcacttgaggggtgctggtaatgctcgggaccgcttcctgtgaaagcacctgagatgtaccactaggtgaagtgttaggattagaaaaaaaaatatcaatagtgtcatcagaatatgtatttgtaaggggaaaatatgttcataaaaaatgacgtctctagagtgaaatttttggtaagattcaagattaagtaaagtataagctttcataccagccgggtatccaatgaacacataggtgcgagatcgcggagaaaatttgtgccttgaattgtccaaggtggaagcataagcaagggaactacagatgcgaagtgatcgtaaaggggtaacctgttgtacaataatttaaaagaagatttaagttgaagtaaaatagatggtgtacgtttcattaagtacgcgacagtattcacaaaataactctaatatctaagagataagcgagattgaaatgcaagagaacgaccaatatttagtatgtgttgatgctttctttcaacaacacagttttgttgtggtcgatcaatgcatgagtaaaaagggagaatatctttaattgcataaaaagaagacaagttgagttcttttgcattgtcacatcttatccctttaatggagatagaaaattgattgagcacataagcgtaaaattgaggtataatagtttttacatcagattttcacttgagcatgtaaacccaagtaaatctagtaagatcattaacaatggtaaggaaataccggtaaccttctatgcttatggtgtgaaaaggttcccaaatatctaaatgaattaaatcaaaagccttggatgccataatgttagtagaattaaaaagtaatttttttgtttgactaaatgacaaacatgacaaggagaaga

SEQ ID NO: 315091 - DNA, 1904 bp, Cannabis indica
ttagtgtatatggtcgactattatgatcatccaattttgaactttgtcctcttttctaaacttgtgggtacataatttactacggttttagtatcgtttactagtcaattattgatacgaaaagaaatggagattaccttgaaaagacaggttgttcctcacatcactaatgctatccaagattggattgagagagcagcacagattccagtagcaaatcatgatgatgatggtgatgcaaatttagctccaactaatatttatgtgatataactcagtggaacgattggagatattgtgtaatatcttgaaaattataattgcgtttaatattatacattttattaaatatgtagttatataaatattagagtaaaattataatcttacttaagttaattatgaaataattagtgaatttttaaataaatgaataaatgagcgtaatttattaattacggagattttattagaacatatgagtattatatatatactatttttaaaataaaatatttttgggttcaaactcgatggtttagccaaagatgtcacgacggtaatagaatgagttttattggaattgtaccagaatgtttgtcgtatcgatttagatggagtagctagtattgaccaaagtgcccctagaatatttattaacttaagtgtataattggggggtaaaatagtcattttgttaagtttatttattttgttttatttgatagtctagtaaagtcctaagctgaaagttgggtttattattgttttttttttgggggttaattaatagatatagttaatcaagaattacaaataaaaaaaaaatattaaataagaaaacctatcactctctctcctcttcggctcgaggaaaccagcaaaacccaaggaaaaactcaggtcaatttttatcaatttcttcaaccttaggtgccatctaaacttgaggtgtgtttttccttagtgttcttaaaaattttaaggttctaaggttaagttttgaagaggattttaataattaggtttagtgtacgcttaccttgttaaagcttgtttttagatgataattagggttgtttaagctttaatttaatgattttaggtttgttgtaccaagagttgggtgagttgagttcaagaactcaaaaactcactcaacaatggtaagtttttaattttgaggcatttctaaattttgagtgtttggttatgttgattttatgttgttaaactgttttggaaggttttaataggtttggaggagttttgggttggttttggtgcaaaaaccagattatatatttctacagtagaaactgttccacagggtactgtggaaacagtcagccaattgacccaatggggaacctcattttttctaaaaccggttagctgtttgaggtatttttttacaacttagttttatgtgttttatcaatgtttagattatttctaagctagtatcgattagggtttatctagttttgagtttaaggcatattacatgtttgattatttatcaagtgtcgttatcgtgacatagggcccgaggtcgtcaagcaccattccactcccacacacctgactttagacttgaggtaataaaagccaattgatctatgtaagaaatttagctctgatacatagataatctctgtaattccagctttaatatcacacttaaacaaacaaatgttaaattaaaacaaacaaatcaagaataaaaaaccaacaaacacattaaaccagaaaaataacatagatgaatctagatagctttcagacacaacaacacacgagatttatactggttctgatcctaagttcaatgtgaacttggtcatactccagtttgaaagcattgccaccaatctttattgataatgagaattagagatatc

SEQ ID NO: 315092 - DNA, 743 bp, Cannabis indica
cctgctcattcaaacctaccctggatctgtttctgggacaaaactcccaacaacacttcttggggggacagttggcggagtaggccccaaaatcacatgccttttaaccttagtcacaaacagtgccagcaagttctccacactcattttatcatcattcttaagaataatcttacttgactatctttcactaaaacttccggctgtatcatattgcctttcatgtacatgtaacacacctctattttcaattcatacacaagagggtctatgtccaactcttcatacaaaatttcatgcatcttttataaagtagtgtcaacctcaaacattaacatcttactttttggattattgaatatccagttgaaaccttcaactgcccaagccccatcatacagtacaaccacaaacacagttgaattcgcaaacaaaaatgacaaaaaaattaattcagataaataatatgtcgcaaaatattgtgaaaagcatcgtcacttatcatgaaaattatcgataactacatcgcgacacatcgctgcttgtcgataaattttatcttggacttggccagacactacgtctaaataaattgacaaaattgaaaaaaggcgttaacataacacaagactacaatatgttgcgacatacatcgtgacacatcactacatattagaggtgtacatcaaaccgctcaaaccgcccgcaccgcaaaaaaaaatacggtttgaaattcttcgcgg

SEQ ID NO: 315093 - DNA, 1661 bp, Cannabis indica
aacaatttacccaagttaagatcataatcttactctataccaacataattacatatttaataaaatatgctatttaaatattatttattttacgggtatattactaataatttttacttacagaggatgttttgcactattttttctaacccctttctcagaatatagttgggatatttagagcttcatatagagagaaaaaaggtcactattgtcgtaagtgttgaagcatggcttgcacaagttcctaagtccaatagggcatgtaggcctatatgataggtttcataagttttagctaggtgttaggtaagataagccattaaccttccttgattgatgtgatagttcattatgcagtcatcataaacctcatatattagattttaatcgttgaataatgggtgaaatgcctctgatttgtctttttagatccgctcacagacgcttcttccatgtcgtatttaaggaacctatataattcgcgactgggacctaatgaccagccctggagggtttgtctagctcccaaagattaaaaaaatacctcgacattaggatgtggttgaagctcctggagggagctcccagacatgaatatcaaattaagttaaattctcttagggtttatcccaagtatttctcaatctttagacccacttgccaccgagctgatttcaggactgccacatatattgtgataaaagaggggcaacatttaccctcatagtcttatttttgaatctttgtaaaatgttacttgcttcttgcctcagggaaggacgtaattagtagtgcgcacgtgtgtgaactatttattatttattatcatttttcctcattttgacaaaaaaaaatcgattcccacctgccctttttagaggagtactcgagcatttcaactgcgcttttttcattcacttttctactaggttgtcgtggccattagattattaaaattataataagttgaaccctaattgtcggatgatagtagattagcattcaccctaaagggcctataaaaacttgtgcctttccttactacccactcatcacttttccgtctcagactttcttaaccctttagcaaaatttgagactctccaaattttctttcgttcttcctctgccattgtcatccaaactactatcgatgtacagtagtttcgacaccctctgcatcttcttcattctattagtttccacttcttccatttttgtctttcaaaatgttatgtacggtattgttcttcatctttttccttctttcttttttatcgtatatatttgatttcttggatgttaatggtgatttttctcttaagcctacatttagggttgcattcagtattattatttttttttttttgaaagtaaagaaaaagcctttatttttagaccttggtagaaatttttaggtttggggcttacaaaaaatcatgcttcccattcctttccttttccttgttcctttgttgtggtttatatgtttggcacccaatgtatggcaacaggatttgttgatttctactttgcctacatcagcacttgttggaataggttttaccaggatctagatttactaccatgtatgttatttaacaccctaaatatgaatttctaaaacaatgtaaataaacacatgtaaagtttcaaaa

SEQ ID NO: 315094 - DNA, 714 bp, Cannabis indica
cgaagcactgttctcctgttccactttcccatccgaaccgagcctcaaaaacgcgttattcgccctccaatactgatcggaagaattaaacaccaaatcagtagcatttcggaatgtgaattttccattaccggaaacgagttcagtgttggatatgttctggttcgggagaatcgtatctgtcgggaatttgaaactttcccacttcccaaacaccaaattaccgtcttccgttaacgttaagctactgttaagattcccagtggtgtttcccggccataagtttgatccagtggaggagtttcggagacggagttcaccggaggaggtgattgtaagaacagcagagtcagtaagaaacgacatgtcgtttttatcagtggaccaaacgacatcgtttcctgtgacgttttggtaccaaatggagaaagtgaagcggtttgagccaggggatttgggtttgaaacccgcggcaaaggttgagttgggagagagaagagtttggttctggttgggtctccatggtgagtttgaagatgagaatgatcggattgtctttgtctgtgcttgaactgagatgagtgaattgaacaagaagaagaagaagatgaagaaaatggtgttcatggttgttggattattggaaaagggtgggtgagttgggttcaattcttggtgggttaatggtgaaattgtaaagaaagagtttatagg

SEQ ID NO: 315095 - DNA, 1858 bp, Cannabis indica
cttcttttttttttctttctgcatgtgtatgaatacaacttgagagcttctctccacaacaatggatctcacaagagtaaagcttcaggtttattctgagcttagcagtaggtccttttaaagcactaggggcgatactggaatttggactgaaaacttggtccaaattctagttgagcaaaattttcttgttgtagttatattttggagtttattgttgtaactgcttttcttatttttagttgtaactggtttttgttaagagtcctggtagagagtctatactgaacattagcccaaagggcatatttgcaattcatgttttataaatacttgatcttataaggagatctattcaacaaattctacctagatttccttatgagtgatgagagttatttgcactcttgaggattttagctcgatgaccactagggtcaatttccttttcaatccttagcaagttcatgcaatgcttgtacttgcctagggttatcactttagtttccatgtttgtgggattgtgttcggtgggaactttttccactgtgacctctccctgagtcactttgtctttgataaagtggtatttgatctcaacatgtttggttctgtcatgaaagacaagattcttgtagagatgaatacaactctagttggctatctgagtagattataatagtatttttaagtaaatttaattcctttaggaccctttcatccaaaatgcttatgctctgcctcagtagttgatagggcaacccgggttatagtttgactttccagcttatacaattacctccaaattaggaaataataagccgaagtagatcttttagtgtctctatcaccagcataatcagaatcacagaatccttctaccaaagttagattttgggattttttgaacaccaaaccaatatcagtagcccctattagatatctgaatatccatttcatagccatccagtgtaaattttcatggttagccatgtacttacttagcacacttataacaaatgcaatcttaggtctggtgcttaccattaagtacattatggacccaacaacattaaaacaaggtacttgactcatctcctccctttctttctatgttttagagcattcatctctagagatcttgtattgactagtaattggctggctagtcttctaagcattagtcatctgaaacttttcaattactttttgtatgtaatcttcctaacacagctttaggattcctttacttttttctctcacaatagtgatccctaggattttagtagcagtacccaaatctttcatttcgaactctaacttaagcatctctttgaccaaatttaccttagacctttctttgttgattattaacatgccatctacatataacagtaagtggatgacatccttaatatcacttccatgaaagtataggcaaatgtcatagtagcttttaatgaatccttgcttagtcataaaagcaccaaattttttattccattgtcttgaagaatgtttaagcccatacaaggacttaactagcttgcagaccatgtggcatttccttatttctacataacccttaagttgttccatgtagatatcttcttctagctcaccatgtcgaaatattgtagtgatatccctttgatcagtttccatgttaattaattagctaaagcaagcattagtcttatggtcttgtatttgactactggagagaaaatctctgtgtagtcaattttagaaattattttatcaggatctatatttactgtgacagtcagtagtcctgtgatccgtaagaggaaataccgggtaagctgtacaatcccacaccgcctggggaaggtca

SEQ ID NO: 315096 - DNA, 582 bp, Cannabis indica
tggtgttttataaaaatacaatatttttgaaaaaaaattccgtgtaacagtatttttataaaaattaactcaaattccaatatttttgtaagtttcttataattaatgtaaaattatactcaccatctcgaaaaattaaaagggccggattgtggatttataattaatataaaagatattagtctgaaaaaaataatcatgataatagtttttagtaacatgtcatgatgagaaagtgactaattgtagtgtggggaggagggaatgtcattccttaattttattaattaattataaagcataagcataagcatatgttctgccattccgatatattctcatgggatattatattatgctcttccttttttttctttctttcatgtcattatcttttaagaaacaaagcacaaaataaaatctcattatcaatattttttatagtttcaaattttaaaacatttaaaacactcgtccattaatacatttatgatattggggataaattcagagtttccaatggtaaaatataagcctttttttatgacactttagctcttaaggatgtgcgtagactttacc

SEQ ID NO: 315097 - DNA, 1839 bp, Cannabis indica
gagtcgattctgctttcaaagttcgcatagattccaagtgttccttctaagagcccagtttggttccccataaatacccgtaagccgccaaccaaacaaatcattgtgatgaacaatcaaatcaatatggttttgagagaaaccactaacctcagcttcagattgctctttccacaacatagctaaaccaccactcctaccttgcgcatccaccgagaacataccttcatacccaagttgagaagaaagtaattccaaccgaggtttcaaacttaaagtttcacaaagaaaaataaaagtgggtttcttttgataaatcatatctttaaggaattgaaacgtccctgggttcccaagcccatggcaattccagctcaatatactcatgatgattggcgaacccgatcgaacgagcccggcaataaatcgttttttgattgagccccattctcctggcccaaaatcaagttattaatctccaaaggcccattcggcccactaggaagctcttggcccaaccttttccttttagtttcaaggaaaatcattccttcctcatcaatatcacaatcggctgccacctcattaaatccattacttcctaatatatctcccccatcaactacatcactattcacggcactaattcacattaatcttgtatggccaccaaccacacccctattcccatgcatcaatctttgaccctccatttgtgaaatttctctttgctgttcactccgaaaatcatgggcattcaatctcctatctcctctcggctggaaaacctcaccaccttgctggacatgccccgacgtaccagaactcccagcaccaccagaggcagacgcaccaaaattcccagcccctccagacgccgatcggagcaacttagatcccatagcatattgtgttctccgagggaccgccttcatgaacgaaccatacggtttgacaatagaagcaataggttggataaataacctagagcaatattgatcagtgtggcctataactccacaaataaaacaaaagtcggcacaaattcataacgaaaatttatccaaaaccactcaccaccggttagctgcaacttcatccgccgttttaatggcttctcgatatcgatccgaacccgcaccctgagatattccctccaaacaccattgaagttattctcatcggttttaacaaagcttccgatatagttcgcagcgtccgaaacaaccctttccgtcttaaaacccgcctgaatatcatgcaattgaacccatatttcgaggtgatgcagccgcaacgccctcggaacatccccggttttcaatctctcaaagattaacggagcatttttgaacgtccatggactacgatcaatgacccgctgaatatctatctttcacatacatacccatataaatctatttgctcccaaaatctttcacatacataccccataccctggcttccatagaaccgccatcaagttttgcattgctatgaagtcgatcggagtgtccgtaagaaatcgaccaactatgctccaccgagtatcgacctcggcatcatcaaccaacggccaatcgtattgaactgctggctcctcctcctcctcgagtgggatgatcgacaagctaccaccgagatcctcaaaaccatactctgctgccatcataaacgccctctcaaccactcctcgcaccaccgtaaaaaccagacaaaaactcaacaaaactaaacaaaatcaaagagacaaacacacaatgtcaaaagacaagacaaacacttaattggtttttttaccaggatcttagatctactcacaagtatgttgtttaaaca

SEQ ID NO: 315098 - DNA, 2876 bp, Cannabis indica
ccaataaacattaaagaacacaagcttttaaagaggttcggcccctttagtttggtaatagcctactccccttgaattatattaactcgagaacaaagaatacattgtttcctctcttgaagctctcacaatgaaatctctgagtattttctcttagatctctctgaagtaattctttcgaccccttttacagtgaggatggattactatttgtagggctaaatacaggaaggaaggtttctcttttgcttacaatatctataattggtaagaatacacattacatatttagaatacataaattgagggattaggacagtttgccatatcccttttatacgatccctgaattgtaggaatttattttatgcttcacgatgtaagtcttgaaactgctaagtcttgatgcattgcttgaatcgtctacccttgccctgctcggtcgggcagactctatccgtgcagatgtatactgagctttgctcagaatatctcctcaacagatgtaggaaataggatccatgtgtcaccagtatatgttaccacatcatagtgcaaaaaatgggataacatttgccccccaagtctgcacgagacttccaaagttgcgcatagacttcactcatcttaactttgtatctgaacgggtggcacgtgttcgatgtgcctgttggtgatcaaatgtgattctgatatagagtcccttcatttttcgactaattaatgttctgattaaatcgtacctcgagacacactacttatttgcatgcttttgacggttactcttctccaggtacttgattgcttttgatttcccaatatttacttttaggaggaaatcaaggcgtttgaaattcaaaatgattacacattttcactaatctgcttataaatagggcaaaaagtcatattaaaccatttttagcatttttcttgtttagtgagttcagagcaaattcacatttctctctcgatttctttgtggaattaatagaaagagctgatcagcgtcatccgagcaacctcaaagcttcaaacagtgattaagtttcggatcttttcctcctttaatgcttgtatctttaattttctgggcttccattgtagaaaattcaatagtcttgacttgttttaggaaaattgtagagaatctaggtttagaactctgaaacttcgactgtagtaggtcatataacttgattgttatggcattctgaatttaacttcacaatatttggttctcactttgcccattgggggtttagtgaaaattaacccttaattcaaggttttgaaattcggggttatgaacctaaaccacacgaaattttcatctttttaatcttttgattagacctgctcggtatattttgcttatttttgttcgatatcccggccaaatactcttcttatgtcttaagttttatagatgaacactggtgagttttggggaggagaacaccatatcgaccaggatcttctccaacttttgtatgaggatcaatctcatatttatgctagtacatcctccttgagtgacagactttccaattcgagttttgagagccgggaagtgagcagagagggtggacctactccagaacccgaagtgcaacaccatttttattccgagcaaatcgcaggcaaaggttacgagcgtttcatttaggaactcaagaaggggtggagatgttatcttctgtccaacttgacatacattgtctagccagacgtagctgataccattcctgtgggtcgtccaagccctggtgcctttggcattcccattgctactcttgctgtgaccgttgcacggcatactcaccaaccaccatccaggggtaggatgatggcccgcacgaaataaactatgcagaaaattgttgtagctgatcctcacatggcctggcatgcaacaatcatcaggcaactaatccaagggaaggatattatgcctggtcgggtgctcacaccaagcaaggtgcgatgttgcctctacatccgtacttcaagaagattgcaaactattaccacctctgcccgactcagttcacacccaagggcatcaaatacttatccgccatgttcatcctctacgcaactcaaggatggggtgagccgtctccacacgataccaactaaatctttacccccaagtcagagcaggtcggggtacttatacttctcctagctggacaataagtgactgaaggaaaccgtagaccctgcggtcagcaaaatagggcattttgtggacgagtattatttcgtaacgggcatggagaccgtccacacttggttccaacagatcccctcatactgccaccctcctttcatgctgaaacttggggagagggcacaaaaaattctccaactgctggaagatgctcgaaatatcactttgttgaccactgaggccaactttgtgaagtacaagctctatccggaggattttgtgccaaagcccgtgaaggagaagaagatgaagtccaagccgagctgagctaaggatgtcgagcaggagaaagagctcattcaactgaagtgtgaggcccaatggaggcttaaagtggcgtacccgcagggccgtctcaaatattttagaggcctgttctaattttaaaaaataggcccttaaccaaaaaataatataaattgtaaataatatttaagtattatcatattacgaaagtatattttacataattaagcacccaaaaactcaaacaattttattaaaattggtattaattccaatacaacttcaaaccaatatcaacattctatttaaaaagggccatccttcgaacgctttttgaagcaaattcatcaaccaactcttcatatttatcatctccaaaacctcattttcaatc

SEQ ID NO: 315099 - DNA, 1252 bp, Cannabis indica
tgttgcattgatctctttaagaagattacctgattcaaggaatgaagtcactgcctgaaaaatgtcatctcccactatctcccagcaatcttggaagaagaagctcgaaaaaccatccggtcctggagccttgtttccaggaatgtcaaagagggcagcttttacttcttctttagtaaatttcaacatcaaatcctcagctttctgtgtggaaaaccgcacctctgctcacaatcttctttctcattggtcttctgttagtcatacttgttcccagcagctccttgtagtaatcaacaaaggctgatgagatcagattagggtcaatgatcctggttccctcctgactttctatggaaaaaatctgattatgtcttgctctttgcttgatgcttgcatgaaaaagtgcagtgtttaagtcaccattttttatccaagtgactttggccttctgctataaaaaagttgagtaatcccgctgcacctgaattagcttagttctagcagctaattctctatcaatcttctcaagattgagagggtcctgctgtagctgtttttgcagactttataaatcatcctgagctctctgtacagccgtatgcatgtctgaaaaacctgctttgttaatctcttttaggaccggtttaagagctttaagcttggagaccacttgatacagcttggtcccataaacccgtgagttccacacatcttgtaatttatctctaaagctcgggtagctactccacattctgaaataacgaaacgacttcctcccttcagctctcttaggatacacggataatacactaggagaatgatcaaatgtcccttcactcaagaaattaacctcaactgtttggtattgatctagccaagcttgattagccatagttctatcaattttggagcaaattctatctttcccttgttctttattcgaccaagtgaaaaaattcacagttgccttcacatcttccaaatgacactgctcaacacaattcgcaaaggctatgtcctgatagtacttgactttatgacctattctctcctcctttgaaagaatgtcattaaaatctcccattaaaaaccagttatcctttgttgctaaatctgccaaatctttccaaagcatctctctacctttcttttcattgaaagcataaatgatagtagcaaagctactgaaggtatgatccattgtagaaatttttaaatgtattagttgacttgtacatttaataatatc

SEQ ID NO: 315100 - DNA, 1721 bp, Cannabis indica
ctctctcattcatcaccactgtcctaattgtctattacttctgctgagttattttcattatcgtttttaaatggaggtgtacttagaaggggctagattccttgtgatgacatatttcatgacatatatgtccacattcaacttattatccctcacaatattatctacttgaataagatgtcacttgtacgtacatgcctagcctattagtgatagtcttataaccatagttaattagaattttattgcagacatatgctttccctttaaaaaaaaaaaagaacaaaaaaggcatgtattttcttatatgcctccaatagccaccggtctcaggtaaagtccaaacctaacagcctagcttccttaaaaatattttggcaaacattgggaactgtatagggctaggaggaatacataagtctaagtctctaaatttaatcaattcaacttgattttgcaataggttactacaaaactcacatagaaatgaaagtcataactgtaaatgacaaaaatacacaaattcaagtttaagataaaaatggtaattaggggagatacctttccaccagcttcatgaacacatatcatgccaacagcgtgatcccaagcctgtagtcatgaatcatgataaattaagttaataaaagctacagaagcttgtgaagactgattgcagagttaataccttgataattctatcaacttttgagcgaagaatgaaaattgaagccctgcctgatgccaccattagatacttgcataagctgcccacaccaaaagtaaaagtaacaggtcaatagcacaataatcaaagtgaaagtagcacaaacattgttgatcatatgaaagaactaagaaaatgttcaaacaggcattttgcacacagacaggatttcctaaacactctagctgtttgtttggatcttgactttaggagggaaaatataatataattttacaaaatttagaataattataaaattacagctcaaaaagagcatttaaaagaagtgttctataaaattttaggaaaatatttttctctgcctttctctactattttctctcagaaattttccttggtaaaaccaagatccaaacaaaggacagatatgtatttaaatgtccatcagttctccatatacttaaatcctatatctggctgactattgttattgttaaggtactctgcttccgaaaggaaaaagtaacaaaagaaaagaaagagaaagagaaatataagccatatataaaagacgggcagtttgttaattaaaagacagacatatgtctataaactctggccattgcatgaagaaacccatctcaagaactcaataaccataatttgatgggtaacacaagcactaatgatttggttttctacttgattatggagcatatgtatgcaaattaaactcccaattatttatgagagtattcaactataatatagccaataggtgcataagtaggaaactgaatcttattcttagaataacaattaaccttccacagcatgatggtataagaagaacttgattttccccaacactatcaacatccgttgtagcactgaataatggagataatggcaaagaatcccatgactgactatcttgactacaaaagcgtgcctcgtgaactatgcaacagtgatcaacaaagcatcttatccaactagaaggtacaccagttgtaccatccagcacaaacgg

SEQ ID NO: 315101 - DNA, 1920 bp, Cannabis indica
catagtgtgtaagactgtgaagaatccaaacaatagaaagagtttcgggctcagatcttggtgatactctgctacagaaaagatataagggttagagatttgagctgaaggagtcatttaattccgctgcaaccaatgtaagatttctcataccttttatgtgtttattttatattgtcttagaagttcatgtttaggatgttaaaaatatacttgttagtaaatctagatcctggtaaaatatattccaacactaccaattgtaaaaggcctaatgatatggtgtaatacccaaagaaggacaggtcagccaacatcccacgatgggtatggccaattatggtaccaagaggtaacataatcactttttggcttgacagataggcgtccacgtgccccacaggtgaaacacgatgacccttactcgcactactacaaaattgggctttagaggcattttctttatacttttgcgtcgcttttggcaaaatttgcaaccgttgctattccaaaggtcgctaaagggatgtgaaataaccgaaggcatagagaccccctatgacgtcgattattagtaaataaccaaccttgtatagtccctatggcgtcggttatttactaataactgcctgcatagggtttttttttaatttcattttgaataaaaatcttgattttgatataaaataagtttctttttcatatatatttttttttattaaattaatatataaaattagtttttttcatatattttttaagagtaatttgcagcataaatatctaagtttaactcctggttgtaaataaatacttaagtttaattttttgtggtaataatacctgagttatatttttggatctttgtagatacttaatcgttaaatattacgtcattatccacgtgtcattttcttattggtatatttaaactaattttttgtaaaaaaataaaaatttaatgacttggaccaatcagggtttgccacgtggcaatttacttaacataaacagtcaggtacctatagaagttccagaattataacttaggtattattaccgccaaaacttaaacttaagtatttatttacaactgaaagttaaacttaggtatttatgctgtaatttactcattttttaattactatgttaaaatttaatttcatataactaaaaattaaataatcaatctaaataaatgtatatatttacattattctaagtaaatatattacacaaatattgtaaaattactccaagtgtttaagagttatctaaacaaagaaaaagtaaaatagaaaaaaaaaaatagtgttatacaagtgctctagtcatcactatgaatcacctcaagcaattttgttatccattctccttataatggtaacaaatcattttgtgcatcgtatcaagcctattcccaaattgtaaaaaaggacaagtaaatatttttattagtatatatatatttgattgtttattaatataataaataagaaaattaaaaattaaaaaattacagctctttttccagttatgaatctgctagcatttgtagatatgatgatctgattgatgtatttcaagacatcaaaacaacattcttaatttttagattgttttaggcaaattgcacttgatattccaggatacggtggaacgcattcgtgtcctggattatctcgtatgttttgttttaaaaattatattactatttcaattaattaacataatttagctaaaaaaaaatttttacatagagagtaattaaattattatatcctcaacatatcagaaatctttttgggaggtttgtggcaagctataggatccaaatgtataatcttccctgtcataatgattgtgagcatccaatgtgcactaaaatacatataaatattgggaatattttaccaggat

SEQ ID NO: 315102 - DNA, 2418 bp, Cannabis indica
tcaatagctcaagaaaaattttaacaaccagaattgttcagtgggcatgatttggtacatgtcaaagttcaggggttaaaaattcaaattagtcttaataatttaatgacgtggcaattaaaaaaagaatttttttaactaatagctaataaattgaaaaaaacaaaaggaaaaaacacatattaaaattaaaagacacattaaatcattaaaagacacatcaaattaaatctgaaacagtattaggacaatacacacaaaattaaaagcatgaaaccatattaaaactaaattataactgtaaatctaaaggtagaaagagatagataagtacttgagaaatcgaaggaaacctagaaaaaccaaactacagattatcactatttttgtgagaaattgaagtaaactcagaaaaacaaaacctagccaacccaagaagagattcatcatccttgtgggggaaacgcgaaacccagccaacctaagtagagattcatgatcctcgtggaaaatcaaaggaattccaaaaaatttgtggaaggagaatgtttttgaaatggtgtatcttcgtcgaggtgaaaagatcctcctctcgactaaagtaagtcctagatccatattttctagggttttttgagttttcaaaaaatgttggcgttatttgggcaaatcttagtagaatgagttaatggagggttttatactaaattttctgtcggtagtagctttaatggtttgtgggatttgggtcttgtggtccacattctgtacagtggttggatatgatattaaagtggaaggtttgaaattattggtaataacagattaatcaaagactattgtgaatctttggttgttgttttcttcaataggagcatttccacatgttttttttctttttttatatatattattccttgtctatttgttggcattgggagattaatcgctattggaggttaattgtaatcaggggttaattgctattgggggttaagtcaaaattttggggaagtttaattagttttgcctaggtcacctgtaagtttaactatgtgcttatacttatatattaactttgcaagtttgaatttggatagcttcactgtgaaattattccatggtggttattggttcacccgatgtggcaatagaaagtatgagaatggtcgaactgcctactttgatttatgtggtttcaactttcaatgaattcagcaggcttcatcttgaagaaatagcttaggaattgggatgcatattccctttcagttttttgtttaagccaaaagggaagcacctggatatgtgatttagggttattaaggaaagtgaaattaatatgatgttggatgatttgagggatagaaattacagagaggtcaacatatatttggtattgtcagatccaatttttgcagttgaatagagactagatgaggaggcaataaggcatgtcccccaaccctaacatgctaaattggacaagtgcattttggaggagtttccatctaacagtgatttagtagcatatgttgttgttaatttgaaaggccatcatgatcataatgatgaattctttaacaagtttttgcaatggggtgatttagcaacacagtggattaatgaagaggtagattctcgtgagtgcagccccaaccaagtaatatcctgtctgagactgattatttcatcatcctcatcatcaaaatctgaggaagatgatgatgttgttgctaatgatgatggagatgatgatgttgctgttgttgttgatgatgatggagatccacctgatgatttatttatttattgtatacaattatatgtggtcaaaacatttttttctctttctctcactatctctctttcttccccactctttgtgtggctttttgatattccttctaaatgtgtcctcccattctttctcatcatcatcattgtaatcatcttcttcttaaataaaagttgatatccatatcttcttatttttgttttttttttgttctttggattctaatttcagaaaacttcaaagaaggagataatagatttggtataatagatgtattcatggtatcaccacacagtgaaaaccttctgttatccctattctcagataggttctacgtggaagtagcaaaaagggtgcacatcagatcgtatgggaatatcccagatttccctttgtttcaagataggattaaggaaggcatcgaagtatccatgagaccgcacccattgtgaaggaggaattgatccttgaagttgtaacctaatacttcctgtattcgaaggcatacgcaaaacacgggtcttccagaggttcttaagaattggctattctaggaggtcccgagtagggctgttcatccgatccaatccgcactttttcggtcaaacaacatccaatcc

SEQ ID NO: 315103 - DNA, 1312 bp, Cannabis indica
tctcgatggcttcaccggtcctttggaccaattgaggtccaagatagcgtctctcactagcctcatcccagtggatatgtgatcgatatttcctaccgtacatcatctcgtaaggtgccatttcaatggtactctagtagctattaatatatgaaaattcaatcaagggtaggaatttgctccaagatccctcaaaatcaatcacacatgcttgcagcatgtcttccaatatctgaatggtctcagactgaccatctgtctaagagtgaaaagtcgtactaaacctcaacttggttcccatgactttctgtaaactttcccaaaacttgaaagtaaatttggggtcacggtctaaaacaatggactttacaacactatggagtctcactattttcttaatgtacaatcggcatactggtccatagtataagtcacccgcacatgcaaaaagtgcactgactttgtgaatcaatccactatcacccatatggaatcatgtaacccaataatcctaggtaaccctactacgaagtctatggttatgtcttcccactttaactaatgtattctcaaaggctgaagtaaacctactggcctttggtattcagctttcacttgctgacaggttaaacacttcgagacatattcaataatatcactcttcattcccgactactaatacactgtcttggcatcatgatacatcttcgttgttcgcagatgtagggaatacaaagtaatatgaaactcatcaaggatttccatcctaattcagtcatctattgggacataaactctattcttatatcataatagtccatttagggcaacagtgaaatcctttgtagcaccagtctcaactttctttctaagttcaatcaatttgggatcattctattagctaatctttatcctttccagtaaatcagattatagtgtaatatttgccaatttctcgaccactaactcaatctcagccctagtcataccctcagccaatcttggagagatttgcttcaattcatagatctaccccggaccttttccgactaagtgcattcaccactatatttgccttaccaggatggtagaggatttcacagtcgtagtccttgactaactctaactatcgtcgttgcctcatattcagattcttttgagtgaaaaagtatttcaaatatgggtgttcattggaccacatctaatgtttttaggcctatccagatccgatccaattatacagtggatgttaaattttaccatccgatccgatccaattaatttcattcatccaattgatccaacatccatt

SEQ ID NO: 315104 - DNA, 1606 bp, Cannabis indica
atttgttatattatcaggtttaacttatattattttaattatagataatataaaatagtgtgtgtctatgtgatcttgaaaaattgaaaaaaagacaaagagagatagagatcaaaaggcaacgaagagggatgtaaacaaggctgtggcaggataagaattatttcgtcactcccatatatacctgtttcataaattcactccatagttacatcaacagagaaagggtatccgtcgcgtaaaaattgaggacctcagaaaataaaaacaaaacatcataaaaactcatttaaaacaaacgtaataaaatctattacatcaaacgtaaaaattcatcgaaagttttgagagtgaatagatatcggacttaggatcctacatcggttctaacaagcctcacaaaaaatacaaaaattagacatattattgagcatttcatcaaaccctacattgggccaatatcgaacctatgtcttcaacctaaatcccttcccaacaacatgatacatcgggcatgcatcaaaccaggctaaaaaaccatattcttttccaaaacacaaatctgaccaatccaaccttaaatctaacccaaactaacagataaacccttaatcaataaacctatgaataatctcatgcattttaaccctaaatcatgtaaaaaatacaatgaatatcactactacaaaaatggtttttcccgatatttttaaatagtcgggtaaagtatcctcgtcggtttctataatcatcgcctatactattgtcgcaaaacggatagaataggcaacggttcaaaatagtcgctattttgaaattccccacagtttaaaactgttgtctataatagggtataaggcacggttttaaaccgtcgtctataccctgttataggtgacagtttcaaactatgtcatataatacatgttacgttttttttattttaaaatttttttagcgacagcttttttcagtcattacattggaaaaataggaaaaaaatacatatattttgccatttttcccctacattaatttttaaatttttacaaatctatatagttacaataataaaactaacaccaatatcacataaatatatttaaaaatctatatagtcatgataattaatctaatgctaatatcatctaaatatatttaaaaatctatatataattaaactaacgctaataattatctaaatatatttacaaatctatatagtaataataaatcaagatatatacacagatcaataaggaaatcgttgtcgcattgtttccactttcacatcaagaatccatcgatcacgtataacatttatctcgtcaattgtgtacggagtgagaaacctatcttgtaaaacaaatgtatatattaattagtaaagactattatcatatgctatttaataaagaataatatatcttataatccttattaattgttttaccggttgtgtcaacacgtatataggatcttctacggtcatgaaactttcagtgaatttcatgacgtagtatccacattgtttgtcattaggctattcaggacatatatgagttatccactggatatgtaacgccctaatgctaaggcacgctac

SEQ ID NO: 315105 - DNA, 860 bp, Cannabis indica
gcatccaaaagataccaacagaatagaacctaactaacatgggtactaagatagtcaccctaaaaaaattcaaactttgcatgagtttgttaagggtggacaaggtagaatgaacctaaggagactaagagctaggacccttagagaaagctatttacccatatgctataacaaataaacttttatggagatttaggtggaaattattagaataaatcgccataaaagctgacgtgtcataacaggacagaacaatcagttaaaagagccaaacaaaccaactaacctaaccgtttcgactaccaaaaaattaactactgctacttacaacaaacagaataacaaaattaaataaaagagctcgtaggagcaaagagatcttaccagaaccttgatataaggagtctcctacaccaaatgcaaagtgagattgagaacctagagagagagagactctcagaaagaaagaatagaagtgagaagagaagagtgaaaaaaagagagatttgctaaatcagtaaaagaaagaaagttagtaactttagctaattattcttggagagattaccgtgttgtgactgaaatcatctcaaattattttaatcgaaggttggtcatattggatttggcttgagcttctctaaggcagctcactgagaaagtaactcaatctttggggtgaacctcttaaaacactgtgtttgttcttctcttctctcatcttctccccattagctagatttgtgtttgtacatgtttctctggtactgatttgtgtttggatctttatcatctcattcgattttgttgaatcttcgaagggtttcgtgttggaagttattttaccaggatttagattt

SEQ ID NO: 315106 - DNA, 542 bp, Cannabis indica
tgctagattaattccataaagatttattgtcttatttagcatgaattttttaattaattctgtcattaagtatcatattatggaatatgcatttaataattatgctattttgtatttatttttaaaaatttattattagtgcaattaattaagatttatatgacttaaatgtcatatattaatttcataatagtgctagatacatttaaaaaataatcaaacattaagataggtgaatattttatttatcacattaagtttcataaaattattcataaaacattcataaaatgaataaaatatgaataaaatgtaagcaattttgtagtttggcattagaaagtatgaaattgggacaaatgttcatatctagaacaatttttaatgatcttcggacgaccacattaggaacactaatctcactgattgtctattatattaataacgaaattgtttttaggtagagttcaatatctaatgtctttgtgaaaatataattttatataattagagagtagccacaacatccttatttgtataaa

SEQ ID NO: 315107 - DNA, 1719 bp, Cannabis indica
ttgtgagtctgatgatgttatgcataaatttaagttttgtggggaaaagctggcggattggggtaagggggttactggcaactttagagaacggttgaaaaagtgtaaaaacgaagtgaaaaagtggaaattgggtcggaatgaggtgtctgtagccaattacaaacgagcaaagaagcacttggctatgtataacgggaagtttttaggcaacaaagatcgaagcaattgtggttgcaagagggagataataatagcaagtattttcatgcttctgcaactacgaggcgaaggaataattttgttgcaaaacttaaagatcattcaggtgcatgggttgactgggagagtgctttggacgatcttatggtttcttatttccaccagctttttttctcttcccaaaccgattggagagaagtcacaagtagcgtgcaaactcgtgtatcatcccagcaaaatgttgagctgctattactagttttagatgaagaagttcggaaagctttgttccaaatgcatccggataaatccccagggccagatggaatgaccccgagttttttctataagtgctggctgattgttaaggatgatgttatcaatatcgttaagcagtttttttcataatggtttccttcctacagaccttaacaaaaccattttggtcttaattcctaaaaagaagcagcctatggatatgggagatttaagacccattgtgttatgtaatgtgctgtacaagattgtgtcaaaagtggttgctaatagacttaagagtgttatgttgtctatcatatctgatactcaaagtgcatttttgcaaggccggttgatctcggacaacatcatgatttcttacgagattatgcatcacttaaagaggaaacaaagagggagggatggttttatggcactcaaactagatgttagcaaagcctatgacaagcttgagtggggttatctccgggctatgatggtaaggatgggctttgatggtcactagattaatttagttatgcaatgtgtatattctgtttcctataccatttcacatggtgggaaggtgctggggcccattgatgctcaaagagggttgcgccaaggggatcctttatcaccatatctgtttattctttgtgctggaggtttctctagtttgttgcggagttatgaacaaagtggcttactcacggggtgtaaaattgctcgaggtacgctggtaatctctcatatgctctttgctgatgacaactacatttattgtaaggtcattgaggaagaagcgtacaatgtgaaggagttgctgcatacttacgaggtgcttcgggacaaagaattaatttttctaagtcttctgtaatttttagtaataatcctggtattgaggtgcgggattccatttgtgctatgttggaaatttaggaggccgataaaaatggctattacctgggtctgccgtgttcggttgggagaaataagaatgctatcattggttttcttaaggataagcttgggaagagaattcaagggtgggaagggcgtgtcttatctcgtgcgggaaaggaggtattgttgaaatctattgctcaagtcttgccgagttatgctatgaatgttttcctcttgctggcagacacttgcaaggagttagagcggcttatgaccaagttctagtggcgctcagattcaagtagcggttgttgggttttatgccct

SEQ ID NO: 315108 - DNA, 1381 bp, Cannabis indica
caagattattcaatcttttcttacttctgttcattgtctcttgactggttttataccagtattgctgcaacattgctacagcattgctgctgttagttctgttgcttttgtttattggttcctattgttcaatctcgattgcaaggtgatcatcgatcacaacacatacacaagcaacctattgattattctcatcacaatatccaatcaacccaacaagattcttgtgatgagtatggcgtataacattcacttcaacttaattttgtttgtccttttaaaactactccacaagatcgtctccccaactcatcctcgaacccttttagtggcttcaatgctctgactaagtctcacaatgtttgatgacattctcttgtaaagagtagcataagaaaccaagtaacatggctctcccatcaacatgacactaatgacaattggcatgccacgccatgccaccactgtaaaatggtgagaaatctggtttgcaaccactgaactcgttagttaaatcaacgaaagagagcccgatttggcatttactgtataaagttttatcatctttgagcttgcagatactgttaaagcaacatgagccccagtccattccagtcacatctatatcttggcagataccattggaaaagtgagtcaatatatgagtaggtgatagtgtaacagtaggattaatctatatttctataatagtgtcactgtcttcatttgctagaaaaattaaaagagagggtggaacttccttgtcagatttatattaaataatttttttatattaattaattgatttataatttcagctataaaactatatataatacaattataaaaagcagccattgttgaatatgcatgctaatctagctactatttcctccatcaaaggacaaccaccaatcaacttaaaataataagaataattataatttgttagaacttaccaaaaccaattgaccagttgcttaaaataaattgctttaagtaaattaatataatttagtttgtcttttacatatgatacaaccccttaggcaatgtgaagaatatgatattcttttagctactcccaccaactatgcattaaacaaaagcaaaatgacaaattgtttaattttagttttctcttacaaggaacattgagttaacagcaaacataattcatttaggtagaatatttaaagatctgtttcttagttgttagatcatatcatatcacacaattcaattctgttgtagatcatatggcagatgctgttgtttcgtttgtgattgaaaggcttggagacttggtgatttctgaagctcaattcttgggtggagttgaagcccaagttgggaatgcacagatcaagcttcaatgtat

SEQ ID NO: 315109 - DNA, 973 bp, Cannabis indica
agagagagagagagagctaaattttttgatttgaggagaggggcattttggagttaacactaaaagattagcataattaaaaaaaatttagggcggtggtataattaatcatttgtcattttttagcataaaatgtcaaatttccttttaaaagaaaaaaaaactacaaaaacaagaatgtaaaaatgttaaacaaacatggtaacaatttaaaaagaaagatatataaatataaaacacctcaataataaaaagattttaatttgtaaaagaaagaataacacataaaacttctatctcaatcacattatttttatataaatagctcaatcaaattttatgtataattatcattataaaggaaatgtaagaaattttatcattatgaaagaaatatttaaaaattggattttatgtatatagttcacgagcttattaaattagtataaatgtattaatatgattcccaagttaactaatataaaaaatttattttattatctttatttttaattgtttttttttaattaatgtatacagtactgttggaatttgcaaggaagaaggtgaaaagatgaggaagattcaggttgaaatagaagacccttttgggtaaaacgatagggacaggggtggcattggatccacatgagattgcttcctgtgtcagcaatggctagaattggaaaaagtggtgtacctatggagatgctcattagatattctcttctgctcgggaataactcaaattggctggcagtattagtactaatgttgtttttgttgttctttttttattaagatcaagtggttggtgggtgtatcatccaagggctatggataagcgtgtcaatagatttgtcaagaagaatagaatggatattttggtgagtctccatggattaacttcaagttaatgatgccatcaccattatttttgcaagagagtctttgtttgttacattaattaaca

SEQ ID NO: 315110 - DNA, 1289 bp, Cannabis indica
ctatttaattatggtttaaataggttactaatagtactatattatcattagatatatctttatatattatcaaaatattactctcatcattaatcatgataagacaatttaaaaaacaaaattgatgtgttagcaactatctatgtttctgtattgaaagaataatcatggatttatttgaactaaatataaacaattgagatatcaataaaaaaaacatcaaaaataatttcaaagcttaatttaaataacacttttgcaagctgtgtatttgggtaaaaaataaaacactttatttttatttttttaatagaaattagaattctaacttatacataacatgcaaattatgaaactataaagataagcaaaaattatgtcaaacatactaaatcataatacatgccatattaagagcatttctaattatgatctataaatactgtttagctaaaatataaagtgggacttaaaaatacgagttttttttttagtgtagcgtaatggtatttttacaatcaatttatagcttataaattaaaggtcttgaattcaaacccatgacctttcttttttttccatccctccctcaccactaagttagccttaaaggttttaaaaatatgagttccaactatataaaaaaatagctctctataataaaatgggtagatatctctataaatatagagagctcctttttttgagagaaaaaactgtttgtagatatatgaatagtgatttaacacttaatggtcagggacatgcgaaagttttaaatatataatttaagtataattatcgttaaaacttaaatataaatattcatttacaatcgataattaaatttaaatatttatgtcacaaattattctaattataagtaggtaaggatatattcacaaataattatacataaaactgacacacttatttaacaatgtgaccacatattaacttttgataaacacacttataaaacttaaaaactcggcagttggcttattaaggcattagacatgcgcctagggttcactcagtccaaaaacttaaaaaagaaaaaaaaaatcttttaaaaatattatctattcttttaataagggccaaaaaatttaatttttcctaagactcaacgatactcaaggtcgaacctgaaactaagatgcaacgaaagataactttacttttttagggacagaattttgtcccgtaatgtacttttacggaatgtattctgtgatgtacgacaaccgttagatggagtaattttttgatctgagggctggggt

SEQ ID NO: 315111 - DNA, 2116 bp, Cannabis indica
ataatatttaaataattaatatgacgtagacacatgtacatttgtgtacacttgggcattctacttgacagttaacagaattatttggatggaagtgtaaatagtaaaacaaaatggtacacttgaatctcaatattttctggaatggaacaagattctcgaaagaattctcagaaaactccattgaaaagggtcctggttgacaaaatgtcaacctaggtgctgggccagccccaggtgtcaacttggacgttgggtccaagttttggcacccaagaagtattgtttcttcaacgaaaggacctattgccctattattgatgaagacgaggaagatgcaaaaattaaatctctaatatgatacttgaaaggcgcccaaattgacagattgtcacctaggcgctaggtgctcggggccccaggtacttaaaaatgaacttgttctgattcttattctaatgcctcaaatatgtatggagtatgtctagtttatttctcattgcaattgcaatttttgaccctcctttttcactaagacggtcccggaaactaaaaccctagttgatgatgtcaacttgggcaccaagtgaaaccctaggtgcccagtttggcttccaagttgcaggttcatgtaatttcagcttccagggcttggattaggttgctatatgtcttcatggtacataatactgaaagataatgagttgaattcaagttattgaagttcaaacttccatcccgaagatcctaaagtcaactttggcgcaaggcttgggtcccctcccaagtcaactgctatgactcgagtctactctatgtgacatcacccttcttgccacgtatcaaacattgatatcgacatcatcaagaaaagtttccaggttaacacacttgtattttggagccattagagctccttataaatacctctctcttccattgaagaagggttggataagaatcatttgtaaggtaatttagagattcaatacaataccattttcttttttatgttttgagctcttcttaagttttcatcttcatccctttgcatttgattttctaactaagtttagttgacaagttttcaccgtcaacagtttggcaccgtctgtgggaacaacaattgctagctacgttagttcctaaaccattcaccatcatctttaagatgtcaagacattcccatcgcctctgagaaaatggagttcactcggatgaaaaccagtcggtcaccacagtaagaggacatcaacctcttgtcgccgaaaagggacctagaaaggaaaagcaagtgtgcttgatgagttcaagctctcgggttcactgctatgaagaggaaataagcggccttcaccagaagaacaagaggctagaaactactgtggctggtatgcaaaatgtgttgaatgacaaactcaaaggcaaaacccaagccccgcatttccgtcacaaaagttgtcgagtgggaaacgagatctcaactgcatatgcaagaaaatgtgattccatgtcatccactaatagcaccccaagagatgaatacggaaggaaactgtcccgagacaactcgagcctacccactgtaaggagatttcactgagggaaacacccataacctaagtaagagacttatctaagaggtctcatattagagggcacatcgcatatggctcccccaagagcatggtccaatgaaaaccacaaagaagaccaaagttcccctcactaacccccgagagaagatgagcgagaggatgaaggagttggaggcaggaatgcaagacctacgtcgaaagatagctatcgccacgcaacaagacttggatgatgatgaggattttgatgaagaattacctctctcgaggtagattcaaatggagccacaactattgaacttcaaggagccacagatgacaccttataatggtaccactaacccaaagtaccatctcgatgtatttaatgagctgatgaagatgaaaaaaggtttcatgtaaggcaagatgtaaattttttcgtgatcacatgtaaaggaaccgcgtataaatggttcaaatggataggaccaggggcgatcactgttgggttatgtgccctaaataaaaccctttac

SEQ ID NO: 315112 - DNA, 1979 bp, Cannabis indica
aggctaactacaaaatcaaagaacacaaatacactcttagagatcaaacctaccatgtcaggattagatccatagacctagataaaccattgatatttgacttagaaagatatacggtaagtttaggatatctatctaagatcaatatcggtcccttccaatgtatactccatacattcggtactggtagagaaaatatgtttcagacccgactcatgcttgagttatgaagccattgaactacagcgaacttatcctacgaagaacagccagttcaaattcttgatagaaaggagaaagttctttggaacaagaccatcgctttggtcaaagtgctctggaggaacagcaaggtggaagaagccacctgagaactagagtctgacatgagaactcaatatcaagagttgttcaggttagatttcgaggacaaaatccttttaacggggggataattgtaatgaccgcttttcataatatggattagtgaaggtaattagcactaattactgatatttttatattatttgcgaatttaaattatttgtgggtcccattgctagagatgggcattagagttctaatttctcaatttcagagattttattaaactctaggtgtatgagttgtgttatatgtgaattatgttatttttacaatttttgatcggcgacaacggaaaatgcaatggatggttagtttggtcacatgggtaggtatagaaccttatttcttagtggtatatatgttggaggaaatagagtaccgggtttgagcggggctatgaaatttgatcattttaccccttgtcttgaaaatgcctaagttataagtttaggggcattttagtaaattaccaagagaaaagatgtcgtggctgccaagggagtgacacttggttattctaatttcagcaaaggattaattttactaaccttcattcaattagcaaaaagcaaaggaaaaaacaaaaaatagaaaatactcaaagaacactctcttcccttctctctctttgaaccagctaggaaccaagaaggttgttgttgatttttgtgttttcagtaggaattagaggaggttttaatcaaggtaaaccatagacactctttagctatgtttttctcaaggttttaatttgtttctactagtgattatagagaatagtggttgtttgggtttgattaggttttggttcagtttttatgttcaatttgagttgattctaggttctggtagctggttttacttttttgtgttggaatcacacaagtttgaaatttgaaactcaagtttaggtctttaatgcatgtttcgatttagtgagtttttctgggatttactggttggaatatattgtgtataccctgtttaggtactctggaaattttggtagcaattagactagttttgagcgagatttgggtttttttggggcagactggtataaaccggttaaccggtttaccagtacctataaaatcggttcaccagttttgataggatccccgaacaacccattttcttaaattttgtccatttcagttccttggttgggtgtttccctgtttcctaagatagtgtagtccctagtgattataatagaaccttaagttgtaggttcacgttcccgaattagggttttggacatgtaatttacccagttttaatatgtgattagggcatccatccagcacgagactttccgttcaagtcggccgactcacttgaatctagaaagaaggtaagaactgtgtataatgtgtaatatgaatatgcgagtgtatctatatattaaatgtatatgcatgcttatatgttagttacactaccaatacttgtacgattacaggaaagtacaggttgtgtgtggtatatcactcaatggcactcagggtacgaaacataccctaccaacactcgtacagttacgtagtgtgtgtggtatagtggttgtgccctagtatggaacgttccta

SEQ ID NO: 315113 - DNA, 1773 bp, Cannabis indica
aggtttgccttccaactcacacatcctccttgcattgtgaatacataacttgtaatggatcttcttgtgtctattcaacctgcatagtctgagtcaacatagcctgagacatcgacttctattttatagcttttgttgtaggtgaggcctatatcaaaagtgtctttgatgtatctcataatccacttaagagcatcccaatgcttctctccagggtctacaatgaatctgctaacaatgctcattgcatatgctatgtctatccttgtacagaccataacatacatcaaacttccaaccccactagcatagggaactgagtccattagctctttatcttgttctgttttgggtgcttgatccttaaacagtttgaagtgtgaagctaagggagttgacacaggttttgagctgtccatcttgaacttctgtagtacctttctaaggtagtttccttgtgtcaaggtcagaaacttagatgtatttcttcttattttaattcctaggatttcttggctttacctagatctttcatctcaaattttgtgtttagaagagccttcatttctccaattcactcttgcttttcccatcaacaggatgtcatcaacatagaagagaagaaagagtgtaccattgaagtatacacagggatcataggcacttttggtgaagccacttctcaacatgaagtcatcgaatctgagattccattgcctaggagcttgtttcaatccatataaagatttctgcagtaagcatgccttgtatctatcttcatcaaaaccttctggcatcttcatgtaaatgatctcatttagttttccatggagaaagacaatcttcacatccatttgcttaatttctagatcctcagaggctgccttggccgtattgctctaactgagacctgattaacaacaggtgagaagatttcattgaaatcgacaccttctctttgagtgaaccctttggccataagtctgaccttgtatctcttgctatcaacacttgatagcccctccttttctctgaagatccatttacaactgatcaatttgcacccttctggttttctcacaatagtccatgtttcattcttcaacagagattgtttttcttcattaatagcatgcagtcacttgtctctgttcttgcaattgatggcttcttcataagtggctggttcagaattctcaatctcacttgtaatggtcaaggcataagctatgtaatttgcaaaaccaaatctagctggtgcctttgattttcttctgatcctatctctggcaagttgataggtgtcaagagagtcatcttgggtctaatctgtttcttctacaagctcttgttcagcattctcacttgtctttacttttgatctgacttcaacttgtacctgtctagcctcaattctgatctctgctttgttttttagtttcatggccattaccttctcattgtaaaccacatccctgctcattatgcctttcttgaaaccttcttctagacaccacatcttgtatcctttaactccatcaggataccctagaaacatgtacttgattgctctaggctgtaatttctcctatttgacatgcacatatccaatgcatccaaacactctcaaattttctagatggtgattaaaataaattgaattatttccattttagtagtaattttcaaataaatattaagaaaatattaatttaagttgtattaatttaaattaatttgcaactcaaatttaaattttcatgagaatatatt

SEQ ID NO: 315114 - DNA, 1084 bp, Cannabis indica
taatgaaaaataaattaacatttgggagggtagataacaaaagttggcagtcttttattaaaaggccgaaagtgggcttcattacttggttgcttcgaatagctactgaaacaagattgtccatctcgatctgaacatgttgccaattattggtctttacccaactgagagcttctttaatccccatggcttcgatgacttcagctgcatatcttccactatagcaaccggcccgtgctgcaacaaggtgaccaagatatggtttcgggcaacaattctgaaaccatacttattgtcgctatcaaagagtgttgcatctacattaatcgtgatagtcttttctgcgggtttagtccatgattcagcgccatcaccgatgttttccagagagattgatgataacgaaattttatcctgagctttattccagtgatcaagagctacttgtgcagaagtactaagcacgtcattaacagaggattgtttctttttccaaacgggcaagagatgaggacatggctgatggtttcaggttgtagattacaaacaggacaagtgactgaaagatcgacatgtttaatcactagttggacagggcaagtgactgaaagatgtacatgtttaatcaaattgttttactatctctattctttttttttgtttgatataattaagtgattttattacgaaagcaaactagatcagtagtaaccacaatgggggctacctcccgaagacgaccctcaacgttcaccttggcacaataggcccacacagccaaggcgtccgcgatagtggcccacaccttaattaggtcaattatactaagcatggaggtcgtggcccgtgtccaatttacgaaatcctaaaaagttgaatttttagaagcgcatggcgacatagtgtggactatgttgaggcgcaggtaggcattttttgggcagcaagcttcctaatacaacgtaataatattagccataactctttcgaaatttgacggttcaagatattttgaaaagctgaaaaagagatctaaaacttttattcacaatattttcctaaaaatgaatgcatcatagtcaaa

SEQ ID NO: 315115 - DNA, 969 bp, Cannabis indica
atccaaggcaccgaagtggccaaagaaagctccgatatcgttattttggatgacaatttcgcttcagtggcaactgttctgaaatggggtagatgcgtttacaacaacatccaaaagttcatccaattccagctgacggtgaatgtggctgcacttgtgatcaactttgtggctgcaatctcagcaggagaggttccattaacagctgttcaactattatgggtgaacttgatcatggacaccttaggagctttggctttggccacagagaagcccacagatgaactcatggaaaatccacctgtgggtcgaacagcgccgctcattaccaacatcatgtggagaaatctcttgagtcaagcattttatcaaatatctattcttcttacactacaattcagaggcaaattgatattcaacgtcaacgagaaagtgaaagacactctgatcttcaacacttttgttctctgccaagttttcaatgagttcaatgctaggaagctagagaagaagaacgtgttcaaaggaattcacaggaacaaactgttcttggccatcatcgccattaccattgttcttcaagtgttgatggttgagtttttgaagaagtttgctgacacagagaggttgaactggggacaatggggcgcgtgtgttggactcgccgccatgtcttggccaattggttggattgtgaagtgcatacctgttcctgagagaccagttttcagctacatcaaagccataacatataataagcttcaatttttcatgcacacaacaaaaccttgaactgccttcttcaactttattcttttcatttattattttcttcattaatatttgtaacattttttcaacactcacttttcttcattatattcttttcattttttgaaccacttagttattttttgtaaatattatagaatcattttctcaatatttaatataatttattatttttct

SEQ ID NO: 315116 - DNA, 1586 bp, Cannabis indica
gaagtaaaaaagaaataaaaaaagacaaagttaacataaaaaaagtgaaaaaagaaaactagaattttttagtacctactttcgtaaaaaaaaataaaaaaaaaaaaaaaaaaaaaaaaaaacaaaaaccaaactaaaaattggggaggggggaattgggtgtgatgacatcatcaaattagtatttttataaatataaaactttttaaaatataataaggtaaaaaaatattttaaaaaaatgattgggattaaaaatgtaaaaaagtagctaaatatgacacgtagtataaaaatccttaaaatttatgataaaattaaattgtgacaaaaaaataaaaaaaattgaaagtgataaaatagtatatgaatgggatatttgcggcgaaactcccttaatctttataatagttatacatatgattctaattaaaaaattggcaaaaaaaagtagcttatcttacaattttgttacagtcgtacccttttttggttgttaagtgtcaattaagtctattaagtgccaactcaaaaacacgtgacgacatatttctttagtttatttaatatgtggtccaataatatgttgccatatgtttctaagctgacatttaacgactaaaaaatggtacgattgtaacaaaatctaaagataggtacttttgtcactacttttttttattagagtcatatgtgtaacaattacaaatgttaggaagaaattgaagaatatccttttttttattacaataaccaaacttaccttcaaataaaatttaattcataaatatctctttttatgagtattatacccaaattatcctcacaaactcacataactaagacataatttcaaacataatagatttgtattctttgtagatggatgtgtaggtttgtaggaaagttgagacaaaattttgattagagacgaatgaaaattatcgtgaagtgataaggatagaattggtagaatgattgaaaaaagcggtaaacataataaattttaaaacagagagtaaaaattaaagacactaagttaaaagatatatgtagtgtaatttctttcaaatgttaaggggtttcgccataaatatctctatatgaattcaataataaacatataaaaataagaatatatatatacatatataatatacagatatattgataaaaaatgattcctaaaattgtttcagtctgataagtatatataagaaacatttctcaatagatattacctattgatagatactaaataaatttaactataaatattaatttttaaaatattaaaccattagattttgatccgatgacaaataataaaagagaaatttgaatatctatatttaatttagctacttaattaaaaaaataactagtaagggatcctataagctgggaaggtacaacgagaacatggaggtcgttctcctaccaagatattggaatggagagcacctccgcaaatattgtcaataaccagcttacagaactctactctaacataacagttctatctactccatattagagtacaataagcgctagcactcacgacccttcttgggcgtggtctccca

SEQ ID NO: 315117 - DNA, 1625 bp, Cannabis indica
tttagaaagttcttatttaggatgtgaataaacatacttgtgagtagatctaagatcctggtaaaataatttccaacagatggcccagttgatcaagtcttgaaaaataaggcgagaagacgtgacaaagtgttagagctctggtgtgaagagcgggaaaaatttgaaacttaaaaaggtgatgaatgctgtgagcacttaataaataccaagggaagtggcttccacgaggagtgaacgatcttaatcattgaccaaaatggtatctgagaatctgacggacggggagccaagaagttgcatcgactctaaacatttgacatccattacggcaagccatgagaaaggtgctaagcaagtgaagagtcttttcagtcgattcgctgctatttcgatgtctcactagacacgcgcctagcacgcgcgtaaatggcaaaagtcatcatttaaagcactgccagtatgacaacataaataatatcccccatagtaacaaatcacttgacggctacttacacaacataatgagaaaatcgtagatacttcacgtgttagaagccaatcatgaggagacgagggaacactataagctcccagattgcgtgatgccctagaagcttgggggtaaatattgtccagatttttataagcttgacacaaggactctaattccataagcctaaatggtaatcaaccagttagtatccttaatcttagcccctgccaaggatctacttaagctcccgaaaagaacctccacaaaggatacgctccatgcaaggcaaggacgcagggagcattcgtgatcagtagtctctcccagtcccagggagtgaagctgaatgccccacgaaggataagggctttttagaggacaccaatacaggtcacaaaagaagtcaagatgagttgtaaccccgtttagtgtcacgtggaagctccgcccgtacctatcgggctgtagacgggacaaccatgctttttcaccaagacttgtcctccaccttatgccttagtaaagagcatgcgcgcccagttgtacttgctcaagtgatccaacggtcatcgacaagggcaattcaaaagggaggaccctgaggtgacatgtaaagtgatcaaacagtacaagctgacacccttaaatgacatgtgttgaatcagccacctaccaaatcaacggtcagaatttattctagtaagatcaacctaacaataatgtgaaggaaaaaatggcctataaatacctttgcattctataagatagggacaactctccaaagttaaaaaacattttataatatataaaaactctactaaaattcctatgaagctttttcttcttcttcaagaggagcaagaggaatagagagcactggtccattgtgtatttacttgtaatgttaaccacctgctgatatgactaataaaatagactcgtggactaagaatagttaacgcttgaaccacataaaaatctcatatctgttatttattatttcactttttcactacaagaaattgtgttaataccggcggtattattcccggcggaatagatccgccggtaatagtctgggtattactggcggatttagtaatccgccggtaatagttattaaataaaa

SEQ ID NO: 315118 - DNA, 610 bp, Cannabis indica
ttgttgaagttcaccaacgaggccttccaactgcttcagcttcattttttttcccctgcaaaatcttggacgaaacaatggaagagacgagaagactcagttcctaaagataaaccctaatttttatttcctccaaaaaaaaattaaacaataaatcaatttttaatagcattttttaggggaatttttatatatagtaagtaattactataattttttttttgtacgtattcataactctaatttagtggatttaaataaaaataataataaaaagaaaaaactcaaaaaattacacatgtttaaattttcttcaatgaaatttagtattatttgatgatggcggtttttttttattcaatgatcattttagatgatgggaaaataaaaatcatgttaaagaagaagagtcttttccatttaaaaaacttcattatctatcataaaaatatgttaatttaatttatgagctcataaaattaccactaacataagagagacattctagaaaaactaaataataaagttttaatgtatgataataagacactttgagcccataataatactacagtagaacctctacccaagaatattctattcaagaata

SEQ ID NO: 315119 - DNA, 2133 bp, Cannabis indica
tttacgtggttttgtagttaaaattctacatagtccacgagtcaatcttattcatatttctgagtatgttttttcaaggcctctcgcgtaagagttttttttcgtcccccttttttgatcttatttgccactatttataatttcatagtggcagttaattacaaagctgaccaaaatacatacggctattatccctaaaatcatgggatttgattacaaaacaagccaaataaatgaggtttttacacaactatgaatatcctgcctttattgggccgagatgagcgcataattaaagagatacagtaagtcgtatctcatagggatgcctcgccgaggagggagccaagatcactttgatagcgagcagctgcttatcattttagcttctcgagactaatattgtcttaaccctgatggttatactttctggggtcgagaagatcttcctcgcatgcaaaatatattttagcaggataaacgcctcgctgtttgtcatctttactcgccatactatctgtagtcagtttttatatcgcataataaacgctaagtatttttagttttgtcaatttctctttcatgcaacgaggttgaggcctcgtcatgctcgtatgcactcacatggtttctcgtcaatacataaattagcagtttgtatgtttctgtctcgcagaaagctattcagccagccgaatctaccctgcgaattatatttccaacaagtttttccatgctaagcgtactagtcatttgtgtatttgagttcttcccagcttgacacgtgtcctcctttgatgtgcttaccgaacttcaggtataacacttttgattagtggtgaaactctgttgcaagcttttcttaggcaaacatgagaacatacattctgtgtatttataagcaaaagacttatggaatgatattgtctcctggactaaggctagttaacgcccccaccacgtacaaaactatttgtctcattttatactttttctttttgattatttattcttcagttctgattatttttattccgtttctgaaaatctcgggaaacattttagtgctttcattgaaagctaaagaaagcagtgagaccacttgcagattatgtctgaatagtcatggccctcacctgaactaaatctgtacttcgtttcactagtcctagtgctagagatggagattatagtgagccttaagaggtgattagtcatcagaaaagtcatcaagacgatcccatctttgaggatgcaaaatctagagaaagtagttctaaggacgttgaagttaatagcaacaacacaccggaggatatgcatgaagacaatcctcaggacaaagtcgctaatgataaggctagggataagagccaacctaatgagtcaaaccctatggtcatcatggaaagacaactccaactggccgaaagcaggttcactcagcaagatcaatttaacgatttgctactcggtaagatgactagaatgaagcctatgaagatcgccctaaccaaactctctcttgacatgctagctcccccaatagcagatgcacttgagaaagaagatttgaaggaccctggaacttcaggcatccacaaagacaaagtcaaaagaattgttgtggaagaactaaagtaggctccttatgcaaaacaacctaaaaagtctaaagctactaaacaacatcaatagaagaggaaaggaaaccatgccttagggcacgcgtgggctcttacaaaattatttcttactaatatattagtttagaaaaagtgcagtttaattaaaatttgataatttaaaacatacatataaaatttctttttaaaataccactaaagtatggggatccactgtttgtgaaatttccttataacaaatttaaaaactgatattacaaaagtaaatttagacttttacacataaagaaaagaagtcgatcatgcttcctagattccaagacacaacaactgatatgtacattgtcgggagacctttgattcatggttgaacatagctaactttcctacctgcaccacgaaacacccgtgagccacaaagactcagcaagaaaagttattaaatcaaaagcattgtaaacactgatattcacatctcaatataaca

SEQ ID NO: 315120 - DNA, 725 bp, Cannabis indica
gattagcaaaccctaactaattaactgtgtataattatagaattatatttttatataatttattatatgtgaattataatgatttatgacatgttaagaccccgttgtttaactagggatattttagtaattttgacctgagaagcgtaaaactatgaatttaaattaattacgtgcttctggactatattattatatagtatgtctgttttgtcatttttcaagtgtgttctgacaagttggcacggtatagtcacaactggtatttcgggcagaaccgggtttcggggccgaaatataattttgggatgtttgattggcattttatttttatatgagaaatctgaaatctattatttatatatgaaatgtgagaattatactttttcccttatatgcttgaaagtgagaatttggccctaagggcaatgtggtaattgtgcattttgtttataatttattaaagggaaaatttttaaggaaaagagggctttatttttctacattttccagccctagcagctgaacacccttctccctctttatctccatattttaaatttgcttatttttgaagaaattgctttggaagctttgattttgctgggttctttgtgcttgttaacggattagaggtagttctccgaccatttctaatttctaaattgttgctgaaatgagaatttaaaaagaatgtttttatgagtaggtgttcttgaaatgca

SEQ ID NO: 315121 - DNA, 2814 bp, Cannabis indica
agacttatttatactatataggaaaacatacaaaatagtttctcaacaatgtgcaattgtttcaaaaatatttatcttcaaattttttttacaaactgataaagtgtcacacattagcaaaaatacaaagaaaatcatataaaatgctatctatcagtattgttaacccaaaaactattcctagtgatgtggacatcaatatttgacatgtggcaagaagaataatgtcacgaagttgagtagacccgagtgataaattgtacaacctttgttcttctagagttctcaacacatgagcatgaacaatagagaaaaaaaatagttttcttttaatctctatagatttcaaaatatatagtgtaaagtgattctgatttcccaaatcaggcttctatttatagtagttaaatccctttaattaaatcattatttaattttttaaataaataaatatctataaacgaattcaattactgatatttacaagggaatctctcaactacttgggagaatatctcaacaaccttgaaatattttataaccacttttcaaattagatatttacctaattgaattaattaaataattaattaaaccataaagacaaattcaatagggacaggaacaagcatagacacctaccattgtctgtaggataaggtttgtgtcttttgtcctgacaaatcttgtctcgataaattttgtcgtatcaatttttatcttttttcctatttaattaatttgaaaaaattatttatttattacaaaaataaataattactattttaccaattcaaaatagattttcttcgaatatctttatactactctttatccctacccttgacaatgtttcaagatggtgattcggggaacatggatctataattctaagctttaataaactagattatttattgagtgtcatcaaccaaataatcctttgtttattaattctattattactccactaaaaatatagaatttcacatgtgttagtttgtaactagtttattaatcctttatttattaattatattagtaattgtagaattatatttactgagtttaactgcagtgtctattgatataatcaattctaatgattagccctccatgtgttggttcgtaactagttttggtcaaaatactattttacccttccaattacttctttgtcctttagttccattaattcactagtgaaagtataatttaagatccccatgtgaatttgtgcacaacattccagttccagaattaatacttaaaaggaaccaacatttgatcagtaaggaaagtcaagattccataattatacatcatgttcccagtcatccatgttattatattctcaaaatagaagttggaagaatcatcttttctaagagactttaatgagtgaatcaaaaaaactaataacatgaacaggatttcatgataactcaatatttaggccgttctactattgatcattgttatgatataaattaggtctttatgataaatgacatcttaatgaagacaactttattcatcttggtccttgtcatatataatctctattatctacagcaccttaacttggatatctcaatacattagtaatccgagccaagattacttgcaccaaaaaacaggcatcattgaaccatactaacaactattgattaaagattccataactttaacatgttgctgactattttattcatagctaagtggtcttagttctctgtatagctacaagccacaatctcataaatgaataaagaattataaattattcaataataaatattaacaatttaacattcacacatatatcaagtgtttaactctttattcaacaattagaaatgtctttataggcttttcagggcataaaccctaacaagatgaacccctgaaatagggatgttaacaatttgatcaagtcattcaacgagagagttagatctcaagttgaagatcctttccttgttagggatccccattggggaaaagatccctttgtcctagatggaacttagcgcccaagggaccatgggcagacctcaaggcctaaaggggaaaatatgtcccagacaaggccatcctgttagcccaatgatggccaggtcttgcctgacaaattatatggcagggctgacaatttccaaggcctactcaggggcaaagaaggggttgaggacatcccaccaatacaaggccaaagcaagtctcgtagtgggagtcttaccccaatcctaatgatgatagtgccactagtcacccaagtggtgaacacactaaccagagagatcaaagttctacgcacaataacaatgttccaccccaaaacagcccaacacgtcctagctaggtggccaaagagtctgtgtttgctagaatgggccctcatgtcaaagttgatctttaggctagcttgaatcgaagaaagagtgctcaggatgggtatattccacccctgaacactcaaccaatatgatagaatcaacaaaacttgacaaacccaatagaagtgttggctggccaaccccctgtctacccaccggccatcctggccgactaggggttggcaggtcaaaacatgcccaggaaagcacaagctaaggttggtcctttattccaagcacttctggatcaaataaagaacatgatacaaggcatgtctagcacaaagctaaccaacttagagttggacaatacctgagggtcacctttctctgtgcgcatcaatgcgctgcgttaggttataattagcctgtgtcacgggtctttaaagttagcattatctcgtctattggtgtc

SEQ ID NO: 315122 - DNA, 236 bp, Cannabis indica
gatttaataactttactaactaatacttgataaaagataacttaataattaataacaataccacttaaaactaactaataaatatctagggaaaaatgacaaatccaccttttgttaaaatatgaagtatctaaaataatctagggtaaaatggtccaaaactacaaccctgaatatttctgacattctaaatgtctaactatattgccctgctaattttaagtaactataccgta

SEQ ID NO: 315123 - DNA, 3318 bp, Cannabis indica
gtgatgcatttacctaaagaagcaatgcttgagggaccaatgcacttcaggtgggtctatccaattgaacgagccgtgtctgtgtataaataatatgtaaaaaattaatctcgactagaaggatctatttgtgaagcttatccagttaacaaagccttaagcttttgttcaatgtacttttgggaagttgaaactcgattcaactgacaagatcaaaatagtgatgtcctcccaaataaacttgaaagggaattctctgtatttaagcatgttgagcgaccaattggtaagaggaccatcgtttctttacaaatgtaagagaaactaaaggcagagtggtacattctgaataattgtaatgaagcggagaagtatatcaggtaagatactttttacattctaaatttagctgtcttcactgatgacattctctaacatgattatatttgtgtgtagttagcataggaacaagctacaacttagaggtgatcaaaatcttaacacaattcaagagaatgagtttcctagttggttcaagtctcgagtaagtattgctttctactaattttgtcattcaaatgcgatttattgttctagtattgattagacttttttactcaatgatagatcaatcaactcagagccgataatcctgcaaaagtatcagatgagttgtacgccatcgcaaatccctctaatcaaacatgttattgttatccaatatgtattgttaacagtgttaaattctcagttgaggatcaggatcataattgtaacacctaaaacaatggtattttggtgtctggagaggatggtaacaatttttatggtgtactcaaacaagtgtacgagttcacttacttgaaggattgcaatgttattatctttaggtgaaagtggtgggacacaaacggtaacaggacaaaaagtgatggttttttcactagtttctctgttgccgtgaatggtaccaaaatgaaccattcatacttgcattctaagaaaatttgatatattacattcttgacctgaagaatggagttgattggaaacttgtcaatgtttacacccctcgcaatatctggaatttctcagatgaggatgatgatgagaccacgactatacaagaaagaaactcttcgggaatcttgttagtcattcaacttgcacaactggacgatgttaaatatgtccgtgatgatgttaacctgattaaagtgaccaacagggaccgtgagcagcttaaccgtaaagatttagatggtttcattataaaagtgatgatgaagacactagtgatagtgagaatgaaaataatatacatgttaatgatgatgattacttgtagactttaaagtattgtaatatttaaacccatcgttaattaaatcaaatacatgtctcttttgttaatagtttgattaattaattattcgtagcttgtatgtgtagaatggctgatgcaggtgcaagcggaagtaagaaaaagggagttaagggaaagtagaagggaaaatattgaacaagaattggccaagctgcttgcaagccagaaattgaaatttagatttcatatggtgatcggggcctcagtagacgactatggcaacaagtttaataattatatcaagtttcttattcgcaacaccattcctttgaacaagtttgacttcgaggacgttgaggatatggtcattcagactatatgggacagaatagcggtaacattctaatttttattgtaatagatcaaacaaaattgttatacaaaaaaataatatatatgactttaatgtttatttcttttctagaccaagtttgagttttcaacaaataattctatgttcgcagattacgtcattaaatcaacgtcaaaaggattacgtgactagagagcatatacgaaaaaggcatggaaggagaatattaaaaaatatggggaggaagaagcgactaggatatcacgtccaaatatggtgacaccggaggtgctagtagaggttatcgcctactggaaagacccaaaacaacaggtattaattgaaagttgtaaaacttccattaacttatgattttttttttctcaatttgctaacaataaatttactttaaattataggcaagagccgaacaaaatacaaaaaattgaggatagatgaagattcaaggtggatggggatctaagaccataattggtcacattgtgagcggggtatgatattttcaacatagtaataattttttaataatattttctaattttttatattgtataaaaataggctgatccccagagaggggaacttcctagtgttgtggataattttgcaaagctccactgcaaggacaacaaatgacgcgatgagcacacacaacagctgcatgtaagtaattttatatttttaataaactcgttgtatattttaatttatatttaactctaacatttgatggaaatttttgtaggccaaaatggttgagattcgtgaaactcaaccagcgccaaccaatgtctcattctagtacaatgtcgatcccgctcaatttcatgcagatatatctgttacaacacaggtgctgcgtgagcgatcacgccacttaagaggactgggccaggtgccgagacttaacacaggggcaaaaagagcaactcccaaggcaggtccctccgggcagcccactatcactcaagaggaatatgagacactgaagcaaggggtggaagagcagaaagcacacaacaagtggcaacaacaaataatgcagattcagagtcaaatcatgagtgtgtttcagcaataaatgatccaattggctagcactgttccaagatttaacatgcccgagatgcctctgatttcaccgattccacattttagcctcctagccatgttgctgggtcctcctcacagactgcccatcccggtgatgacgataacgatgatactgctgtggatctgtagtttttttagtttacaatgtacaatatattataattgtttatggactaaaaatacttttctttagtttacgaaattttatgtagttttgtaattacaatataaatttaagtattataatatatttgatatttatttatttattatttttattttaattttaattttaactttaattttaattatatattataaatatttaattgcttttttaaaaaaatactttttagctggtgcacattaactcgctgacaaagataattaattttttaatattaaatattttgtcgacgagttaatgcatcgacaaaacttcggcggtaaagtgttaatttactgccaaagttttggtcggggc

SEQ ID NO: 315124 - DNA, 1549 bp, Cannabis indica
gacccttatacaacgttaaaaggcttccttaggtcgtacataagttatctcaaacatccactttcacccatgttgcaatccacttgaagaacgaagaaaaactcgatatatcgtatcaaccgtatactctcaatgtttcactcttttggcgtacgaattttgaacccaataatcaatctctaacgtgtttaaatcgagcaaaaagatcgccttaaaccaaaaaagaacgtttttcattcctcataaatcagctccctcgtacgttaagttgttaatcaacttaagttatattatattatatatatacgcagattatataataataataataataccatttaacactataataatatttaccaatattaatacaaaatatttgaaaataaatgataaatatcaattttattatctcacacgtattactactattattatacccacactaataataatatgtaccaaaatcaaacaaataacacatttatttaatatctagatatatatatatatttattagacattatgcacatgcccataaaatcaactattatgtaaactcatacatattcaaatctataaatatgtaaaatgacaaaatactctcagtggtaaaatttacaaaaatatccttctgagttagcagatattacagttcctcagtatcttacttttcaaagattgattgatgaattaaagaaacgcggaatgactgagagggcacgaaaagtgtgtgacctgatgttgttgaagatgggaagcttgaattgccagttcaagttatccatgaaatgagatgcaggggattcgatatggacttggctacaagcacaatgctaattcatttgttctgtgatatgcaaaaattcgaagaggcgagtttggaattcgagaatatgattagaaggggaatagttcctcagtatcttactttccagagattgattgatgaattaaaaaaatgcaaaattactgagatggcacgaaaagtgcgtggtctgatgtcgtctgttccccattctatgaaattgccggatacttacaagaaagatggagatgaatctcgtgcgcggaaatcctttattattcgaaaagttgaagcaatgtcacctatattgaaaacttgtaatgatcctagagaattagttatgtatagaggttcatctgaaaatgttgttggaaaggcgaaccggttgatagagaacattaagaagaaagtataacaactctctctttactcaatagccttggggagtcctggacaattttgagaatcatggagatttacacttgtttcatgtttctagtaaagtagtttatctaatcgttcttgtcttctgttataatgaatgcacattcatttctttttagtcaaatactttgttattgaaatgtaaaacctagcatgaagcctctctatggtcattcttagtggtctttcgaatgctttggatatttcttgtgataatggatgatctttactgttttccacaacagctttaaggtgagtggttaatcgttgataaataggaatctgcgttatcaaaag

SEQ ID NO: 315125 - DNA, 1435 bp, Cannabis indica
cactttttgaacttagcataaaacttatgctcccttaatttctataagaccattcgtaaatgttgctcatgttctgtttcggattgagagtatccaaggatatcgtcaataaaaactataatacagatatcaaggaggtccttatatacctgattcatgagatccatgaaatctgtagaagcattggttagcccgaaggatataaccaagaattcatagtgaccgacctagtacaaaatgtagtcttcagaatatcttactctcagattctcaactgatgataacccgattgaagatctaatttggagaaaactattttcccttgaagttgatcaaacaaatcgtcaattttaggtagtggatacttattctaaaatgtcagttaattcaattctcagtaattaatacacatgcgaaacaatccatctttttttttcatgaacaatattggagcttctcagggtgatacactgggtcaggtaaaccctaaatcttgcatcccttgaagctatagtttcaactcttcaagttttgctaaagccatcttatagggtgccttagaaactggctttgctcctgaagctaaattaataatgaaatctatttcttgctgtgtgtgtaaactaggttattctttgagaaatacatccaggaattctttcactaccttgatcattttaggcctgactatatctggtcttctagtatctattactactgctaagaatcctatgcatccaccatgcaataggtatctagctttcaaaactgaaatgatcaggatttgagaaccctaaatcgatcccacaaaaataaatggttcccttccctcaagcaaaaatgtcaccaccttcctcttattatcaatagtggttgcatacttagataagaaattcattcctaaaatgatgtcaaaattctctatggctagttcaactagattagtgctaaatttcctaccctccactctaacctacataagcctaatccaccttctagagataactaattctccattaggtagtagggttctaaaccttaattcataattattatagggcctatccaatttatccatcactctagtagcaacataagaatgtgtagctcccgaatcaaacaatactaaataacaagagttgttaatagagagctgacctatcaccaatgatgggctagcctcagcatcaacctgagtgatagtaaaaactcgagctagaataggttttacttctttcttaggttcttctttcttcaactgcggataatctctcttgaaatgtcccatgacaccgcactggaagcaagccttgcctttacactcacgcagatgatgcttcttccagaatgagcattctagatatgtgtaacgaccttcaggaccaccttgattatggttcctttggaacctcttattctgactcgagccaccaga

SEQ ID NO: 315126 - DNA, 2364 bp, Cannabis indica
tttttattttaacttgatatttttctttgttcgagaattgaggaaactgattttcgtagtctgcacgacacaaaaaatgggaagctacaattggcatccaggcacacgctagaggattcttctagatacacggaggtaagatcctttcggatacggactagccttgacagaagctcacttgagcaggcaatgtaattgctttcccaaaaaatttgataacaattaggctcgacccaatttaattatgcattaatcttcaattatgtagatttatagactatgtaagaaacgccataggctcctatagcccacttttgttaattaatttacaagggaatgagtccaaaaggaagaagaatgtggcacttttaggcgcactatctatatatacacacatgttacccatgccttttccaattttttattttttgtttttattttgtgttgttctatttggggagggggtttcgattttggaggtcctgaatatgatttctttattttttttttattttttttttattttttttgatagacctcgatacgatatctatatacatgcacacacacccttgtccttgccttttttttttctttgaaatcaacccttgtccttgtcatgtctaccaaaatatttactagatttttaatgtttggtgtgggaatattgtggtgtttaattttcatttatttattacattatgatatacacattgaggtaggtgattcgaacttgtaattttcactttgaactacatttgatctcatttattatatggattttatattaattaattaactatactagtggtctaggtgtgggctcgtaccaacctatgtaacatgacttcaaaagtatgatcccatctaaggtaaaattagatgtacatataccaattatactagtgatagaagtctcacactccaactattaatcctgttgggtttgacagcttagaagttgtaaatagagttcgagaatactagcatctccaataaacaggttaaaatttcataaatgctgaaaattgtgttaattagtacaaaatatagcatgaattaaatttaatactctaataaatataattttttttttttacacttttgttactcattaatgtaattagtatttttcttgacttttttacaccttatattaagacaaaagttattttactcttaatgcattagagacaaagcatgatttttggcctgggaccatgcttgatgctagaaacaaggagaacaccacccaagctgcctttatctctaggctgaagcctgaacttgctgagcatgatcggagaaactgagaggggctcttgatggctagcaggcaataagggaggagtatgctcacttgtccttcgaactcacttatgagttcaagctgcggaaccacggagctaatcttttatacatggacagtgaggcttttgtggagaacacgttggcccgaggaaaggtgctcttttagagtcggatggaggcggactaggccaccacctatcgagaggggtcatcataaagggaccatgaggaggggctggccggccaggatactgaccacaaggccagccaacatgttgattatgtggctggcctagactccagcaatcccaatcttacaacttcaaactcgactccacatgcccctacacacacatagacagtattttacattagtagtatttagcattatatttgtataacatagaacatattttcatgttttgtatggcttgtggcattttacttttagaacactacttattttcatgttccatgcggcttgtggcctttttagaaaactacatatgtttagccatagggccttcatgttcgtatttttggcctataggccctctgtctttgaacacttctattgtttggcccagttacttttttatcatagattatgtgaaggcggtctttaatcctggttatctgcttatggacgtgacaagtaagggtctaaatttactttgtcaagtcgaagtattcctgcatgacttagaggcaggtttagtagcttattctaagcgttaaaatttctctttataagttctttgtgctagttcaatgcattgtacggtatgggtgccccccaagtgaccatggagataggtctcttggtcacttattattcaccaagtttcactgaccatgactgggttttttctcggagtgttatccatagtacgcatgtggaactgaaagagtaactttaagaagtcattcttgtgaataaatagaacaagaaaattattttttattcattaaatggtctttgttgatgtgcaacttacataaattgaatttatacgcttacattacacagatttagcttatagatgtcaaatg

SEQ ID NO: 315127 - DNA, 1313 bp, Cannabis indica
gaaagtgattcaagaatatcaagaggaggatcgattgctggaattcttagttggattgaatgattcttatagatttgttagatctcaaatcttaatgtgtgatcctcttccaagggtgaacaaagcctatgttgttgttgtccaagaagaaaggcagagaggattgactaatggattcaatgattcatcaaatatggacaaatcatcatcgagcaactctggacaattagctggagctattcaacctttttgatcaaagtacaatttacacattattgaatgaatggtcacactattgataggtgttataaacttcacgactatcttcctggtcacaagcttcatggaaagtttcctaatcgagatgctaaggggcctctagggaagtctactactgtaaatttcataggaatggatgaaggaaaatcagagatgccaatggagagagatctaatttctagtctatcaattgaacaatgtcagaaacgtatggccttacttgctcataaaacaacaaaaaacaatacacctaatgtccatgatgaacaacatgtggtttttcatttttctggtaagaattcttttgctcataacaccaattggatcattgatacaggagccacacatcatgtgtgtcctgatatttctttatttaaaaacacctacattaattgattctaatctaaaaactattctcttgcctaatggtttacacactaaaatttcttgtctaggaacaattgttttaatactagatctaattcttgaagatgttctttatgttccttctttcaaatgcaatttattatctattaattctttcagaaccacaactaattgcactttcttattttctcatatatagaaaatgtgtcattcaggatactttgaagaccaaggtgattgggatgggtagaaaatttggcaatctatattacctgaattgtaatcagatgagtaataaacacctagtttttgtttcttcttctatttttgattctaaagtttcaatgaaacagcttggcactatagattgggtcgtccttcttgtgtaaaaactcatcctttgaataaaactttaaagtttcatgttgattctaattccttctttcattgctccatttgtcattatgctaaacaaataaaattgccctttacatctaatcacaatgttgttgaaaactgttttgatctaattcatgttgatatttggggtccatacaataccatggaaactaagggatacaggtactttattaccattattgatgattgttctaggtatacctgagtcaatcttatcaaacaaaagt

SEQ ID NO: 315128 - DNA, 1019 bp, Cannabis indica
tccgattctgattactgtatagtaaacgtgccattaatgtcatagacattcgtgtgtgacatcaaattagaaattttgtttagtgagagtaaatattaaaaacaaaactttaaaaataaatatatatatatatattacggtcgcataattaaacataataaattagtgaatgacgagcttgatgaaaattatacatattcagtcctctaaatctggaaggttacgatcttcgggacaccgctaacagtattttaattatgttgttagataacaacttttgtctatattatattattaatattttgtaactagatttcaaaatttcgagttgtaaatattttataaaagtatttgtatttggcaaagattaaattattataaaatattaaatgtattttttttctatcaaaattttttgattagtaaatattagtacattaattaaaaaagatactagtaggttgttacaatataaatatcaaaatttatataaattacaacatctagaaagatactactataaaaacacttattcccgacggttctcaaatcaaattttttcgaggacaatcgctaataaagttacgtgactgtttaaaattgtagacaatagtgaagtatattcccgatagttttaaataatcgtttagagtttctgactgtctaaaatagtcacgattttaaaattgaaaaatgaagtattcctaatagttttaaacattcatttagagttctcgactatttaaaatagtcacaattttaaattttgaaaacaagtataataggtatcctcgacgattttaagctgtcgggaataaatagtcgacattttaaaattgttagggatacccgttattatataaaacccaaaatttcaatttcaaaatcccaactgtgcaaactctctctctatttcgaaactcgatggttttaaactgtcggggataccattttaaatataaaaatccaataacgttcattccatatctcatttcattccaaatctctctcggccctct

SEQ ID NO: 315129 - DNA, 2801 bp, Cannabis indica
aaacaatgaaataaacacataagagattaaaaaattattacattgatggtagcaatatataatggcctctttaattcagatctctagcccttaattcatgtctgtagcagaacataatcaagatctgaaccttaatcttttctcctttgatttggttgatttggttcgacacagtcttcctcactatactagctaatgatttcacatgtgtgggcatactcttaatatcatggaccacaaaattttaagaggaaaaataaagagaaatctgaaaataacaaatagaaaatattagattttctttgattcatttttatatgacaaaagagagtctagagtcatcctctgaatcaaaaccctcaatgttctatttatagggcttcattaggtttagagttagagctaaatgggctgattagaaagacctaatggcttagaatggaccatcatggccgaatcccttatgaagcccataagttagaagtttaccattattttgctttcttaatgaaacaaacttctctttcttcagtaatgccatttttttgctctacttatttaaatattaattctatctatttgataattataaataattatcaaagaaaattactgtttacatatatttattaattacaccttctaaggtctcttaattaataaataaaccttgaattctctttttgtcttaattgtacccttccttggtaaaattcacaaataagacatagcatttatttaaaatcctaattgattaataattaaaactaattaattgagattacaaaacaatattatcccagttaatgcatggaccatggccctatgtaactaagctcttaatatgtagatttagaatttaccaagtaaatttcttaacttattaattccttttgactccactttagattcagaattatactcctgatagaacgctctatataccgaaaatagatgctctttgaattactcattattttaatctacatcgagtatggtaaaatttatctttctacccttcaatatattttatccttaaaatacttagctacttgtaaatgatatttcagtaaattaatataattactgaaatgagcgctcaatcatttatcgtgttaagccaagctcgaaggaaatcattgtttcacttctaaaagttatagaagctatagattatgtatcaatgattagcgctctcactcaattgcactaccatgtttcaagatgtaagtattgcaatgatcatcttgtcaattttaacgaacaagtcaaagagcacaaatgatatatttaagctagaacctaaccatctcaggattaagatccattgacctaagaccaactaagtgatattgacttaaaaagatataatcataagtttatgatatctttttcactgtcaataacagtctagtctgatgtacgctttatacatctaatactagtatactttgctaatgtcctagaaaagacattccacataatactgtgtaagtaaattttatcgttgattatcatattagtgtaaattcattgcattgataaatcatgagactaaatactttgaagtatataattatgattatttttcattatgtagacaacactataatcatgaataactacatgttcaggatttaattgaagttacatattaaatatataatcatgaaagtaatcatgtgaaccatgcaacataaaataatttctattattttatcacttaggaaatataattatatttaaataggttttgtttagggcataaatcccaacagggaggtgttgaggatagagggtcgaccctcctgatggaccttcagggccgaacctcttaaggaccccaagggtcggccctattgatggaccttaagagttggccctcaatggatcttggggtcagccctgctaacccgtcttggtacccgcagaacgttagtcatgagggcatggagaacgttgatcatgaggacgtgtgagacgctggtcatgagacccagggactttggtcatgagacccgcaagacttggtcataaggcttgtagggtgttggtcatgagtacctgttggacgttgaggacctttaagacattgagaacttgtgggacgttgagaacctgcaggatgttggtcatgagcacaggatgttggtcatgagcacctgcaggatgttagtcatgaggacccgcatgacgtttttatgtcattcacatctcttagtgagctcttgaaatcttgaacaaattaaatccatatatatattcattgaatttcttagggatcattatatgtatttttttttcttatttcaacatatttaaaataaatactttttttagatatatttttaaaaaatacttataaacttataaataaaaaatatatatatatttgacaatatgtacattatatataaatatttaaaattaaaaaaattgaaaaattaataaaaaaaaatactgttttttaagagtggagacttaatgttactaaaaaatcaaaagttgggagactaataatttgctaaaaaaaattggggatcaacttatcaagacttatatattaagggaccaatttgttaaaaaaattaatttaaggaccaacttattcaaacttatatatataaagaccattttgctaaaacaaaattcaccaatcaacttacctaatctatgtaattctatgtgttaattccatttttggcatattttattgacaaaaatattttattattctttgtatatttcggctggcatatattgatatggtttccctatttgtgtaaatctaaacttggaag

SEQ ID NO: 315130 - DNA, 990 bp, Cannabis indica
ccttaaaatgtcgaaataaattgtttttttattggtgaacaaaataggagataattagaagaaaaaaattgagagaaaattgtagtattttttattaaaaccctaattttctaacggtggttatggaggttttatgataggagtttaagctccgcgagtggtgtattgaatacctttcactttcgttattagaaaataactgaagaaaaaaaatttacactatagactctttcgatagcattattttacgaagataaaaaccttgaaggtttcatgcctttattttagttttctttttttaaacatttcccttattttcattgagaaaaccgaagaaaaaacctatatgtctctagtgagttatattgtgtttaaaaagttctcatcttgtattgctattcaataacaataatgtgttctaatacctttgataaaccagtttagtgaaaaataaaatttaaatgtaatataattttataatatttaaatcagtatatttattcaaaaagacaaaaataaattatttgaaaagtgaaaaaaaaaaaaaataacacacctagaaagagtaaagataaaatattgtaacgacagtattgagtacttgtttttgattgagttgcatgttttggttaggatgtgggtgcatgagagtgtaggttgagtgttgtttatattattatgttgcgaggtgtttgttatatgagttggacttaaagggagtagagttagaggttagttagattaaaggaatgtaaaactcaagtattccaagagattagaattactatcaattaaactttatccactataaaacacaaaatcttagtcattaaaattaaagtcaccaaatataagttgagtttgatattcttattctcaccaaatctaacccctatacaaggtcggtcctgagctaagacgaaaaagtcagccgcctcaggccccccaccgctcaagactcatttcgaaaaaaaaattaaaatatagtta

SEQ ID NO: 315131 - DNA, 1960 bp, Cannabis indica
tttctatgcttaatttagttactaaattaaagaaaatatcaaaaagatacctctttttacactatatcaaaaatatgtttataatgaaaaaattttaagtcaaagtcaactttgtttatcacttttttgccgaaaagcttttttcttatttttttttcaattgatgaaccaatctcaacccatataatgtaaaaatgagaaatatttctaattaaatagaaatattaatcataaaaactcaaatttttctaatattacccatatatgggtaatacccattaagagtgcacccatatatctatatgttaataaatatgaaaacaatagaaacaaaaaaaaaccctcatcatctcttctccttctcttctctctaaccaaagaaaaaccaagccacaaacccaaatttttttacttctctctttccaaaatcaatttccacaagctttttcagaacagctaagagtaagctagcttggagaggaagcttaaggtaagaatttagtttttttcttccatgaaagccttgagttcgaaggttgattttggtttctatagttgttgtaggtttggtaacactttggttttgattttgggttggtttagaagtagttttgattctttcttcgatgtttttcttgctgtggggtaaggaaagtcaagtttgaggtttaagctcaaagcttgagctctcgtagtggattatgatttaaagcatggtttttatttttgtcatgtttaatggatgatatatgagtgttctgtaaagtttggaatgatttggttaagtttggagctagtttggagggtttaaggttgaagaaaatcatgtttctagctgttcagaatcaggatttcagatggtaccaaccagaattttggatggtaccaactggaatgccgtttggtcagttttcgagaaatgctgaattttgtatttttgccataacttttcacttgggtatccgttttagacgttctgtataccattttgaagattgcaatgagctctacaatatgcactacgtttcagagccaaaatatgtattttattttaggatgttattaccacaaggttctgtagaaaacccaagattgttttctacgagtattaggtagtgttttgagataaacaattatcggtttattgttattgtgacgtagggttcaaaatcgttgatcgttctttatacaggtcggccaacatacgtgaactgagacttgaggtaagaaaagtatattgtactacacagcatgttatattgtaatgcaattaatatcattgataattgattgatattagaaaaagatacgattataatgaaaagattgcctcattaggcaatgacaatgtgatgataccatgaatgtgatatacaggctcatctgattaggtgatgcgatactcttagggacgtaccagacgtaggtacaggcattagtgacatatgagtaacgagcgtaggcacaggctcacttgattaggtgatgtgatactcttggagacatgtagatacgagcatcagtgatatgaaaaattgccaggttatggcagagaatgaaaccattgtaggttttcctgtcaagttatggcatagaatgaaactggtgtagggtttcctaccaagttatggcatagaatgaaactattgtagggtttcctgccaggtcatggcatataacaaaaccattgtagggtttcttcctagtgatgtatcaagcgtaggtacgagcgtcactgacatatgataagtatcgggtgtaggtatggcctcgtcgtgattagatgatgtgatatattaatgccaagttatggcatgggctcactttattaggtggtgtaatgatattatatatgatactgcattatgacacgtgcttttctaattaggcactggaatacaagattatcaaactaaagcatcgacttgcctgattaggcaatgtgatgtaatgaagatgg

SEQ ID NO: 315132 - DNA, 1865 bp, Cannabis indica
catgtcgaggcttctgaacaacagttttagggagacactaatcatcctgaatggtttgagcttgaagatcggtacagatactagacacaagaggccaaagcttaaaggctcgatttctcagatcatccctctcaatggtagctttgagaagctcagttgccatcacttttccaccacgcgccttgtctaagtttatagacttaggaactgtcagcttagctctaatgaactgagcaacatggggatcatattcatcaggtaaccttctacttctcttcaccctagccatctcaagttcaacaatttaagctacttacaactcaaggaaagtcaaacttggtcggaaaaagtctaagtagcttagaagagttcttcaaggcaaaagaaagttgttttggacttttgggaggtttggaaaaattatttcgagggttttttttggagtttaggagtccttggagtaagatcaacaaaggaagagaagaagaaaaaataataataaaaaaaatggcgtcaaggaggaagaaaaaaaattgtttttctaccttgaagtgaagaaggcttgaaggcttgatgaaggtgaaatcccaaggttctcactaaatgctataggcgtgtggattaaaaaaggaatttcatgtgaaaaaaattggttctcaaatcacttatttatagttgagtccaatttcctataatcctaaagctacttgaagtcttttaatttaaagtttcctaaggaaaaggtaaatgataagtaagagatataattatatcttttcctttctcctttttaaagctaattgcgaaattctatccgaataggattcgaaatacaaatttaaaatgtaacataaattcctaatgttattgggactaaggaaaaattagcaaaattaatggaaacagataaatgataagcaaaatgccaaatgtcttttctcttcttcctttctctctctaatttcgaatggaatgttcaacaaggattataatttcaatccagttaatcctaatgccataacaaaaataagaaaattttcaaatttttaatgaaaaaggaaaaagataagtgaaaaaaagataaaacttttcctgtttttctttattaatgaattttcgaaattcccaaggattaatcaaaagtgttcaaagtcctaattcagttgggaatgcttgaagaacaaatacaagtgcctaagaatgtcaaaattgatgcccatctagtagtttcaagcgaaacaggtttggttcacgtcatcaagtcaactccgcacaagtgtgaaattgacttgggggcagatgttaacccgaaaaactttctggtgacatgaacatcaatgtttgacatgtggcatgaaggatgacatcacagagttgagtagacttgaatcatagcattatcatatgtacgcgttaagtgggtcgggaaacatttatccaatcgcacctagcgcgtcactataggccatagatttttaaattaataaaaatacaaaaattttggattttactctttagtgacgctctatatttttagtgacacgcattacatgcggctaacactgaaaatttagagtctaattatgcatgtcactaaaaattactcctaactatttagtgacccgcacttttgtgcatgtcaataaatagtatcactaaaatgccaaattttagtagtgaggggaccctagccctgcacccaggttgacttcgggagctttgggatggaagttcagactttaatattttcacttttaatctcttacatataatggatttctggacaaatatatctattctatataaaatgtatctatataatagaattcttagtttatgagaaattcatgggtgacttttttatt

SEQ ID NO: 315133 - DNA, 933 bp, Cannabis indica
aatgtttaaaaaaaaaaggtaaaaatgatagactttaaaaaagagggtaaaaataaaagaggacaatataaaaagggtatagagtgtaatttcctcttaaaatataggtttttgggctgacattactaaaatcgtgccaatcaatttgtctaatttttttttaattaaaaaaatatactttgggccgactttttggtttggacacatcaatttcgtaccaaactttttttttttttaatttttgaaaattgggctgactggtaaagcttgttttcctttttcttttatttatttatttatttattttctgaaaggcttttctcttttagctttgaggtaaaagggttttaaaccctaattttatctctttctgtctaaccattctctctcttccgcctcccatagtttctctctttcttaatcccagctctctgctccaaccgaatggaccagcactggtcgtccacctcctaaacggaggctattttcgaactctccaactcccaaaaccttgttaccccgactctctctctttcgttttcctctcctcgcaatctccctctcgtgttctcgcggctagacggagaccatagatgtcctcctggtgtcgaaattgttgaaacccgaagccttaagaccatggatggcctccccggcggaggttcctgcttcggcctcggggcccgcccctattgtgttactataagtaaattcctatctcacttattaatatttgatttttccatttcttaaatgttttttttaggttaatcattttaattttcttttgtaaaagcatcaatccactttttttcttgtatattttttgagtttagcctttttgttatctaaaagtattaatccacctcctgttttctaaatattgtttctctttcactattttttttttggctaattaggattttgaccccc

SEQ ID NO: 315134 - DNA, 711 bp, Cannabis indica
agggcacaaaacccaacacttagtgcatgtggtacaggagtcatacttctattaaaaatgttattgatgcatctgaagctatctaaataggtgtatgggcgcctagatacaagtcaatattatgtgatatgttttgtgcttttctaactgagtttgtcgactcagaattattgttgcatatgtatgtaaggaaaaggcgaagattgagcaccagtgagtccagagctcgaggaaggtcgtacctattaggatggttaaatttgggcctttattttgtaatcgcagtgcgacatatttacaaaatgtattttgaatatgattgtaaattttaaagacaagatcccagcttttatgtacagttatatatttacaaaattttaaatttgacatgattttcgagaaaccctttgattagcaaagatgtgcacaggaaatagaaaatcacgttggggattattttaccaagatctagatttatgaccatgtatgttgtttaacatcctaaatatgaatttctaaaataatagaatctaaacacatataaaactcaagaaaccttacattgattgcagcggaattaaatgactccttccactcggatctctaatccctgttcctttctgtcgcagagtattatcaagatctgagcctggtttcccttcaggtgttggattcttcacagtcttacacactatcattgagtactaactt

SEQ ID NO: 315135 - DNA, 697 bp, Cannabis indica
aatagatatttcttgtatttgtcgtttgcggaggcgatgatgtcttccaaaagtgccttctcggtcttagggttgcggacgttaaggcagagaactttggataaattgaaatcgactactgtttggccctcggaaatcaagttagccctccttcagttagcagtcatgaccaagtcccctacattcaacccatccttgtcatagttggcaaaaactttcgcatgttgaaggaagagttggataggggcggtacggtgcataggaggggccctaacccactcagtgagcaactccggacgctcgacaactttaaagctagaagagatgaagaatcggtgacagtactccttcacgttcttctagaagttgtaaggcaccggaccctcattggcagagtgggcttggagcttgaaaaatccatctttaagcttgtccccccttcttgagaatagataagagttcgtaaaaatataaaatttcagccggactgggtggggcccagttcttggcaacgtaaaaaatgtataagcctgaaagcaggcggcaggcttcgggaataagttgatacggcgcgaggccaacaaaaactaaaaaatttgcaaagtaatcttggagtagtagcatgccccaaacatcaagtgggtttgacttcaggccctgaagccgccgtagttgtggttgggcgtctcttcgtccc

SEQ ID NO: 315136 - DNA, 1400 bp, Cannabis indica
gcatgtcctcacagacatctgccccaaccagaaggaggcagtaggatggtacgacaactgcatgttacgctactccaataggtccatgtcgggaactcctgacactacccaaatattctacatgtggaacatccaaaacgtgtcgtcttctaacgttaaggagtattttgatgatcttagcactttattagatggcttgaaaagagaagccgcttcaggaggatctcttcgtaagtacgccacgggacaagtaaaggctccagagtttttaaccatttacgcactcgtacagtgcaccccagacttgtccgaaaaccaatgtatcaattgtttggataacgtttacggtcaaattccaaattgttgttctgggaaagtaggaggtagagttattggcccgagttgtagtgtaaggtatgagaaaaacttgttttatggatctccaaataacgcgccgcctccatccccagaagtaacgacggggccgattaataacaccattaacaatgctacagaaggtaataaagcttgaaataaagaacaaataacaccataactacttatacagttatgagattgaacaaataacatgaaatagagcaaattttgctgtttgcaggacaaaagagtagtgacaagactagaattattattattgctgtcgtggccaccgttgccggcgtggtactaatcatcttcttcgcagtgtgtttaagcttaaggaaatcaaagaaaaaagttcaaggttggttgagacattatcaatttctcttcttagttcggaaaagtcttcacctatatgtcgtcctctgttttggaacacaattacttaattttttaaaaactccatagccatgccaacttatcaacaatagatctaagatttcgtaacacctattgttatagctaataaaaagaatgacagagctaattaatttattaaagttgtgaggaagtttatgatatattctcttgaagcatataactaattaatgtttgtgatgctgaagatctaaaaatatacgaaccagttgatgaaatcgaaagtgcggagtccttgcagtacaatttcgaaaccattaaagttgcaacggatcaattttcggaggataataagctcggacaaggtggttttggtgcggtttataaggtaaaaactcaagtacaaaactattatattcactgtctagcattattaaatggccgtcacacatgtaaaatttttaaaactgtggtgtaattcaggggagacttgccaatggacaagacatagcagtaaaacgtttatctaggggttcagggcaaggagatctggaattcaagaatgaggtaatgctagtggccaagctgcaacaccgcaatcttgttaggcttcttggtttcagcttggaatcaagtga

SEQ ID NO: 315137 - DNA, 570 bp, Cannabis indica
tattttctgtatctgtttgtattttcaagttggttatattaaaaaaaaagttgtcaaaaattaaggtcagggtcctatttgtactattttggaaaatacagggtctattttatcatttaacaaaacataggatccaattagtaactttgtaaaatacagggtctaaaatgaaatttacccaataattaaatattatagctaaagcactaaactaataatattgtagatatatttagctaaacactattcattttagctaaatttttactataattactattaaaaaaagttttcccgattgttaaaaatagttgagtattgtattgtcgtcggtctttatgaccgatgcctataaggctgacacaaaactaagtggaataggcatcagtagaaaataatcggtaaaaaagtttactaacccttcaaaattgacaatagtgatggatgttattgtcgtcagttttaaattgagccctataactattgttattgaaattctgtattttagtattcccaatttaattatttaattaaatgcggaataataaaattggtactgaaaacagtttt

SEQ ID NO: 315138 - DNA, 2768 bp, Cannabis indica
tattttaaatattaagacaaaaaatttatataaaatgttatcataaaaataataaaagaatttatacgtgatttaataaaaaaatttatgaaaaaaataaataattattaaaactaacaaaaaataatgtaaaaaaaaaatatttaaaacagaatactaaaagtgatttttaaaattaatttaagtttatttttttaatattgagggtgtacacaattgtggaaatttgtggggctataaacaaaactcccaaaatgttcagttaattaatttttctgagttttttgcagctaaaccctctcaactattattccatttgcacttaaccctcaaagtttaaattttggtgataaaactcaccaaattactgaatcattaacaaatttaaagtatcatctattatcatatagttaactgttaacataaaatgcttatgagtacactcgtgtacacataaaaatgtttatattagtacacctaatattattatccaattactataaaaattatttcaaaatttatggatttttttgtaaatattttattttgaatttttgtacttttaaaatgaattttgaaataataatattaggcatataccaatataaacgtatcgcgtgtataagagtgtccaaataaacaatctatgtaggcagttaattagataacaccttaaatttgctaagagttcaataatttgaagggttttaccgtcaaaattcaaacttagagaattaaatacaagtaaaataatagctaagagagtttagccaccaaaactcttctttgtatagattttttaagtaactcaagaaaatttgtattactttaaggctaattaggatttttgtcccttaaacttttacatgtaccaaatcatgcccgttcaatttttcttgccgttaaaaaatttctcctgaactattgagattgttagatttaaaaacttttgtctaatttaattcaattttactattttcagtaattgtttatgtactaaaccatgtttctcagatgtccctcgaattttgacatgtatcaaatcctgcctcttaaactttcatcaatgttagaccttttttttttattaaaattagaaaaaagtccttaaatctaacaatttcaatagttcaggaaacatttttaatgaccttaaaagttcaaagaacataatttgatacatatcaaagttcatatgacaaaaatcctaattagccttactttaatatattacatatgacattaccaatattaaaagaaaagtactagatataacaactttctatacattccatactacatacctatcatcgtcctatctttttacaactcctcaaaacattctctatcattcttgcaaatgtttttaggaaatacattcaaaattctgtttttcatttcccctatgataatttcttttaatagttattgtacaaaactttcttcttataattgtttagaatagttccattctcttccacttgctctgtcctaacttccttttgataattctttgaaaaaaaagcctttaaatactattctcgaaaccttgttggaaactttaattcaacaccctcaccctataagaaattcccaacattttttttttgttataaaatcaccaattatgtagtcttataatatatatataatcaatttaattagcactaaactcacattaagaagacaagatttacatgttggtcataattaatttgctaattagttatgaaaaaaagtagatatgtagtgatttagaagtgtattatggtgtggattgaggtgacatctaaaagaggaccccactccatttgctggtgtaggggtggccttcagtcaaaaacatgtccatgtgatttatttgataggagtgggatcaacttcatattcatatatttctctcaatcaaaagtttaagctaaataaaccaaataaaatcattttctcctttcttataaatctatatatttgtttggttgccaacttgcacaatatgtaacatcatataactatatacatatatgtgcacttatatatatatcatcattatttcaattatttattttctctcctaataacaaaatgaaagagcagaaaaataaatatataaaagaaattttaatggttacatcaaatataatcatacataatagttatatttatttttagttattgaatattattattagaatattataattaatttaaatttttactaaaaataattaataaattacttataacttaatactaacctgatttcctttattatttatagtatacattttgaaaaataataataataataatattattattcttagaagaaaattaaagtttacacttggccctaaattaaggcgggttaggccttcagctcatctagggtccgcctagcctaagactccaaaaaaattattttctcttttaaaaatacacaactatgtgaatatatctttaatgtatatatgtgtgactgagagagagtgaagatgagagccacagagatattaatatatgagccagacttgaaccaaggaaatataaataatttgcttcacacatgcatatacataaaaagaatatatataattgtgtgaaggagaaagaaagaaagaagatgacaactaaagattttcaaaataagagaggaagtggggtactagtaggggtgtacatcaaaccgctcaaaccgctcaaaccgcccgcaccgcaccgcaccgcaaaaaaaatgcggtttgaaattcttcgcggtgcggttgcggttt

SEQ ID NO: 315139 - DNA, 1568 bp, Cannabis indica
tataaatttgcttaaggaaggaatggtctttcgctgtctccgttgcatgatggggggcgaaatcttgagcgtcggattgcacctgagttaaacaagatcaaagttaacgttgatagggttttatttgaacaagagggacactttggcatggattgtgtagctcggaatcataatggtgctatggtagaagcattcaagaaggggaagattggttgtgttcaacccataattgctgagataataggcattaaagaagctttgagttggatggcaactcattcgtgggataaagtcatgttagaaatagatagcatggtgtgtgtccaagcgattcagatcgatatttttatgccttcaaagtttggtcttattgttcaagatgttcaaaatttgcttctcgctttatcttttgttgatttgtgttttgtaaaacgatctacaaataagttgactcattgcttagcaagagactcttgtttctctacaggtcatgtgcttcagctggaggactgttcctctaaaatgtgttatattgttttgaatgaatttattaattaataaatcttataatttttattccaaaaaaaaatattaaaaagtaaagaaaattattaagaattcagtgcaaatatacggttattatttattattttttggaaatattaaattaaaacaatattatgtttatttgaaattcctcatttttcggagaagaaaaaaaattagttcaagcgtgttcttataaaatttaacttttagaccatttaaatttttaatatatttttctctaacaaaattaatcattaaataaaaataaaaataatgtattttttaaaattgcggttaattaattttaaaattttgacatttattttaatcattcaaatgctttttttttcctttatttaagaactcaattaatttttcagagttatcattaaaatataatgcactattttcattttttttagaatgtgtaatcatttggatgcatccaaagttcatgggataagaattttaatttacaataacacataaacatttaaacgaaaaaaagagaagttacctaatagaatatttaaggtggtgttaggtaaaacttttattttaaaattttttaataataataataaaaataaaattcctatttttaaaaacaaaaatattttctacaacaacttttattttttaattttaaaaataaaaaataaaagtgtattctgtaaattttatttttatttttatttgttgattttatttaagtcgggtctggactgagaccaaagttcgagtctgtgttaggatttgggttgggatccgggtccaggtccaagttacaaggtttaggttggggtaggcatctaaactattgataaaaaaaactgtttaaaacttttttaaaagtgatttctttttgtttataaaatttttggtagcgttttgtaatactttttgtttgtaagttttttaatcacaaaaataaaagtaaaatttttgtttttaaaaaacaaaaatatattctataaccactttttttagttttaaagattattaaatagaagtgtgtt

SEQ ID NO: 315140 - DNA, 1036 bp, Cannabis indica
ttaaaccataaacatgaaaacaacatgtaaacataaatgacttctaatcttttattgataacaaatcagattagattgtaatgtgttttatttagggcataaaatcccaacagagaaaccattcaaactagttcggtatcataattcataattaaaaatatgaaataggacgccttacgaaaattagtaagtaaactagtaaaattctcttacaaaaatcttaaaaattcaatacaaataaaaaatctcgtaaagaatacaaaaaataaaaccaagttgtcagtcttgaagaccctaatttttctttttaatttctattaaattatttttttcaagaaaaaacttaatttccatgagagaaacataatttaaagtttatatgtatatattttaaatatgtatataaattatagagtaattcgacaatgcacctcttacaaaatgatgcactgatgcatctcctactgtttcagcaactagaagttttatttagtccaatttattttcatggatgtatatgttaaagttatttaagacgtactgaaaaatttataataatttatagtatataaagtaacgttcaaataatctattttacacgtgtgtaaaataatgagttacgtatgcaacaaaatgtttgaaccttatttttcagcgtgttaaatttttctaattaatttctcaaaattttataagagatcttaaataactacagcgtactcaaccataaataaattaactaaaaaattataaatgacgaaatagataagggtgcttcggcaccatagaagttttctaaattatattatgttttactatatataagactgttagtactaatgacagttccatacactatataactgcataagagtgttaagagagcaaacataacttgatcacttatttttgggtaaataccattttggaccttctgttttacaaaagttaccaattagaccctctgttttgttaaatgacaaaatggaccctgtattttctaaaatagtacaaataagaccctgaattgattttt

SEQ ID NO: 315141 - DNA, 894 bp, Cannabis indica
caacaaattattatttcatatattttttttccttaaaaatgaacacagggtaatgatgttgaacctaataactaataatatatattttttttatttttaattatatcattttttaataacgtagaaaaaaacgagcatacaatttagtatacgtgcctcgcacgtaactttttactagtttctctaaaaaatatcaagattacaagaatcttgtcaagtaaatttcttgatatttttatttagaaattagatatgatattttgtagcgtaataattccctgaaagaactagaatttggtccctcaatagtgagaataacttactatttataggctacaagtgaataaattacattaattatagaataaacaataaaggctaattgaatcaatctcaagatctcttcaatccccttgattctctcaatcccactattttaagcatttgaaatgacctaatcttcaaggattggacaattaaggcgaatttggattccatcttcacgatattgttggtcggacatgctgcctcaggagcatcctttaagcttgttgaccttgcttttgttcaataccactaagtctttaaagcgattgggaataattagattcaagtaaaatatgaataatatagaacaaaataagaacacgaaatggttatagaggttcgacccctcgatagtggtaatagtctactctcctcgagcatatcatccacataaaacatccatgttacgtccgatctgttctttaaacaatttgttgactagcctttggtaggtagctcgtgcattctttaatccgaatgacataacttttttagcaatacatgccaatatctgtacagaagcttgtgtgttcctggttgggtggatgcatctgttgggttttatgc

SEQ ID NO: 315142 - DNA, 743 bp, Cannabis indica
ttatttattattatatattttaattttaatttattattatatatttttatttaatttaagtttttttttgtaaaaggaaataaataaaatagtccagtccattcttaaaccaaacacaggattactttcagcataatccaatcttgtccagtccagtccaatcattttccgtccaatccagtccaatcctgcgtaccaaacgggcccttaaattaatgttgactaatttcgaaggtatcttcgctaatttttgagagattaatagctattaatataaatcgtacatcatataaactaaaattttaactaaaatttaaaattatatacatatattccacttgattttaaatttaattgattggtaatgttagattttgagagaacaatacaatatcaaatgtcattatttcaacatatttatttagcaataataaaaaatattttttgttttcttaacccatttttgcataaattattttactaaaaattgttgaactttaattcaattgtacacaaaaatgtaaatatatttgtaaaagtaatttagtaattttattcaaaagaaaatactaacgaaaagaattattttttgttagcataattatttatatgctgtgaaatttaaattatattagaggaaaaaaaatgaatacaatgtgttgtccctgattttgcccaatatacgtggaccaaccaaataaggacacgtggatcaagcaattaacaatatttgctaagtcttt

SEQ ID NO: 315143 - DNA, 1361 bp, Cannabis indica
gatttgaaaatgcttggcttaaagaccaatgtgctaccagattattagtgattgttggaatcattcggttgaggccgacatttttgggaagatcacgtattgctttgaacagatggtaggttggggaaaaataattacttggaattttaagcaaaggattgcaatatgcagaagagagcttgatcaattaaagtcgaaaagagatgagatctctattcaaaagtataaagaagcgaaaggaaagttacttgtgattttagatcaaagggaggcattttagaaacaacgttcgaagcaacattggctaaaagatggggatcaaaatagtaaatatttccatgcggcggctagtactagaagaagacggaatactatccagaaattgcagaatgaccaagggacttgggtggattggaattcggggttgagcgatgtggtcaatagttatttcaacaatttgttcacagccggccaagtgaatgttgaggttattgcttgtgttcaaaataaggttactacagagatgaatgataatttacaagctcaagtgagtgaagacgaagtgagaaaagccgtatttgatatgcatcctgataaaagccctggaccggatggaataactccggcattttactaaagatgttggagtatagtggggacagatgtgaccaatatggttcagagattttttcgaactgtttgtttttgaaaataattgtagccttgcaaatgtggtgcttatcccgaaaaagaaacaactagaacaaatgggggatttgaggccgatatcgctttgtaatgtgttgtttaaagttatcacaaaggttatggcgaatcgtatgaagccttttatggatcaaatagttgctgcgaatcaaagtgcgttcattccaggccgtctcattattgataatattttgttatcctttgaaactttgcattacttgaagcgaaaaaggcatggcaaggatgggtatatggcgctcaaactcgatatgagtaaggcttacgacaaggttttatggcctttttttagagcaattctgataaagatgggatatgcacatggatgggtggatttggtaatggcttgtgttagttcggctaagtataacattgttcatgggggacgtgaaatgggaccagtgattccaagtagaggcatccgacaaggggctccattgtctccctacattttcatcatatgtgcagaaggcttttcagctttgatacaaagatttgaggcaatggggagaattcatggttgcaaggtggctaatggagcgccaaggatttcacacatggtttttgctgacgatagttatatgcaatgtttaaaaaaacgcaaatgagccttgagg

SEQ ID NO: 315144 - DNA, 2149 bp, Cannabis indica
aaaataagaagaaaaattaaaaaaataagaaaaaaaaaattgaaaaaaaaaatatagaaaaaaatggtaaaaaaattgtagaatatagacttaaacaaaaaaaaataaaagagaaaatgaagtaaagaaatgagatattttttgagaaaaaggaaaaaatgtgaggtttaataaaaacacaaaaacattaataattggtacactcaaaacaaaactcacaactgacaaaaaaaatacaaattactaatagaatcttatttagtttgagaaaatacgaaagagcaaggactatagaaaaacctcacctaagtcatgcgcaaaaggtctgaaatttttagaattgtaaggaaaattttctcaccgtataacgtagtggtatagtcgctcttgtcatgtgcaagtggtggtgctcactgatcggtacgtgcaggcaaaattgtctttttgtacggtagagataccgtgtcccttgtttggaaaggttttcctttttgaatcaaattagggttttggtttcttttatgccctctattttcttatgcaaagttgaatctgctctgattccccctattgcttcagcttcgtgtgccttttttgcaaaatttctttgctcacagtcttttgataaatgctccccctcttgctggtctatttattttattatgagtttgtttgctgttactgaatcaagagaaaattgactaaaacaagaaggaagactgctaactgtagtaaatctttattagagattatccacacttgacattagtggaccttattccatcacgaatgcagaaacaagtatattataactcttacagatgatttttctcaagatggctttacctacttgatcaaagaaaaatctgacgttcttgaaaagtcaaaatcttttaaaatgttcttgagaaataattaggaagagttatcaaagttgttttttaagatcatggaggagaatattatggtcgttattcagaatcaggactacacatgaggccttttgctgaatattttcaagaaaatggtgtactttctcaatacactatgtcaggttcacctgagccatatgacgttgctaaaaggagaaatctcactctcacggatatggttaaaagcatgatgagtagatcaaatcttctagagtttttatggggtgaagcacttatgactacaacttatattttaaatcgtgttccaagtaaatttgttcccaaaacccctttttagttgtgggctgggagaaagcctagtgtgaaccatcttcgtgtatggggttgtccagctaaagtaagaatttatgattctaatttgaaaaagttaaatctgagaacaaatcgttgttatttcattggttatccaatgaactcaaaagactatcacttttactgtcttacttgtggtacgtgaattgttgaatctgagtgtaacgccctgtccaacagggacgccacgtgtgtgtgcttttataaaattcttatttaataaattatatattatatatttataccaaaattgtgggtaataaaattttgccatttaaaacaaattcctttttttttttaaaagttagatactattctttatggcgaccccctcgtgacaaaatacttacattaagattcaaaatacttttacaacataaactttacgtttcaaaatacacttaaaataaacatcctgtccactgggccattgcaccgcgactgatatgtacattgctactccgaccacaggctcatggttgatcaaccttagccttccctttacctgaaccttatagcacccgtgagtcacagagactcagcaagaaaagtgaataaaataataatcgatgtagtactcatctatccaatctcacaataatatgcttatacatttatataataaagtaatcacttaatccttgtattacttcataaagtacccttaccactcgttaaacacgagctgaatatgtcactatcgttgcccgataaagcaaacgataagtaagaaacctatccgcgatttcaagagtaattactcgtaacggtaatgacagtttccaacccccagtcataactgaggcttaataaataattattctggatctcgatcataatcgagactatacaatacaattatcaatcacttaaccctaagtgat

SEQ ID NO: 315145 - DNA, 875 bp, Cannabis indica
tatgttacatattattagtttattacacatatttaatctatatattatattatttaataataatataacaagcaatgacaagaaaatatatacttttcacatctcaaaatggccaccttgaagataggctgcaatagttccactctcgagtgtcaagtccaaaatcccccccccaccccccaaacgaaaaaagaactttaaactctaatatttattgaagtttgggaccatacactatattttgtaattaaattgtaaaagctagttgtgggatttttttatatttaatgaaatttgattaatatttaaattatggatgaaaacttttactcgtggggatggggctatgtgggtaccccttattaaattttgacttaaattaatttttatatttataaagttgtaattttttgagtaattattaattgtgtgaaaatgagagttttggtgcccacttttatttttttttttgtaaatatgtatttttgtgtgtgagagagtggtatgcaagaaaaagaatgagatgtgaaaataaaagtgagtgtgagcttgtagtgtggtgatagcaaggatgaaaaaaatagtgtattaggatttgggtgaagagattgagatggtgaatatatgtaatttttaagttaattataagtgaaatatatttctctttgtagttttaaaaattttaccaaactgagtaaatttagggtaaatactattttggaccttgtgttttgtaaaagttaccaattggaccatctgttttgttaaatgacaagatggaccctgtattttctaaaattgtacaaataggaccctaaactgattttttttgtcaaaataaaacttaataataatctaatctagagatgttatga

SEQ ID NO: 315146 - DNA, 1042 bp, Cannabis indica
ataatacttaataatttacccttttttttctaaaaaaaataattaaatcacatttttcattgttatattacggcaaaattatttcatatttttctcataatgaaaacctaatagtcttcagttaagaaaaaatcacatcatccatttttattgaagaaagaaaaaacagagtcattttttgtcaaaacaattgaaggttagtattctttaacttttctattctcattagaatctattaacaacttgtttgtattcataataaaaaggggaaaaaaatttaagctttgtttctttttatagttgctaatgttgattacaaaatgaacgattttccaaagactgtaattgatttatttttgtactgtaattgatttattagcagtaagaaaataattgatttttaatttctttttattttttcttctttcttcacgcagtacaaaaatgaagcacagatcaataaaaagtctcatatgaaaacaatgaacaatttcaatacaaacccaagtcgtaaagatttgattttcatccaaagtttcaatctttattaaaaacacatcataactcacagttcataaaaggcaagaaatactaatagaatttctctctctctctctctctctctctcttagttttaaaaaaaaaacattaaaatctgtttgttaattaatataacaaacaatataataaatattcatcaatcaaaacacgtaaaaaaaaaaatattcatcaatcatctgttacgttaatttacaaaaaaaaaaaaacaaaaacaaaaataataaaattaatttttttatattaattaactttgcaatcttcattttgattattattgagattagttccattatcaatacccatggccaaggcggatttgaacccaggaccttagactttatgccatctacctcaaccaactaagctataaacatttattgtttataatacacttaaaatttacttaaataaaagcctaatagcttttttttattttttttatttcgggcccccggaaagtgtgggccctaggcacgggcct

SEQ ID NO: 315147 - DNA, 870 bp, Cannabis indica
atttaaatgtttgatctatggttttttcgtattttttgctaatgtttttagtaaaaattgaattttttttttggcgagatttatgttcttttgggttgtcagagatttttttttgtgaatgtctgatagtatacaatggtgagtacgcgataattttataaaaatagtaattattttatttttttttgttgtttttatttagtttagttcttaagttatttttaatttatgatagtgaatttatattagttttgtgtaaatattaaagttagtattgttaaattagtttaattaattttttttagttttataatttataagtactatttttaatattgtgtaattttgtaggtatatgagtcaaactgtttaggaattaaattgaggaaattatatttgtatacctattttattttatttattttaattttttatctccatttttatatcctttaaaatatacctatttttattgaggatgtacctattagatcccttaagttaatataaattatatattagacttaagtaaaatataaaagtatattggataattcacttaaaaaattagatatattttaataaaatataatataagagtatttttaattaatgaatataaaaaagatattttttaacttatctggcaacaaattatctatatgggctcacctctcactaaagcctaattagtttgtaaaaaaagcccaactcaccacagcccattcattgatcatggtttttgtttcttagatgttgcctcactaatgaatacaatgcaaagaaaagaaaaatgggcctcaagtgtacgatagttgatagaggaaattatggattttaaaagtttttatgataaatatgacacattta

SEQ ID NO: 315148 - DNA, 1106 bp, Cannabis indica
aataattacgtaattactaaatattgtaccatttttaaaataattattatatactattatttttctgttatttatttaaactatttgtcaagtaatttcatacttatcttacaataaaaaagaaaatttacaagttttaaatactacacctaccacaatatacaaataaataaaataagaaaaaggtgaaaagaaaaatacacataaatatacgatttgtgacatttaatttttataaacttattttttaatggtaaaactacttgatttgcacttatgttatgttatttttctttctgtccaaaagactcaattaagtgtcatcgtggacatgacacagtgtaccctaacatacacgtgataaatatttaatcgtcaatgtaactttaattatttaaatattataaaaataattttaaaatataaaaaaatttaaaatttaaaataaatagaaaaaaataaataaatgaggcgagaggcggggatctccgccttagagagagaggaagaagaagtgagggggagagagagggagatctccgtttgggttgttgtgatggcagaagaaggagaggaagagagaagaagaagaggaggtgggtgtctatccggttgtgtggtgtgtttcaaagaataagtaaattaaaagaaaaaaagatttttaaattttttgaattatttattttatttttattttttaaatattatttgtttttattttgtaaattatttttataatatttaaattattaatattatgcgaacaattaaatatttgctacgtatatatcggggtatactagttaactgagatttttagacggaagggtaaatagcataacataagtgtagtttggatagttttgctacaaaaaaatcagtatatgagattaagtatcacaaatttagttcatataattttgccgccaatatcgcgtgagaaaagaaatagaaatggaaagggaaatttacaaaaatactggaatttgggttaacttttataaaaatactgtcacacggaaattttttcaaaaatactgtgtttttataaaacaccagtaaaacacaaagagaacaactcaaaacaacagtagaaaactagtaaa

SEQ ID NO: 315149 - DNA, 2171 bp, Cannabis indica
tgaagtgaaaaagaagtggatttccaccaaacaaggtccacaagcccatgaggaagcaactttggtctcaagttaaagtgaagagaaagagcaagaagcccaagctcaaggcaaagaggaagccaaagaagaagtgcctccaacacctcattttctccaataaaatattaaggaggcttttgctctccttcacacctccattgcttcaaatttcaacaacttgagaggtgaaatgaacactcatttttctactctctaaaatgagatgactaccataagaggtgacatggccactatgagtagtgacatggagcacaggtttgtcgatgctcaagagaagttagcacaatggagggcatacatggattattttagacctctgccaaattagctctcttacattttttagcaacttttctcatatttatatttttttggtatgtttgcaaagacttactgccttttgacttttatgtgttagtttgttatgcttttgcatttttttatgtttggatgatatatgtttgaatttttatggtttatgatgaatggtattctttgttttatttcttttatttgccatttattttgtgaaatccttttccaccctttttgatgattcaaaagggggagaaattctataagtgattatttttttttttttgcaaccaaactcaatttttagacttctaatgctttttgaatataagtataaaattgagagggagtttacaaatcatgcacggtaaaactaaaaggtaattttttttatcccttgcacacattaagggagagctaatctaatatattgcttcaattttatttcctttcccttttaaaaataaataaatatttgatatcatcaaaaagggagagattattaactttaacttttaggtctccttgttttaatgattaacaaatatttaattattatttgtcactaatgatttgctaattttgtagcacaattaaagataaaataaaattttctaaggcaaacttcactccaagggcaaaatggtaattttaccaaaaatcttgaaagtggcccaaagtggatttcaatactcaaggaactcaagacaagacatgaggtttatttaatttcctagtcttgtatagtgattttcaagtccatacttaaaaaaagttttaagaacaaattttggtctactaacttctgcgacaggttatttcaccaaatgatatataaaattattaaattgactttttaaatcacatatcatttaactaagataacaaaattagaattttggaaatcggataaacgagtagagagttatggtcatttcagtacaaaaaatggacatttttccactgtaaggaattcggttaagtggttcctaaacggtgaaccgtttcccccagaaactggtttactatttgggaaacggtgaaccgaatctcccagtagcaatctcattttgtgtgtctaatggctataaatggctagtttttgtttaaaccctatataaactcgattttacccaaaaaattctagttggctgagcatttattcatacacttaacatattcaagtgagtttaatgagctcctaagtctaaatccaacaaacacttttcacacactttgagccaaaatttttgtttaattatttaaagtgtgcttgctaatcactctaggttttccattatttcatcatacttctagagtgaatttgcttctaatttcaatcacatattacatttctatattgtgattgaggtgaggttggcactggtattgcaaataactcgattagagtaatattgtcactacaataatctgagaaagagggcgatagtctttggtagtgaaaaattattgtaagatgtttcgaaataccttagtaaaaaattctcggttgtaagggttagtcaagcccgttaacttggctcgatagtggaactcaaagctaggtttataactttgaagaccaatgacataggtagcttagttctactgaatcttgtaaaaattgagagtttataatttcttacccttaaactctttactttactagtttgattatttgatatacattattgcttgtcatgttacatgcatttatttatttaaggaagattaattgcatagttttgtgttaaaaatttaaatttactgaaattagtttaaatatccaattc

SEQ ID NO: 315150 - DNA, 742 bp, Cannabis indica
gggtgaggtccaagtctgggtctggggttattgggttctatatgaaaatcttagtataattttacatgatttatcaatatagtacaataatatataatacaatacaacacaacaaaatatacaaaacgagcccttattgtacttattagtttaaatgtcacaaagatatacgttgttgacaagtttaggtacatgtataagttcatgattaattagttagtttatctactaattcaatcaatctctaagtatatttattttaacattaaaaataattagggtagcttttctcgggtgatctatttttttttttttttttaatttcttattttctctctttcaatatatattctctatttctcaggttttttggaaaggaatgagatgaatgattggatatagttgttgataaattaattaatcatatataatttattataagaatgatttgtcactatcacacaattcctagtaccatcctaataaaagaacagtatgtgctgccaaactccacaaccagtagacgtgccctgatctgactcattatcaaattctttctaattctttcagcaatgtatagtgtgcctcaatcatgacatgtccacatctttaattcctaattaattgagcaactataattatcacggattgatattaattaatcactaatcttaccttagttaatcaaaatcttagctcttaattttcttttttattttttgttgttgttgttgatcaattt

SEQ ID NO: 315151 - DNA, 860 bp, Cannabis indica
actgtgtttttataaaataccagtaaaacagaacaactcaaaacaacagtagaaaactagtaaaacaccaatagaataccagtgaaaacttaacacaatatactgcagtatgaaacttataaaaaaatacagtaaaaagtaaagaataccgcctggcagtatttttgtaaaaaaataacaaaagttagtataccatgtaaatttcccaatggaaaaccccactcctaattaagcccaacaaaggaaatgtactatattgttggatgccctcctcattattgggctatattctagatggcctaatcaggcactttgggccataaaattatcaaggcccaattcagtcgatcaagacacgaaccctttgtcttagagccacgtataatacgcgggaagtttacttgtcttccatagaataatatatgcagaagactttgaaaaaataattaaagtacttttttttttttcctttcttttctttattattattattattattattattattattattattatttttgggaaaagtgaagcaaaagacttttagtccatgaaataattgagagtatttatttttcattcttttaaattcattttttttaatttttcaataaggtgcacattattctaattaagtatcagtagtagctaatacagtaaaacctctatttaagaatacacttgagatcaagtaaattatattctaattgagagtttataattaaatagagttacacaagaaaaaaaattgaaaaaccaaaaactatcaatgtaacaataataacaataaataaacattaatactatatcataatagaaatattttaaagtaaatataatttcatacatgtattata

SEQ ID NO: 315152 - DNA, 1029 bp, Cannabis indica
aaaaataaaataaaaaataactaaatcaaaatctaaaatttataacccacccaaatataattaatattacactattcatcgaaacaaatcctctaaactaaaacatattcatacaaagctgaagagtaaagaaaaaaaaaagagcaaacaaattgatgcagtacttttctaaagctaataccaataatttttcataatcaagcaaatcaatttaaggagacacaattaattacatcaccatggctaatctacaccaagtcatttgaatcaatggcaaacattaacaccatcttgtgtccactctcaaagttactaatacttttatacaaccattaatttcttagtaaactagattcaaagtatgagtttttggagttagagaaatgaatctttaaggctttgttatactacacaactaccaattccatcactgcaaaacagctcaaatcccacataaagccaagctaatgcttcatattatataaaaattaaaaactcaacatacaaaatcaaagcttgatttgagccaataaacccaaaattgtacacctttccaaatgtatagaaaatacaatatatacatgattttggaaaattagtcacgtggctgttgtcccaactcaattcatcagtgacacgaagatgaatgaaaagatgtggtgaaaaacaccctcaatacttggccaaatcagtgccaattaacaacaagaacaacaacaacataacaagcaaacaagattaatacaaatcagaaaactaaaaaccagaaatgaatgaaaattgagtaagacttagcattgaatcaattgaactttattcaaatgtctagcacctttacaatccgattcatgtactcaatttgagtctaagtgtaagacacattacatatcaaacctcacatggtagaagtcatctcataggatgagcaattctacttttacaaccctcctaaacactcacaagattggtaccaaaattagagagaatctaggtgagaggctcggattggactaactgtcaacagcagcc

SEQ ID NO: 315153 - DNA, 1308 bp, Cannabis indica
gaaaaaacttcttaggaggtcactcatcctaaaattacctcaggttaagcatgtttaatcgtggaattctttctactagaaaacaagatgcacagtctcagaatcatcccactttacctttctcgggcaaataaatactcccaaaaattctatcaaaatattaaaaaatactccaaaaatttaatttaagaaatttctcaaaaattatagtaaaatgcgattgtatattattcttcacttccgttcctgcgattgaatgcgattagatgtctttgctggcttgtgtcttactaatatattattgagtcgagtttgctttctaactatatatcgctcttggcaaacagataaagaagatgaagaaaatgttggatgagaatccaaggaaaatgtcttggacaaggggtttttgtcaatgcattgcaagagcgttgagtaatcgctcatttgaggcctattacatattctgtgtagattatacatatatgttattataatctcatgtttgtgcagttgctcttctggtcatgggcggtggttgtttcagtactttattgatctatggttattttgattctaattaaaaatatttcatcattgcttctgatacttttgttgtggtttatattaggtgcacaagttggttctataatgcaaaacacgaatcaccaaaagtttccataaatatgctagcaggagcttctctccatatgagaaaagagagaagaatcgaagaaaattagagcatttgttttattgatactcaattgaattttacaataggggaaccgagtttatatagctcagtagaatcaaaaaatgttagttgggaaacaacttacttataacagaaaaaaaaaaacagctgtaacaacaagttattaacaaataaaattaccctaactaacttattcaaagtgcttctaaaactccatgttaaggcaattaaaggttttaaaaagaagaaaggtattttgcttaacaataatttaagattgaaacttaaatatatttcaaagatttagtcttctattctagcaaatcagaaattataaaaactagatcgaaaaatcatgttttattccctacattccatagcagaagagaaaaaatctacattaaacttctatcgctataatatatatatatgtgtgtttttagtttttttcaatatagttgatataattttatctttaaatataaaaagtgactatttttaacagtgttagtagagttagttttataaatatataaaaatattaatattatttatataaatattaatatattatttataacattattatt

SEQ ID NO: 315154 - DNA, 3112 bp, Cannabis indica
aagctcatcaacaatctccaaacattggcagcaaaattttggtgtggggacacaaaggacaataagaaacttcattggggatcttgggctaaactttgcaagcctaaagaagaaggaggtctcggctttaggattctaacggagtttaatcaagaacttttggccaaacaaggatggagacttatccaaaatccttactcacttttagctcggtttttaaagaatagctactatcccactacatcatttatggaagtcggctgtccctcgggttcatcatgtatttggaaaggtatttgtagggggagaaggatattgaaggaaggggctcgatggaaggttggaaatggaaggaagataagagtttgggaagacaaatggctacctcgaatggaagggactatgctaactcaaaatcccggagtagaagctaatacaaaactcaaccaattcatcacaaccgatgggcagtggaacatggcaaaagtcactcagcattttcatccgaataatgttccttggatacaaggaactccaattgacatgtatgttgaagactcgctacattggccctatactccaaatggccaatacttggtaaaaagcggttatagagttggtagagaaatgaatttacatcctcctaggtgctctaacatggaagaaattcataaatggtggaagatgatatggagcatgaagctggcccctcgaatcaaattgtttagctgaagagtttgtcataactggctgccagcaaaaacaaatcttctttatagaggaatggaggtaaacccgacatctgaggcttgtgagaatgatgctgaaacattaactcatgctttgtggaagtgttcgaaaaccaaagcagtgtggaaactaattccttggtatgcgaagtgtgatttactggaggaaggatctatgtttgatatacttactgctcttcacaatcggctgaggcaaactgagtttgaagatgcaatcaaagtgatgtgggcgatttgggaaaatcgaaataggaaatggaataaactcccacatatgaatggtgttcaacttttggattgggttttctctgcttacccaagagacactactcaaaaggcagctccaattcaggttgatgcgcctccccccaagctgaaactgtggaaaagaccctcccaaaccagagactgtgtaaattgtgatgctgcactaaaccagaaattaaaaggtgttggtctcggattcatttggcgtaattggacaggggaaatcaagagtgctggtatggtttatctcccctgcaactgctccacagatatggctgaagcatgggccatccttgaagctataaagcacatcccagccacggtcactggccctttcgaaatccagtccgactgtaagacagtggtggatgctctgcatagtcaagtctctcatcttagtgcaattagcactctccttcacaagatcaagactagattggaagactttcaggattataacataattcatgtacatagagaaaataatgaatgtgccaatttgttggctaagagaggtttagaaactcaaacttctcaaattttctctcatttttttcctagttggttagccaatttttgtaaggatgacttgcctcatttgatgtagtcttgtttctttgtttaataagactttgtttaataagattttcctttaaaaaaataaataaataaataaataaatagcttaaacacctaggtaaattcgtatatgaaaaaattagttttctaaatttcaatttataagtaaatctaaataactatataaaaaaacaataaaactaaaaaacacttctaatacgaaacacatgaaagtgtaccgaaacaccttttcgataggtgtgcgataaaattttcttaaaatatttgttcaatctttgtttttagttttgtacacgagcaatggccattaaagattagatttagaatatatgcatgcattgtatgtacataaattaataacagggacatttggagttttctaattcaaatagtcaaataagactgagaattgagaatttgccaaagacaagtcaaactcaaacactgcttcaactcattctttggataacccattactattacacactccagttgttgattttcagtttcagaagagctatggtaagtgcccaactttctcccattttaattttatctatgtttctatggttctaaatttatttaatggtggaataggaaagcagtaatgagcaacaccaaccaaagttgaagctttactcctactggattagctcttgttcgtacagggtcaggatcgctctcaatttgaaaggtgaccatcactcaccaatcacgattcattattgttaattgttcattcgtctgatattatcccaaatgatttggatttgtagggataaactacgagtacaaagcagtggacttactgaaaggagagcatcgcaccccaggtttctttcttaattatattctcttgattaatctgatataatttattgaaatctgttgtgatttgtgattttgggtgtggttcaattagagtttttgaagctcaacccgattggatttgtacctgtgctggaggatgaagacatagttatatctgactcatttgctatcttattggtcagtggttgttgacttactcttctactctagacttgtaatgttttttatgaagtggcatactaattttgttaatccaaaatttgttcagtatttggatgagaagtaccctcaccatccactattgccttctgatcttaagaaaaaagccatcaatttgcaggtaagttatctctctctttttcatttaggtaatttcaagtttcatctgtctattttcatagcttcaccgttaggtaatttaactactatttagaagatcaattaacaacccacatagtgtgataagaagagtctctattagctactaagtctaagacttgtttttcaggagatatgaaaaaggagacttaggagaaagacattcaaaatgacgatttgcaaagggaaatttgattttacatacttaatattttatccctaaactaatacatatcaccattgaatatatatgatcactttatcta

SEQ ID NO: 315155 - DNA, 1639 bp, Cannabis indica
aagatttttaaaatcaaattaaacaagtataaactaaaaagaaaagataaattttttatgtaattgagacaataacgagtcttagtttacgactcactgttattaagctccataactatggaattttacactgtatatctagttctttgaacataaaaattcaccattcgttggtaaatggctccggtatttttcactccggatagcatgatcttgtaccagtagattcctttgtcagtttggaaactggtgtactcctgatcaatcacatgcatttttatttggttgtagctagagtatgcatctatgaaggttaagagttaatattccgaggtagcatcaaccattttatcaatgcgtagaagtgaaaaacagtctttcgaacaagatttggttagatctatgaaatctatacacattccccatgtcccattaggccttgggaccagaattggattgacaacccatatgggatatttcactgaggatgtcaatgtttgtcaacttgtctacctctgtttttactacttctaacctcgttgaatccataagtctccgcttttattggactggttccgcattgggatctatgtttagcgcatggaaaataatatgggaactaatgccggtcatatcagaatgactccaggctaacacgtcactattttccttgatcgtgaaacaattttttccttcactgccggaggcaagttcttccctacttggataaccttggtgggatctccatcatctatgcatacttcttccactttctccattggttctatgacaagttccacgccaattcgtggatcaagtacttcatcttcttggaccacccccagtgctggctgggaagatgttccaactttagagttatttccttctctgaccatgagtacaattatggttgaaatactgtaacaactttgcgcacttctttgatctcctgtgattgtccctatgctttcggtattactttggaattttaagtacaaatgccgaatatatgtcactactccaaaatctattaaaaatagtcttctcaagatgatattataagtagtagggcaatcggctattacaaatgtgttgtacttgaatgaagatactgtgttgcttccgggaacttcctcatttatagtcattggaagttttattttgcccatggggatcaatgtgtctccattaaaaatggatagggcatggtagcagattggcttctactagaccaatggcatggaatgttcctttaaaaatgatgttcatagagcttccattatctaacgaagattctggaaactcttttatttactatttgagcctctattaccaaaggatcattatgaggaaagtgcacatgtgttgcgtcgtcttctgtaaaagtcattggtaaattcatcatctttggacgttgggtggatgattgtattaaatgggaagcttctccttgattcaactcattcaggtaacaatatgaggtccacctgaaatagttactacataatcatctaagactgacaatgcaacttttgaagggaacgaatttccaagactggggactacaactactgctgctgttggagcgttctatgcccctgaaggccttgtgcatttgcaagtgtgatcactaggccta

SEQ ID NO: 315156 - DNA, 3405 bp, Cannabis indica
tttcacttcaacagttaggtttgatgtcgattgcaaatgagcttggtgcaactcttctagagactttagcttggcggtcaattcctggagctctcgcctcgcagtggccaccgccgcgtccctggccttcaacgcatcatccttagcctttagctcctcggcctttgcctttagtgcctcttgatggctctgctccaaaaggccctccctttgttgggcctcctccaggatagctttctactgtgcctccaaattcggaagactcttcatggtctcatccatgcccccaaaagcggacatggtgtacccatggtcaatcagagtctttgaaagacggccgatctctacagcaatctggcaaaacaagaaaaatgtgtaagtgcgtgatgccaagtgccaaaagacgagaagcccaaaaacactaacaaattgaaacttaccgcggtcatggccgcacttatgtcctggatctggtagaccgagtttgtggaagcacaggctgcgtatctcttcgccggaagttagggcaggttggagatgaagtggctagttagttttgatgcaaaaggagcaagagtaggcccaataaagcggttgaacaagtctgtcaaaggatccatatttaaatcccaggcgttctcggagtactcgctgcgagagaaattgtcctgggcctcccttaggacctttttcaaagcctccacctccgcgttccccttcgtatattctaccatagcatagttgtgcttggcaatttggagttgctatctttcctcgtcggcaggaacgggggttaggacaatacttagaggaacagtgtactcctccgcctcagatgggatccctgaatctgaactgggagcgtgagtatcggctctcctaggcttcttagatgtctcggtctccaccattttgcccttacccttctagtctagaggggtgagaatcttgccctcctcttcctcttctacctcgccgtcctcatcaattaaaacgatttggctcaaggggaagctagaagagggtttcctggaagtcaccaccaaatcttgtgccggaggcagggccgggtcgggactgtaggtctgagtaagggagtccaaaagctcatccattagcttagctgctttaagagacagacaaataagggcgttagaacattatcaagaaattgtgcatataaggaaaaagcaataaaactaatcttaccctaacgatcaaattcagccctagcaaaatcatgcattaaaaggctggtgtcatcatccccaagaaagctgtctaaggggaggaaccaactggaagacaaataggctgaatgatccagagagataggtgtaggaggaccggaccccatcgaggactggcctaaaaaatgacctaagttggaaaaataaaaacacttggcatgatcgccccatcgggtagggggcattttaaatcaaaggagacgttcatcaaactctacaggcctacatcgagaataatcttaagcagaagggacatgatgaacaactaagggagacttaccgaacccagaggtgctggcgccaggagccctagtgttgggaaccgggaacattaacttagcccgggaaggtgcctgctatttactagcttctacccgaagagccctctcggcagcgacttgagccttaatataagccaactcttgttccctcctaaagaggtacttcttgtaccgatctttcgcggaggcgataatgtccgtctgaagtgccttctcagagtctggactacgaattttgggaaaagaaccttggacaagttgaaatcatccactgattggctttttgtgattagctgagccctcctgcagtttgcagttgtgactaagtcccccacattcagcccgtccttggcatgcatcggaggaaccctaacccactccgtgagtagttctgggcattctacggcttggaaatcggaagaaaagaaaaaccggtgacgatactcctttacattattttgaaaattaaaaggaactggacctgcattagcagaatgggtccggagtgtgaaaaaacaatctttaagtctatcccccttcttggggacagacacgagttcataaaagtataaaatttcggtcaggctaggtgaagcccagcctctggctacatagaaaataaacaagcctgaaagcaggcggtatgcttggggaataagttgataaggtgtaaggccaacaaaaactaaaaagtttataaagtaatcctaaagtggtagcattgctccaaacataaggtgagtctggctccaagctccaaaaccaccgtagtctcctcatctctgggcaagcagtggaagaccccagaggtaaaaggcttgatcctggccacagtcacgatcttctccaacagatgggcacaggtcaaggttgagtgaagctcatccgcctcccaacagttggatcaacacgtgtacttctcctggatgacgggtcctttcatcacttcttccagggtggccagggtaactgctcttttgttggaggatttggctccggatgtagagacaaagatttcttgaaggataatgagattctgaaaaaggaaaatatagcagttagcccccaaaccaaatcctaatatgaagagagggaatgggtgtccctaaccgcaggaaagaggccccctctggattttcgccaaaaattgaaattccagggattcccctaggcaaacatcgggtgcaaatatctcaaaagcagcgaaagcagatgaaaagtaaaggaaaaataaaagaaatagaacatgggtatgaaaaccctctcatatcctggacggtccctcagcagatgggttaattgcaaaacggaagagaaagaaagtggcagaattcaaatagaagaaaagagaaatatatacaccatacgaaagtctttgccaaaatcatttcccagaaatcaagaacttaaccaaaagctctaccctaatatgcaagtgaataacgaaagtataaggtacttagaaaatttacacaaaggttgtgaactggaagttgatgacgatcgtcagtagaacgcagattggcaacgatgaagaaatagcagtaaaaaatctatggtttctgtaattttcctcgaaggagttcttgggggaaaatggcgaagtggtgaaagtaacccagtgaagggaaaaggctgtcttttatagaccaaaaagggtgcgaggcagctgtgatcagacgacatcgtatggtaggaatcgtaatcgattcgtattctacgaatccaatagtggagataaatgcgcatcagggcggttgaaaacatttgagtactttttttacacactgattaaatgcgatagtttctcaatagacgggaagcgaatcgttgcctgcaaaaagaaataaatattaatgatgaccatcataaat

SEQ ID NO: 315157 - DNA, 1363 bp, Cannabis indica
aaaaaaaaaaaagaaatgtctcattatcacccaaataagcataccataaatgatctggcaaggtctttaattctaactcaggtggcttcttaatagaaggcaacgatctttcaagccattatcacaactcctcatatttcttcctatagtaaggaacttgaaagtcaaccttatttacatattccacgacttcaatgtcatcaagatcatcaacagaggataaaaaactagaggcttctaagatacaacattttcaaccacattagcaataaaacaatcatcatttcccttcaaataattgatggtcatgaaaatattaaagaccacttcttctccttgaacccgaagctccaactaacccttctaagcatcaatgagagcccgacttgtagctaagaatgatcttataagaattattggcacatcatcatcttcttccacatccagaacaataaagtcatcaaaaaaaaaaataattcatctacttttatcagaacatgtttaataatactccgtggatgcttgactggtttatatgctaactaaagagtaacacttattggcctcgcttcccccaaactaagtattctaaacacaaataaaagcatcataataatactcgcacccaaatcacataatgcatgtttacattcaaatttcccaattgtacaaggaatggtggatcatgaagcttttaaggtaattttctttgtgaaaattcactacatttttcaataagagccacagtttcataatcttcaatctttttttttcttggaaaaattttatttcatgaatttcacataactaggcatttgttctaaggctttagctaaagaaatgttgatgtgaaccttttttgaacacatctaataacttatatataaaactgtttatctagccaaatttttctaagcctatgaggatatgggatttgagaaggttgatctagtgccactggtagattcttttttgtaatttgaaagtctttaggaatcttcttatcaacttcaccaaaactttcaaccacataattcttctgactcttgtcctattgtatccctaactattctacttcttaccacttctcaaagtaattatttaaaatttttcttttgaattcaccacaatgtaggaaaattcccttggggcctgatgttgagcatctttgctagctgccccacttatgtttcaagacttctgatagatgctcttatctcagtcataaactgagtttgtgtattggtaagagttagcaaagcaacttgtagatcattagattgagtagtgcccacacacagcaagtggtacctcaatcatagattggaagatcgtgaaggatcaaaatcaaagagaaggacat

SEQ ID NO: 315158 - DNA, 828 bp, Cannabis indica
aaaaaaattaaaaacaaaaatgtgagttgttcatacaatatacccaatctatctaatgatctaatttaattccttttcctaagtgcggatatctatacttgtatgaattggattataaaatctaaaatttatatttgtacggattgaatgttgattcacatgtaaaagaaactgatttaatccatccacacatatttatatatagtttttacaaagattaaatatacaattaatgtaaaaaaataataatttaaaattttaatatatattatgatacaaataggttaaatactattttagaccatatatttcacaagttagtaattgaaccctttattttattaaataataatttagacctcatatttttcaaaatggtacaaaatagacattgaattcaattttcatcaaattataaaacataatcataacataagattattttacattttttttttgtctattcgtagaaacttgttttatgttagttattgtaatgactgcacatttataaatggaattgggaaataattgatatttattagtaaattaataaatatgtatgattatctgcattaatagaaattaaaccctattatcaaagataggtattttagtgaaataatttctcaattacggagattttattaaattatatcactacaaaaaatcatacttttagtcacaacaaaatttgtgactaattataaatcatcattcatatgtttgtgactaaaaggtctgtggctaaaagtattagtcacaaaaattacaatttgttgtgactaaatgtaattttaatgacgatacttgttgtgactaaaacta

SEQ ID NO: 315159 - DNA, 1024 bp, Cannabis indica
caaactcaaaactttaaatacttttgccgtaaatatccttcttaatccaatgccttcccatcttacataatggatttgaggagtcaatgcattatttttagctattaatcacatgtatgttgttgctatttccaatgtgtatattaggtgatactattatgtctccaggagctaaacaagggttaatccccattgtcattccacttgctagaaacaactctggtataaataaccttttctcttttttcttcactcatttagaataactattcattcataggaagtgtttcttttcttgattttagttgagaattttacactctttccatattgctaggtgctataactgctcttctgagatggcctacagctccacccgggtaagcactagaagaaaacctttcgaattcatttggtgtgttgtattagattgtattgtattgtattaaatagtgttgtatatgttaagttttgatttataccaaaatattgtatattcatctgcacgtacacaaatcaatatcaaacatagtactaaaaaaatatgatatataatataatttaatataatacgatgtaatacagtatatcaaacgaacccttcattttctattcttggttggttacttgtcttcacttaatggatctttccttaattatctctatagcatggagatgccagtagtggaggtcagaaagcatggagtttggctcttggccaagaatgtaagctctaaaatatgcaaaagttttaatttgatttcaaagcaaacgtatatatatagttatgttctcatttgtttatacaggtagaccaattgattcatagaattctagttgaagcagataccgaaaactctagtgagaatagcgacgagctgtttcatgcttcgggtgatttgggggaaaaactttacacaaagggtgactttgccaagtctcaaatttcaaacctggatgtctaccttctaaaacaagtatgtatatgtaacgccccagtattttgccttattttacaaaaata

SEQ ID NO: 315160 - DNA, 417 bp, Cannabis indica
ttaggaggaggccgagacttaaacgacgacgatttggagttaaggggtcgatgatccaacttgagaccagccttgtaagaagcagccccatttcgggaagccatcgttgccggttccggaactcggagccgctcaggtagacattaacaagaaaaagaatactgttgagagagagagagggactattttggtttcgttggtatcaaagagtcgaagagagagagagtatttggttacagtgtgtgagatgggaggaaggggatgggggccagagagacaaaagcacataaacgacagagaaaacacgagagaaactttgggtcccacactgttttcaaactttgaagacaaaagagggaatggtctcaatttacccttttaccctttttcactcaactctttctcaatcagctttgg

SEQ ID NO: 315161 - DNA, 860 bp, Cannabis indica
aaaattgtggagatcaaattatcaaggatcctcaattaggataaaattattggacattttcaaataaaataatcttgtcactgctctaataactttacattctatgaaactttaaaataacagagacaagcagtaagaaattgacagatgtgttgatatcataaaaaatctatttattcgcgtttgcttttctcctttattagttagtctaacagtcatacgttataagtaaatatatttgtatcatttagtctaacaatctttcattctaaggaagacttgtttgtattgcttttttctattttccgtcttttggtttcaggggtgttgtttgtttggctttattagttcagggatattgttattttgctagtcatctactaagccatgcaatttattttacagattgcagcaaagtttcgtaatgcaggacaaacatgtgtatgtgcaaacaggatccttgtacaagaaggtcttgaatgttatggccttattcacagctgcttgaaactgtttccttgtagtttatatgacttaatttgttgaataaaatatgtttagggatgaaaagtagttgtgtgcttgaagttggatttgggagctctatttctgcttatcttcctatgtgcttgcaagtataaaatgtatacaatcttatgttgtagtatcttagggtgcatttggttggaggtaatggaatggattttccattccatttttttttgcttggttgcatttcaatagaatgacttttccgccatttcggtggaatggctattccatttcaaaatgggtggacgatgcattccaatgcaagatgaaattttttataatgtttttatctattttgtatatgcata

SEQ ID NO: 315162 - DNA, 633 bp, Cannabis indica
atattcttttatttttaagtatattctgttaaaccaagaaataccgttagatagacacttttaatatataaagatatatatatttttaatacgcaattaactattttaaactataagttattttaaatttctatatttattataatttatgattattgtcatattcaaaaatttagtttatatataatccatctatttaccaaaaagaagataaatatagcacttttactataaaatttcactaaagatataatagcttgagctttgtttttttatgcttcataccgatgtatgattataatataattttataagtttattttttttttcctgaaatatccttattttatgacatctcataaattaattgtgtatacattcaacgtgaataaaaaagaatttaatgaatttttttatcatatttgtactctttgattattatttgaatgataagtttggcatatagaaatttctttttccatataatgctaaagtcttgtgtcaattttatgctaacatgtttaccacaattgactagtattttttttgatgaaaggcgtttatatcatagatgcataaatagttagacctcgcggtcattacaaaaaagggtttccgggacagagtcaaccg

SEQ ID NO: 315163 - DNA, 1146 bp, Cannabis indica
ttgctttgatttccataggtgaatttgttaatgtgttagttttggtgtcaaccacagtgagtgtgttgagttgtgctaataactaaaaatatgattgtaatgtgggaattgattactatgatgtgattatttatatatagtaattaaaagtttttggtgtgagtatgtcactaggcgaatgataggaattagtatcagctgtttgatttacataaatttagattttataatgaaatatgttctctaagtttttctaatgtgaatgataggaagtttaacttctaccatttcttagtgtattattttgttggcatttaaggattagttgtgatttgcttacatatgatattaggttggtaaatatgcagatttgttcaatgttgctatatttgtgattgtaaagtaattatcttgttggggtatattatatgtactggattttctgctatagcattccagcaatatgtcaacatacttgttaactaagctttgcattattttctcaaggaaaaaagaaaaaagaaaagaaaaagattgtggcttgatatgtctccaaaatcaatgtctcaattaattagtaaatgtctttgtcttgaattgagtgaattaaactttagtgttaagatgtacatagtaaggaagacttatcatcctagttaaattatggtaagtttgattgtgaatgtggtgggatataaatttatatactatcggaggcaagaacgaattcactatttgtcagaatcagatgtaattatctgttttcatagtttgttgctgtgacgggaatgcagtacatttttgaatggcgaatatgcaaagtcgggtctagcaggattagagaaatggatagttaatgcaggggacgaggtaaaacttgaaagcatttctcttgacatgtcccaacctgaaatctctgaaacactaactctattttatttttgctatttttatagttcgtaggaacctcgtggtacgaggtcaactatattagacaatctagttttttggtatataaaaacgcaatgaattacatttttatttattatatttagttcttgtaatttgtatatttaatttgattgtttaagtttgttatgtatttttgtagtagtgaataaataagtttataattttatgtagaat

SEQ ID NO: 315164 - DNA, 907 bp, Cannabis indica
ttttttttaaagagtgatcagaatcacaggaagacacacgtcgatgcagagggacttccaaccaacaagtcaattgtactagccaaaatgtatacaaaagtcagaatataaattgctacaaaaataaagcgacttatatatgaccaagttactctgaaaaattcaaacaaaactacttgagactatctcaaataaggcaactagtctaaatgaacaatttctacaaacctacaaaataaagacataaaagtaaaatattgattagcacactaaacaaataaatgtttagaatttatataagaaaagaaccaactattttccttttttggcaaaattaaaatttaacaagaaaacttatcttttagaacttcttgaataagtgtaatgtcatattcagagggacgcgtgttgtgattacagctagctaatcctgttaattgggatctataagccaaataatttaaagctaataataaactaaatttaaataaataacttgcaacaatacaaacttatttcataccaaaatatttaaagttatataaccgggatcccgtaaaatttatttttaaaatattaaaaatcatttcttacaggctgacctaagcggcaaaaattggaatttctacataatttcatgttagacctaaccctcgtggtctagcttggaatgaacatgtacaactcatcttcaaagaccctgaattcatggttgaagtgacatcgcgtaactactgcttgcacattggagcacccgtcaaccaacggcccagcaagaaagaataataatacaatatggtaattataataataactacacttcatacagtacgccactacgtatatattatgccaccgcactttatatcacattacttccatatataataatgtcactataattaat

SEQ ID NO: 315165 - DNA, 1162 bp, Cannabis indica
ttccagacagtttagtaaacagcataataaaatattgattccgattattttttattttaaaccgatacatttctctcattgattattctgattcaaattaaatttatgtgaaatatgtataataaatatttatgtgaaattatagtattggtaaatatgtataataaatatttatgtgaaatttataagtgtattagtattgtgtctaatatcaataaatagtatttgcaagtttaataggtgatactaaacattattgtacgtgtgacttgatggagatatttggattttctttttttaatttttagagaaaacaaaatgaacctcatccagtgggagtgcttagagaattttctcccattatccatttcggggttgttgaaattgtatttatggagaattttgtgggaacttgtcttatataaataagattgttttttttttaaaaaaaaaagtaaaaattaaataaatatataaataagattatttaattagattttgaaatttacatcaaataataacatctaattcaatcttgtaattaaatatctaattttttataatttaattaatatatgttaaattaaatatctatttaagagtttttttctaatcacttcaaagaaaaataattaaaaaaaattgtactagggttgtccatctcttaccaataggactggtcctagacataggcttaggacccactcattttagaggcccaaataaaaaaaaatatcttttaaaaaataaataaaaatattatttattttatagtaagggtcaaatttttttttttatctatagcccattttaactcaatagtggtcgtgcttaccacatatgtaatgtagtctaattcttaagaataattttatttaaagtgttgcttaatatagacaataattacatgatatttttaataattttttattagaaaaaagttatttttacctaaaaaaaccattaatttaatgtgatgtgggtgtaaaacttttagaattgtccaattatttttcttaagtctaaataacaattttatatgaatgagagagaaaataaaagaaataatattttaaaataatgttatattttgacaactacaaatattgactcaattaaaaatcattttcattcaattttactgtttcagtgattgtttatg

SEQ ID NO: 315166 - DNA, 5188 bp, Cannabis indica
aaaacaatcaaatacatcttaagagcacctaaaaggtctcaacgtatcctgctatacaatatgctgctgtgtatttctaaaattacacaaaacatctttttacaaattttctatccaactcttatcctttgctgtagctttttttggacaatatctacacaatctattctttaccaattttttgatctgttgtatcaatgccgagtttgactgcttgtttccattccatataagttcatttcgggtaaaccatatggaatacaccagcgctgctactgctgcactcaacacctgctttctggttttggagtgcctccccttctctattttctttgaaagttccagcagagatgttgcattgatgttccaggagagccaatccttcatctgagctaacagatcctgtgaaatggaacacgaaaagaacaaatgttcagctgtgtcatcagcttgcaaacagagtatacaagttgcatttcctatgacattgtgcctgtacatccgttccttggtctttagtctgtcctgaattgctaaccacatgatgaaactgtgtttagggatatttgttctgcaccacacaaacttactccacttcttcttctctgaaaccggttgcaacatgttgtaaccccctgcaatagagtatttctcagctgtgaaatctctttcgctcatgatgcttttcactctttcctttgcttctacgattttcctccaataccagctgctagttggtggagctttgtactcccaccaatctccttgtttgatgtaaacactatgtacccattttatctataggttatctttttttgtagcaattgaccatacatgtttgataagggctgcttcattccatgtggcagtgtttttgaaacgcaatccacctagtgatttggacttacataaggactcccaagctacattgtcagctctatccgccattccttggttccatacgaagttcctgcaaattttttcaatttcggctatgactcttttgggaagaatgagtagttgacaccaatatgtgtgaattgtgagcaacacatgattgatgacaactgctctccccgcaaaagaaatatttctggaactccatactttaattcttgctaccattttctacactaggcacatacattcttctgctgagattctcttggcacaaatgggtactccaaggtatctaaaaggtacactctgtctgctgaacccagacatgtttatcaccctgcaaatttcttcttcctgcataccagaacaatacaccgccgttttctgtatgttaggaaatagccctgaagtaagcgagaatgcctttaggccttgcatcatgagatatatactcttgacatcaccattgcagaacattaagacatcatccgcaaaactgaggtcatttagtttaatgtctttgcacctatcatgatagccaaactcctctctttcccccaccttttgcatgatcatgctaaaatactccattcccaagacaaataatagaggggacatcgggtctccttgcctaagcccccttaggttcaaagaatccatgaagggatccattaaagagtaaagagaacctaggtgtggttacacaattcattacaagtttaatgaatttggcaggaaaattcagggccaccaacatttcctctagaaacccccactccattgtgtcctaagccttttgtaagtctagtttaatcatgcaacaaggtttagggctttttcttccataatgcctgattaagtcttggcatatcattatattatgggagatatatcggcctttaataaatcccccttgattgtatgagacaatctcggggagaatacctttcaatcttgtacatatcatcttagtcgcaatcttataaataacattgcaacaagctatgggtcgataatcacttacagtgttagggcatttcacttttggtatgagtgtgagacagtagaattgatctccttcagtattgctccagagtgtaggaaagacaaaactgcttcagctatatcgtcacctatcagctcccaattctcctgataaaaagcactaccataaccatccggtccaggggccttgatactcggaatactaaacactgctgccttgacttcctcttttgtatattctttttcgagtagttgaatgtgggccgtagtaagcataggaccttgttgcacaacctgctgtttcacccgcttcttgttctccattttagaccccaacaattgttcatagaatgagatgaatgctttggttacatcctcaggattatctactctttcaccctctttgttcacaatggagaagacacggttttggcttctcctttgcttcaaagattgatgaaaaagtctagcgtttgagtctccttcatttagccaaaacactttggctttttgctacaagaatgagcagtaggccttattcacctctgagaatttccttctcgcttccaattcaatagcctgtagctcagagttaagagggtcttggtgtagtttggtttgactatcatctagctgttgtcgagctacatgattagcactttggatatctgagaaaccatctttgttaatctccttgaaaacattcttgaaacgcttcaattttgtcaccacttgatacattcgtgtgccttccacctgctgtctccatgtactatccaccattatttggtactttggatgtgattttcacatgttaaagtacttaaatggcttctttccagtcacaaggttcgggtatacacttagaacggctggagaatgatgaaaggatccttcatttaagaatattacttccgcattgagaaaagtatccaaccatgattcattagccattactctgtctatcttcgaacaaattcgatcagacccttgttgtttattactccaagtgtaaaagcaaccgctgtatttaacatcttgaatctggcagttggtgacacactgttggaagtctgaacctctgaacttcgctctctcccctattctttcttccttctcaagtatatcattaaaatcccctaaaaccagccatggttcttgggtctttaactgctacatatctgcccataaatccttccttccttcttctttattctgcccatacacaaaggtcacgtaaaagctacttttattaccaactgctgtaacacacaggtgaatgagttgagaagagcacttaatgatgttaacaacaaaactaagtggattccacgcaactaatattcttccacctgaatgccaagcagaatttgatgtgaaacaccatccctcaaacatgtttatatacaaagcacccaacttgggagcttttactctcgtctcgagcaaacctaccaaaccagccttttgggaagcaataaaatgcttaactgtgttttgtttctgttggttgttaagtcctcggacgttccaacttattattctatccattagaaagaggaggatctcccctcctccctgtgtttcaccatttcctactccacctctctgctgcccaagttcaggacccaaaaaagggtctgtaacgtcactatccagcaccataaagccattcgagatcttggttgcagctggtttttcagtattcttgggtttccatcctttcccaactagttggaattcctgcagggtagccttcttttccacttgtttaataattatcattcttaaccacccattcttgtttttgaccctccttcttcctacaaacctcagccgtgtgccccatccctttgcaatgagcacaagtgataggcttccattcataattgactattactgaaacattcaacccatgttcattttcaaactcaattaaacccgggaattcttgaagcattgacacttctatgagaacccgaggataactcagcttattcctctctttagtgaattcatccaccattagaggcttcccaatctgccctactatcttgaataaagtcgactgtccccaatatttgagttctaaatcttctaattgaatccaaatcggaacatttctaatatcctctttcttaaaattcacattaggatcccatgctttcatgattacaggcctcttattaaagaaagtatatcctccattaagaatgtgatttctatcttcaatgctatagaatcgaataaggaaaataccataggaaatcatacctactttgtccactttttccttccacaatctccgcacaaaaccttcaattataggtagtggtgggttggctccaagcacataacagacaattgatgagctctagaaatcaacttcctcctgtatatcttcttcagtaatcttcactctgttcttgactgtaaacgatggctccagattcctaacaatgcttccagaccgaagaactggaggaatagatttggatccttgagcaatctctgttgaacatttctgatttgcctccaagaacattgcaaaatcctccttaatctcctcttgttgctgaatagatctgagcgaagattttggtgataatggcgccctgaatacatccgtgagtttcggatcttcatcttcttcgtccgtgaactccagaggttccactccaagaatttcatccatagacttagttttctttactacatctgtcgacgtaggccctcgcttcttcttcttcttgcctgaaggcatgatcttaggttgagattttgcccttgttttggccatggccaccagctcgagagagagctgcaacaacgaaaaaatctctaacaaatactactttgataatttcaatattaacttaaaaacacgaaaaaaaaaatacatataaactaaatatcacccttcgttttactctactattctataaagatattatccttacaagtttaagggtaaataccattttggacgctttattttataaaaattgccaattggatattttattttgttaaatgacaaaatagatcctgtatcttctaaaattgtaaaaataagactctgagcttaatttttgacaacttttttttaatataaccaacttgaagacaattcctaacacaaacatatacagaaaatgtaaacagttaagtcataacacctttagatcagattcttattaaattttattttgatgaaaaatcagttcagagtcctatttgtaccatttttgaaaatacagggtccatttcgtcgtttaacaaa

SEQ ID NO: 315167 - DNA, 1221 bp, Cannabis indica
agatcctggtaaaaataaattccaacacatacatggtagtaaatctagatcctggtaaaatatttccaacacagagttcttctcaatctcaggccttggccgattgagggagaggttagcatgtatgaatttgaagtggctcgattttgggtggagttccacgggctacccacacgatgcctctctgaggttaatgctcccatcttagccaagaaagtgggaaccttcattaaaacagatagaagaaagaaggaagatgtggttagagggggtattcgcggtgttggattgatgtctaggttacacacccattccctgctgggttttttctcaaagctggtgcccatcctgagtcgtgggttcaattcaaatacgataagctaccttttctgtgcttcaactgtggtagactggtagactctaatgagtgcaaggctcctacaatgtgggttcgcccatccaatggccccgcggtgcggatgtacggtctgtggattaaggtggatggtgcccgaggcaactgcttcactgccaagggtactcgacgtgaaatggtggtgaacgacgaagggtcagtgttaaatttttagaaccgccgcagccctggaaggtggaagcaatgacaggagcgtcggcaggagcctatccccagctcctccacagcggcgttcggagacttgaaaaaaggagggccctgctggtacgttgcatggtactgtacccatgcagcgtagtggaattgttgggagtacgaactgtacggcagattccagcaaggacaaggttggtgagatcctgggggaccttatttcaaacgtgccagaaatgctgaactccccccccccccaaaccatattctaaaggattttccttcacctgattttgcttctcaaattgggatgtggagattatccctgatattgggcctactctgattcaaggactcgatattccacacatttggtcctgtaaatccaagaggccccatcactttcttaagcccactcacttgcacaggcccagtgttacgaattttctgtttattacgcaagtgtacgtatcaagtagtatctcacgcaagtgaggtcgaaccacagggaattggattaagtactactaaattatacttatgattctatttggtaaaataataagtttgcaatttaaaaataaagaactcagaaattaaagggaatataaacgaagattaatcaagatgag

SEQ ID NO: 315168 - DNA, 945 bp, Cannabis indica
gcaccacaccattttttacagtgcattttctgcggttttttagtttcgcggtgcgagtgcggtttgagaaattagaaaaactgcatgtgcgggttggtttaaaaaaatagtcaaaaattgtacaacccgcaccacgaacacccctaattttatgtatttaccccattagtgggccaagtttacatgtaaaccctagtgggtcacgggtatgtccatactcgggttctagcttataaatactacattataccctcatgcaaagggtcggaaattcatgttgtaaacaatatagcaaagagctagatttttagcttgtcaagaacattggggtaatactttaaggttttcagcccaatataactcatttttggactagggttcattaatacccgaaccacgtaagaatcttcatctccatttcgtttatttgattcattttcttagttcttcattatattcagttttaaaaaatcttggtaaatattttggtgatttcattaagagatgaggaaagattttaagccaaattgtatctataacaatggtggctactagaaatgttgtcactaagcccatcgcccatagtcaggatgccatcactgacgtgtaaacccacctcccgtagtgcacacctagtcaggcactatgagagacgaggaaatatccgacgctggtggttgtccaaccaagaaagcccaacattaggagaaatttgtcgatgaaaatcccattaacgactacgaaacagatggccacaaagaagaccttgagggcgaaggtggtggtgaggatgatggcggagacgatggtgagattaaagataggtattactgttagaacttgttttaccaggatctagatttactaacatgtatgtttgattataaactataatctaacatcctaaatatgaatttcttaaaataataaaataaacacatataa

SEQ ID NO: 315169 - DNA, 1431 bp, Cannabis indica
aaaaagttcaatataaacaaatatcataattgaataaaaaatatatagtaaaaatatctaagctatttatttattttttaaaaaaaaaacatagtaaaaagtgatatgaaatattagaaataattaaatccctttataatgttttagtaaaaatctatgaatcttttgaagtgattgagatctgcaaaagtagcgaagctttttcgctgtcttgcaacatttagaccttatgacgacccactttagaagatttgccatgtcccacttcatgatcagtaatattaatatttagttcttccattacagtatcaaaatttacaaaatattggagaggaagataaattgaggatttgagagttaacggagacgttaatcttctgttagtttttattttaaaaaaataaaacgttaaaaaagtgttaaaccaagaattcgattacatagccacattttatgtaaagaagatatatagagagagagggaggggagtgaaggagagagaagcctgaccttcatggagtaagagaagttgttgcagagaagaagaaacaacaaatcaaacaagaatagaagaaaatggccaccaaattacaattaaagagagctccaacgaaaaggcgcgaatgatggaaaggaggaaagtaaaaattaaaataaaataaaatattaatataagatatgaagaatctacaattggtctaaataatttacacaataaaggagctgttctttatattctacaaatttctcaattttacaacagctgttgagactgctcttagatgaagccatcatcatattctcgaaaagtaagccttggtgctactaaaagagaagatacttatgcatgacaagttgtcaaaagcactctgttactaagaaaagtatacattgataattgctcatacttctcagcattcataaaacaaaggattttataattcccacaactcgaaatgctgagaaaaagcaggtaatggaacttttaaatagaaaaacagtaatacatgtactaagatcatggtttcatccatctagtatatctttctaatttgctgccaatgcagaatctcctttccttcaacagttttaaattgaaaagattcttcatttcgtagtcatgtatgctctgtacagcaaataaacaatactattacaaaaaaaaaaaataatttaggaaatacactacaggtacaaacaatcttataacaaagtgaacttacaaatgagaagtaaaactacactccccccctccccctctcctctctctcctttctcaacttggtttgaaataaggaaaagaggaactaaaacactactcattagctatcatccaatgtccagcgtcggctgcgccttgctctactgaaaatggtactagaaagactccttcgagacagatttggtgcagcaccagaccgagaggatgac

SEQ ID NO: 315170 - DNA, 725 bp, Cannabis indica
aaataaagaaaaataaatacttactgaatggaatagcctgcccgagacaaaggactatctaaaaacaaaatactagacaaaccagaccaaatataagaatcaacagcaaaacatagctgtcactacaatttatttatcaaaattccactctgcaatgtcttgcagcagagaggaatccacaagagcaagaggaattgaacatcaattacacaatatatttatatatactataacatctcacctaaaggaaaatgtgttgcctatctccttaagtatactaccatttaatttgttccacatgaaattcttgagataaaattgaaagacaaatcatatgctactttgtaattctgacagaacattgtccaagtactaaaatgagagtttaatttttcttctgtagtgatataataacttagtattcaaattcataacaactacaataaagggtcaatgaacaaataaacaaacaaatacaacaatgattattatggatctctaaaaaatatccttggaatgttgatccatacaatgctgttaaattcacaacattataactcttttgctgccagaagactatttaaaaccacagaaatttagattagcaagaagaaaaaaaaactcttgatacttgcttgattcgagtatttagaaaaagtttgttctctaaaactaagcataaatagatcattttgttgggttttatgccctaaataaaactcttt

SEQ ID NO: 315171 - DNA, 620 bp, Cannabis indica
ttttttaaaaaatgtattataaaatataataagaggcagctcaattttcacaatcaacgtgatattaatgaacaatataaggacataggtaaataattctaaactgaacatttatattaatgaacaatatatataatttatttatattttatcataaaaacttaatatattatatatgaagacataactttccgagcttgaaattacaactagcgcaatagcaatagaaagagtaagaaggaaataagcgaagagtgcaggaccaggagcaaggatcgataaggttaatcttatcactcggagcagaagcagccatgggtcccagcggaatctttggaataaatggaatactactatttaatgtcttctgatcaacaacattattttcattctcattctcatgtagtaatttgttttctgatttctcaaagagaaatcgagcattggctaaggttgatgaaaacaacataatgaagcataaaatcactattgtaacattcacggccatgtttcacaagtaagtgttttggatttaattaggagtctcttgctatattggtgtatttatagatactagtggtgtgaaaaatagttttaaattaaaggatagaggttaatgt

SEQ ID NO: 315172 - DNA, 530 bp, Cannabis indica
aacctcactcttgctctagctcaatctaaccttggagcgccaacgaataatcccacctccgagatgactgcacaactcccaactcaatttgcaccagccacacgtatggtgggagcccccccaaagctcccggagtaagagatccttaaaaggtaacactcgacctaaggataagagacaaaggagaggttacaccccctagtatacacaatatacggaactcgtggatactcaagaacgagtgtacttcataacctagcaaaacactcattactggaagcctccccctttgtactgaggtagcttccggagagaccccaacaaaaggtgtgattaccacaacgatattggtcacaccactaacgaatgcaagaacttaaaggcttaattcgattaggccatttatatgaatggatcaaaaacagggttaccacacctgaatacaggacaaattggagtccaagtacctcaaggggggccagcaatggcaccagaaggacaaattgttggatattattttaccaggatct

SEQ ID NO: 315173 - DNA, 1060 bp, Cannabis indica
aggtactaggcactactggtgcctatagcaatgctcaacatttatatcttgcattaaactagttttattatctactacaaaattgttacgtggcaatgttttgttaattgaagactaaatctttagtcacattatatatgtttctcacattttttgcacgtgattttgtgtttataaacatgggtatgattttgttagtgctagcaattgccaatcacattttagtactttatttctttatttgatccaatcaagaatttgttgtatcaataacttttgcaatttatatctcacaacacatgtgacactattagattagagtaaatgagaaccaatggttcttcactattctaacataattagtgttaagaaccattcaaagtgattttattaattatattacaacattatttcaaagtaattttgatgtatacactttttctttcttttgcataattttaattagtgctcaatttttggggtgttttagattctatgtagatgaaattccaataagagtgttcaagaatttggaatcaaaaggtgttccatttccaaaaaggcaacctatgagaatatactcaagtctttggaatgcagataattgggccactagaggaggactcatcaaaatagattggactaaagctccttttatcgctttttatagaaattttaaagctactgctgctgctgccgctaaaagttctagtaaaatatcagaagaattaaatggtgcaagtcaaaaaagacttaaatgggtacaaaagaagtacatgatttataattattgtacggacatcaaacgtttttctcatgaatttcctcctgagtgttaataatttatattacttaaaagagtgctatataaatttactttactaattaagcttaactatgtgtgtacattattttaagagtgttacagaagaagtatgtcttttatttagttgggaagaaaatgatattgtatacatgtagctgaattttgtatgtaaaatatggaatgtaatgaaatttgtttatatgtaattagaacatgtaattattttttatttat

SEQ ID NO: 315174 - DNA, 958 bp, Cannabis indica
attgagtgtttggataaagattttaagtggtcactaagagtgtcaaggaatggtgcaacagataatttcgttttaaggaaataaaatgaaaaacacattttctcactaagcatcaaatttggggatcaaaggcaagcttctgcaaagatataaaggactgtgttaaatacaagtttttgaacataaaaacaacaaccacaccagcagatattagatttgagatgaatgataaatatgggttacaattaaattacatgaaggtgtggaggagtagaaaatatgctcttaacatagttagaggaaaagtaaaagagtcttataagttgctgcctagttatttctatatgctccaaaaaaacaaacccaggatctgtagtgcacatggaaactgaaagaaacaataacttcttattttgtatcatggaactagacacttcactgaaagcgtggaaaaatgcagacctataattgtagtagatggaacttttctaaaagctacatatgggtaacactactaacagctagtgcacaagatgcagtaagtaaaatattcccactagcttttcgtgtggcagattcagaaaatgatatcccatgggaatggttctttgaaaaattaagagcatcatttggtgttagacaggaacagtgtgttatattgatagacaaaaaagtataatcaaagcagtccaacaaatcttccctgaagtagaacatggatattgtgtgtatcacctactcaacaacctgaaaacaacaataaaaaaattgcaaggttctttgaaaatcccttttctcgtacagcaaaggcatacacggctcaaaaatttgaaaatcacatgaaagagatcgacgccttagacaaacgggtcaacaatatctacaaaatattaggtatgagaaatggtcaagatattattctaaaaacaaaagatacagtaccatgacatcaaatgtt

SEQ ID NO: 315175 - DNA, 2176 bp, Cannabis indica
aaatgtaatgtatttaggccctccacgtgtctaacagcccccctcaaggtggagtgtacaagttttgtacacccatcttggagataatatttagaaactgggagggaaacagagcttttgtgaaaagatctgcgcgcaaggttgtgcttggaggggacatgtatctcaatgagtgtgtcttggttgactttctcccagacgatatggcaatatatctccacatgttcggtgcgctcgtggtaaacaaggttctcaaagatgtgaatggctgcatcattttcacaatatagaagtgcaggattggtgggagtgatgccaaaatatttgagtatggccatgatccaggtgacttcacaagtggcatgcgccatggcgcggtattcagcttctgcagatgaccgagagatctttgttgtttttttgatttccacaagatgagggaggaacctaaaaacacacagtaaccagtgatggagcacctggtatgttgacaacttccccaatcagcatcaaaaaaaagtttcaattatactgtagatggggataagttggtttcagcataagcggagatggtgtgggtacttgaggatggaaagaacaaaccttgtcttgggataccttttaagtattgtaatattttgtgagtggcgttcaagtgtggtaaccttgggcggttagatattgacttagacgattgacagcataggagatatcaggccgagatattgtgagataaacaagtttgccaatgagactttggtaggaggaagggtcatagaggagatctccttggtcttggcttaatttgtgacgttctaccgcaccttgttggttatatttgactttataaacatacttgcacccaatgggtttatggcctggaggaagagaagtgactatccaagttttaactttttctaaggcttgtgtttcattgtccatggcatcattccatacctggaatttggatgcttcttcataggatgtgggttcaatgattatatgggtagcaagggcaactgctataaactctggaggaagagtagtatagtcaagatgattctcaatgggatgtatagttgaagctggaacaacagctacttgacattcacaatcatcaagatatgatggtttgtgagataatctttcagtttgagtaatgacttgtgaggatgaagaagtttgtgtggtttgattgggagtggcattgggtggaaatgtgtgataatgatggtgacggtgtggacctgaagaggtgctgtttgaggggagcacattaagattaaaaaaatcaatacaatggatggaggagttatttttgaatgggaagatatcttcataaaaaataacatctcgagactattatatttgattggtttgaagatctaatagaatgtaggctttcatcctatcgagatagccaataaaaactgaggcttgacttcgtggggagaatttgtgtcgttaagacaagagagtagaagcataggcaaggctcccaaagcttcgtaggtgatcataagtgggggttttgttgcatagcacctcaaatgaagtgagctctttgaagagggcagatggggtgtggttgattaagtatgttgcagtcctaatgatataggaccagtagtgaattggtatatgggaatggaataacagtgcccgagctacattaagaaggtgttggtatttccgttcaacaacggagttttgttggggtcgttctacacaagagtgatatggaagaacaacctttgaagcaaagaaggaacgacgattacgttccttggcattatcagttcggacaaccttgattttggcagagaactgggtgcatattaaagtaaaaaaatctattatgatatgttggacatccgattttgctttgagaagatatgtccaagtgaagcgtgatttatcattgacaatagttaagaagtgtttgtatccttcgacacttatgggagtgaaaggtgttagataaattaacataaacccaagatcaatttgtatataatatagaacacaataataatatataataattaggtatgcgtacctgattaatccatagcaattatctcagtttgatccacaacagttactccactttgatagtgcaatactatcaactaagtcttcttccctagatctctaaatcagaagcagtttattt

SEQ ID NO: 315176 - DNA, 936 bp, Cannabis indica
aaagttgtatggtcaatatctttgtgatacttacaaaatttcttggggtcctcatgtcacgattaccccaaatcgaagacagttttttgaaaatgttgttttgttcctcaattacataaatatgatcgcaagaatagataattcggtgtagttgacaaaatgtgggccccctttcctctttagggatgtttctttcttactgagggacttggcgagctttagaattcgtcgtctagctggactacgtcttctggggctgtgtcctttggtattatttgctcttaggctttgagaacgcgatcttcatactgggggttcacgcttctcctttcctctttccaattcggccagagaattctcaattctcttatgtggttctgccatggcgaataattctactaaggacccaggtcgtcgcgcctgcatctccttccaaaagtcagttcttggtagaacacctataatcaacgtacagaccaataaagactcggcagttgtttccaggctttccacctccttctcgagcttttcctccttggtctacttagtccggatgtctttctctaactttggaagaagagtgcggagactctccctctcgtctttgagaacgttgacgtccttgctcagagcctcattatttgccataagcttggcggtagagggcatttcttgcatatccttcgtcagctcctcgactcgattctcagcagcaaggagtttcttgttcacctccctgagctccttcctcacgtcttgaacctcttttttagctacatccatctccctctgcaatgtgttgctggtggcaaggtttttggcagctgcaaacttggctcgggaataggcgtaggccatctttagattgacctggatggaaaaatgttaaaattcgagttacgaaaaagagaataaaacaaagaaggaaatatttac

SEQ ID NO: 315177 - DNA, 559 bp, Cannabis indica
aaccgcgaatccagcctatactcagtattctaatcatagtgatgtggtagcaattaattcatactatctgatagcctagcatatgtctgttggcatctcggtacatctctatgtacacctcaccaatgccctgatatgctaatttgagggctatagatttgcctattctaacgccggttccccaaccgaaattccggttttgtggggcttcttggggaccaaccgaaattccagttcctataggcccctctgaaccggaattccagttcagtgcaggaatcaccaaaaattctataaaaacttcaattcatccccaacctctaccaaactttccatgcctattctaaacatcctaaagaacatttttcaagcaataaaaccagtacccaaactcagaaacaaaagatgccattagagaggcaagcttgagtttaaaatctcaaagcttgcttaaacatcaaaccaaccatcaaaaaagcctaaatcaacatatctaagaataatttatgttaggttttatgccctaaataaaactccatttcaatgtaatctattttat

SEQ ID NO: 315178 - DNA, 925 bp, Cannabis indica
gatcggtgacctcttgggaagttttcccaagaagcgtgcgagtgaggaaaaagcacgctagaaacactcgtgttggtctgtagggccagtcatcagtccatgatgcagctagagtgaaatactcgtttataagagtcattatttcgtgggagtaagggcctaatggaggcttgaagcggggacgttacacgaatgatcctttaatttatattattttaatcatataaaatacatatttaaaataataaaatacctcttgtattaaatagaacataattgttataaaataggatcactcgttaatatatatagaacaataatattttcacagttatgtagtcaccaaatgattagattttagtatcaaatatttaataataaaaagaaaaaaaatttcatgcacttgttggttgtccttttgctcgttcgtgttggcactgttctgtgttgatattggcagctggatggaaactgttttctcatcctggtggcacaatttatctcacagggtaggtgtaatcatgttggaagaggcagctatggttgcttggggcgtttggcaagctcgtaatgttgtcgtttggaaccagaatacttctactgctgctacaattgttctctcagcaaggcgtgctcttgatcaatatcagtttgctcagtcaacaaaagatgattctttattgttatttcgtgataataataaagccattgagcattggactactgcagttttaatcagatcaaggttgttgtgaaaaaaaattagatatacgtaagtgcacgtagtcacaaacaagtaaaatacaatgataagtaacgagtatcgtctccacaaggactataaaaataaaatttctattgcaaaagttaattaccaagcaaaatgcctaagaaccaaaatgaaatgaaatgattaatgattcaa

SEQ ID NO: 315179 - DNA, 2854 bp, Cannabis indica
gatgttaatgaaacatacttgttagaaaatctagatcctggtaaaatatttccaacaacctcgaggtccaattatacttcaggtatcttttttcttctttccgaaatgtgttgatctctccccttcttccttttctcaggtggatgaaggttcgtgcgacaagcttatgggttcatggtggatgaaggttctgggttcgtggtaaattgagcttcacgattcgtggtggaaggagcttcacagtttatggccgaagaagcatttgggactttgggtttgtctagcaatgtttttttttcttgtttaaatttgggtttgtgtgataaaatatatattttgtttcctaaattatttgtaatagtgatattgtaatattggacattctttaatttcagatttggttttatgcttattttttttatgaacaagtttttgtttctattttatcaaattgtagagaaatttttgtaaagatagaaaattatttgttgagtttataaaccttcacaacttgtttgatataattttttgtaatatacattttcacttttaatctcgctttttataagagtttttatcccattggcatacatcgcattttttattttaacaaaaacttggataaaaatgccctaaaagaaatcaattaacaaaataatattaattttcattaattataagaattagaaaataacaatgataatttatttattaatttcttttttcaaactagaatttacgataaataaatttagacccgaaaaataagcaaaacaaatctaccactccaacctgttatacatatttcaaaggagttacgaacactacaagaaaaagcacttttgcaagcaagtttgtcgccgacaaaagtaaacgtatcttcgcgatatagtttttgtgacaacaatttgcgtcatcaaaagatgccggcaatgattcatcagcataataactttttccaacgagctaagatgatgtgccgacaaaaatatttacatcgacgaattcagttgccagcataagttcattgtcggcaatttgttgtcaactgaggtgtccttgtaacaccctgttatttaggcgcgctacagtaattttctaattaacatactaccttgctaatcaagggttttcttagaaaatcgtgttaaattaaaactttgattaaaattattaaacattataagcttatatatatttgcataattgggatcccaagttaaactttttacaaatgtttcaaaaatactttcatatacatgtcgcacagtgacaacaaaatactattcaagatgtcccgagaccgaacactctaggtcgcgtcgtcctgacatgtacaatcaccatccaagcccggagctcaatcctgttcagcctttgcctttccttcacctacacatggaagtagatactgtaagtcaacaaactcagtaagaaaatcatataaaaaataatataataccgacttgtatctaggcacccatacacctatccacaaggcttaatagataagtaaaaacgttctttaataaggtacgactactgtaccacatatactatgtaccgctaatgtacgagtattagtagggtttgttttgtaccccgagtaccactaagttctgtaccacacacactctgtacctgtccatactagtgctagtaacatcgtaatgtactctttacatatcgtacactataccaatgcactcggtaccgctaccgtactattattggtagtgtgtgaatcacaacaagcattcatatatatcccacatacacacatttgaatatataatatgttttatgctatcttaccttattttcgaattcaagtgagttggccaacctgaacagaaaacctcgtgttggatggatgccctatttacattacataagcgggtaaacaacacgccaaaaccctaatctggaaaactcaaacccccaactaagggttctgctattgacaactaatataacaataccctaagtattaaggaaataaccaaccaaggctctggaaataacacgtattgactaattgaacgatacgggaaacctgccctcaatctggttaactagttttacacgacttgtcaaactggttaaccgatttgcaccaggtttcccaaagagaaggtgtggactatgaggatacttttagtccggtcgccatgctcaaatccgttagaattcttctatccatagctgccgctttcgattatgaaatttggcaaatggatgtcaagacagctttccttaatggaattcttgaagaaaccatctatatggagcaaccagaaggttataagcttctagagtaggaaaataaagtttgcaaactcaataggtccatttatggactttagcaagcttctcgctcttgaaaaaaaaggtttgatgaaataatcaagacctacggctttcaccaaaacgatgataaaccttgtgtttaccaactcaaggataatcaagtggtagtattcctggtcctttatgttgatgatattttgattattggcaacaatatcaataaaatgaccgacatcaacgaatggcttgacacttgattcaaaatgaaagatttgggtgaagctgcttatgttcttggtattcagatcatcgaaaactagaagaacagatcccttcctctctctcaaacaacttacattgataaggtgttaaagagattctcagtgacaaataccaaaggggcagtgatgccttctaaacctagtatccgtctatctaaggaacagtggcccactgatcctcaagagatagaggacatgagaagggttccttatgcttcagcagttggaagtctaatgtatgcaatgttatgcactagacctga

SEQ ID NO: 315180 - DNA, 643 bp, Cannabis indica
tgagggttaggtcatagtgaacagtaggcacatttgattagcttttagggattttgcattttgttgcatcggtttctcactcactatagttttttgcatcgtttttaaaacctcgcaaacacaatagtcgagtgttaataacagatgcaaaaaaagtaattttttaattttttgcatattctcgtcggtttactttttactgtcatttcttaaaagatgcaaatagcatattattagtgtcgtttttaaaaacacgtgccaattgttgggttactattcacgtcggtcaatgctatgaacagtagtgttgaccgatgtaaatagtgtaatttatagtagtgtatggagacaagtacaaagggaagtatacacaggctctctctcagatcaatgacttggaggaagacttgaagcaagcaaagctggatgtcaatgattcccaacaaaagctcacccatttatctctagaatacgataagcagactctaattgtgaatgaaaaaaatcatttcttaaatcactttggagagagaggtcaagcatcatttggacttacaaaaaaaggtagaaggagctgagaggaaaggtatcaaaaaaagggccaagacgcgaaatttccctaaatctaacaattaagttaata

SEQ ID NO: 315181 - DNA, 1076 bp, Cannabis indica
tttttcaagaacaaaattattttatgaatatttatctattacttaattaataagtatatttattaattaagataaaaaaatacatttattaattttttattaaagtttcttttagggcaaatacaatcctttatttattaaatgataaaatagattctgtattttccataattatacaaataggatcttaaattatttttttgtcagaataaaacttaataataatctgatctagagacattatgacaaaaatagctacatttttttttggatatgttcgtgttaaaaataatcttaaagttaattgtattaaaaaataaaattgttgaaaatgtatagtttctacattatcttactttatgattttttatcctattctatcgttttattttgtgaatgaagtaacacaaatattaggaacgaagaacgatatttgaatatgtttagttgccgtttggtaatatttttttaatcaattttcagtttttaaaattgaaaaagtgaaaatattttttaaaaacatgttctataaaactgtttttacttttcaattttttaattgagaatcaaaaattttaaaacaaaaaaaaaaattattttcaatatttttttaaatagtttttttttcttaatcaatatcttggacttcgatcagacccggacccaaatccccccacggccctggcgctgaactcggtctctgacttgaacccaaatccgaccccggacctaaacccaacgtaaataaaatcaaaaaatgaaaaatgaaaatgaactttacagaacacacttttgttttctgtttttaaaattgaaaaataaaagtggttatagaacgtattttgtttttcaaaagtaaaatttgtaaaaacaaaattttacattcattttgtgattaaaaaattagaaaacaaaagtacttaccacatggcaccttaattagttgtccatctctaagtgttcaaataatgttcaagcaaattatgatgatactagatacaaattaactcttaatgagtacgtatttcgacaaattagctgttgtcgctttctaatgtgtgtcctgtccagctacc

SEQ ID NO: 315182 - DNA, 1442 bp, Cannabis indica
tgccatgagaaatatttggggcttcctgcttactctgagcaaaacaaaagtcagcagttggctgatataaaggatcgaatttggaaaatagtgcatgcttggaatgataaactattttccattgggggaaaagaagtgttacttaaagcggtggtcaaatccattccaacatatgctatgagtctatgagttgctttaagctttcaaccaaattctgtaaggatatagacacaatgatggctcaattttggtggggtacaacttatgataagaagcgcactcactggaagaaatggaaatttctttgcacttcaaaattggaagggggtatggggttcaggtcttatgttcaattcaatcaagcttggcagatttttcaaaaccccgacacacttttggcaaggatattgaaggcccgatagtataggacatctgactttttatctgcctcttctgctggtgtatcctccatgacttggcaaggtatatgctggggtaaagatttattgattaaaggtctccgaatgcaggtaggatcaggctctcacattcgaactgctactgatccgtggattctagcacaaaacatcttcacaccagtaatgtttactggtttaccagattctcaagtagctcattaaataaatgaaaataaagtgtggaatgttactaagctacaagaagatttctcaacaattgatgttgataatatcctcaaaattccactttcttttgctgcttagaatgattgtttcatttggcattatacctctactggtctgtattctgtccagtccagatatcagcttgcatactctttagccgctcaagaaaacacaacaagttctgagtgtcatgcaacctggtggaaatatttttggagtttaaagttaccttctaaggttaagatatttgcttggagagtttttcatcactctataccagtggctgccagtttatttcagaggaaaataattgattctagctcttgtagcttatgtacatgtgcatgggaatcggttggacatgcgcttttcagttgcaaacacgctaaattggtttggcgtttctctgatttttctttcgatttagcagcagctaacataatgactgcaggggattttttgatgcacttgtcaaagttatacattaaatcggagcttgaacaaataatatgtttaatgtggtctatttggtcgaatagaaacagtgttgtgcatcaaaaatcttccaagaaactggctgatatttttgctagttctatggcttacctcaaccatttcaatcaagtctcacatacaccctccattttcctcaaggatcatgtgctgttactttgaagaaattagagtgctcaaagcaagcctacgctctgtatacattagcatgggataacatcataggatttcggtcctattctattagccttcgggatcggagta

SEQ ID NO: 315183 - DNA, 725 bp, Cannabis indica
tatcactaacggcactatcactgacgccaaaaagtcctcactaaaagtaacattattaccaatgaaatttaagtatcctcagtaatgaaaatgtattttttttttgctgaagtatagatcaatggagacaaaatatatcaatgagtcattcagatatatattaatgacgaaattatcattagtaatttttttttgaaaaatagtcgttggaacaggcagaaattttcccaataaaacaatcactggcgacaaattcgtcagtgatggactgccacctcattagtgaacagtccatgatcactgatgactttgtcgttagtgttatgtcgccattaatagtgttaaaaaaacaattaaaaccttgaatccctcatatcgtttcccatttttccttgtcaacatttcatcttctacttacaaaaatattaaatctcctccaaaagattaaaccctatttttcatcttcttccttcgttgatagcaggttcggtcgatggtggttgttgtgccgtccaccactgtcgtccccccttttagggtatgaatttattttctcctattttatttttaagatttgttatttttcgagggaaatgatttttgtggtttttattagggtaaagattcaaagagctcttcttcttctcaaaattactattgtgtgttcaacctagagagaaaactaggtttttagcttttgagacattaattggataatgagacca

SEQ ID NO: 315184 - DNA, 1177 bp, Cannabis indica
taaatcttaaaccctagttgaaaaactataaaaggaacatgatgctctcattctcatccaacctacttcaacctaaacgtagttttctaactagtagatgagagactcctttctatagtgatttcacctcttgcttttcttcaccaattcgagccatagtgatagtgtaccatgctcacacataccaagtcaagtactcaatcatagtgcggaagacggtggttaacccaaaataaaggagaaggagattcaggcttagatcttgttattactttgcgacagaataggaacaagggttagagatatgagtggaaggagtcatattattccgctgccatcaatgtaagattttttaaactcttatgggtttaatttgatcgtactagagaattcacatttagggtgttaactggtaaaataaatcccaacaaaaactacatgtaaatataaatgaattttattcttctattgataacgtataagattatactaaaatgagttttatttagggcataaaatcccaacacgatgtcgctccacaatcaccttggttggttatgggagattttaatgagatattatggaatgatgacaaaattgggggaccgccaagatgtccaaatcagattagagatttccaatctactattgatgcttgtatcttaacttggataccttttgatggagagttagccacttgacaaataaaagtaagggtgctggtaatgttaaagaaagacttgattcttgctttaccaatgactggtgggctataaccttccttgtgcctacatggcaacatttagacttttaccattcaaaccatcgagcattgaaagttaccattcaaattcatgataatgttgttgctgctcctgttttcaaatcgatatttcactttgagaaaatctggttggaagagcaagaatgttctgatatcattctctggtcctggcttcaatcaaattcttcagttgtcaaccaagtgatcaccaacatctcaaattgtgctaacaagctacagctttagcatcattcaaaatttggaaacatgaagaaaaagatcaaaaaaatctcatgaacatgtttctatgcttcaaaactcatctcgtacagactatcatcattatgaagctcttgaaaatgctaaaactgttggattttatgctctaaataa

SEQ ID NO: 315185 - DNA, 1722 bp, Cannabis indica
ggcataaaacccaacagagctggcctcaatccaagaagacgatgatcctgaggtcttcttagacctgtgcgaagaacttgaaatggagaaggagtcgggtacagaggcgttgaattcgacccccaaatcgacgagttgggctgatgacaatgaggcgatggacttctaggaatctgctaaggttacttggagcaaattcaatttgaatcaggtgaaaaccccttcctctcaactatcatttactgaaccattaaaacttggggatcaggtggttgctaagatagatttagacgaagctgaagttgaagcttcattttggagatcgtcaataatctgtattgtattgggggccaatcctccatttagagtttttgaaggctttatcaagagaatatgggggaatttgggagtggaaaggatagtgagaatgcactctgggttcaccttagttagtttcaaggatgaagttactaggaacataatacttgaaaccggggttatacaatttgatagaaagccagtgatactaaggccctagtcggaggatatggacacaggccgaatggtcaaattggtccctgtgtggataaggttgcacggattaggtctttaatactggggaaagaagaatttgagtgctcttgttagcactattggaaagcctattacggctgataaagtaatgcttgagagatccatgattaagtatgctagagtgttggtggatgttgagattaaggatgaagctccgagaacaattgcctttgctaatgagaagaagcaactgattgaacaaccggttgaatatgagtggcttccaaccgaatgtgcggcatgtgacttgcttggtcatttgatttcaaattgcaacaaagggaaacctgtagcctggaagaaaaaaacagcaaggggacaagcctaaagctgttgaaaaagctgctgaaaatgaggaaaaattagtcgggaacttgggcaatgtaatggaagcagaaaagagtgatgtcgatggcaaaacagagaaagggtcgattgatattgaggaaacaggggctaccataacttccactaatccaaccagtaatgaaaactgggttactccaaagagaaaaagttctaaaatagtaaatcggcctcaacaagaagcgaaaatcagcaatggctatgaggctttggaggatgctgaaggggtgttggctactgaaaatagaaaataatctaatggataatctcaatatcttaggttggaatgtgaaggggttgaataatgtcgagaagcagcatgaggattttgaacactgtaagataaataaggtgggttttggggctctttttgagaccaaggttcatcatgatagagttagtaatcttgtttacaataacccaaactggaggatatattccagtcaggatatttcgtatagaattttgctggtttggattgacaagcttgtcaaagtggacattttgttggaagataggcagctcattcattgtaagctcaaaatggtgggatacaaagaggagttctatctcacagcggtttatggaagtaattctatgaatgaaaggaaggatctctggaataagcttgctagtatcgggcatctgaatgctccttggatcatccttggagacttcaatgctatgttcgcttacaaagatagaagtggtggcagaagaattaaagatcttgaaatccaggatagtcaaaactggcttgct

SEQ ID NO: 315186 - DNA, 2488 bp, Cannabis indica
gataactaatcagattgtaaagatttttatttagggcataaaacccaacacccaagtctaggtctacgtcaaggtttgggtccaagtctcggtcccgatcttggtacacgatcgagtttgggcccgagttctggtctcagtatgggtctgagcctaggtctgagtttagttctaggaatgggtctgagtctttgtcacggtcctagtcttgttcgagggtccttgtctagctgatcttattcaggttccaatttcaggtctcgtttctaggtcagggtctgcatttgggtcctggtctgagtcccaaatctggatccatgtcacgtgtctcggtctggttcttatttaggtcgcggttcccaggtccgacttcgggtttagacagagactggggtgtaaatctatgtctcggtcccaattctatgtcccggttctggttccaattttgagtctgagttcgggtccaagttcaggtcctgagtctagatttgggttaggatccgggtcggggtcccagtttgggtctaggtctagcttggagttcgggtccttttccgaatacaatttcgggttccaggtccaggtccaagtcctagtttccgtcccattcttgagtcctggtctacttccagtttcggttccaaattcgagtcacaaggtacgggtttgggtccaggtttgggtttgggactgggttcgggtccgggtctaggttcgggtcctggtctgggttcaggtctggggataggttccaaatccaaacaccgactactggttcgatccaagccctgggtccaaatctaaatcccaatcttgggtgccggtctggttccatttcaggtgccaggtcacgagctgggtcctatgtttaagtctgggtctggggtcgggtcttcggtcctggtcctagttttgttgcctaggtccctatcttgattctaggtccaagtcctagttttggtctgggtttgggtcccaatctaagttcgggtttgggtcctagtcgcagtttgggtttaggtcctagtcgcagttcgggtttgggtctcagtctaggtttttatttgggtttggattctggtttgggtcatggtcatagtcctggtcctagtcctagtccagtccaagttccaattgcaattctgagttcaagtttgggttcgagttcgagttggggttcaagttaaagttgaggttagagtcatggtctaagtttgggtttgggtccggatcacggtctatgttcgaattaggctccgtgtgtgggttagggtcctgggtctgggtccagattcagctccgagtcccaagtttcgatatcaatctgagtctaggtttagttccttttctaagtcctaggttccgatcccggtctttgttcgagtttgggtccgggtgcaggtctaggttagggtcttattctgggtcctaggttcgggtccaattttgggttcgggcccaggtttgggtcttgtcctggtatgggttcatgtctaggttcctttcctggtttgggtttggggcaggttttgggtccgggtttgggtctgacttcaagttcccgagtctaggtcaggtccaagattgggttcgagtcgtggatttagatctgggtctggattccgtggcctaggtccctggtctgggtcccccatccaagttcagttcttaggtactggtctgggtccaggttcgtgttggttcatgttcgagtctagcgtcttcgttttagtccagcgcttggtccgggttcgcgtccaggtctcgtgcccagtcttggtcctggttcaggttcgagtccttgttagggtttgcatcctggtctcagtcgcgggtctcaagtcccgatgagggtttaggaccaggttaggtctaaggcccggtccaggttcgggttccaggtctcagatcccagtcctagtgaaggtctcagtcgaggttctcgtctgagtttaggtaatggtttgggttaggttctggtcttaggtttgggtcctagtcatagttttagttctgattacgggtccgggtctaggtgcaagttgtggtcgaggtctgagtcttagtccgagtttgagtacgggtttttctgatcctggtctatgtccaggtctgagtccgggtctaggttcgggtcctgggtctaagtcctagattcaggtctaggtctgagtccagctcctgtgtttcgatcctggtctgggtctgggtcgatattcggggtattcaggtccggttctgggttcgtgtccatgtttaggtttgaatcccaatttaggtcaggggctttgacttggtccaggatcgagtctcgagttcgagttctggttcaggttcgagtctcagttctagtctgggtttgggactgggtccgagcccgtgtttcggggctgggttctagtcgagttccgggtctcagtctaggtccacgtactggtcatagtcccggtcttgttctagggtcctggtcacgttctggttcaagttt

SEQ ID NO: 315187 - DNA, 874 bp, Cannabis indica
ttgtctgatcaccaattaactgtttaatgaattcaatataaaatttaagaagtgagtattgattatgctgtagtgaaaaagacacaaatttaaatataggacgagagtacctatatagtttgtgtagcatttaagacttttatgcttagtgtctcctatttgttaaatttataacaagagtaaaaaatttgcatataggttaagatttatatgtcttagttcgaatataagtttctttaataaatccactatcacataaaattcagaagttgagatttaaattatattaaactatataaagtagatgcaatcgaagttaatcctcttaacctttaatcattgttcaatttcatattaattatgtgttttctttgtttttcttatcaaacatattttcttacttttgttgtccctaaatagaattaaaaatttaattatttggtaattattacattttttgtgggatcgacctcactcttgtgagtctattatttataaatgatatgtatacttgcatgttggaatatccataacaattaataatatgcgtgtttatgtttttggcatttgaggaattttaatctaacttataattgtagttattttagggaaacttacaaaaatactgtttttttaccaaatattttcaaaaatactgggacacggtaaactttacatttttactgtccaagcctatttttatttcttttatactgtccatgcccaatatatttacttttatactgtaaacagtaacaaaacacaaacgacacctctccttcgtagttggggacggacaaatcaacaccagaatcatagaaacaccaggaaaaaaccataaaatctggcaaagagaaaaattactaaatcaaca

SEQ ID NO: 315188 - DNA, 1000 bp, Cannabis indica
gttatggtctagttctgggtgtcggttcaggtccaagtcttggtcacggtttcggtcctgttctagggttttggtcaagttatggatgatgtttcaatttcgggtaccatgtctgggctagggtcaaggtcctggtccagcttcgggtccttgtctgagtcctagatcaagacaccgactacgggtcttttctgagccctagttcttgaatctcagaataagattaagatcccaatcatgggtcccagtctagtttcgattcatgtcccaggtctcggtttgggtatcggtctagatttgggaccgaagctagggtgcagttttgggtctcaatcccaattgttggtcccgagtcctgctccatgttcaggtctaggttcgggtcccgagtaccgattcaggtttggcacccaatcccaaggtgggtctgtgtgtgagtctgggtcctggtccggttatagttttgggtctcggtccaggtcctagtcttggtcctgttcctagatcgcaatccgctaatagtttcgattcaatttacaaggcacggggtacgagttctgatcgagtttgggtctgagtcttgttttgggtcctaatttgggtctagggcgaggttcaggtctgcgtttcgatctcggttagggtccgagattgggtacaggtccaagtcccgatcccgttccaagatcctagtcctgttccaattcaagtttcaatttttgttcccgagtgtgggtctgggtttgggtatgtatatgaatcctggtttgagttcgagtgtgggttccggcagtagtctaagtcccagatccaaacaccgactacgggttgggtccgagcatcgagtcccagatctcgggtcccgaggtgggtcctaggtcaaggtttgggtctgggatcgagtcccatatcatgatccaagttccaaggcccatgttctgatcccagttttggggcctgattcccagttttgtgtcccccatctatgttcaggtcctag

SEQ ID NO: 315189 - DNA, 3595 bp, Cannabis indica
gtttttaatcagaaagttataattgttcgatctctttctcttaagaaaggtttgatcggtaactttaaaaaaaaacattaaagtggtgggtatgcattttatcatgtatttctagataaattctggttaatcatacacatatgcccctcaagtaattttaaagggttacacttcataattacttaaaaaaaagaaatgattaactttattcacgacagaagttcaaaatattatatcagtgatgtgagttacaatcattaatttactggtagtaaaattgcaattgttccacgatccttactatcgtttcaatcatgtaaggaccctcccagttgaattgattattttctcaaccttcagaagcatctggtttttataaaacgggttttgatattaaggatcaattcctatcatatccccatggctccaggtgaacagatcctagtttgccctaaaataagtgatcatggcttcagttgtttgtccttcttttgtcaagactaccattagctagtgactggctgtcctgtgctgcagctctatgcgatagcgattgcgagctagcatctgagcaccttgcactactcctacgcccactggtgtttaaaatttcatggttaagtgcttgatcgaactaactgcccctagtctgattaatactcggtgacctagtagtatattctaggctgatggccagtcgacaaccacaaagccttgcatgattgtggtggacaaaggtaccccgttcaaggtcaatttgagcttgattattccttgactggcgacattgtttccaataaatccacgaagattcactatataatgtttcaatttggcttcttcgagccccaccttctttagtgtttcctggttggcgagctagatggtgatcaccaccgggtcaacgtgagagtatctcgcattttcttcatcttcctcaaaaaatataatcggaggctctttattttttactttcttacgttcctcttttgggtgttattattcttctcctgcaatatggtatccccccaagataaccagagtatcctttccttcaataggaggaggttgtagtccctagttgcttgggttgctgggtggattaggctggttatgtacattgccctacccttttacatatgtcttgaagtgtcctcgtgcgatgaaaacctttatttcatctttcaactgacgacactcttctgttgtgtgcccaatatctgtatggcacttacagtatctggttggatcacttttatatcacgcatgcctcatgggcttctgttttgtgaaaacaactttgtgctcatgcatgagatagatattctcctgagtttcattaatctcagtatagatagtgtaaattggtacatacttgtcgtgtttcttttgtttcttgtctttcgacgaccccttagagtcgtctttcccattttagccagaggcccccagctcgagttctccatctgaatcataccccgattgttttccttgctccccgacttgatacctcctgaacttatcctccaactcatctattcaaaatttgatcggatccccttactttggaccaagttgttggcgaagattaggttttttctggttcaagtgttctcgtagatctagttggttatgatggctggcagatctcgttcaactcatagactgtgtcccgctcatggacctcgtcctttagtgacttatagccttacttgtgcctatgcgatgttgatcattgttgcgacgagtattttctcctcctggtattgatcgattgtgggctctcgcgtgccccgaggcaacactcgcctcttcaggccttgttcctcctccttgggtgtggttcgtcgtgtttcccacactagggtttgcactagcccttccttatgggcttgggaagaatattggtgattcctcgctaatgacctacgtgcttcaggttgtctcccaggaaattccttatctccgtgaggaatttcctcttccctagttcctggtcgccttctattcttatttttatgagatggttttggttgatcattttgctgctcattctcaggggattcctcagtttccccaagttctctttcctgagtgttatgggggttcccctgagctgtcttcagcaccctagtttgtgagtcgcgaggtctacctcgtggtcttctctctccagggttagtttgattttgaatattattttcctgtgttgtactggtagcagatgcttcacactccaacttagcattccaacggtttgcctgctccaggcggcatctgagttggtgatgttccaactcaacgattggcatgtattttgttggatcataggtgccatcctcaccaactgggttgggaagaggtctaccaatgctcattctaggttcttcatgccttgttcctagattctgggttctccttgaacttgtggcctgcatacttggatcactctcaggttaggttaccctgagatgagtggttcgttcagatggtgagttgaaaggcctctgggagcccattggctcttttccaggatgataagtggtttctttgtgaggagtgtcaaaattttctctgtcgccaaccatggagaaaattgtttttttttttatttaaagagggttttttgcgggcttttttcacgaaggctcccaatgaaagcaccaaactgctaacgcaaattttcgtttacaatatgtgagcctacaaagtgataaacttgcacagaaataaaaagttggtaaagaaaagataagaacacaaaggtttttacgtggttttgcagttaaaattctgcatagtccacgagtcaatcttattagatttctgatacagctcttaggtctcttctctaatgatttttttcgtcccctttctagtatatcctgcacctatttataattacataggagtgcagttaattccctagttgactgatattttacaaaaattatcccctaaagtcatgggatttgatcacataccacgtaaaataaatatggctaatatttgagaatcacacagttgtgatatgtccgcttttaccggatcaatgtaaatgtgcactaaatacgatgtcaccgtatcgttctgggatatctcgctgggaacgtagcaacaatagccttggtagcgagctagaacttttcacatgtctttccggggttgataatataggtctcattgtttctgcacttgaagacataatgctccatctgaaaaatcgcagtttttggtgacaaggtgaacctcagcagtcaacatcatttatatgtcagcttctatctgagggaactaattcgacgagactgtgaatatcattgaaagatgtctaaagctgattagtgaaggtaccatgaacacgccttcctatagtgagatggatgcctcgttattagtagtttgggtttacccgtgtattatacgtcaagtgccttaacaaccatcatgcctcgctcatgtcttgccttcatctcttcctccatagcgaggttgatgcctcgttttgcgcatctgatgtcgtatggtttcttgtcagtgcatgagtcaacagtttgtatatatatatctcgcgtaagacctttcagtcagcaag

SEQ ID NO: 315190 - DNA, 765 bp, Cannabis indica
ctcagtaaacaatcaacaactaagaatcaagctagagtcgctaatgtgggcaagcactgcaggtgtaattttgggcagagatgaacaaggtaaagataattattatcttttatattaccttttgtatcttttgcattgagtagtcacccaaggcttatatatttattataatcattgattatattccttttgtttaggttaatttttttttaattaaattaattaattttaaatttaaatatttaacaaaaattttttagcaattaatatttataagtaattttatttttatatttaaaattttattataatttttttgaatctaattatttttttcaacaaatgtttgctcatctttattctttataaaaaaaaatctaatttcaaaaattagaattttagtttgatctaagttaacattgcaatttcttatatttctgttacaaactcatttttttaatttactaactacatttagattagatatctctttgatttttagtgatttgcttgctatttttttattattaagcttatttgtgaaaaaagtaacaacaatctcagttataatgatagtctactttggttcggtaatttgtttgtacaatctctaggttgatgttctactttgatttttagtgatttgccaactatttttttactattatgcttatgtgtgaaaaagaagtaacaatcttagttataataataattattacaatctctagattgatgaagatttaaatgaagaacaaaactaattaa

SEQ ID NO: 315191 - DNA, 1219 bp, Cannabis indica
aaggataggagattggaagacaaccaaacatctggtgggtaaacgcccacttaactatattataagcaacaaagttatagtctttactaatattagtaaatatacaactcacaaaaacaggagagaatctagtacaaaaagagacatattgacatagttctcaagtacctaatgagactcattcccattaaaagcgtttgataactatcttatatattcaatttcaattgtttttctcttaaaataacattatctaaaatcactcccatttttatatatccttaatccgtactaaattatctctaaacattttaagtcgtttttttttttttttaactatcgagattgtttaatttaagaatttttatttaatttcaattaatcacgctaatataacaattgtccatatattaagttgtgacaccgaactttgatatgtatttacaaaactatacctccaaactttaacatatattaaattataccttttaaattttcattcacgcgaaatttactttagtaaaattgaattaaaatttttaaatttaacaatcttaataactcgagaggaatttttaacaacttaaaaagttcagaaacgtaatttaatacatgttaaaatataagggataaaaattcaaattaaccttacttttaaaaatgtaaattaagtagattaagtctctcaaatcttgaacaattctataaaaacataattttactaatacaaaccattgtctttcctagtacgaacataaggctaattcaatcacaataatgacaccaccatatattggattaaactattatatcacaatattttgacacattaaactatatttaattttattaattttattttaaaatactcacaatttagtatttctcacttttgtattgacaaaaggaaaagctatgaattggtaggaaggacttattataaagaggaaaaaatatattaagaacaacgactaattaaagggaaactaataatatatattattaaaaatgaaaaaagaggagaaagatattattcgagttataatgattatttaattttgcttaattaaagaaattaattaagtgagtggagaaagaggaatatccaatcaaagtgtcgtatgactttggacaaatattggtcgataacttatgaacaaccacaatatttatttatttattaattaattaaggagcgtttgataatatttttattttt

SEQ ID NO: 315192 - DNA, 1421 bp, Cannabis indica
agcttttattttttctgtgtggaattattgccatgaggatcaaattcggttaataaaaatctgcgttaacagtttggtgctttcattgagagcgtctgtgaaaatgctcagaaaaagcctcctgacataaaagtgatggatgacaccaaagataataattctcaagaaggaatcaatcatcgtcttggaaaagaaccattgagtcctctgatatctattgagtcatcgcatgaacagactgcgagccctaggaagacccagtattggtcccttggcttgacgaacctttgataaacaacaatcagcaacttcctcacaaggttaatgaggatggcacctacgacccaaccagatacataccaatcgtggaattagaaaatctccatcttagacgtcgattggaggaagtaaaccagcgtaataccgagttagagcgtaaaatagctgcaataaaggcagcgcaggaggatggaacccaaaatcaacctgaccttgggaaaagagattcacgaggaaaacctcatgactcgcaaaccaaggggcaagggacaacccagagatatactcagaaatctcaggagatgcaacctgtggaaactgtggaaaacctagagacacaacctgagatacgtggaacatcggacaaaaattgccaaccttctcttccagctcataagaaagaaacttgtgcaaacccttacggggagaaaaaaacctgagaggagggcaaggtccgaccgcagtcacgattagagtgatatatgagaacatctgaacttgaagaaggctgaccttcgtcaacgactcggtccacagcaaaaggattcactccatttgcgaatgaacgagttggagaataagttcagaaggcatcaagtcacgaaacctagaagacaatgggggcacgacactgttggagaacttgattcggaagcctcaggatcaaaagaaaagacgattccaaaaggcttcccaaggataagaagcccaacaagtatatccctctttatgctgaatataccgatctcaatgaaacttttgaaaaaatctacctcgcacatgtacaggaagccatttttggcgagccaagacctatgaaacatgcgaggcgcaagagggatctgaataagcagtgtgaatatcatggagatattggtcataccacggaagagtgtcattaggtgaaatatgagatataaggtctcatatcgcaaggacaccttctacgatatttaaaggggcaacaagatgcctatgatcggcttgatcaacccaataactaaagtgaccaaagattataaccctcctccgtaagaggaagggacacctcagttatctcgagagggagcgggtctcaagaatacaaggggcagttactctggtaaagcaatttgtaaaagaattgcgacgtgagtagatat

SEQ ID NO: 315193 - DNA, 1077 bp, Cannabis indica
tgacgtactcgtgtataagagccatcattccataggtatacgggcccaatgaaaacttgaagtgggacgttacaatacctatgcctaaagaagaacaacaggtatgtccaaagagaaaaaacaacttcctgtagcgtttttttttacataagtgtttattataatcacagtgaacttccgtcaattttccttttttaaataataatttagggtgacaaaacatgattttaaactcccaatatcattacaagtgcaaatattcaatattcttaatcatttaaaattttctaaaaacatgggagaaattgttttcagtatcctatatattttttaataaacatttccccagctatcactttaaaatggctactcaatcatattaaaataactagatataaatatgagtaagcattatttttggctaaaagatcttgcatgattatatatagtatatattaaaaatatatttccacatgatacatttggacaatatttaatggcatctctagtattgactaatacaaataagaactagctctccctctcgcacaaacacacattcaatcccatccatatctatatattattagttaatatagttgagaacatatggctcaatctctcttctccaaccattgtttgtgaagttttgttcatctattgacatggaaaaagttgaagaaattcaagttcaactcagcattaggagtaagtctttcttgtttggcttatatatatgtatatatatatatatgttgttgcccttaattttgtccaaaatatgtgggccaatgcgactgcgacacgtggatttgaggagtatggctctaatataatttgaccaagtctttctaaatcaagaggatcagccagaaaaatacctcctggagaaggtatgaagggtccacgtactctcggagagcaaagctatagcaaagcacctccaggaggtatcagaccccatctgaacatccatctcgcatttaatgccgcatgggagaaggcgtattggaactgccataagtattaagtctgacggcgtaaccccccttctgcagctattacgctatgattaat

SEQ ID NO: 315194 - DNA, 1493 bp, Cannabis indica
aagaaagatgcttgaaaatggtataaacttctagtttttggccctggttcagaagccacgaaggagaggaagaaggagaatgtgatttggtgttttttatttttactttcctttttgcttttaacttaggtttttgtttttggttcctttttactttattttgcttttccttatttgttttcttcctaagaaactaattatcctcaaaaggatgagccacaaacacctatcccttccaaaaagagtgactaatctcttagggtaaaaagattaaaatgccctaaaatacttgatacaaatttatatctattcgacccatttctactgttactgggcgtaaaaatgtaaaaatatgaaaattcacatataacatgtatatcacacctatcgttcaataagaaataataatcataacacatattttcatgaaaatagggtttataaagcataaaatgcataaataatcacatagtcagattaattagtgctaagtgtcccaataatctcatgtctaagtataacagtcattacactacaccttgttggacatagaaacaaatcatatatacacatctcgggatgttgtctttcatgaaaacatattcccttttctctctcgaaaacctaatatagatgttggcctctatttttcacaaaccatacttccatttaacacaccaattctctcatcatcatccccacaaccaaccgacttaaacaacttaccctcaacaaaagctagtcgtaccgtaaaaaaaccttctcatctaaatgactacattcgccttactacctccacaactccccattgagtctttctctcccatattaaactaagtcctcagttcagagctgctgtcctagcaacttattctgaaatagaacctcaacattatgctgaggcatcacagttcaaacattggcttaaagccatggataccgagacacaagctttgaaaaacaacaacacttgtgttgtaaccaagcttctcataggacaaaaagccattggttgtaaatgggtttgcaaagtaaaatacaaccaaaaaagggaagtagatcgtttcaaagcccatctagtagccacaatcaacgacaaggaatcgactactctcaaactcttgccctcgtggctaagtttaatactttaaaaaaatttctagctcttgctacaatgaacaattgaaatgtccaccaattagacatcaataatgcatttcttcatggtgacctccatgaagaagtttatatgaaaattcctccaggatacaaagctcctcccaacttagtttgtcttttagaaaagagcatctatggcttaaagcaagccagccgatagtagtactccaaactgagctccacccttcttgcagatggtttttcccaatcatcatttgataactctttgttcataagacggacaacaatgtttcttgctgcctggtgtatgtagacaacattgttgtagctagcaacaatgatcatgccatatc

SEQ ID NO: 315195 - DNA, 2950 bp, Cannabis indica
ttggcccctcaaaaaattataaattaacttatggtatctacacattatttgtaatgaccggttaagtttaatatgtgtgattattaaataattagagtttaattattaattgaattattaatcatgatctatacatttgtggagatttatttaattcagaatgtagtagttatgctatacgtgtgaatttattatttttcgtgttttagccgatagtagtggaacgcaatgttgggccgttagaaagtcacattctgtatggtttagaatattttagcaggattccattgttaggcattggaagtatcgagaattgttggagtttggaaatgaccaaactacccttggttgtcacttaacctttgaattttggctaggggcaaaatagtcattttactaggggagacttttgtccttttatgaagttaagtgttatgttataatctgagttctttcttatttaaaaaaaaaaaaagagtaatatatgactttttatgaaaagtctagaaacccatttctctctctctctctcgaattctcttgggaaccagctagggcttggaattttcctaactttttttgtgagattctagcaggttttgaacaccctaattcaaggtaaatccatttagcttcttcctttgtgaattttttaagctcaagttaagtctaaatgtttaaattttagttttaggttgttgtttattttggtattcttggggttttttttagggttgtttaagttaatttgagctggaattattggttgtggcaatgtttgagcaaagttagggtttaagaactcaaaccttgctctctaatggtgatttggatttctgagatttttattgtgttctattgcttgttttgggtttgttggagtatatgcaggtgttctggaaagtattaagaagtttggggttgatttagggtgtagggtgtgtttttgggttatctagcactaaaccagtcgaccggttgagggagacctataggaaccggtcgaccggttggtcccaagtaaaccccactaaatcgaaattctagttggggaaccagtctaccatttgggacaattttagaaaccctagttttttctattgttgtgatgtttaaggtattgtcatgtgatttgtcgataggattaattctaatttttgattttatgcacccgggaaatgttttagagtagttacagtgttaccaacacgggtaccaggggtacgaagtgcatgtggtacaacatttagtaactcccacaagtacaataaagaccctaccaacacgaatgcacagtcggtactctagtgcatatggtaccgtggtcgtacttccatagtgaacggtcttaaccatttagtgagtctagcctttgggctcatgacagcttaagcataaagctggtattccattatctatatatgttttatgtgtatcttactgagtttgtcgactcatcagtttgctacctttgtataggtaagggtaaagctaagctgagcttggcaaggattgtacatatcgcggcagtgcaacctggagggttttgatcttattacatttcgggtttctttttgtggttgccatgtagtttgtgaaaaacatattatgtaacttcatatataatacatgtatttccaacaatggttttaaactcaggatcccgatttacgaggtttaataaatataataaaataagtttaaatctgaattagccaattttcaaatacgagcattacagtttggtatcagagacaccaggatattcactgaagatcgtcaagatatgtacaatcaaggccagtgttgagctcaactcacggttccgtaagcttttaccttttaacaaactattgatgttgtattgtgtttatatgaaatgctgtttaaaccctcaaatgcagtcttagaaatatattgagcactgtctaacctatatgccttgtgggttcacaggctaagtcctaaataatggacgcctagcaaaacgtaagaagacagtgtgaaatggttgagaccggaggtggtcaggatggtagaaatctccaaaatcccagtggacgcgacagaggccgtggtcgtactcatataggtggccaagagaatccaccccaggatccttttgattgggagcaaaggtttgttgagatgcaggcctaaatcactcaacaagaggaagagattcaaagacttagacagcggaatgctcctattgagcctggcccgcaaccacctgttgttgtggttcctgcggtgccagcagaacagcctgttgctggcacccgtatggagcctttgtatgagcagtttggggagcaagaacctctagtatttttgggaggtcttgatgttttaaaagaatagcaatacttgactgtgatcgagacgacactcaatttcatgggataactgaaaatcacagtgtggtgtgtgccacgtttcaattccaggaagatgccttggtgtggtgggagatggtgtccctcacacgcgacgtgactagaatgacctgggaagaattccaggacttgtttaatgctaattattataatgaggcagtccacagtgtaaagtggaaagagtttgttgggctggtatagggttagaatatgtcattgaccgagtatatgaccaagtttgatcgcttggccaaactggcctctagaattgtgcctacggactttagtaaaaaggaaaagtacttggtggggttcaacaccaagatcagacatgatttagtcatcaccactaatgacattacaacctatgctgaaatagttgacagggctcttcgagttgaaggagcggtgaaattcctgcaagaaacccgagaggctccttgtaacgtccccacttcaagcctccattgggtccttacacccgcggaataatgactcttatacacaagtacatcactctggctgcttcatggactcatgactgacctaca

SEQ ID NO: 315196 - DNA, 1263 bp, Cannabis indica
agatcctggtaaaataaattccaacattattgctgcagcctgatgtgctcaaggctccaagcacgtattctagtcgagccacttgtatcagtctcgccagtggccccatggatgtttgtcttgtgatttgcacaggaggatagcaactgaactcgccggtacataccgatctaacctgacagtgtcgcttgtattcgaccccacacaagccctcatggtcttacctacatagtctctgatggctcgaaccttagactctattagctaagcctcgaaggtgatattagggtcttgggaagtcttcgatttacgtgtcttggaggacataatttcaaagttgaagtcacctggttcaaaagcaattgtgaccttgggtaaaaatagaggcttagttaaaggaatagaagacacattgggaggattcaagccaagcagcatctcgcaagaaatgacgtttgccttctgtaatttcttgtacgaagcgtgtgtggcaactagcaatatcatcttggtgggatttcactaagttttccctaattttttcatcatttatctccattttggatttggattttagaattttgggttcgtatgggatggaaaatacagtaggatactcaatttctaactcttctggacgataaacttctgaacgagattgggacattgctgcaagaagaaagcaatcccaattcctggaagaaacttatcaaaccagaagtttgtaaattggagaatctcaaaaacctatgttctgtctaaaccctaacatttacccggatacaattcggccctaaaaattgctaaaatcaaatgagataacgaagatgttgactaagaaatcggtaattaaacaaagaaatacaacgtaacaagcatgtaggaaaatcagaagaaaagttacttactattgcgagttggtttttggaacgatggacggctctgcaatcttcaaatcaacgaatgacgtgaagatccctccgaatgcttgaagtcaaaaattaaatcggatgaaagtcgtaagaaaaatatttatgacaatgatggcatgcaaggtttcgagcaaatctacgaatgattttttctacagaaaagcttaaaaacttcttagaaattctaaaatggctaaggtaatgcaaaggtggtttctttttctattttatactcttgggttaatctctgttagatcaaggagataattgatcctacaggtagaatttgaaagagaagtggaaaagatggtcattaaatgttgatgtacct

SEQ ID NO: 315197 - DNA, 660 bp, Cannabis indica
aaaagaaaaaaagaaagagagagaacccttaggactacaagggttggctacccctaacggtccaaaaaaagagtgaaagcctaaatataactccacaagaaagagcactcgcaataacgaaggagaagctcctcaaaatacaaataagtcttgaagcgcacacagggaaacaaataaaagttaagtgtaaaaggtcgagtcggttcacagaaccatcatctcccttaaaataaaataagcaaaaggtcgagttggttcatagaaccatcatctcccttaaaatatcgaaagcaaaatgttgaatcgcttcacaaaaccatcatctcccttaaaatattaaaaggaaagaggaatcaaatacgactttgagagggacacctcgctaaaaggagtaccaattctctagtattcaaaatgtgctccaagtgccacagatatgtttttctaaatgccataaagtaactcataagagactgatcttgtttctctacacgataaaagactttgcaaacatcatgtaagcgatatatgttgtctttgtcataatacaaaaactcaaaataatctattagttctttaaccaattcacaatgattaatcaaactaattacctcatatttgatagaatttcgaatttgaaggaacaagcgagcatcctca

SEQ ID NO: 315198 - DNA, 2421 bp, Cannabis indica
aaaaagtaataataataaagcataggataggtgtgaagactcaatggaagttgtttatggaagttgttctgacaaattactcttgatttctttgatgtatgagtgacttgtgagatttatattataccaaatagctactaaatcagaatcatgttatagtaattagacaaatgcacactaattaaatttatcaaaaaaaaattagagcattgttgttgggtacttgtaatacttaacattttctataaatgtcaccttacgattggttagcgatattctctaaaacttattttcttaagttaaatgggacccgctacttaattacactaatagcaatatgataccaagaaagatgttgggcaccagtagtgtcttttagtaattctcacaaaattaagggtattcgtagttccaaatcacaaccaatccagacaaaacaatttgagaccgagcccaatgaatcaagtgtgaatgatttggtcaattcggactgtttgaaattctctagtttagtcacggctttagaaatctcagtagcagttcaaactaaaccaatccgtataattattttatatacttaatatgataggttcaataaacacaattttggacacaatttttaaatccaaattttagacttttagatgaaacttaatccaaccatccatattaaaacacatataagtactaaattaaataaataaaaaaacaattctatttatttatttacattccatttaattctaaatcctatcattaaattaaataagactcattaaattaatttttctctctccttgaactctttgtccatggacactatcgcgccgacccgatagtgcgtctaaaaatactaccagaggttagcagatatgtttccattgacttgtcggtatgtcgcttatacgggacgtggcctaaacttctaagagacattgtggtgcgccttggtcacgagtcttaacacgagataacacgaatagtcattcgtggactagtttgcatacgcgcatggacggatgcatcatgctgaaaagagagagaggtctaacatatgctactagtttggtagcttgtctcgagggctgtcaatatgcgtggaggcatggtgccttgaggattggaccatggacgtatggaagtctttgggcgatgaggaagaatgttcggaccgtatcgaatagggcattatcagaagcattggcacgtcagtttggtgttgacatcttgccacacatgttaccttggttacgagtgactaggtgagcgacgatgttggaatttgccttaacatactgggaacctatagacagtgtgagtatcttgactagagagtctcgatgcatgggtgcacttatggatgtttgcgagcatgactcgacgggagttgttcgagagacaaaagtgtgcacgaggcacacggtcgcgcgaaaaataagcttattattactcagatagttggcaggttaaccttggtttaaaaaagtcaaaatgctgcacgggtgttccgctgccaaaaaagacgagcccgtgacactaaacaatgcaataccactcccaattgcatcctgtaataataattttaatttaaaaaatttatattagaattaatttttatctataagtttaactttaactgtaactatattaataattgttggagaatcatgtgaattctctgatttctttctatcgaactaaaggagagagataagtaatgagtagtgatgtgtattgtgtacttaaatatttaatcctacgggtctagaattaaaaaggaaagtaaataaaaaacaaattttttttttttcttaatttagtacttatatgagttttaacatagatggttggattaaattttatctaaagatttaaaatttgtgttaaaaaattgtgtcataagttgtgttaatagaactcatccttgatattaattttttttttttgacaaaatattgatatttggaaacaacattattaaatagaatatgaatattgatttaatattattatgataataattttttattgttatttagatattataaacttattataaataaaaaaaattaattaaaaaaataaataattactgtgaaaaaaaataagaacaccaaaccactttgtttttgaatggattgatttggtatggtttcatcatttaatttgtctggttaagttttaaatttttaaaaaatcgtaatttagtttgaaaaaattaaaaatttgaaccaaactaatacgtgaatacttttaaaagatagtactaaatatcattgtctctaataccaatatttttataaaaatctgttaaaacatttataaaatgacattacacatattatatgcaatactttacgggaaatttgattttttatgcttagaaaatcaaaaaatttgatttataaaccaataattaaa

SEQ ID NO: 315199 - DNA, 1179 bp, Cannabis indica
tggtatatgtgtaataaaatagagaaaaggtaaaaaagttgctttaaccgtgtgtaggtttatatgtaataaagtgtgtaatttgtatttttggtgtaaaaatttctaatatctaggtttagaaaaattatatgttcattaataaatttttgattgacaaaatttaattgctaatgcatcttctacgaaattacattgaatttccattatacggagatttaattgttcaagcttatcactttgctcattttcatttcttattttatttcctttcatgcttagtttttagcctagctcaaattaatattgtttgttttactcaaattgtttagtactgatttttatataattaattgctagtcaaactctgtggagattgtaggatttattcctaatatgccccacacacagcaatggattagtcaatataccaaggtcagtttggacctttcttacccaatcaaaaaccactttttgatccctgaccttgaacccaacaacagcccctttgagatatactacaggtcattttctacttaactagaaaccctaaacaatgcatcagacatatatatatattgttttatcatcaaatacacactcagccacttaaaagaaagccctagccgttaccatcttcttcgttgttcttctctgaagaacacaaagaacagcaaccaacacccaagaaaaaccagccccttcctaaatcaattctatacccacaaatcagaaataaaatcccaaaaaaataccccttattagcccgaatataaaccccaggaaacagagcataaatcaaataaaatacaggaaaagaaaaattaagagaacacaccaaattttatagaggttccccaaaattggcctgggtatgtcctctttgagcttgcctcattcactatggatcttcaatgatcaaatgattacaataggtgggattccaaaatacacatgtattgttttggtaggtaatccgaaataattacagtatttttctcatctcttttctctctattttctctctaaattagtactgatgttgtgttctttcttccttgtttatgaacaatctctcttgagtttggatcttcgactgttaggctaaaattagtctaagtttcgggtcatatttcggttagtgttttcactctttgtttctagttttagggctatatt

SEQ ID NO: 315200 - DNA, 572 bp, Cannabis indica
ggttaaattcaagtaggaattttagaggtagcttgaggtaaacctaattttctcttcctttgtgaattttagttgagtttggtcttggcatgcaatttctaagatttagttgttgtttaggttacaccttgtttcagtgtgatttctagttcatatttgagtagaatttggtagttttctgctggttcggttggtttgaggggtggttgagcaagtttgagtttgaaaactcaaagttggctcaacaatggcacttttagttttttttgcatttttcttgttgtttttggtcgaaatctgttgttgggtgttatttcaagttgattggaaggtttggtagagtttgggttcaatttaagtgagttatgtaattttttggaaattatgctatgaattggttaaccggttctgctaaaattgtagaactgattaactgtttcactgagcaggaccctaggaatctggtttaccgattcgggctatttttagaggcttatagttttggtgtttccttaatatttagggtattttcatgctatttatcgatagggaaacttttagttttaagtgta

SEQ ID NO: 315201 - DNA, 813 bp, Cannabis indica
agagaataacaaaataggaaatattgattttttaatatttaattaatgattttaaatatcaaccattagatatttgatctaatggtcaagaataaaatacccatacatgggtaatacccattaaaagcatacccgtatatatataccaatttatatatatatatttatatgtgactttatatatatagtttaatatttttacatttaattcattcaaaataatattatgcaattataaaaatattactttactttcaatcacacaaaaatgctgagatgagaaataatatatatatatagctcattaatagatataattaatacgtaattatatacttgacttattaatttaatatatatatatataatgtttaaaatctgtatgtgtatataataaatttaattaatactgtaacacaatatgtcaacaaatattatatgtaaaaattaaattcaatactttaaactgtgtgtagctaggtagaatctaacaaatgataaaaataaataaataaaaaggtcattttcatcacagccattttgtatcactttgaacaaaaatataatcttactctcatagatcatctcaagttaattgagggtactcttggatcaaaaaatttaattgagatttttttaggaaaaagtttatgttttatttgtatatatagtggtaaaattttaaaatatattatcttgaaaatataattagacatttttcgtaataaaatactaagtatagtatctcaaaaaataaattagtatttttttaataaataatagtaaaaacacaaaatatagtattttaaaaaa

SEQ ID NO: 315202 - DNA, 654 bp, Cannabis indica
accaaaattttagattagggggttagttgtaaaaacctgtccactttaggaggttttgccgcaaattaccttaaaatttattgaatctttattttaaatatgccatttttaaaaattattaaaaaaatatatttttaaattttttaaattagatgtactctgaacacgaaccaaccctatctatatataacaccttcgttaagaattttttttactttattaagaactaagtaatattgccgctcttcgcgcgactaatttaattgtttactattataataaaaaataattatttattaatataatggataataaattaaaagttatttcattatataataatattaaaattaagaattttaatattaagaattttcgttaagaattttctttactttattaagaattttctttgctttggtgaacaaagttagcgctttatggattggggcaggaccgtctcaaatattttagaggccctgttttaattttaaaagtaggcctctaataaaaaaatttataatttataaataatatttttgaatatcatcatattatgaaaatatattttacataattaagcaccaaaacattcaaacaattttattaaaattgttgttattactaataaaacttcaagctaatatcaaatat

SEQ ID NO: 315203 - DNA, 1825 bp, Cannabis indica
ttggtatctctaaagatagttaatggcccaaggggtgacatattatcgggaagaagcttgtgatcatgaacaaaagtagtacgcctatgccaaatgcacctactaagggcaatgaactcatccaattcatgtttactcaaaatatctacagaacctaataacaattcataaaatcaaaagacatcctttaaagaatcgagctcgtgaaaagatgcattgattcaggttgaaggcttgaatggctgacatgcaggtttgttggtgatttaaacatgcgatgctgatgtgtaaaatgttggtgagtccagcatggccttggcggttggggatgtcaacgcaacctaatattgggttataaagtaggctatgtgcgcttgagtcatcagtgtgatgtctagcatttgaacattgtattccttgatattgtgttaataataaggttgggaaggggttcccatatgttgtgtgtgttcttatgctttatgtgcatatacttgataacgagagagtgttgttgagtgacgttatgcaaactaaatcgtgagtgtgtatgcataaaaacgagtgttggattggcttactagatcagagagaatctaggttatcgcagagaaaatttgtgtgtgaaattaactttgtgacaagcaaatggcgaagtcaaagagcataaatagtagtttcattattctaaaaacaaataagataaacctcaaacgcatgtataccatgacaaattaaattggcataagacaaaatcaaagaacatgaatagtagttctcaggggcggagccactcattatgttagagtggccatggcccccctcaaattctcaagaaatagatgtacatatttaaatgtatataaaataaatgtaaataattaatatatatatatatataagatatatatattgttattgtgcactttttgtagatattcagattatatgaatctatataatttaattgtaatttattaattaaaatataaattatttatattacatatattttgtttttaatagaaattatagttttgtaatttccactaaataaggctatataaaatgatatttttaaattagaaataaaaatataaaatataatgactctaacactattcaataatatatttaaatattttaggaagaggaaaagagttttgactaattaattattaatgtatatattgaaaaaaaaattattttaatttcaaaaaaattttatgctaaacatataaattactatataatattaattttttatgtaattactaattattttgtcaaacaaaattattaaaatttatatgtaatattcacttttacatctaaatacactgtgtattttaaaatatagtgtaattactaattataatagactatgtaataatgtaatttatatcatagtaagcctttataaataacttttgttatgtataatatgtaaaaaaaaattatttaaaatgaaaaattttaatagttggtccccccaatgtttcagtggctcggcctctggtagttctattatttttttaactttattttattttttaattttaaaataatttttggaataattttttacaattgttattagaaaaacaatattattattggacactaatggtgtctaacaccttttataggtagtgtctcaaaattggttagcaatattctctaaagattatattcttaagttatatagaagctggtttttaattacaccaatagcaaacagcagtataacaacaacaaaaatactaaatactaataatacttttttagccatattatattaggtgactgtgctaaaatagataac

SEQ ID NO: 315204 - DNA, 461 bp, Cannabis indica
ggcgctcgaggaggatcgatgacgacgacaatagtttggcagagctggaatcggtgacgagtcggtggagctacaattgacgacgcattggtggagctgcaatcgacgacgaggggcggagttagagcccaaaacatagacaatagggcggagagagagcggcggggttcacggggtgtccttgggcttggacggggaaaatttttctggtgaagtctgtcgtcggggtgggtagatcgcagagagagaaagaatttgattgagagaggagggttaggttttgtttggggctttaggtttttatactatcctttttatatctcatttatttatgggaaaccctatgcacggtatttcttagtttgttttttatttttacgtgatttattatgttagtttatttatatatatatatatatattcatttttctagttttacgttaataattattgtacatttt

SEQ ID NO: 315205 - DNA, 2819 bp, Cannabis indica
caaaaatagtaaagtaaaaaagagcaccggattttaaagaagttttaccccgtgagaatgttaatagcctactccccttgtattttattgacttgagagaacgaataaagtgttcttcctctctaaagctcttataatggatctctgagttattttctctcttagatcactattctctcttgagtgtgtttctagattaattcttttgtcccccataatagtgagattatgtcactatttataagggcttaatacatgaagaatgctttcccttaatctataatgaataaaataggaaactacattaattctataattacaatgtaaagaataggaaactaaggtatctttcctttattttctgactcaatcccacaattatagggattttcttcgcatcttggaggtgacaagattgatctctagaatggccaacttatatgccttgctcgatacaactatgtctgtatcttggtcggatgtcttcttgactatcctgttcagaaatccaagtgttaccaacattaagattaaccattagtatgttgctaggaatacttccctttgcccaggtaccaaaaatatgggacacatgtcatccattctcattgccacgtcaaggtccaaaaataggacaacatttgccccttaagtctgcgtaggaccttcctggtcacacgtggacttcactcagctcgaagtcttgtccacgtgggtgacacgtgtctttgatgatgatgttgatttgatgtgactctgactaggagtctcttcaatatatgaccatttaatgcctattgataggtatacctcaaaccacggttcgatgtctgagcacgcttgacagatgtactccctgcaatgagtactaacatttacttttggggagaaatccaaatattcaaatttcgaaatgattaatttccttttcagattgcttataaataggactaggaacctttggtgatcctttcagccattttaactcttagaaaataagaacaaatatttccaaacaagttttctctcaaatttttcgaagaactcataggaaaactcttggtgatatcatccaagcagggcaagaaagctctgaatcaatgagtaagtctttcattcctttcttttatacacttgtaatgcaaggcatgcattatttttggatactttgctgtgaattttgcttgttcttgaacggttctaggttaattgtagagcaactatgttaagggttaggaaattgtagagcaacttatcagtattatgaggatgagataggaaattttgcaatttctattcgaaagactcaagcacaattcctagtccttataaaaagttttatggtatctctattgattacttaatcgtaagcaagtattttacattaatgttaatactagaatgttgtgttgataactcagtctagaaggaacttatagtttccagactaagatagaatgttgcaacaagatatccctaagtaccaatggtaagaggttaaatgcacacttgtgtatgaatttaaccaaactcctactacttagtgggagccatctaagatgtaatcaaacaaggaacattgggaaacaatcaagaaagaatatctgaaagtgacctgtatgttaaatgataggggtgtatatttgaatccttatatctacatcaactcataacttatcaaagatggtggttactctggggtggagtaattgttctagaagagtgtaaaaacccatctataataattttgttccaccagtgaagctaaataatttagttgtttcaaaaagtactagaaagttattcaaactgaagaaagttcttaaaatgtttcatctctattcctttttggatagaattagaggtgtgtcttctatttattcatatgcacttaatgagcagtaaagaattcagtattcctagaggagtaatacatatagaaaacataatgttgcataattttttatgaacacaaaggaagtaatggtggacaaagaagttgcttaccatagccttacagttcctattatttgggtatagtcagatatgctacacttgatctggatatcaagacactagattgattgaaatacacttcttgttttatattagtacaagtgggagtttgttgggattttatgccctaaataaaactcattccaatgcaatcttatttgttatcaatagaagattagatgtcatttatatttacatgtagttttcatgtttaaggtttaatatacaatttcttttaaatcctgaacatatagttattcacaattacagtgatgtcaacacagtggaaggtaattatgattatatgcttcaaaagtttatgtcccatgattcatcagtgcactggatttacattgatgtgatagtgagcgataaaatttacttacaccttggacaagtgttatgttctctccaaggcattggcaaagtatgctagtattagatgtatggagtatacaatggactaggaccgatattgatattggtaaagatattataatcttatcgttgtatctttctaagtcaatatcactggttgatcttagatcaaaagatcttaatcctcatatggataggtttgatctcatgagtgttattgtgttcttagagttttgtgtcaaagcctaccattagttcgggtcacacataaatcttgggaacatgatagtacaattgagtgggagcgctaatcatagatatggaatctatagcttctatctggatatagaagtgaatgatgatttccttcgagcttggcttaatagagataaatagaagagctctatttcagtaatgtattagtt

SEQ ID NO: 315206 - DNA, 1882 bp, Cannabis indica
  modified_base (143)..(143): a, c, t, g, unknown or other
ttcagtgttaaacaatcactagaggaggataaaagtgaaccattaccaatgtgatcaataaccaactggtgcccattaccaactgtgagtttttgcttaccgatcggtactcaattttctggttcaagttgctgccatcagcngcaacgtggttagtagcgccactatcccgcgtacccaggcagcatcatctaccattttctgggtgtagcaacaaaagccgagggaccttgagcaccttttttcattgttattctgaccatcgtggggggtagagccccatatatgcctcctcatacctattgtagcaataggcagctgagtggccatatcgaccacaaatttggcatgttggttttgagtttccactacttcgaccaccacggcccctgcctcgtgagccaccacctcctctaggatgacttccaccacgatttcctgagccaaaatgattggaagttgaccctcttcctccttgagaacctgagggacgagtagcagccagatttgcactaggtgagggagatctgctttttgttttagggactccagagatagcacttaacctttcaaacttgctgtcgaaacttagtagagtatcctgcaactcttgccaagttgttgttggtttagcttcaaccgtgagtacaataggcagatattcaatatcaagacctgatagcacatttgacaccaaaagtttttctggatagggatctccagcaagtgtgaggacatctgaccactgtctcttctgtctaacgtaatcagccatggacatacttccttttcgtgtcgtctgaatcttcctgcgatactcatccattttcgatgagctccaaacaaaatttctagggcacgccataatgcagcagaggagtcgcaacccataacctctatcgtaatgctctcagtcatagattcgtagagccatccaaggagaagctggtcacgaactatccaagcttcaaaggctggattcacttcaagaatagagtcacctgcatcgttagtgacagtaacaaactcatctggtctaatcttagtaccattgagataaccatccaagagatggccacgaactatggcagaaaccatagttttccacaaacaaaaattattacgatcaagtttcaaagcaaagggttgtgtgagtgtacttcccacctgaggtatgtgactgtatggagtctgagtaatactgctgcctccaaccatccagtgttgcagctgaggatcacctgaagtagcatgagtgctttgaggagttctgctgccgtcggccatagacacacgtctgaagtgctctgataccaagtaaaaaattaaatagcagtgaatatgtaaagctcaactcatggaatagaggctggcatgaattgtatttatacacaaatgattggtacagaatattttagatttggtacagctgtacagaaagggattacaatgaaagcagtaaaaggaatattctaacaacctctgacaattcccaattcttaggaccacatggctaacggctatgacagcaaatattgacagcacaacagtaggtaattaggattaattcattttcttaacaattatcattaaacctaaaaaataatgttaatcaacattcatcatctccccaaataggagtttagttcataacatccatcatcaaatccataattaaaattaacacaggaaataacatagataaattaagagaagagaaaagaattggttgaggcaattgatctgggtcgcccaagccgctcttgaagtctcctcctttgtttctagggctccaaatctgaataatcctcacttttcacgaactccttctaattaaaccaagccttctctttaaaatttgtgaaattacaaaattgcccaa

SEQ ID NO: 315207 - DNA, 1618 bp, Cannabis indica
tagtattattgcgaccttactttttaatataatcattatgtttgattatagtttactctgtaattgaaaaaaaaataaatattgttctaataatagaaactagtaggtttattgacatatataatggtagattatatgaaaatgaaataaatttttagtttaatatacaaaaagaaaaaggaaaattagtttcaatataccaaataaactaatagatttgtttagggctgagcggtcggtttggtcggttttttctatataaaaatcaaaattcgattttcggtctggattggtgcaattcgaaaaccgaccgaccaatttagaacttatcttaaaatcgactgctttgaacctgtgtttaattttattgttttagagatattcatatttaggatggttttttttttgaaaataaatgcaaacttttattaatagcaagaatcctgatataataagtcctgcaaagtagcagaatcatttgagctaaggattctacgatcagcataagatcgagattgaatagcaacatagtgagcaactcgattagcagaccgtttaacaaaacataaactgacattaggcatagctttaagcaaacaacgacaatcatcaacaaggataccaaaaactgatttcatgactattgaactacggactgcttgcacagtcactttactatctgtttcgacaacagcttgataccattgttttcctttaatccaactgagggcctctttgacgcccagagcctcagctgctgcaacattttgctgcccatgaaccggctgacaacacgcttcaagtagccttcccgtataatctctagcaaccataccaaagccaaaccgactttcatcttcaaaaaaggctgcatccacatttcagatcttgataatgctaaatatttaatatagtaaagcacatttctataaatatataatatttgttaagttatttttgtaattattttatattttacgcgtatttttgaaaaaattccataattaaaaccatttgttattctaaatatttaatatagtaaagcacatttctataaatattttacaagtttcaaaataattttcacttttttattataaggtttgaaatttattttttcattacatgtggaaaataaacaaaataaagaaattaattgtttttttttaaaaaaaatacagtgtgaaggagagtttttcccaaaacaagttctctttatcaatagaataagcaagcaactctccataatccatgatgcttctccaaacaacccaaatatctcaatttagaatcaacaataccacgatgtaaaagtttttttgacctccatgaacgtcggtgagaacttctacttcgatattcagccatggtagcgggaccaacgcgggaagatatccatgaaagccagcaagaaaagatcaacgattgaggggagatctccctaaatgcttacttgtctaaacatttttttttctaaaaaataaatctgatgttatttttaatttttatttttaataaaaagatacaaatatgatcttagttacttatattgttaatcaattattattattgttggaaatattttaccaggatctaattttactaacaagtatattga

SEQ ID NO: 315208 - DNA, 1135 bp, Cannabis indica
cacctaagcaattatagtaatcaactgtacaggataattcgatataatttccatctcaaccagccaaattatgctagcacttgttatattaaaaacaacattcggctacaaccaaccacacgagtctctagcttcagtactaaaattttgttcctaacatcaacagttcaaaatccaataatctgactctgtaattgttttcttaccaaatattccaattctaattcaaattcaaaacaatcaaattcacttacctaaaccacggtcttgcttcttccaccaaaagaagtactctcctaaaatcctcacaacccttactctgatccatcgaagcacatttcacgagcgtcacaacaatttccacaatcagcaatcccaaacttttatcagcactaccttcccctataaccggcagcaaacttcgctttgattttgacgacttagcaccggaactaacactctccaaaattctcaatgcttcctccttcgcctccttccacctggcccatgcttccaaacaatgcaccatccgaaccctctgggcttgtacggtatggggtttgcaatcaagctgcgaagaaatggactccaagcaatccaagcacagcctgtaaatgtcaaagaattccacagccaattgctcggagccaaatttcgaaggttcggcgaggcgcttggggataatcgaaagtgaggtattaaggaagggaagaaaagacttggcgagggagcgagcaagggactgttcgtccttggaggcggtagctttcttggttttcttgaggtttttgagatctgagaaagagcggaggtggtgggagaagagagaagagattccgacggagtccgaagcttcgagcttggaaatgagagaggtatccatggcggataggaagagagagtcagaagagtgtgtctgaattctgaaatagtgaaatggttttgaaaagatgtaaaggaggcgcgcgaactcgctggccataattatatttttcaaaaaataataataattcatatttgtttattattttgggattatttcacgaagagaaatgctaaagggcaacaagtggtgcctagcatcttcctatgtgtcaatatcgctattggtacaattaagtatcgggttccatat

SEQ ID NO: 315209 - DNA, 1521 bp, Cannabis indica
tccttagccaaacttcagcgccggtttatcattacgaaatctcggagccatctcggcttcatacgaactcggctcacccgctcaggaccctctcgaacgacttctgggacagcaactccttcgttggttgaaaagcttggttggttcgaacctttctcctgggctgaattctctatggcactcttgatgctttgtttccaaactccaatatcatagctagtggactttctagttgggcctcactatcagttgttgcaacttcaataatatccaaactctttggagagaagtttttgtgcaacattaagtttcgaccataccagagctgctatgagaccaatcacaaacaattcaaagtcagcaatcattaatttcaatctatttataattttagcttttttattatatttggaagaaatttataattttagcttgggtgtgggcaagtggtctctaattctaattataaaaaatctagtaaaagtaagtttactgtattttttttttccatacaaatttatgttttaagattctattaaatctttgtgatattttttttcaagtattaattttctttaacatgataaagtcttaaatgtcaggtaaaaccaaagtcggccagatctgaaatggttaaataatggccaaattaagccaattacaaagatgacctaaaaccaacaccactaaggacaaggatgataagcaccattattacaacaaaaatgaaaaatccaaatagaacaaaattgaacttgcaaaagggaaaactacaaacatccaaacaagaataactagacaaagcaaatcactaaccgaaaaccactcggtataggaatcaaaacaacatgagggtgcgccatccctcaggaaaaacacacatccacccctttttgattgcagtttttaaacaacacccaagattagcaagcgttaatataatatcaatttaattttaaaataaatcaaatttatcctttaaaacactttaattttataatttgaacatggatccccactcttcgtgaagaaatgcataatattactagagactacgtttatgaatagtttggtaaggaaatttgattttagagttatttacataatataatatggggaaaaatgaaagttttgaatatatatatatatatatacatgacacatgcaaatttaattgcaccaaatatgatattttctttatgaaaaaacttaaaatatgggataaatcatcataaataagaaggaatactataaaaaacttaaaaactcatataatatttacttctatataatcaaaactagtctcctaatggaaaaaactagttttttgatgaaaaaatcattttcttgataaaaaactggtttctcgattaaaaaaaatcagcttcttgatgaaataatcttagataagaaggaataccagtaaaaaacttaaaaactcatataatttttacttgtatataatcaaaactagtttcctgatgaaaaaaaactagtttttttgatgaaaaaatcaatttc

SEQ ID NO: 315210 - DNA, 507 bp, Cannabis indica
aaattaaggttgtaaaagtcaaagtgaaggtgtaaaattaagaagatcaataagagttagaaagtttgaagaataaatgttcagagcaataatgaagaaaaaataagtattgtattgcttagcgatatctcttttataagtcttttacgtaataaatttactgcagaatttaataataataaatgaatacaagatattttacgtgattttgtagttaaaatttatatactccactagtccttcttattacgaatatttttctagatataaagtacaattctctctataaatgtaaataaaagtttctctcttaatttttccgtccccttttctaaagattctgcccctatttataggtgtataggatgacagttatttttattgggatctatttatttacaactattcatgaaacgtggacagtccccacatttatttttatgcacatgggatcgtacttaataactacccaaccattctttgtctttatccttaaacggttatgct

SEQ ID NO: 315211 - DNA, 1442 bp, Cannabis indica
atataaattttcctaaataaataaataaaagctataccaactaagaaaggttaaaaggcactttataatgcattaaaaaaaagcactttataaaatattaaatttaatttgatccacattattaaatataatattaaaatttatcctcattgtaaaataacagatttaattaaatttatatatgtacttttaaaaaaatatatatacaattaatattttaatagaaaaaaataaatttaaaaatcttatatgatacaaaatattcaaaaacttaataaattaaatttatacttttaatataatttccttgtgtaatatgatttacaagattgtttcgagggttgtggctaattgatttaaagtagtgctggtaatttctaacacacaaagtgcatttatatcacgttggttaatttttgataatatcatgatgtcgtttgaaattatacactacttgaagtgtaaagtttttgggaaggaggggattatggtattaaaacttaatatgtgtaaagcgtacgatatattggagtggaattatctcatatttatacttcagaaacttgatttttcacaacattgggtacctggtttcagttgtttttccacgatgaggtattaggttgttcacggtggtcatataatacggcttattgttccttgtagagggataaggcaaagagacattttgtctccttatttattttttatttgtgctaaaggcttctcggcattactttgtcgatatgagcataatcagttgataaaaaggtgtcgtgtggctaggggtattccgtcaatttctcatatattatttgttgatgatagctatctatttgtccaagctaagggactcatagagtgatggagattctacatagttttgagaggatgtcaggtcaaaagattaatttgactaaatctactgcttcctttagtaggaatgtgagtggtgctattcggaaggttgtttgtgctatttttaatataaatgtagctgttgagaatagtgtgtactggggtctcccaagtacaatcgatcgaaacaagtctgatgtattgggctttcttaatgagaagatgaggaagcatatacaaagatggaatggtaaactcttgtcgcatgctggtatagaggtcctactttgtaataaagctcaaagtcttccaacttatgctatgagtattttccttttgtctatgagaacatgtcatgagttggaacaacttatggctaatttttggtggaagccgtctacatattcctgtcaaagaatttcgtggaggagttaagagaggatggcgtgtagtaagagtttagaatttgttttagaatgagattctaacccttttgcatgaatgatttttcttatatttttagtgttagggttctcctatctaaactttgtccactaatgggataaatacacaaaatacattgc

SEQ ID NO: 315212 - DNA, 904 bp, Cannabis indica
aaaaataaaaattaatgataataatttaacgtaaaaataaaataagcaaaactataaaaatgaaaaagcaaaaaagaaagacgtaaaatttaaaaaaaaacttccccaaaactcgtacatatggtaattctttttttctttaaaaaaaattacatataaaaattaataattttttttatatgattggccctgtaaatttttggtgtggaatagtattaatataaacgattgagcatctatattattttgggtaagttaaaaaatataacttttattaatcaattaatcaaatttacctctaattttatatgtaattgaaatatacttatttttttatgtattttacctaaaatatcttgacataagagagttacatggagagtatcttgaagtgcaggagtacaatatttaaaaaaaaataaaaataataagactttaaaaaggaaggtaaaaataaaaaagataatataaaaaaagtatagagtgtaatttcttctatttctattattttttattttgaatgccatatagagcgggtggctacaacaagtagggctgacccattaagagatttgtgtgtgtgttatccaaagtggagtgtgagagttattgggcctagtttttacaaaagtttacaaaaagaataataaaagaatgggatttttttaagaatatactaaattaagtaactttttacaaaaatgacatttttttaaaaatgaaaacaaaatgacgtgacacatacaaagagagtgtgtttttaaaaaattgggccgaaaaaaccgggattacaagcccaatatacaaatcgttaaaaatataaaattaccataaaaacgtcaactacatatacgtaaacttaacataacaaaaataacatcatttttgaaaataattgccaaaa

SEQ ID NO: 315213 - DNA, 851 bp, Cannabis indica
accatggttctaactagaagaactactccctcagatcctcctcaggacccatgacgatagatctcaatattcgtgttcctcccaccataaaaggtcctactaatccgattaatactatcaattcagccaatcatgtgaatcttattgatctcgtcgttcctctaaggctgggacaacccacaagatctcatacaaaagagtagatcaacgtggagcaacttgctcataatactaatgagaatgtcccaagagtttatttaggagaaactaggccaggtgttggccaacctgccattggcgaaccctgcctagaccttggagatgatattgaactggccaggctcaaagaagctgtaagccaggtgactcagacaggacaagaagatccacacgctgctgattgtgatgtttttgtccagtagagacgcaaatccctaaggtggatgagtgaccaagaggccatcctttgggcccattaggcagaactaaattgtcgtaatagggaggccagtgacctgataaagcgattcaatgagagaactgccggaaggggccaagatcttataagagattctttgcaaggaaggctcattgacaggttaggtagcgtttataagctggtagacaatggacagacagtccaaccaggtccctcgaacacgaggacaaactgttggaattttatgccctaaataaaatctatttaaatataatcaaatatactaattaataatgttggggtttgtgtcctaaataaaactcatttcaatatcatcagatttacctattaatataagatcagaaatcacttttatgttgcatggttcacatgatttatttcatgataatgt

SEQ ID NO: 315214 - DNA, 631 bp, Cannabis indica
atatggtgggtaaggcactgcaaactgagggcgcagtggagtggacccaagagtcttaagggactcaggttgttggtggggctcctactcctcctacctcaagctttagtaggagaggtagtggctcgaccattgaccagaaaagaaaggcgcctactacatctagtggctcaagatagaacaagaggtctgagggaaccagggtcaaggaaattgtcagagtagctgtgaaactcgatacaattacccgaaatgcccctgttgtaagaagcatcatatgggttagtatagagggtaagggtgcttccagtgtggtatgctaggacactataaaagggattgcccccaacttaagaaagaagagcagaagattgctacaaaacttgctccagcaagggtgttcgagtcaactaagacatatgcagaagctagcacctcagttgtaacaggtcagctcttggtcaaacaactcttacttctctttgttatttgattatggggccagtccttcttatgtggcagcaagaattagtagtaagttgggtagaccgcaagatacttatgaaacagggtttggaaccctactgcctgacggagaattagtcatctccaaaaggtggattaggtctat

SEQ ID NO: 315215 - DNA, 560 bp, Cannabis indica
taaaaatatataaaaaaaattctatatatttttttgtaatgttggtttttttttaatttgggtctatattattatgatgtattttgatcataactatgtactttaatttttcattatttttatctttctgaatagtctctatagacaatctgaatttgtacctttttaccatttagttggtaattattttgcctatatttattgatagatcgttgtctaaacagtgaattaatttaaatatattgctgttttatattgtgtaaatttatttattttatagctaattaataatatgtcactttctaatttatttttctgtattatataggatgatcatgtcaattattaaagggtgcatcatatttcttagtaaagaatatataagataatagatctcgatgtagaccatttatttttatttttattaaatgtaaaactctctttgtggcaaggtaaacaactttctttttcatctcaaatttttatgagattatttcacaaatacctaaaaacaataaaaaaattataaaaatatgattttacggaattttaaatagttt

SEQ ID NO: 315216 - DNA, 1841 bp, Cannabis indica
tcttacaaattcttgagaaatttaaaagaattagtatagaaaacagtgttcaaatagtttatttcacacgtgcaacaaactatttgaaacttgttttcagaaggttaaatttttcttaatatctccaaattttacaagataatttaaataactacaacatatacgaccaaaaatattaaactaaaaaaatctctattaaaccttctagccatagctgaacataaagaaaggcaagaacaaaacagagagaaagaaaccagagaaaagagagaactaaaggtagaagaaagagtcactttattgaatgggtaatggaagagtatttatacaatgaacaatcaatagacacgtgactaaagagttataacaactcataacaaccaatcagttagttaagtaactaacatgacagctcacaataacagtaacaaactaactaactgtccaaaccatcagctctaacaatctcagatatcaaaataaataaggatgtatgggtacaccatttttaggaggttgcatcgtaaaattttccaaaaggttatataggcccattgcttggcccaagacagaccaactagccgacccatcatctaagtagggacaaatccaaacagcatgttcaaatctcatcttatcctccagattcaaatccaaaccacctatcacagaaggatggtcgttctcaaagtgattacttaaaatacaagaatgttggacttgagcgaggatgtcctcaggggtcatccaggaacatgagtcgaaaggctattcaggagagcataccatctcggaaggttgtttacgtggcatgcctctgacacaatcatgaggaatagagattatatatgacaagaactgatatttaattaagttatctttatcaaattagttgtttcctacaaagatctaattcatattacaataatgactaattagtagatcgacttaaattctgagtaattataaacttctgtttatgatattagtttctttaattcactcgttaaagattctcagaaaacatgattcttacaactttagttttaagaagttaataatgtgtatgactcatgagaatttaatttacaatatgaaatcttgagtatcctaatggattaaatattagtacttttactagtgaattaatggtactagagtataagtaataattaaaagggtaacaaataattgaccaaaagtaattatgaaccaatactggaggaataatcactagtattaattatatcaatgaacattgtagttaaccttagtcaatatatttctataattaactttaattcatatttatagtagagtaattgtaaaaataataaatatatttattcagttaatgagattcaataaataatctaatttattggagcttgatattataggttcatggtcctcaaattgccaccagataacactatcaatagtgtggatgacacaaaataaagatgttcagaaaatctgttttgaattgacaaaatagtaattatttattttataataaatagtttatttttaaatgtattatttaaataaattggggagggagattgttaggacatacatttattacaagatggcgctatcattatacagtggtagacgcctgggctctactgggtttatttttgagttaattaattaattcaaacaataaatatttatttaaatttaaattaaaaagcggttatagatatttaatatgattgagatccttcctcaagtgtttgaaagatttacatggttgttggagatgttttcaaatagtttagttattcactcaatcattactaaaataagtttttaagatataagttgtcactaat

SEQ ID NO: 315217 - DNA, 1340 bp, Cannabis indica
  modified_base (1326)..(1326): a, c, t, g, unknown or other
caatcatgagacaccacctataaaaagtgttgggcacctactaataccctatagcaatgctcaaaataaataaatatggcatatcatatatatcttatttaattattaaattattgaagttatttccttagtgcaaaaatatataaatattatatttgtaaaagttaagtatctaaattataagtatatatataaattgttatgtttgtagtaattaagtgtacttaattttttttaatatttaagtttacatataatttgcgcgcgtccttgcgctgcatacttaactaataatctctattttaatgcaattgtatacactttttttgttccaaaaagctatatacacttccctctttaatttggaattaatgcttaatattattaataataagcctaaattataatcagaagaaaatcacctaaaatgatatatataaagatatgttgttgctaagaagaagaattcatggtatataatacaataagagataaggctattaatgagggctcatctttcttggagataaaatcttccatcattcatcaattaacaaatatctttgtattaattaatatatagttgaggaaaaagagatggaaactcataaatgtcatgatagaataataatttattgatatgattaacatattcaattgggaaaagaagagaccaaaactcataaatgtcatggtagaataattaatatgattaacatatttaattgaagtagttgtatagtatactactataaatagaatgataatatgtagaaatgatatacaaacacaaacatatttatatagtgagatcatcaaaatcaagaaatcaaatcataatctaaaatatatatcatatcatatcaatatgggcaagagtggtgtgatgatgatggtgatttacatagtagttgttggtgttgtgtttgttccatctcctacttttgcaatctcatcatcagatcaagatggtgtcaagatgaacggtcaaaatggaaagatggtaactattatggatcgtgatactcttttcaaggtactattgaaagaaaggttatcacaaaataatcaatgctggggtagaggttgtgctccttggagtccttgccaacctggttgtcattgtgttggacccgttggtgtcattggagcatgcatttaaaaatatatatagatatataataataatgtcaattgtaatgaataataataatgcatgttatatgtgtgcatgcatacattatgaatgacttttatgtttacctatagttataaatacttatatctacatatatgggtataactatatgtactttttatcatttnttttcttttatctt

SEQ ID NO: 315218 - DNA, 598 bp, Cannabis indica
ttttatattgtaactaaaaaattgttactaaaagtaatttttttttatagtgggaacttcaacaacgtcgtgcatacctttcctcaaaaattttctaataaagaagcataaatgaatgaattctgtcaatttttcattttgaaaaagacaaatggaagagcaacattaattagctaataaagaagcatcccaactaggttggcacccaactctatagccattttctataaatacaattcattacaataataattgaaatcaaacacaaattaactgactaaaaagcacctattaatgtatatagcaaagcctcattaaaacctctaaggagtaaaacccaatgggaaaaaactccaaagaggaaaaagagtccaatgcttataattcaaacaaaagaacctaagtaacaactcttgatgtccacctatcaaacagtacattcctcagctcattgatttccttctcctattaaataatatacagtcacataatgattgccaaaattatagagaatataactaaattcattgaagcaaatcttacctttaaacacctaaaaaaaagacgttgtgtctttcatcctttttacttgattttt

SEQ ID NO: 315219 - DNA, 3148 bp, Cannabis indica
acaaattaaactcatattaatcaataatttaaagaatcaaattaagaatattaatacataaattgatcatatttataagataaatatagacttatcaaagaagtatggattacttcatattcttgtagatgtggtccaatgtctgagataagtgttgagaatcatgggtattctatgtgggacaatgtccataacattccccttcaagatgatggctatttggtcactatctgtataggtgcggatcggataagatcacttgcccgaaagggatatggctctgataccatgttgagaatcatgggaaactatctcaaaaccaattggcaatgagtggagtaacacatgttcttatatatggctcaattctctaccatttattttatgtgggacaatgtccacaacaatgagcttggttattctaccaatgtagaagaatcatagtgtgattagaatagaacagtaggcaggtgaggagacactatgtgagttttgcaactattatcagaactacctaatattcttttttaagttaaaaacctttctttttatgtttattcctaaacccacttaaggattttacttgactatacttttcacatagcattggtttcgactgaaacccaatactaaagtagtattagtttacccatttattgtttatttatttctcttatctaatttacttaagcaaaatgtaattttcttagtaaaatactattttaaactttatattttaaaaaaattactaattgtacttttattttttaaaataatacattgaactaatatttttgtaaaataaaagttaataataacttcgtataaaagtgttataacaaaattaattatatttttatatctattcgtactaaaaattgtcttcaaattagttatatcaaaaaaaatatttaaaattaagctcaaaatcttatttagattgtaattagtaacttttataaaggacaagatcaaaatagttctaacacaattttgtcattggtgagtattacaaatgctaagtgttgtataatattgctcctctccaatacattgtaaatcatttcaaactaaaaatgttactacttactttttacatttctttcatgcccatatttgaattaaaattactaaagaaggaaagtttttttgacaagtcaataaaccagacacaaaaattgagaaccaaaactgatcaccaggtacaaaattttgaatacaaaaagctatttaaataatgcactagctctatagatagagtaggactatgaaactaaaccttcatttccattggaaaaagaaaagaataacttatataaatatatatatcacccttcaaattcattcaacaaaccaacctagttcctttttcccctaccccgttttggcccaaccactacccattcgtcatcttcggctgcagcatttgtaagtgagggtgtggcttcggactcatcatctacttgcatatcctctgacccatgattttctaaggtcctcgttgagctaaccgtaactgccattttcgatgaatcacccacaccgacatcttgttcttcatcatcgctatcactatcatcatcctcaccgtcctaaacaaccatttggaaagcaaatgaaaacataattataaatgaccaccattcatcgttagaagtttgcaaggtgatgaagggctcaaacgaaagttacctgtttgacatgacgaacgggaactctccaatgattcgcttcctttagagcttcaatggacttaaaattaccatccaaacattcttcatgcataatcattaacttctcagctacctatttataacccacaaaaggtgaaaacatgacactgaataattcaaaaacatgtatgtgtttagaaagtcaaaatgcaattcgatttggatacattcgatttaaatgtaattgaaggtaatttcataatttactatatttgtctgatcatgtcattacactataacaatataattagaggtaattaaaaagttctaattacactctttaattctaatggccttctatgagaatccggtgtaattacaatgtgtaattactaaaatcttttcattttatatatagattactataagatatgaaaaattcatatgcaattatcatctcatattctaaagtgtgtttagaaaatcacagtataattagatttgtatgtaattaaatgtaattatacaatttgacatgtttgtctaatcatctaattttattataaccgtgtaattatactaattatactatataattactaaaaaatcattttaaacacaactactaaaaaatattattttcgcactaattattttgtcaagaattcatatccaaacacacatagtgtaattacttaaactcacctatgcggaggaaagcttttaagtttgaactacgaaatcaataaaaagacgaaattgcatataacctcaatacatgaaaattatctatgaattatttaaccaagtcatacatacatacatacatacatacatacctcttcaatactgccatcatcaacctcagtattcaaagattgcaaaccttgaacaagtatctcttctaaatcatctatgtatagaggttctaaagcagaaaaagaaacaatattaaaatcgaaatttgcaatacaaatgtaatcatctgcttcctattatattacaaaatttagaataaaaaagagagctttatttaccctttggttttggttttgcagaagaggtagagcgagtgaaccaagagaagatatcggaatggagttgttgtgctttttggcgcgattgacgaccaccccactcgttctctacagccaattggagcgctgaccatcgatacaaaactatcccaataccttcactgaatatggaacctgactcttccgatagactcttctcataattcatggcccaatacttgcaaaacccaaccctaataaaagagaaagaaagggtttataaataaaattgggattggtgaatttgaaagaaaacgttaagctttgggtttacacagtctcttctctcctggttttgttaggttaagcttcgaagaagaagatgaagtaagaaacttttattatattttatttttcaaattaaaataaaagatgatttttcgaaattaccataaaacc

SEQ ID NO: 315220 - DNA, 3934 bp, Cannabis indica
gtaatgggttttatttagggcacaaaacccaacagctttctagtaccaccttgaggtgtgtgttgtcttgtaaattgttaataatatttgtttttaaagaaagataaatttcattaagaaaaatctgctattacagaataacttaaaaatcatggacaagcatctatccaaacataatctcctaaactagtagcagaggttgccagagtgtgggcaacaccattcgctaatcgcagaatggtgctgcaagaaccaccaccacgaacagctaataaaaatagacatttactaaaatagactgaatactacaattaatatgaagcttattaatccaatcaatcgccatagtagaatcactattaataaggaatatattgaaaccaaattgatgtgcaatagtcaaactcaaacgaatagcaagaaactccaccacattagcagagaaatcacctaacacacatgatgaccacgccaaccaaaccaaaccctttgcatcccatatcactccccaatctaacaaagcccctccccagcactaccaaagcatctgtcactaaagcaaaagattcaggaggaggtgtcgtccattgagtagctcggtttacagctggattgcatggtccaatcccaaatgaagacctccctgaccatactccttcaactccaccagattgttattggctaaatttagaataacatccaatcttgactccttgctcctaaatagtactgagttcctatcataccacaaccaccaaagagttgtcatcatcaatttaaaaacctcatggggtatcctatcaaagagaaataggagaatttcctacattggttcatatacacattgacagagcaccaaccacaccccaattgatgccacactggaatcaagccaaaacaggaaagtagagcatgctcaggagttttagattcttctccgcaacgagaacaacatagagaacccaaacttgttgggagataagtttgtgtttctactggtaaagacaaatggaacatacgtcaagaaaacactttcacctttggtagcatattaagattccatgctctatccaacaagataacttggatgaatttatgactttctcctcaacctggagcgaccacgccaaagagtagccactcttgacaatataaaacccatctctattgtagtgtcagcaccaaccatcttctatcgcacgcctcgctaatggaatagattaaattatgtccacatccattggtaaaaaatctgttgaagcttccccacatcctaagtaccgatggaagaataaattcactcacatgacaatcatcatttgtcctcctcgtgattggctgaaacgacattggacgcgggagccatggctccttgaaagccctaacttttgttccattgccaatggacctccaaagcccgcatttaagtagctccaatccccatatcaaactcgaccaaagatggaagaaccaaccttttctgtggcctcaaggataaagcaatttaggaaatatttatgtttcaaaattcgagcaggcaatgaatttggatatagaaataacctccatacttacttagccaaaatagcttgattaaagagttgaaaatcccaaaatccaagcacactcatcgccttaggctaacataatgcttcccatttcacccaaggaatcttcctttgatcaccagatgaaccctacaagaattgtctcacaatagtctttaattttttacaagttattgctaggagcttaaagaactcatcatataagttggaatatcttgaagaatagattcggtaagtacttctcgcctgccagctgaagagaaattctgctttcctccctggacacatttcctaacattcttacagataccctcaaatacccgctttttatttctaccaatcaccgtaggtaatctagtacttgtcatgagtagcaactgatgtcaaccccaatactctcaaaaccccatcttggtccacgtattgcatattcgaactaaaagtaataacagacttctcaaagttaatcttctgaccagatgcagcctcataagttagaaggatatgctttatagttttagtatcacctcattttccctaccaaacacaagactatcatctacaaagaataaatgagtaacatgtggtcccgatcccgaacacctaaatcccatcagttcagatctggcctctgcaagggagaataatgaagacaatgattctgtacagaagaggaataaataaggagataatggacatccccatcgtaaccctctcgctagaatcactcggcctttaggttgcccattgattaaaaaattatacttcaaggtcatcacacagtccatgataaccctaacccagccctcagcaaagccaaactatcgcattatactggctaagaacctccattccatctggtcatatgctttactcaattaaagcttgagtgccacaaatccccttttcccattatttcttttaaacagtgaatgaagtagctcaaaactaaccataatattttcatgtatcgatcgtcctggaagaaatgtactttagaaagatgagatgaggtgaccaagaacacttttcatcctcaatgataatgcttttgcaaaaattgtatacattacattagataaagcaatagatcgatactttttaatcaattttggtttttatacttttggtatcaacactgcgcttgacttattaagttgtcgcactaaaacactgtcaattaagatttcaaggcacactttgctgatcctttcacccacaacatcctaaaatctctaaataaataaagcatgatatcagtgtggccccgaagctttcttggtaccaatggccttaacagcttggtgcatatcctcctgagtgaacggttccattagacgctcattatcaaccaccgagataagcaaattaataacctatttaccacgctggatttgctcatttttcggattggttgtttgaaaaatatctgtaaaataccactccacttcaccaacaatatcttcctcaacacataacttttgtctagattttgtcataatctctgcaataggatttttcttcttcctcaacgatgctttattgtgaaagtattccgtgtttctatcatccactctgatctcgatctctgcttccaataaagctcttctctattcataaggtcgtccaatttaagttgtaaagctttcacctcatccattcgaacatcgagagcattagcatctatgactttatctatctcttctcgagtttccttaactttcttaggtagtgacccaaacctttgcatattccaagttgaaagacactttccacagtaatcatgcgactcccaaagtcctaacgggtcagccacatctaacgtacatttttgccaagcatcaatcacaatagaacgacattcctcttccttaagccaatgtggttcatagagaaagtgccgcttaacttgctcctgattgcgtaccacaacattctctagtttagcgactataggacgatgatcaaaacaaagaaaatcaccatgggacacttggattgaaagatagaactcagaccaagcatgattacacacaaattgatctacctattcttggacatgtgaagtgccttgtctttcattgatccaagtgaaggtcggcccttcgtacgctaaatcatctaacatacaatcatccagagctttttgaaattcactcatcgccaaaccatcacggttcatcccaccctttttttctttcatagataatatttcattgaagtccccccacaaatccagagtagattaaagaactactttatacaacaaagaagtagccaagactctttgcagaggtgagtttttgggttgccaaaaaatctcgtgaatcaccacaactcactccctggacattgtactgttggaa

SEQ ID NO: 315221 - DNA, 1275 bp, Cannabis indica
tttttactattttagaaaatacaggatccattttgtcatttaacaaaatacagggtccaatatgtaacttttgtaaaacacaagatctaaaatagtatttaccctttatttaatatgacaaacaaaatgccaattaaaatttcataaaaaacagagagtattaatatgtaagtaatgtaatgcatgttatccttaaaaaggtagttattttatttttttaatcaaacatcttaaaaagttagttattttaatatactaaactaaacatctccaattcaattactataataataaagtagataggcaaatttgtttgattattttacataagatattgttttgtaaaaaatggaaataatgaagataattaaagcaaggaaatagaatattaatttgtagcatataaatggtccatgagaggacactcatatgtgggagatgtgtaatttaggatatttaatgttagtgacataacattgaaccccacaaagattttgttagaaacaatgatatacatacattccattactatcatatatatatatgttttgtcactgagcttcaatcatgtggctatgatattttattctatttttttggcattttacatatatatacatatatactatttaattggcatgtgcctagttgattaaaaattattaaacaaaattagcaatatttgttatattataattaaaaattataaatcttaattaattttatctttgtgtattaaaacaatgaagcaaagtacattattaaaaatgagtaattagttataatattttaatagagtttttttttttcaattatttgctttgataaaaggttagatttgggtgtaaaaagttcttgttgtatttaactttaattctagtaagccgtatatatagcttttgaatttgtgtaaatctacttatctaatatgggactaattacaaagtgaatttcagttactttttcttttttcttttcttagggaaaatttcagttactttttcaatatcgataatagtttagttttttttttaatttttaatttttttagaaaagttttgtaaatttttattaatgtaaataagctataagaatagttattcaaaaaaaaaaaaaaaaactaataagaatacttgcaaattagtagagacaaatcttccactataattacgaccagaaaataattaataagcacaccgaactaaataattaactgttttatttacaagatcgtttaacaaaaatataagaaatttgagatgggttcaagttaac

SEQ ID NO: 315222 - DNA, 503 bp, Cannabis indica
taaaaaataaaaatttatatttttatggccacgttaaattttgatttgactctacctttggctaccaacgatgacacatgagcatggtatgattttagtgtatatatttatcagaaatattataaggcacaagtagtgtctaatactttcctcaatgttatattattattggtacaatttagtataggatcccatataatttaatataataaattttaaaaaatgttgctaaccaatcacaaaaaaatacgactagaaagtactagacactgatacttaataacaatcttttatttttattactaattgcaaaatatttatattctagaaacggatgaagtgttgacttgaggtcttaaggtaaattacaccgacaaaatgtatgattacaaaagaaagacacatcaattgtcaattgatgatgtgattaccaaacaaaaaaaaatatttttagtaataatttttcaattacaacataaattttttgtgattaaatataattt

SEQ ID NO: 315223 - DNA, 2353 bp, Cannabis indica
tactacatgtgttctttgatttggttgttaaaagcttactagaggatcaactcaatacttacatattggaataatattattttgtagttttaattaattgatttatttaatcaattaggattctaaataacgactatgatgtcttatttgtgaattttactaaggaaaggtataattgagaagaaaagagaattcaaggtttatttattaattaagagaccttggaaaatctaattaataaatatatttaaatgataattttatttgataattaattataattatcaaatagatagaattattatttaaataactagaatgaaaaaatgacatcaaagataagtttgcttcaaaaaggaagcaaaataatggcaaaaatctaactcatgggccttatagagatttcagccatgaggtaatattttaagtcattggatcttttaaatcaacccatttagttttgatcctatacctaatgaatccatataaatagaacataatgacatttgattcttggaacactttctagactctctcttgtttaacaaactgaatcagaaagaaagcctattattttctatttataaattcaaaattctcttggtttttcttcacgaaaattcttgctccttggtgttgagtaatttcccacacatttcaaagcaatactcagcatagtgaggaagactgtgtagttcaaattgtcaattgaaggagaattcaagttcagatcttgatcatactctgcaacaaaaaggatcaagggtgagagatctggatgaaaggagtcatactattccgatgacatcaatgtaaaattttttataacttttatgtgtttatttcattgttttaagaaattcatatataggatgttaaattataaaccaacatacatgttagtaaatctagatcctggtaaaagatttccaacacaaatcatgtttgattttagggttcaaccctgcgaaatatttatccttcttactaaaatcagttggcacaatttttgagcctaactgggccaatctatcaatttaaatcgtgtactctgtaattaaaatattctcttcttgagtcaattgagtgaactctttcctctttagtactacaaaaggcttcattatagtacttagggttgaacaagtcttggaattcttcctaggtaattttggtgatgtctcgggtaagggacaccatatcccaccatattaaggcatcctcttagaattgaaaggtggcacaggacaccctatcatttccattaacacccatgaaattcaatattctgttgataaaagttagccattgctcgactttcataacatatggtcctccaagaaaaactagaggtgcttgcttgcaaaaccttttatatagcagttccatacgattatgaatagcaacctgctacattgtcacaacaggagcaagagctactagtacttcaggagcaggcattgcaggagcaccctgttgccttaagtgtcagatttcttcatcttattcatttatcctggcttgcattttctacaaatctatgtttccaatcctgggcagtttgtggtgggttaacattaccctgaccacgagctacacctcttcggcctctaccttggccacgaacattagggggatactgtcatccttgaccgccactggattcaactaactttctttagcttctcgtatttcgcctgatttccattctattggactagcctgcaaaatcataagttagcctagttagactacgatcaaggttaaaatctaattaccgcttaattgagaatttaaaatatgtgcctatttagctatcgggctactaacatgcttcttaaaggcttagtgaaccatgagtcgaccttatctcggatgatgatgattgtacatatcgtgataatcttgctctgataccaaaatgtaatgtcctattagattaggcatgttatcgtgtttttaaattattgtgcactcctttgctaatcaaagggtttattgaaaaacgtaagtaattaaaattttcataaataaatttaaacttaagtacataaatacaaaacattttttgagatcttgtttacgaagctacatcagttttcaaaacacaacagttacaaagttttcacctagtgactatcaaaataaagcctaactgtcctaaagatctaaacactccaggcttaactgtctcgatatgtacaaccttctctagcccgagctcactattgttcagtttttgctttgcctttacttatacatgtaaaaaataattgtaagtcaacagactcagtaaaaaaaaaatataaacataacataagcataaaccagattattgttgggttttgtgccc

SEQ ID NO: 315224 - DNA, 1093 bp, Cannabis indica
aaaaaaaaaaaacttactctctcaaaagtatttacaaagattcaataccccaagtgctcttttgaaagtgaataaaataagaaactaaaattactttcttaattcacaccaatcacaagctagaatcttttaaaagtagggatttgatttacattaaaaaaggaaagtaatttcactaacttgatccacacatctaccttggacgaatattcacccacggtgtaataaccttattttccaagcaacaatgtgttagcaagccatttatcttggatgacacacccacattttagaataccaacttcaaaaacattttattttgaaatcaaataaagatgagttgtttcttttgttaaagaaaaattgtactaatgatgtattggttgatacaaatttgaatagtgatgtattatttaccttaaaacttgataaactcagttgagttgttagcataaatttatgtcggaatgtttgtatttgtaattcctaggacaaaatgtgatgttatctattctatagtcccaattcctaaatacataaactcacaaaatactcatttttcattttcatatcacacacttacacataaaaaagtcatcttttttatttttaccaacgagaaaactataaaaatcaattttttttttattttgacaaaaataaaaatgaaatctttttttgttttcccagaaataaaaattaaaaatttgattggagaggagaggagctgagagcaagggcagtgaagtgaggtgtggctttttgattggggagagagagagagagagtgtgtgtgaagagtgagaagttgacggtttagggtttaggaaggtttctttctcctccttttcctttttttctcctctgttttgttctactctgtaaataatcacaacccaaaatcaacacaccttccttcttcatcatcatcatcatcatcttcaacaatggtgcttcattctcattcttactaaggtgaaaccacttaacctcttttcccttactattacattacattacatttgctcgttatttattgtttagtattagggttttacagcacaacccttttgtgttttttggtttttttttt

SEQ ID NO: 315225 - DNA, 797 bp, Cannabis indica
gtgaatcttcagcttccataatttcctccagctttctctctcaggatgaaatcggttactttgcgatagccaataagcattcttaactgaaaaatttcctttgttgcttgctttccaaaatactctgtctccttcatcagagagaggcctgatcctcaaaatcgcatttgcaacctcagaagtaaagcactgccgtattagattctcgtcccaaactcgagagtttgacatgaaaaggtcagaaatagaagaaaaggcatgggtagttccataggtgaagctctgtcgaacctcttcaggggtaaacccagggacccagggtcttgtccaaatatctaagtttcctccccccacaaggactcccgctcctgaaacacagagatctctagccgatagaatactcttccagagaaaagagtctgaacttttcttttcaacctcccagaactcaaaattagaacaatacttggcacttaaagctttcacccagggcctatccgattgaaccaagatgttccaggctaacttagccaccagggccatgttaatgtctttgaaacgcctaaagcccaaccccccatttctcaaaggctggcacagatggctccaacttctcaaagcaagatatctacttgaactgtggtcagaattacaacccttccaccaaaatctagcaacaatgctgtccaattccttacataaagacacaggtaaccgagtagcagccatcgtgtagcaaggaatgctttgaagaacacttttgatcagagtagatcttcctgcctgtgaaagacatt

SEQ ID NO: 315226 - DNA, 1699 bp, Cannabis indica
aaaattttaaaaacgaaaaccacttttttaaaataatttttttaattactattttagactctgaccccaacctagaccttggaacctaaactcagacccaaacccgaacactaactctaacccaaacccctaccccaacccaaaccccagacttgggcctgacctggaccccgaccttgaccccagatccgaaccccaacctcaactcggacttggaccctggacccagaccccaaacccgacctcatgttttgtggtactaaatcaggtacgtagcgaaataaaagtttttaattattatcgtaccacatctcaagatcaccacatgtatatatattaaatctaaaagtaaaatagatgaaaaaataatttacctctcgaagcctattagagtatctttgaatctttttgtcaaatgtatcctatcagttgatctcgaaatactcataccgtagtttttcgaatctacaaccacacacaaagactagcgtgtgctagtaggataaaatgtatatgaagttcttgttagattttcaacacatgagcaagaacaattctacattgatgatggagagaaaagattaataaaattaattctttttatgcttacctaaaaataatacgttaaaaattctatttcttatttgtatcttactaggcttatatggtatatttaaataaacttaataaggattttatttaattaattatttaaatttaaattatttattaaatcatatttaattatttgaattaaataatataacaaaattctattatagacatttatttcatataactgattgaggaaatctctcaactacttgagggaatctctcaattaccttaagtaaatatctcaaccaatagaaatatctataactatttttctaaatttcaaataacccaaaaataaatccagtggggacaaccctatagtagtgggcgcccatcactctgtgaagatacagtgtaggtggcaccgaatcatggacctataattctaagctctaataaactagattatttattgaatctcatcaatcaaataataacatttattaattctatgattactccattgtaaatataaaattgaactcttagtaattataaaaccatatttaaagagttttactgcaatatctattgatataatcaattccagtgattagccctcctcgtgtcagtttataattaattttggtcaaattagcgatatatccttctaattactttttatcctttagtaccattaattcactagtgaaagtataatttagatcaaatctaaatttgtgcacaactttttaattccaaaattaatacttaaaagggaaccaacattcgatttgttaagaaagttagaattccataattatagatcatctcatccatccacattataagatttcataaacataagttgtaagaatcatcttctctaagaaactttgacgagtgaatcaaagaaactaataacatgaacaagagttcatgattactcaggattcaggctgatatactatcgatcgtcgtgatgatatgaattaggtctttataataaactgcatgtttgataaggataactatattcatatcggtccttgtcatatataatatctataaaatacagtaccttcacttagatgtcatactatatcattaatctgaaccgagattacttgcactgaagaat

SEQ ID NO: 315227 - DNA, 931 bp, Cannabis indica
caaaaatacatctttataaaattaaaaactattttttaatttttataatttatttatagttgtattatagttatcacgagatttttttcagattattttttgttttttttttatagtttatttatagttgtcgtgagattaatttattgttgttttttaattgtatttttactttttctgagcaagtatattattgtaattttaaactttacaaatatatttttataattaaaatttttaggccataaaattataaataaaatataaaagaagagtattttaaaaaattatccataataataagttttgtttgcataaataaattgtaaaacattaaaaatatagaataatatattagtttgagttgttgagagcatagaaagtgtgagtgacccatactattgtcatgactgaggcaaaggtcaaggccgtggggaattattactctaagagcatctctaatgagcaatatttaaagttattaaaatacatatattatcttaaaatatatatatatttttatttttaatagttgataattttaaaagttgctcatgatggttccacatctattttttttttttttaaattaaactcttattaaccacatcatattgaattaatagttttttaggtaaacaaataattttattctaataaaaataatattttataattattgtctatattgagcaacacttcgtatagaattagtcttaaaaattgaaccacattaccacttcaatgggcaacctccattggagatgctcatagtactaggatttctttcactccctttctctttctggtagtatttggtttacatgaatgagtgtaaaaatagaattactattcctaaagaatgatcattcaaatgtttggtttgtttattgtcattgaaaaactcattccaatagaaattgtaattcat

SEQ ID NO: 315228 - DNA, 1256 bp, Cannabis indica
tagggttttgctaatccatttctcaaatctagggtattacagagatcttagcatatcattatattatgagcaataaacctgcccttaataaagcccccctaatttttaagccattatatttggtaaaatacttttaagtctactacaaataagcttactagtaactttataaagaacattgcaacaagctataggtcgataatcatttacaatatttgggcatttactcttagggataagagtaagtactattaaatcgatctcctttagtaagtgactcgagtgtaggaagtcagtgatagcttcaaatacctcatctccaattcgataatagttatcttgaaaaaaaagctagtgtagccatccagacttggagctttacattcaggaatactgaagatagctcgcactacttcttcttttgaaaactcctctaataagagatctgaatgggatttagtgactacaggaccataagccattatcatagtggatactttttttcctgttctccatttgagtccccaatagtgattgatgataggccaaaaaagttgcagttatttcactagggtcttctacttgaattccctcagcattaactattgatagaattttgttctgattccttctctctctgatgctgaagtgcaaaagggaagagttctcatcaccatctttagtccttgccaattttgacttctgatgcataaatgaatagaagttcttgtgtatcgatgcatatagtcttccggcctctatttcttgctcttgtaactcagtatttaaaggatctgtctgcaagttgttttgaaattcatttagcttctgtctagcttgaaaattagctatatgattttttggaaaatgctatttattcagctccttaagtacaggtttaagtaccttcagcttggttattatttaatatatctttgtaccttaatattcctgcatccacacactactaaccatccgatgaaatcgaggatgagaagaccacatcctataatactttaaaggctttctgccacttggaatagtaggatgaacagtaagcactactagtttatggtcaaataggccttcaataaggaaggtcccttcaacagttggaaacaaatcaatccaggcttcgtttgccataactctatcaatcttagaataaattctatctgaggcatactgtccattgctctaggtgaagaagctcccagagtcttaattgttggaaattattttaccaggatatagat

SEQ ID NO: 315229 - DNA, 838 bp, Cannabis indica
gaaaaagataagaagtaagactatagtttaataaaattgtatattaaatatgtacaaaaataattatattatatatatagtgtataacatatatgttcaattggttttcggtttaatcggtcgttttgccatttacactaaaactgaccgtgcaaaggcagttttttcgattttcagttttttcggtattgggtttttcagtgttcgaacagtcggtgtactcaatttttttaatttcttaaattttttgctcaaccctatttatatcataacaaatatgttacatgtcattgtgttagttttatgcttgttcatagagtaagttagataattagattctgttataatttcaatatttactttctactaactaatctcagtatataagagctaatgactctcctattgagttgtaatgagaatcactctttttgttctttctttctttctctctttttgtttctctcaacgtggtatcagagtagattttttttcctactttcgcacaatttggatctttcttcttccctattctttcttcaacccaaaaatatttatttaattatataacttttttagtcgaacgacgggtggtggtctggtgtgtgtgagttctcaccaatgcgcacaaaactgtgacccttaataaggcttaaacctaagtcgcggactatattgctctctttaagacgtttcacggctctgtccgaagtgtgcacgatagtctagcaaccacggcatccccaagataaaacatcttctgtgtacgattcgttctccaccgaacgatattgctcgattacaccctaaaaattgctctaagaaaaatcgtaaaaaa

SEQ ID NO: 315230 - DNA, 1545 bp, Cannabis indica
attatagaatcctaattgattaaataaatcaactaattgagactacaaaacaatattatctcagttagtgcagggaccatgggcctatgtatccaagcttcgaataagtacatccaaaatttatcaagtaaatttcctaacgtattaattcctcctgaatccactatagattcaaaattgcaatcctaattacataaaacgctctatatatcaaatatagatacgctataaattatccattgtgataatctaaatggtcaataatcttctatagacggtttacattgaatagggagaaatttatcgttttacccttcaaatatattttattcttaaaacacttaactacttgtaaatgatatttcagtaaactaatataattactaaaatgagtgctctatcatttatcgcgttaagccaagctctaaggatacaattgtttcacttctaatcgttatagaagctataaatttcatatatatgattaacgctcccactcaattgcactatcgagtttcatgtataaatttgtcatgtgtaaattttgtacactgtgacatgtcttacttggcacttaagagagtcttgtggacggaagtgtaaagagcaaaacagaatatgagtttgataggttttgccgtcaaaaaatcaatttatatgattaagtatcacaaattgtataattcaagtaattttactgccaacatccttaaaaaatagctagctatctaaagattaaatgtataaagcaaaataactgtccctcttatcaaatagaagagtagttgtagattgataaatatattcaaaattatgaaagtcaactatatattatttttaccttcatattcattatgattctaattaatgtgttcaatagtacaactaaccagatttaaaaaaaatcggttcctcctagtttagttatatacaaaattctttacaaaacttatttaatttgatgagagagtaacttttaaaataacatttcctaaatacatttaatgaaaattaagcaatgcataatgataattaagtacatacatggctggtgaaatgacaattaaaagtctccaaccagctcaagagtacttgtcccaagtttcaacccatgactagttcagtcgtctccttcgtgaacaatgttattaagtttgattctactgtttgggacattttgtcacacaagtaatcatcggccttgttacaatccgataccttattttcttaaacaatgctgttaagttaatacaaatgtaacttcattaatatttctcaatataaatttcagtcacacacgtaatattaatttatttactaaaattctataatgaaattaagatttagtagttattatgacacaacgctcaaccttgaaaatggtaagatttatgttggagttgtcggtagaaatcaccttggtgaaattttcaactcctcaaaagtttctaaggaggcgcatatctaatattttctcgaggaattatctcatatgttattttttaactttttttttaaaaaattacaatttgaattatttcgata

SEQ ID NO: 315231 - DNA, 2708 bp, Cannabis indica
aacccgtgatttactattttcctttttccctctagaacataggacgattgtatgtcatcgtcctagtttgaaaaaagcaaactcaaccgccaaacgaaccttctccctacaaaattcaatattaactgttcggctgttgttaaaaccacaagcgttggccaatttagaaaaatcttaattttcttggccagcagtatcaactacctaactaactgccaacgcaatacatgatgtaatttcttcttattatgcctaaaataatgtcaaaattaaaatcaattttagtattgaaaactgtatttgtcaaataatgggtcagatacaatttacgtgtaagaaagctaaactaacgaaggtatcctaattgtttcttcttctttaaatataattctattttttactttttcagatgaaatttgtttgcttggttgacaatttatttgttgtattagtctaaagaggctgtaactgtaaagtacttcctaaactaaatttattgtatagctcagtctaattgctcaacgtttcgaacgaaaatggttatgaagtagccacgtcagcgacataaacagtttaactcccaactttgatggcttctttgttttagtcttctaatatcttatttttcaatttcttactcaacacgaacaaccttagaagtcaaatatccatttcgaattttctattaataaactcaattatttatcttctagtaacactaattaatcgtctaaacgtggtcgtttgaagccaacttcataaaaaacttcgctcaacaactgaaacattcaaaatggaataattcaacgcgttcaaataaatgcctccacaaatacaagacatgggaaatatcaaaccaaacaattttgctggctgtggcagcattctcttctcccttattcaaaaccagtagagactagagagtactttcacttcactttctctcggatcaaaattcattttctttcactccaaacacaaattctaccataaccatcaaccccaaatttgttctgataaataaaataaagttaaaataagaaaaaaatgggattcaaattccaataccttttcttccttgcaacgtgtctatcctcgtttggttacactccaatctccgctcgaatctttcctaacatatcatcaataccgccgtggctaatcccgaaaaacgactccattttgggagcgtgggatgcgtttaaggaatttcatagttgtcgtccgggagataaaacccagggcctatccaagctcaaaaactatttccaaaacttcggctacattcccaaatctcctttcaatttcacagacgactttgatgatgagcttgaatcggccataaagacttaccagaagaatttcaatctcaacgtcaccggccagctcgaccaaatcaccatccaacacctcattctgcctcgctgcggaaacgccgatatcgtcaatggcacaaccaccatgaactccgggaaaccctcgtcgtcgtcggcttctaactccacgaatttccacactgtcggacactactccttcttccccggaagtccggtctggccggtcggccgccgcgacctcacatacgctttccagccagaaaacgagctcacaaacgaagtaaagacggtattcgcacgcgccttccttcggtggtcacaggtcacgccgttgactttcactgaaatccagacgttctcggccgccgaccttaagattggattctttgtcggcgatcatggtgacggcgagccattcgatggggttttggggacactggcgcacgccttctctccgacggctgggaggttccacttggacggtgacgaaaactgggtggttggcggtgacattagcacttcctcagttgcgtcggcggtggatcttgaatcggtggcagtacatgaaattgggcaccttttagggtttaggacactcatcggtggaagactcgatcatgttcccgacgatagcttcgaggacgagaaaggtgagcttgccaacgacgacgttctggggattcaacgattatatggctctaatcctaattacgtcactcctccttcgactccatctagaccgtccgttcatcagagtgatacatccaacggtggggactatagtttgggttctggtttacggtgggacccatttaagttcttcttgggcgttggattagcattgattttatcatagatttgtagatattatactttttaatgatatttttaatttatttatttttattatttatggttgccttctgcggttgtattcatcggctgagaccggcaaccatacttgatactattactatatacacacgacccacctatcatcgcgtttttccttctaattatttaggttcattcgtcattataggcattaattttatcctttatttattcttcagtcttcacattttaattaatatatgtgttgtattcttttcaatcctttatgttcgtagacttttcagcagaagttacatcaaatttaaaagagtattgttactgcttggtaggggtggatatcccattacaattgaattagattggaggttaaaaattaaattttaattggattagatcagttattgaatgtgaatctcaaaatctaattataaacccatacaatccaattacatttatatatatattaaaaaattatttatatttatttatataataaaaaaatataatatatattta

SEQ ID NO: 315232 - DNA, 869 bp, Cannabis indica
cgtatatttgtttgagttcatggagagtggggttcttatcaagccattcaggaacaatgtagccaagttggctacaaggctcttcattgaaacgaatttggtatccattgctgaatatgtgtggccttgaagtgattaacaataaattcttgaagaataataccatacctgaaaattgaggcatagatttttataatagtaattataaaaaattagaggtgaattttaacataacatatatacaaatatttattaaagtgcaccttttttggtggcacctctaaacttggaaatggaatcaatattttccctagaaatccctccatatactcatgattttccccaatctacaaattattaattaatattttcacaccaaattatgaagataacttaatattaagacgatatattgtttgtttagctattattattattattattattattattattattattattattattgcctttttaatgaaattcatgatgatatggttgtggtgagtgattggattaagcccatctctgccttgaatggagattgggtcctcctcatcttcataatgtcacgattgaccttcaaaaatgaaaatctatcttcagaattgagaacaataacagaggaaaaaattgacagtgagaatatattacttataatactaagttgtgatttaaaccagtaatgattcttctctattaatactaagttaaaaaagtattcattaattgaaaatcgaaagactaagataaatagtttatattaattttttttattgatttgggtagaagtggaatatgcatagatcatattactactaagttttgattaaactctcctaaatgtcatttcacttgtatttaat

SEQ ID NO: 315233 - DNA, 1740 bp, Cannabis indica
tttcccatatttttaaaaatagctcatattaataatctccttatttcttcacaatgttgattctttataaagtcaaaaaaatcaaaaaagttaatttgattaagataagtaatttttctatcatttgtcatcttgtattttgccccattatctttcttaactttatatctatcttttaacttggttatagcatgaatcataaagttgacttgctatttaatttgtaaaacaaattgattattaggggtgatgttgcataggcatgtaagcactcacacctttgtctctgtatgcatgggcaactacaaatgcatatagatatagatacaaacatgaaatatgtttatgggagtacaacactattgaaataatctctgctgtcatgtttgctatgctagctattagtaaatagcattttgaaccttaaagaagggcactctaagtttgaaaatatttgtgttaaatgtcttgcactgtagtcaatctagagtaagaacgaaaatgctaataatctcttttccattcaagtaattaatgtgattttccaagggctcagtaatagtaactttgttatcgggtttaatttctttaatagagtttgagttttcctgtcctgtaatagttagttgttaacctattcctttttgtagatatatattcttatgccttgaatgttgtcataatatccaaagtcattcttattctatcactatcacttttgcttgtagctaataatgttggtcattgattatattgtccaaatatacattcagttgttctacaaggtctctaattttagtgatttagtgatttctaattatgtttatgggtggctctgtctcttttcctttttaattacaatttcaagtaagtatggcttcttaatatggacgtgatgcagtaggttcagattctctaataatttgctcatgtttactttgttgtttaaatttgttcagtgctggctgaagggtggggcagaagggcaactgccccggccgggctcccagctaaaagaagtcccattaggtttaagaagtccaattcaaatgtatcttaaaaaatggcctaatttaatactttttttattttaataaatatttaatgttaattgtatatataattaagagaaaattacatgaaatatgaaattttataaaaagaaaaaagttacaaaaatatggtatttataagtttgtcactattttatggtagtttttttaatttaagattttttatgatatttgatatgccaacatttttgtaaacttaatatccaaacccctatgaaggaaattactctatataccttttataacttgatgttttaaatttttaccctctttttcaaaatctattatgtttacctcttatttcaatcattctacaaattttacccttatcgattcacaatagttttgtctaatcaaaatatcgagttgtgttaaaggctttcaactgaagagccctaacagatttgaatcgcctcctccctctctcttgttttatcggctgtccaccatctcttccattcaagaattcatgcacgcacagtctaaattggagagtttttcagcaagcctgagacaatggtatagacaataaacttgaagacaagatattaccgaaagagaagactattgtattgatcttcttgattgatgccaaaagtttttgttttcatttattaatttactattattagtttaattccaattaatattttatggggttagaatt

SEQ ID NO: 315234 - DNA, 525 bp, Cannabis indica
tgatggtaataaagtgaaatagtgatgttggttgtgtatatatagtagagaatgatttggcttagaagagacttgtatgagagaaaatagttgtatatatgcaaataaaagagtaggtagtaggtttggaagtagtaggagacttaatttagttttgaagcttggttacaatttggaacattgatggggtatttatagttgcttattccttacactttgtggttagaattattttgttctagattattcttttactagaagaaattgtatctatacacatctaaatatttctagagttcacatagttcgtatattctagattgaatattatcaagaaattaattacttaaggtttttagagaattttttatacaaatataaaaaaatttagactaaagtgttgtagaaatgtataacaaattttaatatttagtcattaatattaattaattagtttatttctatcaaaacaataaattgttgtaagttacaactatgaatatatttataatattatatatatat

SEQ ID NO: 315235 - DNA, 2610 bp, Cannabis indica
ttaaacaaaaaccattagaaattatataaaactaatatttacgtggctcgccacgtaactctaaaaaatacacaagaatagggtatggtacttatctgatatgattgattatatatgttgcttatatatttgcgtatataccctgattattatactaattaattgcttgacgtgaacgttatttacttgttcttaattagcccccggttatacacttgtatacgcacataattccatgattaattattgtaatacaccaaaaacaatatttattacatgattaataagtatacaaatctagcatctacttttggtatataatatatttaatacatatatttatgttgaagtattttctagagccatagttgatagttgcaataaataatatatatttaaaggaatgatcgattgtgatacactcaaattatacatatatgatttcaaaaaaaaaaaaattatacatatatatttttttatacacagtgttgtataaaatgtaatatcaatatataattaaattatctgtgactaaaattaaatagacataatgtgtgtatatatgacaagatattttttttttttgtagttatattattttaattaatactccaataccatacgtaaaatataactctcttaaaaataatacaatatattaggatcatgtggcttatttttaaaacttaaaattcaaaaagcttaacgatttcaaaacacaaaaatttgggtttaatttaatttagtgtcttaatttatcttgtcaatatagatagcatcaccaattatatatattttgttaattaatattgtgaagaaagacaccttaattaattaatattataaatttgttaacttagtgtacttctaataattttttttattttatctctataatatatttaccattttttttttattttagagcacatttttatattacaccatacattaattttcttaaaatacattactaaaacttattttttttaattttaatatattttatttatttcaaatgtataatatcaatatatatacatatcttcatataaaaataattattaaaactcaaaataattaataaaataaatttagagcaataaatagtattctataaatataagcataaataataagttctaaataaactttaaactaaaagagtttaaaactataacatatttttagtaagctttttcaaattttttaaaacctttttattttaaaaaaattattgtgagtgctccaatgtatattagattactttctcattttaaaaaaaaagaatatcatatacgttataacaaattagtccctttcaaacaaaaataaaacaaaaagtaatatataccgtcagggataaaaatttagggggcctaactatattatatattaagcaacaaatagtttaaaatatattattaaaattaaaatatagcacgtctcttgcatatcacgaaaatcatctataattgaatctatgctaaatttttagtaatttttttttcaatatacactaacaaacaattacttaaaaattcatcttccatcttattgcgaagtgtagtcttcctatattcatagctgaaaaagaccactttgtagtagatttataaactggaagtgtaagaaaaagagttaccactttatatacaagtagaaatgcaagccacctaattctcttaattgaagttttcagatgaaatctattttcagcattcttgtgatgtgaagttcgcaaaccttcttgcaatacgtgttgattgattcatgagatctgcaactgctttctcagcctttttatgaggtgaattgatatcgtttccaatatgtgctaaaaatacacaaaatttcctctcaccttttctatgattgaaatccattaatagcaaatgcatccaatctaaggtgtgcatatttagcgtgaaataaaaaaatatggtagacaaaatacacacatactttaggagaatactcaaccaagatagaaataatttaaaccaagatgactgaaaagaacgtaaatgatctcatatagatataagttctacgaacttcatcacgtttttcaggtggatactcccatattggtggttgtaatcctaaatcacgttctaatgaattgataataaattcttctttaatgtcaagtcttaaagattttgttaggtaattttctaaattttcatgatcaacattcacacatggatttgataagatatcaaatgttgaactattaatattctttcgcttaaagaaaatattaattgtagttgattttcacatctacaaataaaaagaatacgtatatatattaatcaaattattaacaaactctattaaatatataacagtcaaagttctatcaattatttatatatattaatatatctttataacacaaaaaaattaagattgaaatttgaattatatatttaacatacatatatcattttctatagcatacatcttatgttgattgatcttcaatttatttctgtaaaattactagcactagttaattatatatgttattttttagagtaaataccattttggatcctgtattttgtaaaagttacagattggaccctgtgttttgttaaa

SEQ ID NO: 315236 - DNA, 842 bp, Cannabis indica
agcgatgatgaaatatgtttgggctatagctactaaaaaagatagcctatggcaatacaaaacaaactctcaaagcagctgaactggagaaagtggaggtcaagaacaaagtgatccaatacatggacccaatacagttcatggcacagaaataccaaattgttgatgggtataagctgtcacgacctccttaggaaaatgtgagatggtgcaaagaagtttggtgccgatataatttgcctaaacattattttattatgtcaattggtgtacttaacaagttaaaaactagagagagattatatcggttccacattatagattgcctcacttgtgttctgtgtggcttacaagaagaatcggttcaacacctattctttgagtgtgactttactcgagattgcttggaccagttaaagaagtggctgcaatggaaagcttgtacaaactcattgcaaagactactaagatggattaaaaaagcaaaaatagaaagtttcaagaagaaggttctatcagcagccttagcttgcctattatataacatttggacatcaaggaatgaaaatgtgtggctggcaaaggagcaattggcagaacaactagtatatagagttagaaggataatcaaagatagagttgcttgccttggttataaaaagataaataggaaattgtttaaaatgaaacaatatggtttgaggatttgtaaaaatagggaattacattagttattcatttgtgtataaatgtagtttgagactatttatgaagtctctttagtttgtaaaaatattttttggagtaatgaaattcaactggttcatcaaaaaataaaaaat

SEQ ID NO: 315237 - DNA, 1390 bp, Cannabis indica
atgtagggtttattaagtacttacagtgcatagatgtcatgctagttatcctttacccagctctaatgaggaatttactaatgatacattgactttaggcttatctggtgaagtctaggccatgaggcgccttatgtatgttgatgtggatgccacctcacaatactggttgtaaaaatcgtgtcctatcttcatttgtaattaattacgtattaattacctgattgccaattaatttgtttccttatttaggaagatatgatctttgttcaagattctgggaagataattcctgattgtgtgtgatttggtaggaaacaagtaactacacgggacttatggatgtatgttgcgggcttcttctgactatgcgggtatatgtctttcgaatgttgaccatgctgaatagggactcgcctggacgagttgactgttatttacccaaaagaactgatggcttatggatctagcccaatgatatttcttgggcccactattgggctttgattatttgcactgtgtttgctatttagattccacgtgtcctctaccaaaaacatggataacatttacccccaatctttcgaaacgatgtgggttgcggaggcttgctttagactatatggatggacaagtggaggctaaaggtgaagcctttaagcattccatatattttctgtgaattgaagaaaactttatattttttgaatttaaggccatatgtggtgctgcatcattggttcgtggagtacctgttcgttgaggacgcgcttgaagcaaaataaatgaattgtcatctatttgtttctgtgcaagtctcgaggagaatatcttcatgcgatttatctcactcccatatattgcgtttaatgcttcaatgatggaattctggatcgttagatcgactttgtttttctggagagtaaatctagaccatcgattcgagcttcatgcagatttcaactcccaagtataaatacttcgtaacgcgactatttaccacttttacccaaatttcaaatttctttagagtttatagagaagatattgattacgaattgagcaattttggagtatgatattgaatattgaattcaatcttgtacttcaaattagggctcgagagtatccaaacgcaccatccctagtggttagctgcacgtctctgaggcagtcgttagcattagatcttaactctgaaatagattctttaatcgatcaagcttgtgctatttaggaaggacttgatcgtctcaagcgtccatttatagaagaactcagtttgacatcatcattcgagatcaatattttctctttgaagctgaacttctttgcaagtctagaatcttcactcaattcttcaacaagtgatttctctctctctctctct

SEQ ID NO: 315238 - DNA, 2152 bp, Cannabis indica
aataaattaatatataatcttactttttcatgatttaattgttttaattatagaattatgaattatgataattaatattatatttaagatttattgttattttaacttatttataattgataaatttatattttttataattaatatgttgtgtcatgcttttcggtcttgtcgcgtgtcgtgcttttcaggctagtttatttatgcttacgcgttgtaccgttcgtacttctcatatcgtgttgtgtttaaggatatatttttcatgtcgtgtcgtgtcgtgctaatttgtagtatcatgtcgtgttgtgtccagtcacgcctagtcatgctcgtgctgattttgtgtcgtgtcaaaaagctcaatccgtatttataacactaaattatactaataaaatatggtttataacaacaacaacaacaaaaaaaaatatatgtattaagctttatgagttttatttttatattataaattattttgaaaaatctttgaaaaaattactaaagggtcgctataattattaaaattgatttgttatataagtgtgtgttttaacttgtaatttctaggtgcctagctgaaatttttcttatagctgggctactttacaattacaataaaaaaattatattacaaagtttgtttcgatacatttttttttatgagaaatgctaaagtattagtgatgtctagtactcttatagatgtcatattattattggtacaactaagtattggatttcataaagtataatttaataatatttaaaaattatcgctaactaatgataaaacgttatatatataaatagtgttagttgataatcaagtaatagcaatgctttataatctatttgaaaaaaatttaatataattatttttttatgatcaagtggttataaataattacaacacattcaatttttttttttaaaataaaaaatggctaaaaggaggtttgtatgctataagattactctaaatattttaatcacaataaaaaaagattactctaaacgttttaataataataataaaaaaatattagagtattagaaaaatgctaaaaggttggtgcttaacatttttttatgtgtcatattgttattggtgcaattatgtatcgagtctcatataatttaatttaataattttaaggaatatcgttagccaattacaaaagcgccacctataaatagtgttaggcattggtggccaataaaaatgcttattttattaatggaaatggaataattctataaaataataacaaaaagattaatttgcagtgtaaatagtaaatacatatgtttaattctcgattatagataaatatttaagtttaatttttgacggtaataatacctaacttatatttttaaaatttttgtaagtgtctgactattaagtatcaagtcatcatccacatgttatttttgttagtatatttaaattaattttaaataaaagataaaaatttaatgacttagactaattagaaattgttacgcaatacttaatatttaatggtcaggtacttatagaagttccacaaatataacttttttattgtcaaatttttaaatttatatattgaattaaatataaatatttatgctattaattatttaagaaataataatgaaaagaaagaaaaaaagaattaaaagtgaagtaaactgagtcaaaggctttttggattgtcagtccaatcagttcacggacttttcattttggttaactaattgcaataaatatttaaagccaaaactacattttaatgatataatatgttattttgaaaggttttaatgatttaaatttagataagtatttttaggaacaaaattttttctaagaaaaactttgtgagtccttttccatacaatgtggtattatagaattgtatgagttttatgctctcaagttgtaaatgatgtattttttatttgtttcagtatttaaaagaaaaatatttactctaattattgttttaatgaacttgaatttttggtcaaaataataaattgagtaattaattttaagtgtataattaaaaatggtgtggtgtactttataacaaattcatgttaaaaataaatatacattatattaagagtaatttacagcataaatatttaaatttaa

SEQ ID NO: 315239 - DNA, 722 bp, Cannabis indica
aaaaaaagagagagagaaaatagaaacaacacacaataaaaatgttaacatctaacatttaaacatctagcatttaaaaagatttgataaagcattagcaatgaaggggctgcttctagtactatttattcattatatgattctttttcatgaagagagtgttgcacataattataatcaaagagaatgatgagcaatataaatgatgaggaaccaatcactaaaataaacaaaaaaaaaaatgttccagcaaaattaaaaaataaaattaaaattcaaaaagaaaaactggggaaacaaccactaaaatgagaacaatgaaactattataccatataatataagaatcctcttaaaactacattggaggtcataatcatatcaaactaaaaaaataggaatcattcaaaatttcaaatcaaattaacataaaaagttctaaaaaatagtaacaaggaatgatgaagctttggactttggcttgtcatgaagcaaatataaatatctaaggactttctttctatcacataagaagatgaagaagaacaaatataaaatcagttgtcacaacagcacacttggaagaaaaagttctctttggagcaaaatttctgtacaaatgatctttccatagattggtcaggcccatccatgtttagcattttgattggcaatagatttggatgagattttaatatgagaaacacctcaccattgtttta

SEQ ID NO: 315240 - DNA, 3574 bp, Cannabis indica
aaaattatgatattaaaaaaactaaaataaaattaacatacgtgacttggcacataacatctatctagtataaatatatattataagcctgtgacgacatatgtatatacataaattaatctaaaataaataatattaatatttttatagtataactctattaacaccgtcaaatttaacagaatatttttatattctattaaaatattttgttaagctaacaaaaatctaacccgttagataagcacattttatatataaagatatatatatatatatacacttacatacttcattgatttgctataaatttagattattagaaatatgaaagtgtatagttaaagaagtaggaataggtaagtgtatagtaaggtgcatggggctccatttctatggatttctctaacattccctctcaagatggtagcattttttttttgtgctcatcatatattacatgactcgatcacaagtgttagaaatataaaagtgtatggggttgaggaagtaagaactaagaataagtgagtgtatggtaaggtgcgtgtctcaaaagtcaaaatcgattgacaataagagaagtaacccatacatcttattatgaatgtaacactctaacatttacttgaaattattttttccttcagctattttattatagctatttattattatatatattttaaactatatttatctttatttttgactaaggtctttgtcaatctaaagatgttctccctacctacacaaatagaaaaagcaagcttacaaatgcaacttcgtggaaatttaatagttaaaagccatatatatatatatttatatatacacacatttttaataggtattacctataaataagtaattttgtaaaattttagatttttatgcttaatttttgtatttaattaaaaaaatatcttattttatattatatggaccgaggtttttcctaaaaaataaataataaaataaattctttgacaaaaaaaatataaaaaaaaatgagtttgacttaaatattcttttatataaataaatttttatatagtgtcaaaaagatactttttgatttttttgaatttttttttaattaagtagttaaatttaatataaaatttttctcttttattagttatcggatcaaaatttaatatggtttaatatttttaaaataaatatttataattaaatttatttagtacccaataattaatacctattgagaagtgttctgtaagacatttcttagtgcattttgtgaatatgaaaatggttgtgtttctattacggtgcaatatattgtaacatagggttgcacttatgtgtcaaaaaaataataatattttatataaatataagacatacattacatcaagagtctgcatataaaaatgaaaaagtacaatcaaacaaaataataaaactatcttcttcttgaagcttcttacaggctttgctctggttcaacctcaggtaggttagctgagtttctattctctctgatctattctcaaccaggtttgagctttacttcgtaattttactatcagcattaattaccttcttcctttctccctggctaaaaatcctttcttcgaagagattgcagtccacattaattacctcttccctgactcttgcatttaattttcttatacgtcaacctaatcattatgcatctccccctaatttctcgagctcaattgctttttaacaccatttctctctcacatcttcatttaattctggcggctccatcctttcagcatttaatgtttctgcataaattatacttattcctctcctgagatcgattttatacagataaaccaaccgtcacttggtttctcttcttctcacacccaaaaatcatcattgcgcatctttctccgaatccagacagtctcaccaggcattgaagagatggctcacacaccgtttccttcttcgaggcggcccttcttctccaggtactctcttctgtggtctatttctttaattgtctatttatatgttttgttgtaccacttttccacaacatcatcacctccttcttctaccaccactgtcttctctttttctctgccaacaatggcgtcctcttccgaaaaccctaatcctattactgctctcgatgatgaagacagtctcgtccatgagtttgatcacatttccatccaatctcctaacgatgccaactctttctgtctgttcttcaaactgctgtctcccaaatctgccaaaccctcttggattgagaaagctatgtccgaagcctggacccttagatttcctgtccaaatctatgaatatcactctggatttttcttggcctcttttcaatgtgacggagaccgtcgtcgtgttcttgaggagcatccatggcattttgacaagtttttaatggtatttacccatcctgacgtgtcccctactcctactcctgaatctgttaggtatgttcctttctggctccaggcccataggatcccgttcggtcggagaagccctcaattggcgcaattcattgctgatgagatcggtgatctcattgaaatattcactctctctttaatggaaaactttggtccttaccttcgtcttcgagtccttcttgacataaccaagccattgcgccgtggtatgactattcgtttccgtgatattcctgacccaaaatggatcagctttaagtatgaaaatctccccaatttctattatttttgtggttttgttgaccacacctataacaagtgtcccaagtatctgcttcgctgtgataatttccctgttcctcctatcctggagtataaggatactcttcgtgcgtccccatcttctcctcataaaaagaacccgtttgaaatttctaactctatcccttttgaggaattttttcctcgcatctgcacccgcaatgacgaccaagatttgcaacaagctgttgaccgatttctccatgtggaatctcctaattcaagtcttgtttcccatcctgctcaggtttcagccacctttactcaacctgccctatccaccccttcactggctatgcaaaattccagtcctctgcctgctatgaaaacaatgcaaacctctattcctccacccattatgattgattcagtcaccacccatgctgcaaaaggaaaagctattgctatgtctcctaccagccatccctcccaattcagaggaagtaagggggtggttattaatgaaccatgccccacaatttccactgccatttcccttgctaccagaaggaccttcacgcgtcaaaatgcccaagctggagactctgtgcgcagtatgcttaagcgagccagggctgttgtttctgatgatgctgtggtcccctctatgtccgatgatgagccaacggcgggtgctgctatgcggccccgccgagaaaaatgagtctttgcagttggaatgctcgaggtttagggagccctcgagcattccgtaatctctccctgcttctcaagcagcatcagccattgttgttgtttgtcatggagactaagttttcaactggacgtggaatgcacctcaaacacaa

SEQ ID NO: 315241 - DNA, 1803 bp, Cannabis indica
ttatttatgatcttttattttaataaatattttttttcttttatttacattacagaaagttctctatagtaattgctctttttttactttttttaggagtcaaattgtcttaattattattaaaagaaaattacgtaggaacacgtgaacatcaaaatattcacataaatattgctacctatttaattgtttaaaataccgttatatacttgtattactttataaacgtatactaagggtatctccaacccaacactataatgttatatatagtgtaattttctccacttttcactccaacccaactctatttttcaacttattttcatggggatctacagtgtcccactattaatggtgggcactgcagaccatgacaaagcttcttcttttttttttaaatttttaatttttaagaattaaataataattttaagaataaaataaataaatatatgtattaaaatattcttattatattgataaaataatttaataataaagaatatatttttagtgttatggttggaattgaaaaaaaaaaatagtgttgaaataataatcaacaccaaatttaaattttagcattggagatggcttaagagggagataaaagcacttatttttttttttttttgtacatgaataaaaacacttatttacttatttaggtggtatcagactttttatttttaacttttgcgtcagagttgtttgtctatttaaattttttctcattattttattattgcattttcctctctattcattctcttttttataacttaaaaatttttttgaccacaccagtaattaattttacttaaacacgtacacaactctcattaagcttttaatattaactttttcatatataagttgctttctctttccattcttttaataacggttgatgttgttatttttaatatgttttattattattattatttgagaaaatggtagcattagttttaatattttattatttttactatctatattatgtctttcttatttataatttttaaattctttttcaatcataccgataattatttggcaaaataatagtattagttttaataggtttataaaataatttgtcaataaattgaatagtattttaaacaataaaataacataatatagcctaaaaatataaaaaagaaacaagaaagtttcttttaatattagtcgtcatttttcggagacaaaaaaatgtatgtttctcacataataaattggttatttgattatttatatatatttgtaaaattctgaaataaattttttaatagaaaagtaaccaattgatatcttattcacatcaaaagcaactaaatggttactttttttaaaattcccaaaaagcaaaatttctaaacgagatttttccaatttttttcatttcggtaattgttttgaattttggtatgtatacttatgtggcacaacggtatttgtgcaaataattttcttaaaggtacttttgtaaataaaatcaactataatattaaaaaaaaaccctattattaatggtattgtaatttattatttgattgtatttaagattagtgaattttatttaattggttacttttcagattgtgatttttctttttataaattactttttacaatatgaaaattttaactttttttttacagacttttatttgttttatttgttttattactattatttttatttgggctaattaggaatttttttttccgaactttgacatgtaccaaatcatgcctcctgaattttttttgccgttaaaaattccccctgaa

SEQ ID NO: 315242 - DNA, 696 bp, Cannabis indica
tttggatttaatttgtttgtttgattgaaaaaatagcattattaaaagtaaagaagaaataaaaaacgacaaaaataaagcccaaagccataaaattggtattgttgaagcccaaaagagagcacaaaaggacaaaagcccaacaacccacttcttctccagccaacatgcccgccacgtggcggcctcctactcacgcgcagcagccacgccaggggcttgtccccttctcgtccatcacgcgcgcgtgaggcgcacggcctcaccctggccttgtgtgtgcctcaggccgagccccgagagtggggattttctctctccgaactccatcagccaaaatggcttcagccacttttcacgtggcattctctatctcaccacatgtccacatgcaaccaatgagagggtgacacatggcagctctgaattaagttattttaattgcaaaaatacccacatgcaatctgtaataagtttaattacgtattagtctttttaccttctataaatagaattttaggtttttagaattcggttacagtttcaatttcagatagaaaaatctagagaaaactctcagagcactcagtgttagtttacttctttcttagttaatttgtttatgggtttctaagttcccttgttattaaggcatacgatgaaacctagtgtatttaattaagtatttatttttat

SEQ ID NO: 315243 - DNA, 876 bp, Cannabis indica
aacaatctcaatagttcagagagcatttttaacgaccttaaaagttcagggagcaaaaatcctaattaaccaatttggatatatgaattatacagactccacaattttcttcactttatatatatttcagttgatttctctctttacaagtcgatagagtacaaggatgagcaaaaattttgtaaaccaattttctaagccaacatggggtgtaccgcagtgtaacgtgatgtgaatttgtgacagtcagtagtctcgtgatccataaagagaaatattgggtaagttgtgtaatcccacattgcatggcgaaaatatgatgattctatgaccatatagatatgagactacacagttacagatggcttaaatgaattgacgagtactacctatattaacaaggtacatttttctagtagcacatcgtttaagaacttcaaagttaggtgtgcttgacttggggtaatcttggaatgggtgacctcttggatgtttttcagggagcgtgtgagtgaggacaaagcaggatgaaaacacttgtattagtttgtaaggtcattcgtcactccaagaaacaactgagaacgctcaatgaaggcttgaagcgggggtgtcactgaaaaataatatttttacaaatgccaatatatttctttaataacaataataaaatcgtaaatgtaaaaatttgtagtaacaatacagaaacataaaataaattgtgcagaagttaaaacttgacacaagagaatcatacgtggtaccagaatttttttaaacactcctagtccacggagctacgctcaaagaatgtaatcaattagtaaagtataaaagattacaaaagcaatttttttaaacactcctagtccacgg

SEQ ID NO: 315244 - DNA, 551 bp, Cannabis indica
tctaagatcctagtaaaataattccaacaaactttgtctgtgttttggtcatattgtgcaagattgttctttttcattttgacagatctttctcaggaccctccttaagatcaggtggcactagcacacaggctcaaactcgtccttcagcacaggccaatctttccaccagcaacaactcaagtgacaccaactagtatcctgactcaggtgcaacgaatcaatgcacatctcaggctcagaatcttgccagttcttttgactatggaagtctagatcagctatacatgggtaatgtcacaggtttgtcaataaagtacattagtcaatcctctttctttccataaaattattcttatcctcttgttcttaacaaccttttacatgttcctgatgttagacttttatttgggcttacattaagttttattggttatattaaaacttgggttgattggatagttctttgctgtgttagcccatgttgttggtgatcaattgttaatgggcttagcatctgtgtgtaaagtctaggtgaagcagaagtgtgg

SEQ ID NO: 315245 - DNA, 1615 bp, Cannabis indica
tattgacttaaaaaatatataacagtatacatttgataaaagtttatgatatcttttccactgtcaatatcggtccacttcgatgtaaactctatacatttgataaaagtttactttgctaatgccttgaaaaagatattccacttatctaagtgtaaccaaacttcattgtcgattatcatgttagtgtaagtctagtgcactatctgaacttaaataatttgaagcatataatgataatcattttccactgttgtgacaatactataattgtgaataactatatgtttaagattaaggctttaaatattaaacaattaattataaaataaacatatgaaccaagcaatagataaagtcaaaaatgatctccgatcttttattaatagataaatatgattacattgaaattgatttttatttagggtataaaatcacaatataaactcttccactccttaatttcttatatttttagaagggagtgtttctttttgtaaatgatagttgttatattattctttggtgagttcgtgtgtctttgtaattacttttgtgtggagaaatttctcaaagtcaagaatgcgaagaacaacctttgggagaaggttcatttaagctttgcatcgtgagaaagcaagcaagcggctatcttcgagagaagatttctacaagttttgtattatgaggaagcaagcattcatcaagtagtttgaaattaaggagctcaaatcttggcgtcttaatgagattcattcagcaaataagagtatatcaagcttgcagcaaaattttcaaagagagtttaagttttgtttaagtcaattattttatacttgttgaaatttgactaattatatttggccatgatcctgtggattagtagcaatttgcaaaaattactaaaactaagtataaaatatcgtgtgttattttaatttctataattttattttttgcactattattctgttctatcaagttcagtttctgatagagattttaattttgcttaaattataatagttctgcattaattaatttttttttgttaatttcacttactaacgtaaaaaaaatagaatttcacaagtcatgcttagttcttgctgataggcgccggtatataaatcaagttttgccttatataatagttgtggccataacataactcgatatatagtaatacattttaatacaatatgaaccatattattcaacaaataaaaaaaatttattgaaatcaagatgaagtgcagatcaagcagaaaatacaaactcttgaaagagagtttcaaatgttgtgtaatttttttatataattaataaatattttaaaaataaaatattaattgtaataataaatcaatctttatcctttaccctagtcaacataaacatctcctttccaatcctttaccctcttcatccctccacgtatccatcattcctaacaaacataatagcaaccacaatgtaattttctttgcattaaaatatcttataattttaaagggcatttgataatacttttgtttttaaattttttgataacaaaaataaaagtagtttttttaaaattttaattttaaaaaacaaaaatctgttctataac

SEQ ID NO: 315246 - DNA, 750 bp, Cannabis indica
gagttagagttagtaatacatttgattattatggagttgacatatgttataggtttcgaattgacaggttgttaaggtgctctatcaaaagtgataaatccaagtttaaattaatttaattttgattactcagttgcttataccctatatatagggttcgttgcttaaatttcattgcagtttgcaaagtttgtggtgctagttctcatctgttcagtgatagattagtctttgcaaattgtaattaatgatggctttactttgatagtagttttctatattgtaatgcaaatgttttacaagattcaattgcaactgttttggtgttgtaatttgttatttataatacattgagtaattttgtttttagaattgcagggaatcatcctaaacacacagcattttcctggaggtgaagactgttatttcagttcgtaatcactgaggaaaattttaatagttttacacttaataatgggatgtaacttcatatgatttttttttatgtatgattattttatttttgtttcttgtatgtattttgatgacattcagatctaattttttttaattatgaaataagggttataacccaacccgacccaacccaacccaacccataaagtaaaaaatgggttgggttatacatatgatgtgatttgaatgggttagttttttataggccgacttaattgggttggcccacaaaaatatcctcaacccggccaacccaacccatgatcagcccta

SEQ ID NO: 315247 - DNA, 777 bp, Cannabis indica
cattttgtatttaacaaaatagagggtccagtcgataacttttgcaaaatacagggtccaaaatagtatttacctaatatttttttatcacaccttttttgagaagcatcttttagcttttctaaaatatttgtatgaaatttccttatatgcatatgtgtggttctttaacattaaaatgttaagctaattaactccaattttaatttgagtcccgtcttttcatttgagcattgacttctttcttatatgtttttgtcattatctaaatttttcaaaagcttccattcaataatgcgatcaaattctgcattataaaaattaaaatcaagacattagtattgaaagaaaaaaaaaattaaacaaaaaagaaagtattagtattgaataaggtattaggattatatatatatttaatttttttaaatactaattatatatgaataatatagaaaattattgtataaaaataaataaataattactattagtattaataaaaaaattagtgatgattaggtaaagcaataactaatattagaatacaatatatgatttgtaacttaaggtttttttgttgttctattgattatttttagctaaaattttgatcatgttatttttttggttgaatttaatcatgttaaattgctcatatttatgtgatatatatatatatatacacgtatatggttgcttatagggtttcaggttttattataatcatttaaaaatggtagatattatttataattcaaaattaaaaaaataaataaa

SEQ ID NO: 315248 - DNA, 639 bp, Cannabis indica
tgatactctgtataaaatatcttgtatcattttaatttctgtaattttactttctgcactattattctgatatattagattcagtttgtgatagatcagattttgattctacttaaacaattttactacagttatgcattaattaagttgtttgttaaatattacacttggtaattttaaaaaacagaatttcataatgcatttacatatttattttaaaaatttgttattataccattaaataatagagaaatttatacctcatactgttttttctaattttttttttcaattttagtattgtacgaaaaaaaaatattttttactattttttatactatatactaggtttttttttttagcaacatcccacattattttgcttttcccaataaatatatctattttttttatttatttatatatataaagttcgaaaattttaaattgattgcttatgttacttttgtgataattttttttacttaaaatatttgtgtttttcatttttttttttttttgaaatttggacaagcccgtataatctcctattctaagagattatatatgtttctttatatattaaaagtgcctatctaacgacatttcttgttaaacagaatatacttaaaactaaaa

SEQ ID NO: 315249 - DNA, 1465 bp, Cannabis indica
attaattagagattttattatatcaatgaacaaaaataaagacattacaattgcaatattgttgagaatcatggggttccatctcaaacccaattgaaaataagtggagtagtccatggtcttatatatggctcaattatctaccatttattctatgtgggacaatgtccataacattccccctcaagatgatggctattttttgctcatcaatcttgaaccgtatcagagtggacatggtcactatctgtataggtgaggatcggataggatcacttgcctgcaacggatatgactctgataccatgttgagaatcatgggggtccatctcaaaaccaattggctatgagtggagtagcccatgttcttatatatggctcaattctctaccatttattctatgtaagacaatgtccacaacatatataaaatacaaagactaataaaaaagaatgattaaataaattacaacatatatacactatatatattacacatataagtaaggttgatgaaaaagatagcacaatatattatataacatatatataggatttttctaaggtgagaaattttaaaaatgctttatctgtgaggatttattataaaataggtcatactacatttttgtagatataaaaggaggtatatagccattacaatgtagagtagtgtaaaagattattattataatatatatataagattttctaaggtgagaaattttaaaaatggtttatctgtgaggatttattataaaataggtctcactatatttttgtggatataaaaggaggtatatagccattacaatgtagagtagtgtaaaagattgttattaatttataccgtgggaactcatcaaaaaaaaaatatatatataccgtgggtcctacttatttaatgttttgttctttttttattttaaaaaacctattctttttattatacaatgattaaaccagaagaatatatttttaaaataataagttacataagtaaacaatataaaattgcatgtgagtgttaacagtaaaaataacaaaagaatttaaaattacagatgtttgaagaaatcactcaataaatattaatgtttcatagctttctctgttttttttagatctaatcaaataaatttttcttgacttggcaaaagaaacatggtgaagaagaagaagatcgatggagaagaaaatgttgtcagcgaatagtctaatggagaagaagagtgacggcttgaggagagagaaagacataaaggtcccgtttgttacacgagattggaattaggagtaagataaattatcctagtcctttgtttgtgagcataaattaattgaccagataaatagtcctttggccaaaaactaataacttttgtgtaagataaacaaacatgaccaaataggtggaattaattgggattgtcatattttttcctaattttttttaaaaaaataa

SEQ ID NO: 315250 - DNA, 1571 bp, Cannabis indica
tctatcaaaggcaactatttactccatgaaccctcaaagtccatgacataggctcgcagtaagtcttctaatatctgaattgttctctctgattgcccaccagtctgagggagaaaagttgtactgaacttcagcttcgtacctacagctctttgaagacttacctagaattttgatgtaaactttggatccatgtgtgaaagaatagattttggaattccatggagacagactatctcctttacaaacaactctacatactgatccactatataggttgtttaccggcaaaaaatgtactaacttcgtgaaacgatccactatgacccatactgagttatacatccatgtggttttggataaactaaccacaaagtccattgtaatatcctcccactttcactctggaagtgctaatggttgcagtaatcctgccgacctctggtgttcagctttattttgctaacacattaaacatttaatcacgtaattcactacatctttttttattccccaccaccaataatagggttgcacatcctgatacatttggtggttcccgaatgaaatgaatagggtgtagtgtgagcctcatcaaataattcctttttgagcttatcattatctggaatgcaaacctgagctttatgaagtaacattccattattcaatatcgagaactccttaggccgactggccgatgcctcatcctaaattttaactagttcaagaccttgtagcaatgtcttcctaatcctttccaacaaatctgacagaagtgtcagtttatgcaacttcccaaccacaaatttaatttcagccttaaccatttccgagactaattgaggagctaaaaacctgcccggtaccctttctgttcaaagcgtctgccactacattggctttcttgggatgatacagaatctcacaatcatattccttaactaattccagccaatgcctctgtctcatatgcaattccttcagagtaaagaaatacttgaggctcttctggtctgtataaatcttatacttttctccgtacaagtaattttgccatatttttagagcagacacaacaatagtaagctctaaattgtgtgtcaaataacgatatccatattcttccaactgacagaaaagataagctgaaaccctgtcagcttccatcagcacacatcccagaccctgtctggatgcatcacagtaaacaacaaactttgtatggtctgatggcaaggctaacaccatattgtaaactgtcgctgttttaactcctgaaaacttatttcacacacgtctaaccataaaaatcgttggttcttcttagttaactttgttggtggcattgaaatctgagaaaaactttcgaaaaaatgctggtattatctcgtggatcttagaaaacttcgtacttcagtcaatgttcttggcctcggtcaatattttattgaattgatattttccagatcaaccaaaattccaccttttccgacaatatgccctaagaaggacacctctgacaactagaattcacactttttaaattttgcatacagcttatgatccct

SEQ ID NO: 315251 - DNA, 2339 bp, Cannabis indica
gtcactctgaggactattttaaaaggaatagtcagtacagtactaaaagcaatcaagcatgaagcaaacactcgagagacgactttgtcagcatgggagacagatcccagtagtttccaacaaggccatacgaccaagcaacaacatcaaggccttagtcaatcaatgtctttgattgacttgaaagacaaaagagcatgcataacaacatcaataacaagcgaccaactgatatgcacatcaccacacatgttgtatgtagggttgaatttgacaccctttgtcactttaattaagggtatcactactctaaagccaatagagtatgggctagatcaagagcaattttatcctctctcagattggattaaggctttagagatccccttcaacttcaagaatccaatgtggcatttgtacactggtaaagaagaccctctctctcacatacacaactttgaagtacaaactgacctgcaaggcattcgagatgattctcattgtaaaatctttctagccatgttatcagaagcagcacaacattggtatctctagctttccctgagatctatcaattcttgggagacacttaagcaagaattctatgaccaattctccccatcaaggcacaaactaatcgagcccaacaatttggtcttcatcaagcagcaagaagacagacctctaaaggattgcgtccaatgatttttagaggaaaccacatagacaagaacactcagtgaagatgccaaggtaatggaaatggttgttgtactaacaattttgagtccactattgagagacttaaaactcaagtcagtagacactgctcaagagtatttagagaaagttgatagttctatcaagctcgaaaaagccattaagaaggtcggtagatttctcaaacataagcaactgaatacaatgtttatcctcttccagaatcccaaaagacactgatcatgaaggtaaaaaagagtcaacactaaattcttccactaaaatagattcctcatttttatttcccaaagtgagctcgagcaaagagacattgatgatgaatcccctgctatttcttaagatgatctagagcaagagagcattgatgaagaatttcccctacttcccaaaatgactcaggagagggggtagtgacgaagatgctccctctatttcaaataataatcaagaacaatggagcaccaatgaagatgtgttctatgagtctcataaagatattgaccaagaaaatgacactgcagactcccaatgagagggatggaccttatattgtcacaaaagcattagaacttgggacaaataggttggagcccgctatgacggccacttaaatccagcgccggtaccaagttatgtaacagggagaatctgagacaatatcattaataaagcaattgttcccaagatagttctcttcacagtgagattcactttaccttgtgcaagtgaatcgattggctctcgaaccgaaaatatgtagtgaagtcatctataggtcaagaggtccattgtcaagttatggtccctacatttctagtcaattagagcatcagtgtagaggggatcaacttagcttctttgataaaaatacaaatttgagaatcttatttcttttttattcaatctagatacaatgatgatgtaattgaatttaatatctaatgaataaaagcactgagtaaagcttgttggtacttcactattattaatcaactcacagacctaacgccgctctcaagcaatgaacaaagcttgtaaagtttgtattgaggtaactacaagcatttctttagttagttaaacactgccaacccacaaatctctagatgagtgcatgagtgctcacacatttaacaactccctaagacccttgatcaacaaagcccaacgagattaggtatgctgagtagccaatgaaggcatttcgccgatcactcgcgaggcaaataagacatagtatatgagagttatgtattcacaaaaaatcatggtatacgagagcgatgtatgttacatgaacaattaaaaagacatagtatacaagagctatccataagacatggtaaacgtgggctttgtattttttgcacatcaaagtcaagcacttttatgatttgatatacaaatatttgaggtcacacgcaagtctaatgattgagtttataaatctaaagtgtcagtgcaagtgctcctatgtggatcgccaaaattgaaaaggaaaagaatgatatagttagtcattaggaaaactctttggaagcaggacgttgcgtctaatagagattttgttgggttttatgccctaaataaaactcttt

SEQ ID NO: 315252 - DNA, 608 bp, Cannabis indica
cctccggtggctggagcagacttccttgccgccttggtcgccagttgcttccttggagcctttcctccggtggattttcttgctgtctgcttggtacgagccattgagagaatgaagtttgattaagaaagagaaaaaagttgtttgtttctcgggaaaatggtgtggtggaaagtattggatttgagtttgtatttatagtaaggatcaagtgttgagatttgttgtgtgtgttctgaggatgaattttgatcgttgatttattctaaatggacggtgtggatttaatttagtgtcttcgtgcggatcttcaaactaaaattttggcgggtcttcaaatttttttgtttagtggcgcgaaaatttgtaatttctgataattctagtaaaaggagggaaccatttgtaatttctgattttatttaagggattattattatttaagtaaatatattggggttatttatcttcctcttctttatttttcattttatatttgttacactaattactatttttacaaatagagcaaattatattttttttttgaataaaagtagaaactttattacttcaaatcatccaaagctaaagaagaaattacaaaa

SEQ ID NO: 315253 - DNA, 3314 bp, Cannabis indica
aaccatgcaacataaaatgttatttgtgttctttattaactagtaaatcagattatattgaaatgagttttatttagggtacaaaacccaacatcatcaatgttggagtgtcatccagcatgtcgacctcctctaggacaacaatgtttggttcttctaggaactggatgggcatcaggtttgctttgtcagctatggtactgctcactacgcaggaaagtgcatctgttgtggtattctattctttttgaaacaagccatagttctttaaagaaataaaagttttccttggttgtcaatgcgcaattggctaattgaacgagtgcgtcagctgttgtgctgtctttgggggcttgccttctagtatagcctttaagctgtcttagcaactccggtaggccatcatcttcttgtattgagttgtatattcacctaagacataacttacgactagctgagagtcgtggtacgtgtataggtggttagcccgtgcttcgtgttctagcctagagccaacattctaagcttcatgttcatcctccttgttagaagctttgaaattgaccttgttgcctcgtgcatcagttgcccctaggtgccttgggggccaggcctgcatcgggcaagtggtcaatgcagctcttggattcttattctcgcttcttctctatctcttgattttcttctaaactctgagagatttggggagatatacttttatgattcgccatgaagctggtgagagcttggctttggtggccatgtttggttgtgaggtgcttttatgttggccgagtctcaatggttcacttgagtatttagcctgatgctccaggtttttgtagaacctacttcaattttgatcggtgtacacgtttatagggtgtatctggaagtatggccttagctttctcgaagccaaaagcaagttgtgggtcagcttctccatgagtgggaactgacttagtgtcgatcagtctcttgctggtgtagtttaccggttgtacactgtcatcttctcttgtgagggcagcactcacagcatgttctgtgactactaggtgcacgcctagctcttctttatgcaacataggtggctgagctaatttgtttcttcagctcttggaatgcggttcacattcctttgtccactcaaaattgttgatgcctctgcttcatgttgaagaagggtacacatttgttgtatacttggacacaaatctacttagtgcagcagtgcgtcctgtttggctttgtaaccttgattgttgtgggcgacttcttcttcattgagagtcgattatctgatatacccgatgggtgcgctgccttggccaaagagcccatacatcactcgattgcagggtgctaagttagcaagttggagcctaatcttttcatgtgttgattttgaaaagaattttggaggaagctctattgtccaccatgtatttgctatggttagattcccaatttttgtggtaacgaccaaggggtcgctgtgcgggaaactgtcctggacaagatcttcttttgagaaagagatcatgggctcgccaagatttggttgcttagagcctcattcttcgcctgccaagaagtcacttttgggcttgtgatagagtgtttgagcatagaaccctctggcttagtttgtcttacctacaatatggggtctgccaatgtcgacccctaagtttcctgccatctgaggtttgggaaaagttggtggtacctgcctgtacacttggccaaagatggtggctattgacctcgcttttagccaacgacaacgattcaaataataaatgatagaaaatataattaagataaagtaagaactaatgaacagtaaggaacagaagattttagagaggttcggccccgttagtttggtaatagcctacccccttgaattgtattaactcgagaacaaagaatacagtatttcctctcttgaagctctcacaatgaaatctctaagtgtatcctcttagatctctctgaagtaattctttcgacccctattctagtgagaatggatcactatttatagggataaatgcttgagggaaggtttcccttttacttacaatatctataattactaagaacatacatttcatatttagaatacatagattgtgggatttggacaacttgccatatctctttgatatgatccttggattgtagggattgctttcttcctttacgatgcaagtcttggaattgctaagtgttgatatgacgctcgaacggtctacccttaccctgctcggtcacgcaaactctatccgtgcatatgtatgctgagctctgttcggaatatctcttcagtcagatatagcaaataagaaccacatgtcactagtatgtgctgccacgtcatagtgcaaaaaattagataacatttgccctcaaagtctgcacgggatttctgaagtcacacgtagacttcacctagattgaccttgcgtctgaacgggtggcacgtgtttgatgcgcctattggtgatccaatataattatgactaagtgtcccttcagtttttgagtaattaatgctctaatagaatcatacctcgagacacgccatttacttgcatgcttttgacggttacccttccccaagcactcaattacttttaatttcccaatatttacttttggggggaaatcgaggcatttgaaattctaattaattgcacctttccactaatctgcttataaatagggcagaaaatcctaataaaccacttttagcatttttctcattaagaaatctcaaagcaaataacacttttctctctcgaatccttcatggaattaacagaaagagccgatcagcgtcatgcgaacaacttcaaagctacgaacagtgagtaagttcctcatctttctctcctttaacgcttgaatctttaattttctgggttaccattgtagaaaattcaatagttttgacttattttaggaaaattataaagaatctaggtttggaactttgagactttgactgtagtagatcatataacactattattgtggcactccagttttaacttcgcgatgttcggttctaattttgctcgttcggggtttagtgaagattaacccttaattcaaggttttgaaattctgggttatgaacctaatccacacgaaattttttcggctttttaatcttttgattagacctggtcggtatattttgcttatttttgttcaatatcccagccaaatactcatcttatgtcttgccttttgtagatgaaccatggtgagttttggggaggagaacaccatatcga

SEQ ID NO: 315254 - DNA, 1253 bp, Cannabis indica
aaggtggcttctatacttttatgctgctatcttctttggtcgtaatatctgtcttttggtctaacaaaaaacagcaggaaattgcttggtctaacatcaaaagtgagtttcgagtggatacagcagcaaagatcaaatggcttacctccattctccgtgaacttcatgttgggtcgataatcaaggcgcggcttccctagctgccaatcgtgcctttcatgctcgtgccaagcacattaaaatagatcttcatgagcttgacgtttgctatgttccatctaatctatagtccaagtgagctgatattcatactaaaatgttatcgcttgattactttgcctactttaagtcaaagctcaaagtgtgttccacaccatttcgcttgagttgggaagataagcaagacaatctccaaacttatagacttttctctcatttattctgagttgagtttttgtactgataagttgacaaagtcattataatcaagggtagaaagaatgaaagcaaccatgataagaactgtattgtaattgagaagtagctcttgggagctgatctccttatcttttttttataatctcctccatgattttggctattaattatcttcgttacttcattaaagaccctaattggggtagattaatacttgtttaaactaagctaaagcttgcattgtttatgacaaatgccccaagtaatgtggcttgactataacttctttttctttgtatttggtcttatctatatattaaagaagaaagcgaatggagctgaattggaagaaaattcaatctcttacaatatgtgaaattagaatatgcagaagttaatgctcagcatttggagacaactgaatgatttaactacttggagtgaagaaagctaactcagaacatgaagataaactaagctctattaataatgtcataaagatatagcctaatgcaaacaatttatctcaattttctgaggcttaaacatatgatacattagtattacatataataattagaagaatacaactaaaccaatttggtcttaattcttttaacttcacttctaagataaaatcagacccaaaaggctaacaaactaaactataataatacaagataaaatataatgatcgattgtaattagagcatttcccaaaagcttcattcacattgaaaataacaaaacacatcaaccctagaaagattacacaaagattaaattcatcagcctccgaatccgtatagagtacg

SEQ ID NO: 315255 - DNA, 892 bp, Cannabis indica
aaaaaaaaaaaaaaagctaaaagtaaaaagttagtataataacttcttatataaggaaattatattaagtgagatagcgctctaaaattgctctaattattttttcttctcttcttaattctctcacttttataattttttttttctctttttttttaagataaatttctattaattggtaaatcagacaaacttcattacatggaataatgctcatcgagcataatcagcaaaaataaacaaaccaagcagcttacaataagaagataaaccctaacaatatattcaactaaattacccataatatattcaaagagaaattatatctaaaaagttaagaataaaatttgattattgttatgaaatattatatatataaatgttcaattcacccaattttttttattattgtcattaattgtaattaatattcctctccttagtttcttaatctatgactcacatatttatataaataggggatcaccccatcaaaataaagcactttctctttgtcttctctcttctcctatttcgttatatattatattttattttataacatgttatcaacacgagtccttgcccacggtaaatattattttgttcaagttcttgaattatttcaaaattatgatacactaaatatatatttatatatatacactcatctgagtgaaataatttcaagaacccttttagttttttcttctttgttattatatgtatgtttatattcttattcttatatatttattctcatgtttatatatatatatatagtagaatctctatctaagaatactctatttaagaacaacctttaatttattataaaaaaaattaagttccaatttgcgccaattataaataagaataacctctaaattgt

SEQ ID NO: 315256 - DNA, 769 bp, Cannabis indica
aaatgttgtttttggtgtagtgattataattaacctttattggagattaaaagttgttaaccaattataaaacattactaaaatttcatagtagtggtagtacttacttcgtttaaagatgctcataatagttggaaagatgtgtataattcgctaatttggcggcatctgtaaattcaagtaaacgtcgtcttataaacagtggaattttctactagattacaaactcactagtcactagtcaatagtcactacatcaacgtgtaaaccaaagctgtcctcgtcattttccacgtactcaccacatcccacgtgtcagcacctcattcaattatatatgtctgtacacttctgttcagaataaaatatttatgcatgccttatataaatataatactttgtccaacgaatgcctaacgtagggaaataccaaactaagataagaagaaaatgataaggagccaggtggaacagccacgtaagcctcaaagcgaccaggaaccgatcaaatacggcgatgttttcattgtaagcgatgaactcgcagataaacctatttctcccgcggaaatgatgcaaaattctgaatcgatcacattgggccaggcccagaacgagagttcaggctttgttggccttgtggacgactcggacatggctggagccaaagccgaagccaaaggtgtctctgtagccgaggagactcatcaagacgtgcctgtggcttgggtattagaaatatatatatatatatataatcatccttgaa

SEQ ID NO: 315257 - DNA, 1881 bp, Cannabis indica
tatagatttcaattttattatgacctctaggtttttattggtgggccatgggcttccatgtgcatgcatgtgctgtgtctttctcacaaaggcccaccattaatccctactactatatcttatatatctctctctctccttcaatattcatatattcagtttcttcacattctctttcttaattttccattcctctcaatctctctctaacacacaactatatcactctgcaaaatttgtcttatcattttatatatatagctctcttcttgccctattgatcaagaactctctctaaacaatattaaggtaagtacatatatataaatatacatattacatttgattacatagcatatacatttttttcatatatacatgtgttttcttttctttttgcagctagagtgagaattaaaataatgaaaaacaacttgagattattgaagcaagaattcctaaagaaatggataaagggtcttcaaatatgtagtactagcctatcatcatcatcatcatcaagtaataataataataataataataataataataataataataagaaaattgtaggagtttggagagaaagaatgccataaagctttcagcaaatttagccatggcttttgccaagaaaggaaacacttcatggagccgagccatcataacaaaagcagctaacaattcttattcttcttcttcttcttcttcttcttcttataactactccaaaatcctctaccacaacatcaacaataatattaatactaatagtaggagaagaagtagtatcagttattattataagaagaacaagaagaaaaagaagaataaagttgttaaacattattctagtggttttttagctaagaaaatggttgagaaaagaagagaaattctgaaaagacttgttcctggtggagaagagtgtttggatgatgaagtttgtttgattaaggaaaccctagattacatattatgtcttaaagctcaggttgatgtaatgaggtctcttcttacttgtaataatcataatgttatatataattaattgtaataataataatgccaagtaatattattattataattaattaagtcatgtaatattactatttactatttagtttaatatttgactgttttattaatattactattattaattctaatatagcttgtatttataagatgaagaaggatatatgaaacaatgtattatgtatatatatatattatttatatgaatcatttatacatatatagaaaattgaaatgaattatactaattagtttcgcattaattaatgcaatgtatgtattagttaactttttctggttatgtttttgtgtgttgatatatatgtgtctagttatttaaacttgttcaatgattatttatttattattttttaattaggggtcaataactattactattatgttaaggaaaggtttgccagtttttgtggaagaccattattattaagtattttaaggtgtttaacactatattgtaaatatttaatagctttttatcttatttactaaatcaaaatgtagtgtgtgaaatctgatattaaattacataataacagtatatcatttttataatacttagttaattttaaagtgtcccttaatatttttctatgtgaaaaacaaaattaatacaattataaaattaataaatttggattcactttgggaggagagagagatagagagaaaccaaattcaatgaattaccaatagtggtattacttatacagtatgtaagtgttattctttactgctttttttagctaagcaactgagatggggttcaaatgtattatggatataaatatgtatgtttatgtgtgtatatatataata

SEQ ID NO: 315258 - DNA, 1157 bp, Cannabis indica
attttaaaaataaaaaaattactttcaaattttttttaaataatttttttaaataaatattttaaattctaactccagcttgaaccttagaattcagaattcggcctcaattccaatcctggacacgaaccacaacctcggctcaagacctgactcaaataaaattaaaaaataaaaatgaaaatgaaagttatagaacacacttttattttttatttttaaaattaaaaaaataaaagtaattataaaacatgtttttatattttaaaaacaaaattttaaaaccaaaaattttactttcacttttgtgattaaaaaattaaaaaataaaagtattaccaaatattcttaaagatttttgtcttttaaactttaacatgtattaaattatacttccgaacgttttaagtcattaattttttttttgaataattgaaattattagatttaaagacttttgtctaattttatttaattttataaatataatgattatttatatactaaattgtaccataaaatttttatatttactatatcatacctctacctctaaactttagcacgtacaaaaactaaaaaaaaatcataatataatttaatatatatcaaaatttaagagaaaaaatcttaattatcatttcacattacacttttgatatttttctttctttttttttttggcttaattcttgatttttttattcttgataatatggaaagtggcattattgaggactgtgggggagtctcaatgtgcaatgagattatatgaaaaataaaaataattaaaagggaagaaaacaaatcaaatggccttattggcttgcttttttgcttggtttatagtaagagtgtttgtttacagctgttataggccccaaacaaaggactagtcacattatatttttcttctcttttggaaaagaataaagaaaagaaatcacacccattaattattactactattaataattaataagtgagtttccttgttctatatataaagaaaatgaagattttgacaataagggttgttatggttagctatcactatcttatcccatgccattgtttgtttttttgagtattaatactaggaggcaaaactcacttttattttagggatattggcggctaaaccccccaaacttttg

SEQ ID NO: 315259 - DNA, 2297 bp, Cannabis indica
ctaagtgagtactcgcacatttttaagttaagtgttcttatttgcaatgaatactcgcacgaatagtgttgtccaaattcttttaacaataatatatataaatattaaaactgatttataaaaattatttttaccatctgcttccagttaattgttcatatataataagaaatacattatgtaatctcttttttttttgaataaaaataaatcattgtagaagtaaaagttactgaagaaataactgtaaattttttgtcaagtaaataaataaaactagcagaaaaaataaaaataactaaaaattaatgctagtaatttgtggttgagtaattgtcgtagttcaacttttaaaatgaggctatatgaaaattgtgagaaaattattactgaatgtgcagaatcaaatcaataaaactctaaataatcaaacaactagtaatgacaagataaaaaaaccaagtataacaatcaaaaataaaacaagggcaaacagagtatataaaaccagaaacaataaatgtagaaaatgaaaaaaaaaatcaatacaaagatatatactggttgaagtccgatagatcgatgtgatctatggctctactccagttctagaacaacaatgtaatccttctttattgattgagcaataataggtacaatacagtcgagacgagattctctattgagtcctcataaagtgtttcaactctcacactttacacttaagaatcttcttcatctacagaagattcttcttacaaaacctaaatctaatctctctctatctctcaatcttttctctctcaaactctcaatctcatctttatttcgtaagttctatcttacttctaatctattccaaaatgataaatgaaggtgatatttgtaagcttaggatcaagatctaaagttggtggctgcaagaaaagaggttgttaagttagtagaaataactaacttaactaaatcctcttagaacgaattctcctcgcggactacggataccaactgaagacacttctggataggatatagtgtgttggagtcaactatctggatctaccgttttaggagtgacaactagacagctggaactcctttctagggaagagttagctatcaagagaactagacccaaagtggacatgatagtcgttcgggaactctcttccaaacttgactattattccacaagactccttctaggactggtaactgcgagggaataatttcccaaaaatgacaagtgcggaaaccttttcatttggaggaactatatataccacaatttcatctagttacttcaaattaaatgaatgacgatgatgaagaatgaatgcggccatcattatttggtgttctaggaatttcagtatactagcttctgagattgatcaagttcaagcaatgtttgaacttgtttaaggttaagaccttagtcccaacatcagtaagattatcttccgtactaaccttctctaaatcaacaagcacttcttctatcttctccctaatccagtagagtctgatagctatatgtttactctttttatgataaactgaattcttacaaaagtggatggaagacttgctattcgaatacatagtcactcctcctatgatttgttttaactcataaaatattccccaaagccataatgcttccttaaaagcttcctttatcgccataaattctacttctatggtggaaagagcaaccacgtactgtaactgagccttccagcatatacagtttggtttgtcaataaaacataggaagtggttaattttctcgtatctctattcgaggcataatttgcgtccacaaatcctttcaactccaattatccttttcctttctcataggtcagaccataatcgtaagtgccctttaagtatctcactaaccatttaagagctttccaatgttccatgccttgattgggcatgaaccggcttaggatgcttaaaatgtgagctatgtccgatctcgtgctcaccattacgtacagtaaacatcctagaaccattgcataaggtacatccttcatttcttctttctctttcgcattgttaggaacgtatgtactctttccatcttccatgtttaacttctgaataatcttcttaatgtacctgacttgctccaagctaatagtctcttccttccggttctgtgagacttcgataccaagtatcatttgaactaacccaagctctttcatctcaaattctctcttgagcttggctttaatacttttgatcacagatttatctttgctcatgatgagcatatc

SEQ ID NO: 315260 - DNA, 552 bp, Cannabis indica
caggcagattcgacaacgcgtgacaaatcagctactgctgcggtgaagcttcagaagctttataggggttatcgcatacggtgtaggttaggggacactgtcgttttgtggcggaagagctctagtaaagttcatgaaatctcactctctttttctctgttttcagttcaaagagtaggattattttagctagcttttctttttatggaaaataataatgtgctgatatggtatttaatacatatatattgtgtgtgacttatttggtttcattggtttggatttgaggattgaggataatgaaaaaagttgagagctttctcaacagatttaaatgtgctatggatttctacaaatcttaaataagatttttttaaaaaaaattataaatatatataaactatttggatgatttcaattatatacactataaatttatagattctttggtttcagtttcagttggattagagagaagtgctttcgaatgggagaacttgaaataagtagctccacagattatattcttttcgtttctttctattgtttgat

SEQ ID NO: 315261 - DNA, 1786 bp, Cannabis indica
aatagacaaatggcttaaatatatttcagtttggcaacttggcaatgaaggcgtttatttcgaagaagttgccaccgccaaaatatatgcatattccaactttctcttctaaataatcatatatatgctaatttaagagcacttccaaccagccggcatatatgtatagctaattacgaattttacctttaaatttgacatgtaccaaatcatgtctttaaatttgaaggtcgttaaaaacttaactattgagattattgatttaaagacttttgtcaaatttcattcaattttactacttcagtgattatttatatactataccatgctccctaaactttgatatctactaaatcctgaccctcgaactttgacatgtactaaatcatgtcctctgaattttcattcatgttagactttttttgttaaaattggaaaaaagtgcttaaatctaacaatctcaatagttcaaggggcatttttaacgaccttaaaagttcagggaacatgattttgtacatgtcaaagttcagagagcaaaaatcctaattaacctatatgtgtatacatatatatatgttgtgattaatactttaaagaaactataatcaccattataaagttttttttactgtacacgacatataattacgatatttttttttatatttaattgtgaaattaagaatttatctttagaaaatttaacagtgtatattttttaaaatagtacgaatacattcctatttgttttggtacccgacaaattttttatagtctattcttatgtagttgtgcagattatagttatttaagatatttttacaaaattttgagaaattcagacaaatttaacaatccaaaaataatgcaactctttcaaagtagcacactgatatattcttacctgtttcggtattcgatagacttttttagtattttttttatggtcgtgtacattatagttatttaagacattttgcaaaatttaaagaaacttagaaaaatttaagacaccaaaaataaaatttaaaatttctgtcgcgtgacttttattagaggagtgtatttgtaaaagctccttataatttataacaattgtcttattgaagtatgatattttaatttatcgagttttattgattttacagtattattatctttgatctagttagtaaatttatttaaactattagttaaatataataaatatggcgatttttattaaataatataatattaatttttattttattaaaaaattaatattataatttattaaaaaattaatattataataaagaatatattttttgtataatttttggtattgtaattaaagtgaaaatattttttgatactaaatataataataccgtaacactaaatttaaagtacccttggaaatactttaatcccacccctttttcttattaaatgagtgtttgttggtcaatatatatatttatattatgatcttaaaactagtaccctacccactgtttcatgtacccttttaatttaacgattaatatttatgaaaattttatgcactttttttttggtgtcatacattcatataattttaatattaattatttattaagttattatataaattgttttaagaaatttttaaatttttaaaaattcttactttatattcttattagttgcctctgatttcacacaatatacgtggaccaatcgaacagggacacgtggatcagataacttgtaaatatttgttaagtctttgaaggccacaaggaagcaccctgggcat

SEQ ID NO: 315262 - DNA, 997 bp, Cannabis indica
ttttttttaaaaaaattataactttattaaacttaatttataagtcttatttaataaatgtaccgataactataaagaaatctagacaaagaaatcatcatacaatttttatttaaaaaaaatcaaccaaagaaatatctttaaatgttatagtaaataaaagataagtagtcaaagaatctcacacaaaataaagacttaaaaaaagataatcatatgattttatcatcgttgtcatcactgtatctcttttatagttctcgcaacattcatagtcaatgttaccatattttgtaaaataaattaaataatgaattaactactcacttttatacatgaatcattctattatatatatataaaatacttatatattttatatattttactaaaaataaaagaaatgaaagaattaaggagaaaataaatagagttatatattttatatcaattaatatttgtgaagctaataaaaaattaaaaaaaatgagagaattaagcagagaataaataatactaattagagaccagattttataatgtcacgttaccgcctcatatctctcctttatatatatatagaatttatgaagtgaaactaaacttattatttttttttatattatataaaatatagtatttttgttaaaaagaagcaagtttttgtaataataataaaaactctaaatagatgtaactctattaccattgtgatatggagagtaaagttactataaattgaggtgttctttagttaatatttttccgcttgtccgcttatcacttatcagacaacacggagttgaccattttttagcgtcaacaatatatataaatatatatattaagggtccaaattctataaagaatcatgggtcagggtaaaatttttatttactcttatatttatagagtataaaggaaatagaacattaacaaaaaatctactttagtcacaacaaaacttgtgactaaaaaataaaaaaaattgtagact

SEQ ID NO: 315263 - DNA, 1018 bp, Cannabis indica
tttatgttgacattatgacataaaagagatgatcatctttttggtcctcctagttaggcatgcgtacactttcaaaatttggcaaaaatatatatgatatgagaaggttatgacaatcagataaggttaaaaaaaataataataaaggaaagaaaaacccaaaaataatggaatcgtaattttaagggaagctagactatattctaagaagaaatatattaaacgtgttattgcgttgtgtcgtatgacttgttaagaaattatatcgtgtttttgtttgagacttaggtatttgtatttttcataaatgtatcattgtgttataaatgtcaactgacacgattaataccaaattactagtcatacaatgcgatgttttaatatttttgtaaataatacttttatcttgaaattggtatatcaaatttagttagaaattatacacatcgttttaatttgctattgtctactctattgtcggccgatgtttgctgattccactataattcatttgtaagaccatctctaatagttacactaatttagtgtaaaatcttttactttttgtagaacaaacccacaaaataaatatattttacttcaaagatctcgtattttatatttttacattaataaccaaaaataattaatttatgatataattatatcatgactattagaaagaatttaaaattttaaaatattttagtaaaaaaaatatttattaaatcagttaaacataaaatattttagtcttttgttaaaaaaaaaaacgatttaattgaaggatttaaacactatagttaatctcaatatacacgactatttttgaaaatgaaaaaacaaggactgccaaaaaagagctcactaataatatcaagcatctcaagaatatcaatattctcaaaataattaaagtctatatagtaaattttgatattcctcaagactaagatcctcaagtgaccaatttgactattaaattactattttacttaatgtttattttcatttatgt

SEQ ID NO: 315264 - DNA, 1041 bp, Cannabis indica
tatatatatatatatttagtaaataaaattataaagaatttttttaaaatagaaataataaatgctgtataaagaaaatgtcaaaaaaaacctatgtatataacattgcatatattattttcagcattaattatacaattaactaaataactccaataactaataattctaaaaaaattagataacaaaataacaatccatatttaatattatatgtattgttttaaaatattacaataaacaatttgatagataattagtgatattttgcattcaaagtcttcaaacattcataaaaaattgttcaatcaattcgaaggaacaatagatagattcattatatgtctgctgagccaattattttctctctgaataatccttcaactcataaaccacttgcaacacaacaattcctctcaactgtaatatacagattacactaaattaaacaatcaaaacaaaaatgatcatatgacaaaaatcccatcaaaactaagtgctgggcaggggctttggatgggatcaagaatcgggcagggtccctaacaggcccaaagcgcctagcagggtccctaacggatccaaaatcctattttttaaatccaaaattacgtttttcgtgttttttgaaccccgaagttcaaaatgtcaaaacaaagcacaagattcaatctttttcataaaagggtcacacattaatacatcctaaagctattgagcgggtcataatgtataaagactactctaaagcatggaaattaaaaagttcaaaagcttgaaattcaataatggcagaagcttaatgaaccaaaaagagagaagaagctttgaacttacccactaagaagatgcagagaagatcatcctagcccgcacaacgagtgtaaactttgagaaagtcaaactccacaaagaactcgggctcgcaaggctatggagtttctgagagagtttttactcaaagaaaacaaatgagaagtaagaaatgaagaaagatgatgaggcacttatatagtttctggaaaatcatttcttcccccg

SEQ ID NO: 315265 - DNA, 2477 bp, Cannabis indica
attttaattactcattttaattttattgtataaaatatagtcacgtaaaataattttttagtgatctgtcattgtcacgtgaataaaaattaaaatttaatgaagctgaacaaacggtaccttaaaaaatgtaaccataacagtactaagattttcccactaaaatataaagttggataattttttaaagtaaattgatagttagagaaaatttaccgcaaattactcattactaaaataaatactcacatatatattacgaattatatatcttccaaatcgatccggctcaactatataactacatacattagggttagtatattcatatatattatacatcttttattgagaatcaaaactagctcaaacaactatatatatatcacatcttcatatatagcaccattgcttggctgaacaaaaaatttcaaaggctaatgctcaaagctcccaatcatgtcttgtgcagccaaaaaaatcgaaatagctaattcaaagagagcaaaaaagaaataacatgctagcgcacaattattgcagagtacaaatataaaaccctaattaattagcaacctatttccaagttcttacactatggaaaattattcaacaccattcgtattaagggtataaaaattactatacattaaaaccttctagctagtcttgatagaaactcacaatccgagtcacgtgactccacaaaattaatcgatcaaatgctaaacaccctaataatctcgtacagtcacgtagttcggatagtgggtttcaatcaaaacctgtaacattactacattaatatatacaaatacattcaacttatattgtcttaaatttaaatcaaatccttcactctagaaattcattagtaatatgtttacatatatgcaaaattatttcacaaaaaaaaattatgaataaaatgaaacgaaatttgagaatttttcaattaaagatttatcttatctttaagagtacactaatgctctccactaatagagcaagtaatttataaactctttcagacagaattaatcttcaataataaaaaactcaaatttttttatcattccattcaaattaatccttgtgtaatgacattacatatttataactacatacccctaacaaattagtaataagtccctaaactttattcatcgtaaaatatataaaataatgtcaatatttattattccttctttggcctagtagtgaaaaatccatatatatatatacttcataaattacagtgatataaatatatatatagtaatttacaccccagatggtgttgatataacactgtaaagaaaattaacactactcatttttcttcaataaatgtaatattggatattacatgtttatatacatatatagataaataatttaaaatcattaaaatttaacattcacagattttgtacttaactacacatcaaatcataacaaaattaatataatacatgagataagacataacaaataattgtactcacaagaagcaaaccctaaataatgaattgagatctgagatggtaacatatatatatatatacaaataaaagtatatatataaaacaaccacaacaatatatacacacaccctacacatataaaaatcatatcaattaaaaaaaacaagttattaaaattgagaaaacaatatcaactataaaaaaccagtttttttttaataacaatattataactgaaatatatatatagatagataggtagatatagggtagagctcccttcaatccaaagaaagatctaacagaaggagtaatggagctcctgatttatgcaatccacaagtctataatcttattttatatataaatatatatatgaagatgatgatgaagatatataggactgtgggatccataactcagcagcacaatccaccctgaaagaacctcttttggacttcaaggagctccactccatatattatatatatatggatctatatatatattattgtgtttgtatataaaaccctagctagagagatatgaagaaactatattgaagaagagaaatcaattatagccaaccaaataataatattgaataggaagaagaagaagaagtttggtttaaaagtgatgatgataatggttttgtgggttggcaaggctttgatgggactactctttctctgtcttttatagacttttctttatgctctttctttctttacttgccctaatataataataataataataataataatataaagatttataaaatatattgagttggtaaatagtataaatttaataattctatttagtggtataagtgttatagtatttataaaattgtaaattattactgttatttagttaattattaatttaaaattaaatttaaaaaaaaaaattagtaaagtaattaattttgtagggtgtaactacaatgtatcgcattaaaaggatgtactgatgcatcct

SEQ ID NO: 315266 - DNA, 1842 bp, Cannabis indica
caaacatgattagagttaacaactgaattaatcaaatacaaatcaaaattctaacaaatgatcgattacccgtatatctttccaaattttatttttatgtttagggttgacctgcttccaattttcatagcctaattgtcatatggcatctaactcctaaagtcgaaactagcttggcgtagtttttgccataatactgtcctttatcactgacaaggagaggaaacatttttccttggtccatcaacttaataattttgttcacctcagttctacctcatttaagtatccccctaggacactctactgttgggtccaaatttgaatctgagcttgaacttaagtttaccatatctacattattgacaaatataataaaaaaatagctataacaaagcaactacataaggaaacataatcaattaagctgtaacaaatagtaactacataaacaaacattatcacaagtaagttaccaattagatacgttttctttttattgttttatctttacctgaatcacaattgacccatatcattagagaaagcatactaaatttcctttccatcactaatcgtggaggaagattttacataacaaggaagacaagccatgaactacgaggactacttagaaatctatgtggataaactgcattcgtagatagatcgagacaaatatgtcttagtttagatttgaattcagaatttatgtagtttactttttccaagcttaggaatctgcaggatgtctgagttttgcatctttcactctcttggtctcgtacaaaattaaattttcaaaatatttttcactacgatataatcgtttaactcgcggaatcaaaggcatgtaccacatcactttttgggaaataagtttcctattctccttaatcttatatattttatggcaggataaaccacaagttgggaaattatccatgtctgcatattccttacgatataaaatgtaatcgtttagacatgcatggatcttttcatacttcaatcctatagaatttaaagtcttcttcacttcatatgcagattccataaagtaattgtcaaatagaaaaaagatcattaaaagcagcttaaagttgagtaaaatatttgtcacttactctattttttgctttgatgttgtaaaaatttacaattggttgtaatcgtagttttttacaaccatcgaatagggatttatctgcatcacttagaaaattatcgaattttttcaggatcattaagaaattcctcttatgctttgtcaagcaagtccaatggatgatcatcaaaagcattaccctcaatatcatctttccccactttcctaatggatataaatcatcagctagccaataccaagtagtataactttaattgaaacctcttaaatacgtacatgatccataatcatcgcaatatttccttttgatctattacaacaatctacacatggacaatgaatatgttcaggatttctagaattcattaaggtaaattctataaatgcttcaaatcttacttgaaatcgtaatgggtctctctcctcacgcatcaaatatttatccataacgaaactcctaacaaaaaatctcaatatttagtaactaattattacttaataatgtaactaactagaattctcacaattatttaatatttatgtattactctaattcatgttttagtttagttcatgttattaaattacttattttaaatattgacatgatacctagtaactaattgtaaatagttactagttatataagttgtaattaaccaactagtttcttacaactaccttgtaattaaataattacttgagttatgcgt

SEQ ID NO: 315267 - DNA, 1606 bp, Cannabis indica
agcaaaactataatagccatcatgtaagcagaattccaataataaataaacactaagccaaaaagagaacaccattgaaaattgatttggaataggctcctcaacaactagactaccaatctcaagaaaaactcatggccaatgtcaatccttcagccaactcaaggcctcatggcgccccatcatcacctcaaaaaactcaagtacagaaggcccatcaccacaacgccccgtaggttctcacaccaccaatgccaaaccatggtgtattaatgacagtgtgattagaataaggattagtaaaggcgactagcattaattattgatattttataactatgcatgattttatttgttgtgggtcccattttttagaaagtgggcattagagttataatttcttaattttggagattttattaaactctgagagtattaattatgttatatgcaaaatttacaatttttatgatttttgctcggtgaagatagaaaatgcgacggatgatcaatagagtcacatgagtgagtttagaaccttttatttagtagagtattcatatattaatttggatcgataggcgggattatagttttggactactttacccctagacctatagttgcttaagtatgaagcaaggggcatattagaatttgctcttttattgagattttgtcttgtcgtggggttggtagaaactcccaagttttgttttatgctggtggtatgatctagttcattaaggaaatagaaataggaaaattaagagaaaatcttaagttattactttctctctctttcaccatcgttcctagaagaactaaggaaaacccaaggttaggctttcatttttcaagccattttcaccaaggattgaggggaactgtaagtcaagatcaaaggtaagccctagatacttttttccttattatttatgaagttataagcttagttctcttttgtatttttgggaattcgagagtttacttttatttgaggttgaattgtgttagagactattttaaagcttgattttagttgtttatagcatttttttaggtgtaataacagctgtagaagatttgaagaagtttggttgagataggaggcagtcgaggaggtcaagatcctctgaattttcgtggtcacaacaggggccgtggcaggtttcaaagaggttgttatgaaaattcaccacaagctcctcaagattaggattaaaggtttgaaaaaatgcaagcccaaattaatcaacaagatgaagagatccagaggctgagataacaagttcctcctgatatgcctcctcagcaagtgcctaccgctttggtcccagtggtgcagtaaataagttttttctggtaaccgcatatgtcatgaaagttgagtagtggctcataggaattcagtgagttttgaatttcatgggtgtcgttgagaatgactgagttacttgtgccaccttcaagttttaggaagacacactagtgtggtgggagatggtgtctctcagcaaggacatcactacgatgacttgggaagcatttaaggatttatttaatgctaagtattataatgagttttttgcaacgctaaaagaaa

SEQ ID NO: 315268 - DNA, 1292 bp, Cannabis indica
tttcgtcatgatcccttttaaaagaaatggatgtcctctgattttagcagttttgcggtctcaaggtacattaacattaaatgaccatcttttccacttctactttgaattctgtccgtaggatcaaatatctttctgatccgacaaagttgatatcatgagtataaagtaagaaaaaggaaccacatttgcactatttcctccattttataaatcctcacaaactcttaagcttctttgttaaggaatagcatagagttttctcgagaatttgcatgccatctctatccttgatatttttctgcaagtttcttctaacttcatatttttaaagagatccttactgcattcaaaggttcacaggccgaagagttgtatatcgtcccaagccccaacttcaaacagtaagtaacttctcttcttaatatcttacatgcttgatacattgtgcttaattgctgcatctcttatttgtatcgttgccatctcatttggttttagtagtttttagggttgaattgtatttgggtcaatattagggttcatgcaatacgtaggttttttcagaatcttcaactcaccaccttcaggtttgataaaattctctccagggattgggactgctttcttcttgcagcaatgtcccactctggttcaggaatttatcgtccagaagatttagaacttgagtttcctacagaatcagcaatcccgtacaaacccaacccttcaaaacccacctccaaattagagttgaacgatgctagggttagggaacatttagtgagaacccaccagtaagataatgctagtcgtcacaggcgcttcttgcaagaaatcatcgaaggcaaacaccgtttcttgcaagatgaagcttggctagaacctcccagtgtgtcctttattcctttggcaaagcttttgtttttacctagaatcacgattgcttttgaactaggtgacttggactttgaaatcatgtcttctaagccccgcaaatcaaagactcctcaagaccccaatgtaagatttgaggcagaacttatcgagtccaaggttaggtccattggggcctacattggtggcatccttcaatcttgcggcattaggtagtggaaggggtgcgttattaggtttgtggcactcggggaattcagttgttactgaaatatcttgaaaaataaataatatttaaataggcatattttattaaatatataattatgttagtaatgaagtaagattatgatcttacttagggtaattattgagaatttactcaataaaataaa

SEQ ID NO: 315269 - DNA, 810 bp, Cannabis indica
taaaccaaataggtaaagatatcccttcaaaatagggattttaacatctttttatctattatttaaattacaaaaaaggataactaaatccttagaatatagaattaatatcttgagtgaatatctttttcttcattggttgttgagcctgtcctggactttgttcagcctaggtatattcttgtcagccttggtatgtccctgccagtcttggtatgtgtctgccagccttttccacatagttttgttgttcagctctctttgcaagggtcaggcttccgtggatgaacatccctctttggtctgacaagcatttttggttaaccaacttgttctcaagacctggccgccctacaagcttcccttggccagacatggttggccagacatggttggccaaggtcttgatgacctacttaactctttttgcttattcttgcttggcagttatgcttgattgctttagaatccttgacagttgacatgccgtacgtgtaaggtggctttgtcctgttattgacaagctgtattccacgtgtcttcaatttcgactatgtggacataccacgttaagtggataaaatttagaataatttggtatttttatttactaatatttgattagttacaacttacttacaaaggcctagcctagatattaagaggttttttagatgtaattgttttgaaaacaaaggatttctttgcaaaaataaatgaaatgcagttcactagacactttttgaattaactaaattttaataatagagcttcaattgatttttggaggactgagaggttgatattgat

SEQ ID NO: 315270 - DNA, 866 bp, Cannabis indica
atttaagaaacttaaaaaggttattggtatgattttctctcctctcctattattgttcttgctcatgatttaagactaaaataagaacatgttattttgtgaatcttattagctcacactaatccttgagtgttgaggttgacttggaagatcacgatatgagtttcatcatcatcattttttacctagctggataggataattgaaattaatacgaaaagaaagtaagaacacttgatgggtgtcaagaggtctttttctattatcattattatttgatttaatatatatactacatcgaggatcctcagggtcggtacaatgataatcaaattaaaatactttcgttgtatacctaatttagtaccagaaaatcaatacatttggtctatgaattgaaattagaggtttgctacatgtacatgaaagacaataagatactgcctgaggttttagtgaaagacagtcaactaagagtgctcttaaacatgaaggcaaatttgagtgtcgactaaggtgaagaggtgtaacgctcgtactttttcataaattattaatttaattacaagcgttaaaatgcggaaaaactgtaatatcgcttttatttataaacataaattattttatatttgagcttagtttggacttaaaagacataataattaataaataaaaaataattgcgacattaatttaataacacttaataaaataaatggagcgtgccctagaccaccctaagttatatggtcatcagcgagtacactgacaagcctccaaggtctcacttgccaccgactttctaagttttacaaccttaatctggacatggtaagtttgataagggtgagctactaaactcagta

SEQ ID NO: 315271 - DNA, 1249 bp, Cannabis indica
ttatcatgacaaggaacaagcagaactccaaatactcccaaaaatcaagggaaatgttgaaagagaaacagactgtagactttccgagattcacgatttggctagaagcattctcatattgctgcaaaacttctttgaaccataaacaactagacactgatgcttccaagaagacaaaaaatgtcatgagcaaacaaaagatgagaaattaaaagcccccttcatccacaacgaaggcccaaaattgaaccctgaccaatagcatgttggataaaagaagttaaaccctcagcacaaacaagaaacaaaaaaggggataggggtccccttgcctaagacccctggatggaaaaatacgaccactgatctcaccattaacattaataggatatgaaacagaagtgatacatcgcatgagtaacccaatgaaaccaagatgaaacctaagtttagacaacatgccacaaaggaaggaccaatcagctttgtcataagccttagcatatctgctttatacgcaagaaaacacttcctccctttattatatcttcttatagcattaagacactcaaaactaatcataacaatatcatatatcaagtggtcagaaatgaacgcgctctgctactcaaaaataacatcatccaacacctcacgtagtctatttgtaatcatttttgcaatgatcttatacagaacattacaaagactaatgggtcggaattcactagtgagagtaggggatttaaccttcagaatcaaagtgataataggctcattgatcgacagcatggaacccatcccgtcaataaacctaagacaagctttgcacacatccgttccaacaatatcccatatttttgataaaatccaacactcgtatatcatccttgtcggggctcttatttggatgcattgaaagcaaggcaattcggacatctaattccatgagcggtcttatcaacacatcaataagctcagtagtcaccaatggttggaccgaatccagtaccaaattcatcaccttgtcagatggttcatgagaagcaaacaaagattgaaaataatcctcaaaaattgacgcaatacaaataggcgactcacccaaactttatttttgtcaaagtgtgtttaggtataagatataataactattattattaaggtcaatcgtgcaattattaaggtgataattacattatatttttttaaaaaaaatgcgtttagatataaaatactaattacatat

SEQ ID NO: 315272 - DNA, 1720 bp, Cannabis indica
tttgctaagtaacgttaattttttatgattatttgtctaaggtttttattgtaaataattttataattatgtatattaatgtaaaaatctttttttcataaataatattgcttacctgaagatatagacaccacttttaacacatggtaagaaataaaaaaattttgagtcctaactcccgatagaattggcaattcgtgttatagtatcgtgtttgtgtcgatacatttataacacgaaatgtgtatggtgaaaacgaacatgacacaattattaatcgtatcaagaccccagattttttatgcatatattaccctaaaattaatctcctaaacctatatgtattaatattggtcaaataggttaacatttctcttttttccaaaatacccttcccattttcaaacagccactatcgctctaccctctttccctctctcggtatcctcatcttctctaaacgaaaaactcaaaccccccaccaattttccatccaaggattcacgcgacctaactaccaccatgacccacgacccaaacaccacccttttccaccacccacgacgattgcgactgacgaccaccgtgactgacagactgaagtcccctttctccacgaccacggcgacccacgaacccaatgtcaaaggttagtgtttttttttaaaataaaattatccatttttgatataagtgttatatgaaattattgttttgttaaatggattgtaggttttagtttggtttatgttttttgttgaatttgctaaagaggggggtttctgggtgaaacctggatttttttttccaaattttgggttaggtctgatggggtacgatgataggacgatataggtctgatagttcaactatgatatatgaagtttgaggttgatggtaatggcttgatataaggatggtagtgggacgatggttggtctgatgtcccttaccccttacttttttttattataggacgatatgggacgataggtatgtatgatatggcacgattggtatatttttgttgtggatgataggggatgatgagggacgatggttggtccgatgataatatttaaattcttaattatggtttttttccttcgaggccgatgggggacgatggtaggtccgatgataatatttagttttttaattatgttttttccttggaggccgatgggggacgatagttggtccgatgctttgtagaatgtctaacttcaagtttcttgtatttcttttagaatacaagaccaccatgccttattattccagtctcggatctctaccatcactagtccatctagcattatacataacgaatgctaaaacagttgaacctgtctaaaacagttgaacctgtccacaaaaaataaataaataaataaaattgtaagagaaaagtgttaaaaaatcctagaaaagccacaaaatcacatcctatcagacatcacattggacgatatcagacaaaatgtcggaccagcacatgaccccacaaaatatcagactatatctgtaataccccggaattaagagatggattagcaaaaccctaactagataattatgtataattgaggaattatattattatatagttcaatatatgtgaaattatatgaattttattatgttaagaccccgttggtgagccaggggcattttagtaattatgacccgagaagggtaaaatgatgaaattaatttaatt

SEQ ID NO: 315273 - DNA, 1293 bp, Cannabis indica
taattaagaccaaaaaaaaaaaattagacattttaatgagatttcatccaaactgaaatgacaatgttaaattcagacggaattttcaaagagtatcaaaagttgaaatcaaaacgctaaacagataaattatatgcttaatgtttaattgttttttcttaaaaatatattattcctaactaaatgataaagttttcttattaaaaaatcatatactacaatttcacaaataatataagcctcattaattatttaccttgggttttaattatttctatttattgcaagtttttttaatttagatcacatatttttcaagtgtacagagcaagttgagttattatatctttaatgaggggccaaaatgttaaagtttataaaattgaaggagtaatagagtgaatatagttgattgatatataggatattattatcgttctggaggtcaagtttcctgattcctcatttcgtgtagacagatagatgcataattctaaaacacacagacgtcgtcagatcatgggtccatctttttcctattacacgtggattattcctgattcaacacgtggatatccttgcctctttcattggttaaatgactttttccttgttttaaaattaatttaatttggttaagcataatcgaaaggcaaataatatcgatttctttttcattagaattaatatattcttgtgatgtcaaatcaggaaggaatttcttaaagtttattttacattttaatcccctgaattttttaatttttttaagggaaatcattcatctatgatatcatgaaaatgactaaacttcttaaatttaagtggagcaaacataaccaaaaattaattatcattattataatatacaaagagataaagtaaacagttttatgaaattgtgaattagaaaaagaaatcgtacacacaagcaaacttgctgtttcccttttttctttttatttgctcagataaaattatacaaacttattgtaacaaaccattccaaaaaaaaatcttaatggtaaaacccaaaaaaaaaagtgaaataagcatctaaattatgcttgtcacatttgtaaagaataaatgtggggtttatttaatggaagaggaaaaaataaaaagaattttatgaaggagaggagaaggtgaagaagaaggtacttgccaattggggtcctcaattcattaattaggatgagaaatcttccaatcttttcttgctttgcccacaatctcactcttggaacaaactatttttcatgttcattgaatgttttatagggactt

SEQ ID NO: 315274 - DNA, 1422 bp, Cannabis indica
tctctctctctctctctccacaaagactaccaataggctaatcatcacctagaccactgttggatttctttcagatgatattttttctcgataaaatgttccaccttaaacatctgttgagtgttttgagcgataaaattttctttaaatttaaattttgcatgtaaaaacttatttttcaagatgtaatggattgtaatgttatttcatgtttttgagttttaaaaaattttgaattagtgattgtttgctaagtttaaaatgaaggatgagaatatttaaaaattttcataagtaagaagaagcctaaaaataaaattaggagccccttttcataagtaagatggtctctcgtcaatgcaggaattaatagtttgtgtatccttatctcgcctaagactatacagtcagaaataagttatacttaatttgagataatatacaaaacagattgtcctctcctttgacatggtgtgatttttgtcattttgtcttttgctgtcttgagtttgtctgtgtttggttactctggatatcgaagaattcggtgggctgtccttagatgtggaggaagaagaggaggagtacgatgtgcgttggtgtcttgtcggccggttcttgaatgctagggttattgatgtacaagccatgcaacacatgatggccttcctgtggaaaccaggtaagggtctttatgtgaaggagttggaacaaaatagatttttgtttcaattctatcatgaattggatatcaaaagagtcattggtgggagtccatggacgtttgaaagtaagcaattaatttttgaaagactcaaggttggcgttaatccgagaaccatcgttcttaatcgacttgatctatgggttcaaatccatgatctttaacatggatttagaacggaaaggatgttacagagaattggcgattatatcggaaagtttgtggagttcgatgagaataatttttttggtgtgtggagggaatactttaaagttcgtgttacgatcaatcttgatcaacctctcaagcaccgaatgaagatccgtcgattgaacaattcggattggttttgggttaattttaaatatgagcatgcccctacgttttgcttcatctgtggtttagttagccatgctaataaactttgtccaaagttgtttgagatatcggaggagatgattgtcaagctgtatggagtcttcatgcgagccacgacccaacgccaactgatcggaggacagtggctacgatcgggacgtaaggagaaacacaggatggagcagtcgtcgtcagccaggagagacggtggtggagcagtcagacttccagcgaaagatgtccaggtgcattgttcgtgtagtaatggctgttggaaattattttaccaggatcttagatcaactcacaagtatgttgat

SEQ ID NO: 315275 - DNA, 1673 bp, Cannabis indica
aaaaaatctaaatgatctcgattgtcgttgatctcattcaaattagataatatatgaactgtaatgactgcttatagtggcggacctaggattcaaagtgagggggcgtaattttttttcttcgtaatttttgttgtttttttgttgtttttgtgcatttgtgaaattatccctattttaaattcctagttgacattatcaatttacaatattattcatttgcaccattataccaactttacatttttagtccaatttaataattctagcttattttctttctcaaagtttgtgtttgttaatttttatatattctcatcactttattttatttttgtttaaaccaatttgtgagtaattagttttataaattaatttccaatattcaatccctgtggagatgataatcgatttatcactttattacttgttgacaattgtgtgcacttgcgtatacaatttttcacaataagtttttggcgccgttgccaatgattgatttagtgaaattttgtttgtggaacttaattactatcaatttggttattttgttttcacttgtttagttttattttcttgctctattttacactttgtttgccttgctttggttccttttgcaaggtacttgagatgtctcatcgacaagtccttataatttggttcaacatgacttggagcccttgtatgaagcatggtggagatataagggatttctaatgagatttccatgtcataggttgtccaaagagtgtcaattagaaatcttcctaaatgggttgaatccaagtacacgagaatggatagaaagaggagatggtaccactaatttctaccaactataattcgatgaagcctattggatgttggaagacatgacaatgagttgtgttgtaatagtccaaacaatgaccatgtttgggaggacaactacaacaatttggagctaaattttgccacttacactcagggaccaaatgatgagaaattgagagattttcaagagttcaacatagaagaagagcctcatcaaatggctcaaccaagttcacttgaggcattgatgatggaattcatggccaaaaatgatgcattaattcaaagacaagcatcatccttaaggaaattagagaatcaatgtgagctattggtcaatgatttgtgtgataaactccatgaaactttgggcattaatatggaaaatgcaaaggaggaagaagaaagtaaaaatgggagaaaattttgagcaattacaagtgctcactacaatccaaagtagtgaagaaaaggatgaggaagcaagaatttcaagtttgtcaacatttgttgttgctcataatgttgtagcattttcatagcaaaatcacccagattttgaaaaaattcagtaacaaaaagtttcaattcctcaacctaatgagtcattagtcatggaagcctacacatataaagatccttttggccatcacctcctcctccaccattggcatggtaccttggcatccatcatgtgcattcatcgaattcaagtccagtcgagcattttgtctattcaatttcatatctcgccaaacttgagggtattcacaacaaagatccatttgtgagatcatatgtaacgccctaatgctaaggcaagctacagtgctttttcaattattgtgcaatctttg

SEQ ID NO: 315276 - DNA, 893 bp, Cannabis indica
aaatagtcattaggtaaattaaatatgagttttgttaacaaaaaaatagttttcctttggtggagcacacactccttgagtctgacgcatagaacaaacccctgacatggtaggccccatgtcaaaatattatgattaattgattaaacatataaacctaacatttaaaaaaatatataaaaatatttaactaatatatataacttaaacaaaattcattatacttttatccatttattttttcttaatcacacacaagctaacttcccatcaatgattttctaattctcatcagtggctttccacttctccaagcttttctttaggtattatataattggtactttaaatattttaatattttatttctctaatctctttcatcataatttattttttcagaatcattttcacttttgaactattttattatttatgatattatataggttgggacatgattttatcctgttaatgtactttcacggaatgtattccgtgatgtacgacaaccgttagatggggtagttatttgatctgagggttggggttgatctagggataattagggttaaaaaatggtaacgtaccctaggacacattattacgtacatgccgtacaacgaaatacattccgtgttttgcatttatgggtacaaaattggctgcctatataggttataactactattaagattttaagaattatggtgaaaaagaagagtggaatcatctccaatagaggtgtaaataagtggtgaaaagctaaaatatagctcatttaacaaaaagtgtgctccaatagtatattaaaaagtgatgtaaatttggcacatagcaaattttgtgcaaaatttagcacagtatttactatgatgtaaaatttacaccac

SEQ ID NO: 315277 - DNA, 1634 bp, Cannabis indica
aattaattaaataagaaaaaagacaaaagatgttaggacaaaagacaccaaccttgtcctaaagacataggtaggcgcctaacttgtgtgatttatctttttgggttaattaattatttaatgtgaatatttaatttgagatatttcaatgctgttgagatattctctcaagtagttgagagattccttataaatatcagtaaatgaattctgttatagatatttatttatttaaacaactaaataatatataatttaattaaagtgatttaactactataaagaggagcctgatttgagaaattagaattatttttttcacattgttaaattcaaaatctataaagagaaaaggaaactattttttctcttagttgttcttgctcatgtgttgagaactcaacaagaacaagattatacactttatccaaatagcccacattattccttgttttggtggatcgattttgaagacatttgtgtgagtccaaattgcatattcctcatcaactggattaagggattcagcttacaagaagttttgaggataccctgataggcttcaagaggtatactctaaacttattgtttttattattttgatttaatgtacactacaaatatagagatcttgtggctatggtacaataataatcagataatacgaaactcttccactgcgtacctgatttagtaccataaaactaacaaattaatgtccttactcatttcttttggatcaaagattaagtgagtctaatcaggtagaattgttgggattaaactcacttaatctgtcaaagtcagtaggtctatcttttctcttatcagatgaatctggagaaagctgttgttagttataacaattggttttgtcaccaacttaaagtgagtcctaccaacaactataaataggtattcttctattctcaaattgatctccaatctccaaggctcatactttagattcagagttaagtttagagagagagtccaaaattatagtgagtgtttgtggagggatgtaatgggaatatcactcttgaagtgatttccctcattttgagacatattttttgttatagtttactatgttgagttgtaatctttggcttattcaattatatattaccgacaattcctaatcaataaaatcatttattcattcatttattctcaagctaagtttattcttatataatttcatctaagttctatttttgattttgtgattggttctagtttgaattgtgttttcttgaatattgttactattgtaacaatcagttttgatggtgatcattcaccacaaataagtttattcttacccctctggcttcatggtaccggaggtgtcttccaagtttggtctgctgaaggcagaaaactctgcgagtctagaactaacatagctcatcgaagggcatatttgggtgggcttggcccactttatctttgataagaattccactaatgggttttgaatgctgacctagaatttacgtgtcaaatgccaaaaatacgaatagcaactttgaaataataaaaaatgatatatacatacatatatatacattttatttgaaggaaaaaaactatatatatgttataaatattaataattatgtggatgt

SEQ ID NO: 315278 - DNA, 628 bp, Cannabis indica
gaatgaatttattctcaagagatgatctgattgacatatgtgttagtttttaattgacatatgttatatttatctattctcttttgttcaattaacatataacgtgttattttattaggttattttgcatgatattccatgttccactataaatcaaaaagagtagttttggagcttgatggtgacgcgcggttgtattttttttctccaatatttttattttccactattttttttttatccgacgtgtaagtaaattctaaattttattttattttaaaaaaaatcgaattaataattctataatttgattattcttctttactaccttctttctttagtatatgttttctaaatatttataactatgcattttttcatatattttctgtcaaacaaattaatagttaattttcttcttttaggaatatgtgaagagaataggtaaattgtttatccgttttatatgtattaagtaatttaaagcaagtgttttgcccaaattcaaatgtaaagatatattttgtcaaagttgttttgcatgttgatatcttggatgttaaactataaaaacagctacttttagttacaaatttttagtcacaacataatttttttgtaattaaat

SEQ ID NO: 315279 - DNA, 751 bp, Cannabis indica
tgttgttttttatggtgtttttatgttgtttttatatttttgtgaaataatcccatttaaaaaagtgtacaagcccataaatgtaggcaaacataattctcctatatttctttaaaagaagtttaaaaattcaatagtgattgtaatttatgaaaagacccattttgtattaaactagtctcaggctcattatttttctcggtcttgattggggcctaatatctttaaacgtgttatattacaattgatacaattaaatatagggtctcatataatttaataaaataacttttgtagaatattgttaactaatcgcaaaatgtcacttctaaataatgatagatatcaatagtactttatagccatgctcatatttaaatagaaaaaataattaggaaattttttttatatatatacattttctttgcaattctaatcaaatagatgaaaagtcatgatatcatctattaagtaagtcatcttggatagtgtgcctatactagtgtagatttttgttgttaagtttgtaacttatgaaatggtacaataatattcaagacaatactatattcatggtttggaacatatgatatggggaatgttaaactctattgttgtatgtatatttttaagtactgtcaagagtaaagatttaaattgaatataaatataggaaatgtttatggtaaagatcttagttttgtccctatggtagggatacttttttagcccttgattattgatctaatgg

SEQ ID NO: 315280 - DNA, 3110 bp, Cannabis indica
ttgtatctttgagttttgagttgtaactcttttcttttatttgtattttgtgctttgggattgtaactctttatttaatatattgtccttgtaatattttgtttagagttgtaattgtcttaatcttttattcatcttattttattcttccattgtaatctctctattatttctaacattagtcattgtttagtctcctctgcttctagtacagttagttaggacagttggccgttatttctgttagctgttacattcttgttctttactacggttaggttgttattaagatgagttacttgattggttaatctaactcatcctccctctggtgtatatatactttcatgttcttcttctgtaaactcactcgatcatttttcattcttatcagtaaataaagcttttccttctctttcattttcgcattagcagtcatatattagtttagtataatttagggaggactcccaggtatgaggcttaccatttagtactggtgaaaattgttccaaatagataaattaattagtaaatgttattttttttttaaaaaaataaattagatgaaaggctagtataataaattaataaaaattaataaaatactgtcaatttttttttagaaaaaattaaataattattaaattatgttatataaatttattagtatgcatattaatttattgtaattatataacgaataaatacactatattattattttaatagataaataaactatatcattaaatatgtataatgtataagttaattatgatttttgtcgttaaatttttttgtctgttaaattttttttctgaactattaagattgttaaatttaaggacttttgtccaattttattcaattttactaattcggtgattgtttatctacaaaattatattcctcatactttgatatctatcaaatcatgcccttcgaactttgacatataccaaatcacgctccttgaactttcatccatattagactttttttttattaaaattagacaaaagtccttaaatctaaaaatctcaatagttcaggggtttttaatggcctcaaaagtagggctgaatattgggcgggtgtaccgggattcaggtttgcgggtttcgagttcacgggtttcgggttcaaaaaaatgaaaacgaacccggacccgaatagggtgcgggttgacgggtcacggattggcaggtttctgttggccgggttgaccgggttggcgggttgacccggtcaactcattaaaaaaattattttttttattcaaataattatttctttaaagtccataaaattcaaagtcgatattaatgtacataactaactgtatatcatccttacatagctaactgtatatatcatcctgtgagaatatcaaggtacttcacttatgcccttgtgtttatttttgtaatgtttgaatgctaagatgtgaaaaagaatccaaaatatttgcaagtactcatgcatgtagtaatattgtcatggatatcatatgttatatcttttttatgggtatcaagacaaatacatgcaaaacagagacgtgtgaggctcgtatgcatttttttgcagagcctaagaaataatatcatcaatggtgagttttgttttggtataatattactattgggaatgattatattagtaataattttgtttgtttatgatgtatggttacagttaaagatttgttcaatggtgagaaactgtaataaaaaaataaaaatatatataatatatttaaattgcaggttggcgggctcaacccgaaacccggtacccctaaaaactcaaccggcgaacccacccgaagggtaccgggttgaacccgacccgcccgaacatttttttttttaaaaaaatttgcgggttcaccgattcgggttcgggcgggttgctcgggttcgggtcgaacccgctcgaaatgttcagtcctacttaaaagattaggagccatgatttgatacatgtcaaagttcgggcacaaaaatcctatttagcctattgtatataccacagtacttgatatatcgtagcacaaaaaattaacacacgtattaataaaattatctaccacaaaaaaattctaacaaaaataaaattagtatattaatactcaaaaagtatatacaatgcttataaaattatatataccaccattaaaatgtgtacaccacgctaaaaaaattatataatcattatatataataaaataaaaaccaaataaacaacaagtatatacagtttaacctctatttaagaataccctattcaagaataacctttaatttgttataaaaaaatcaagtcccaatttgggcctattataaataagaataacctttaaattgtaattagttatacaatttctaagtgctgtattaacaaagtatacctctatataagaataattatatcttaatacatatattttataaaattatttatgtagaattagtaattttaattcaaaattgtaatacatgtataaatattatatttactcaaaaataattctattatgatataatattaaggattgtttaatgtcattgttgttacattattatttttttttgatattttgatttttttttcttgtgtaactctatttagttataacctctaaaaggaatataatttgcttagtcccaagtgtattcttggatagaggttctactgtagatacatccagggatgaagctaaaaaataatattaggtggggcgaatataataatagaaatttatatggtacacccacataaaggaatattctgttagatctcctatctgtttcggcatccaaaaagatttttagtccaattttttttaatctcgaatattatagctatttaggaccacttgtaaatttttaaaatttttgaataatttatagtaggggtgttcgcggtgcgggtggtgcagtttttgaccattttttcaaatcaacccgcacatgtagtttttctaatttcccaaaccaaactgtacccgcaccgtgaaactaaaaaatcgcgaaaactgcaccgcaaaatatggtgtggtgcgatgcagtttttgcggtttttacagtttggactatcaccaa

SEQ ID NO: 315281 - DNA, 802 bp, Cannabis indica
aatacaaaaatatgttgcgttcgttttttagtttcatttacgttgttttttttatcattctaaaattaaaagttaaatgtacaggcaatataataacaacaaaaataaaacaatgaatgtgacaagaagatattgaaaatatgaagaaaatttatatgtattgatgcaataataacttcaatagctatacttactattcattaatgagacaaaggagaaaagccataattttgtataaattatgtaaaaactcataaacaagtaaactaacaactgtcagatttaaagattattctatacagcatcatgtagtagtggtgttataaaattatcaataggaaaagagaatggtcatctaccactctctcctagctaacttccttatcccttctttcttttcttcctcttgtgtaagtttctttttggggttgttggctatgtcgttgattacccttggtagagtgtgttttgggtctattttctgctttgggtcataggtttctctggccttttctttgggtttctttttctttagttccttttgttgtcttggttgtggggtactcctggttgtcgggtaggggttggttgagggtttgagggatttggtgaggttggtttgtttggtagcttgtcctttctttgtttgctttcaatggctttagttaatgccaccaactcctctactaatggaaagtgttattcttatgaggaagcttcagtcaagatcagtccgtgtgcctcttctcagtaggctttatccaccttttgtcttcttgggaaagttgtggccccaatggta

SEQ ID NO: 315282 - DNA, 985 bp, Cannabis indica
aagagtttggcaaaaagaagctcattccaagtgtcttgaagtccaggcaaacaccaatgcacacaatcggcatagctaatgggattggccaattggtggggagtgagtggattccattgcttcttgtagattgatgtgtgtgcatctttacggtagcttgagagttgtgtgatgttcagaaatgttattggatattttgacttactcaacacatctccactcacttttagtatacttcttctgtctgaaccccaataatttggatcttctattatcttcgtttcgttgtagcaattccctcctgctttcccaccccaacctatgctcctacaataataatgatcaaaacagagtattggtacaatcaatcaacttaatttatatacattattgttaaaaaaaaaagatacttatgctaagcaataatctaattatgttggtaagatcaataagaatctaattaggtatatagttagaagcaattcaattaaccccgatcgaccaaataatcaaccgaaaaacgatgactcaagattccccattcaacaaataatgtatcaagtttgacacatcatatataaaaaagttgtgttgaaaaagatcgagttattaattaactctcaaattttcatggttttattagatgatttacactaaaatatctttcttaaatcatcccaaaatactggcataataattagcatttagtatataatatactcacttgtcatgaataggtgacatgcttgtgaagaaaacccttgtcttcttagggtccatattgcgccgtacccatctcaacatactcttcatagccatacgataagcatcatcagtcgacagctcaacaatatccttaattttgtcatcaaaaggttttcgcctgaaaattttaataaataattatataaaataaataagaaagaacagcaacatatacattaattaattatgtatgtatgtatgtatgtatgcatataaatat

SEQ ID NO: 315283 - DNA, 640 bp, Cannabis indica
tgtatgccacatccacgtaagttgatccctgagtaatagggattgagatggtgactcacgatgcgtttagttgaattcgctaagtgttgctcattctgcatggctcgtcattatggacatgccagcgaggcatcctgctcggcatgttgatccgaccagatgctctaagtagagtccacgtgttaccattctcgtgatgccacgtcggagtgccaattttgggataacactaatttttaagcgaatcgaaaagtttagatttttaaggattttctgattttcttgtttgaacatgtttgttttatcatatatcatttgttagaaaatacttttcatgaaaattttgcataaaacaaacttttggtaagtaagttacttaaattgaccttttatggatgagtaaaatttgctcaaatctctcattttttgaagctttttatgtttttctagcttttacacttcatattaatcatgtttaagctaatgcaaaatcaattttttaaaaagatgcataacactcatttttgtacatatattatttttgcttaaattgttaaaaaacttaccaaaaagtttcaattcttgtcatctaattgatttaagtgctgaacatatttgttttatcatacttgaggtatga

SEQ ID NO: 315284 - DNA, 1539 bp, Cannabis indica
gttcaataaaatttacaaaccgcccaacccgaataaaccgcccaaaccaaaccgaataaaccgacaaaaaatacaacccgaaataatataatgaaaatccaaaccgcccaatgaatatattgggtggtttacaaattattctaaaccgcccaattaacccgaataaaccgaattaaaccgatttatatattttttaataaaagtgtatatcttatattatataaattacatttattagttaaattattttgtatttaaagtttggacattttaatttttaacttaaaacttagattttatagttaataatttttaatgtatttggatattgaagttaaagtttaaaatctacactatattatcactttttttatattttattcaattattttatgtttactcaattatatttatcttatattaaagttcttaaaattaatttaaactatagcattatttaacttgaaatataaataatatatttttattttttaacttttttgttacttgaattctagaaacgaacaataataattataaaaaaaaaatgaagaacggtttggacggttaacccgaccaaaccgacaaaatcattgggcgggttgaactttttctaaattttcattgggcgggttacgattaaattttgcaacccgatatttatattgggttaataaaaatatgctataacccgactaaaccgaccgacgtacacccctaattaatagtgtttagtattttttaaatgtgttaatattgttattggtttaattaaatatcatatttatataatttaataaaataattgttaagaatattcaatctaagatgacatatctaaaagtgttatgtattattggtgtctaatatcaatgctcttaattaaactttctattaatatttattaagtgtaaatagcatcacaaatacttaaagtttaacgtttgtaaataatttaaattcaatatttatttttagcgggtactaatatttgtaaattgtaatttttattcaatttcatcagtataaatttcgatttgaatttattaaaaaatactttgaagtaattaatattatatatatttttttagatccaataatttaaaatttaaattttttatgtgttatatttaaaacaataacataatttatgatgataaattaaaaaaaaatacaattttataaatattaattatttatattgctaaaaaaataaatatataaactatatttattaattcacatcaatgtcaatctcattctatctcttagcacgaggcaacggattttgtccataactattattattcctagccgttggttttgatgtattctatgctatggtcatttcattcattaaaccatctttataaaaaaaatttaatagataaaaaaagtgaaaaaaaaaaaaattctgaactattgagattatttaatttaagaatttttgttcaactaatttagtaaaaaaattttaacatgaatgaaagttcagagggtatgatttagtacatatcaaagtttgaggggcatgatttg

SEQ ID NO: 315285 - DNA, 1025 bp, Cannabis indica
caccccccccccccaaaaaaaaaatcatatctcatttttcaaagtcatttgtaactttcatttcatttcttggctctctctctcttttgcgaccatgagtcacaccgtccttctcctctactctctctcactctgtccctctcctccgctctctcgtggtagcataaaggtaagcacaacattctctgatttggtttttaaatttttattagctagccatgattttgtttgttgatattaatttgtgtgtgttcgaaataatccaaagtttgcaatgagaagaaagtttcaatgaccatcaagtgaaaagcaattcgaaacgtgtaaaagaaattttttacgaggatgaagaagagcacaacaacggtggaggaggatgaagctgtaaaagttttacagcgaatgcgatatatgcgagaagtggttttgaggaggatgaagacgataattttttttgggcaatccactatatatagcgactgtttaaaaccgtcagctatactataggccactgttttaaaccgtcgggaattcttttataaagatatttttctatcgtcgcttattctaccgagtatttgcgatgctcgtataggcgacgattttatagaccgtcgggaattctttactcgacggtgtaaaaatatcgagaattttagattttttagtagtgaaagttatttttatgagagttcccttagtgctcaaagataagggaaataagcttttggacaaaggtgataatactttgtttaagtcatggtgatcccgactaatctacactaaaggttttgagagttcttttcatctttacatgttcttgtatattatttatatatacatgtgttatattacatatgtatgttgtaatttctcttcttctgtttttcttatatatataatgtattttcttatatatatagtgtatgttattgtaacatttttgtaattaattttgtaattcttgtattattttatagagattttttctattataaacttaaaatgtaataaatttacattta

SEQ ID NO: 315286 - DNA, 614 bp, Cannabis indica
tttctttttttgctggaagaagtgaaagtattattgcttttcaacaagtagatataggccaccaaattaacattttttccctttaaaaaaaattgaaaaaatcactcttcccaacaaggagtacaaagctctttgccttttggaatttatttattatttattattattattatgttgttgttgttgtatgattcacttgatccaaggcaaggcattaaaaatctaatgatacttgccttattaaagaataactattgtttttttctttgttgtttgtgaaacttaattattaaaaaggggtttagtggtatatgattgtcttcctcccaacaaatatattttccgcatgagattctatgcaccatgattggctttgactgctttttcttctatggaaatggaagatcttatttttgactctgatcatatatagtcccatctctttctttctctgcaccttatgaaatttcaatgctactagtatagtctttcacaatcacaattgtaaaaagtcatacattaaggactcgtttggaacgccgtattaggtcgtattgtattgtattgtatttatattgaattggattatatatcatatttttatataatactat

SEQ ID NO: 315287 - DNA, 617 bp, Cannabis indica
taatttttttttttttaatctttccttttcatttatcattttttgtttgcttcttcttcttcatcttcatcaaacctaccaccaccaccactattaacaaaaatcaccacccaccacacaatcgaaactaccaccatcatcaccacctgtcaagatttcaaatcgaaatcaaaatataattaaacaaacccatatctaaaaaaataaacttacatctgaaatgtttcacatatttcagattaaaaatactaaaaataataacaaaaattcataatcaatctcaatctcaaattcaaacacaaaaaaaataaattaaaaaacaatatgggtagatcgggcgagagactgaacgagaagagaaagttgcctctgcccaagtcagcccagttgtacatcgacgttggcgagcccaacatcgaccataaacgatgcatctagttggccacaaacatcttcagccacgaaggacgcatctccgaccactaacaatacatctccgacctttctctgtcccgtgcgaatgtaaaagttgctcaaccgctcggcctgctctgtttaggccaccgtcagagggaaatgacctcaccatgaggtttttgagttctcgaagcctccag

SEQ ID NO: 315288 - DNA, 946 bp, Cannabis indica
taataataaaaatggttaaacaaatcccaacatgttcaaaatatatagtagtacttttattattatatgaatccaagccttttttaacaacttgagaggtttcttattatcattattaattatttttaaaaatatatacataatgataaaaaagtaaagaattgtgtaatcaattacacaaaatgggtattaggggcaaaaaaatggaaactaccaattttcttttttaaagttttgagattgtgacaaatcataatgtgatcttgaattaattcatataaaacataattaagaataaacatttgttgaagaaaaagtagactttaaaacatagactagatctagagagagatagagagagtcaacattatctttttatttggttatttaacttatttcatatgactatacaaacaaaaaaaaaaaactaaattttaatatgataatattaatgcaatgcaatggaggcttgtgttaagttttcgtagttcttaagttaacacagcttgcttgcatgttatctagtcagcttcaaatccaatccttaattacaaaagtgaaatcactttttaattgaacatgttatttaaaggtgcaacaaacctctaattaattcctcttatcttaagattgattaatcaaatatcctataataattaaaaaaaaaatcatttaaaataatctggtctaagagatttgaattgaatataaatcataaattgtttattggtgaacgtacgaattaaaatatagaataattagcttttttagtccctgtacttatgatactatactatgatgccccttaatttataagtgtagttaaaaataccccctaaaatatatcagttggaataatataatctttttatctaattctgttaaaattgactaaagttgattgttaaattaataatgtggcattatacatagatagtagttgaaa

SEQ ID NO: 315289 - DNA, 627 bp, Cannabis indica
ctgcgtactgatctaatatacatggattttttatttatatgataaataaatattaagtagcggttgaccgtttggtctttttcttttttggcgggcttaaagttttgattacagaatgtccaacaacaacccaggccgacaaatgttaaatggttgctttgctttgatacttgtgagataaatactctttaatattagtataatttaatgtaataaacattatagaaaatcatgactaaccgattataacaatactctttattatattattttagaaaaagattatctaatattattattgaccgatgacttctaagatatatattgaaattttaagtcaatttttttttgaaatagtcctccttttaaaagtttaagaaacacacattaatcttgaagtctattagtgtcgattgcaaattatccataatttttcttaggtattagagcattaatggtaaaattttaaaaaatatttggtgtggtggacagtggttatgtgataaaatattaagatgttataccattgaaaagaaaatgatatcattctaaaaatttgtatggatactatattgtagcattgatgctatttattattttttatataaaaaattgaagctaaaatgt

SEQ ID NO: 315290 - DNA, 1339 bp, Cannabis indica
catttaacaaaacacagggtccattttgtcatttaacaaaacaagggtccaattggtaactttcgtaaaacagagggtccaaaatggtatttacccttttttcttttgctgaacatattttgaatattaattaattatttaaatgatgtatattgttatggacttctccaagaagtagtacgtttctttctttggtctttgaatatttttggactcacaattaacaaaagggatattggtggcaaaatcattcaaattttatattttttaacacttattacacaaacggattttttaacagcaaaacctatcaaactaacattatgttttactctttacacttccatctaaaaatctcaattaagtatcacagtggactatccacgtgtacacaagtgtagacataacatttttagtggtccacataatattaattatttaaaattataataaattaaaaaaatataaaaaataaaacaataaattatttcttaagactgatgaagtaaatgtgactacatcttaaggtaaacgcgaagcaaaaatctcaattaaatgtcaagtgaacgtgactatttcttaaggcaaacaagcaaagagaccattacaataaattatttactaaataatttggggatattttttaatgcttttctacttttatcttttttatttttgttttttgttaattacccataaaaaattgaaagtgtcaaagaaatgactggtaataggaggaagtgcaatagtacccctattgctagctagtctaaattgtcatatccatatcagacgttttttttaaaatataatcacttctcctataagtgttcccaaccgttggatataattatataacaatgaatagttatgatgaaggcagagtaacatgttactctctttattaggcgtgatcgaatcagctcatatatttgtgtgggtaagtatgtctatatatgtatatagtgtatgtatatatgtgtttatgttattgtattttttttgtgtatatatatatatactagaagagagttacgtggcgagccacgtaaatatttagttttattttaagttctaggtagtttttagtttaaaaatttagtgactaattgtaatattatattataaacgacatgttttataaaactaattgttaagaatgtcataattgtgtatataaatctataatatacacattgttattcaaatgttttatgtttataaacgtatttttttctatatagtagtttaaattttatattgatgattctaatttagggtgggtattggtgttagttttttaatttaaaaaagtattgtttaatttttgggtttaatt

SEQ ID NO: 315291 - DNA, 1767 bp, Cannabis indica
aaaaaaaaaaaaacaatcacatacatataataataataataattagaacgtatttagaaagtcacgaggagattaaaattcaatttcattaaaggattatataattttattacactataattaggattatgtgtaattaaaagtaattaattatacaattttacatatttatctaactacgtaattataatataattgtgtaattaaagataatcgagaggtctcaattacacattttaattatcatgcccagtgagaattaagcgtaattactcaaatttttttactttaaatattaataattttttatataattactaactattttcccgaacaaagcattaaaatttcataaataataatcacctcaaatctaaataagtgttatattttaaaatatagtattattactatgtgatttattttttaaataaaggtttataaataaaagtaaaaacccacaaaaaaataaaataaaataaaagtagaagatagcaatccaatttatcaagaggtaacctcctgcagcaaaacgttgggattgagcctaaattactactttgataattacattatttaataattacataattacttttaaacaaacccttataaaaatacaaaataaaaacaataaaagttctagtaattaaaaaaaagaatataaatatagataagattgggagattgggcactactcctaatgctgtttagatttaagaacatctccaataaagagtcataaatatcgtgtattgttattttttagaacattttattaaaacttaactttaacaataatgtaaaatgttagccaaatttgagtcttgtaccaaatttagcataaaagataacatggactaaattttagctcgcaataaatatcatattttttaatgatctatttgtcactcattaataattttttttttttatatttataagatattaaaataatataaataaaattaattattttgtatagttttaatgagcattaatgatagtattgatttatagctaattgcactatgtgcattgtaacacaaatacaaaaattagaccaaatataactttacgatatatttctgatcaaatttgacttaaaatatacactattcattggagatagtctaatttgtatttatagacctctatatctatattaagtattttttttttttattattatagtagcgtttttatatattatatttttaaagttattttttttaatatagggtaaggtattacaatcaactaataatttaagggtcttgagtttgaatgatgggtggacaacatccaatctaatataataccgaaccaatctaatctaatctaattacaaaaaattgaacatccaattacaattggattggattggatcttaaaagttagattgtaattagattgaatcgattaatggatgttattctcaaattctaattaaaaattgatctaatccaattataattaaatatatgaaaattattatatttattataaaattttttagaataaaatcaaaagatttattaattaagaatttcgtgtaaaacaatagaacgcactttagcggaacaatcctccaacagaagctacactaacctgtagagaaacaagagcctcttgccaagcaatgagccaacttgtttgtagatcgtttaacaaaatacaactcaatatatgggaaaactaaaagcaaattacggacatcttgaacaagtaaaccaaattgagaaaccatagaaaaattcttggata

SEQ ID NO: 315292 - DNA, 1505 bp, Cannabis indica
ttatgccgctaaaaataaacattgggattatgccacttacaaacttgaaactttaaagacttataccactatttaccctaataataatgataatagaaataaatggtaagaagattttcaacgtagttttgaagttaattcttcatagtccgcgagtctatcttattctgaggttgataaattgtatacaaaatacaataaattgttttacagatagaattcttttctttctcaaattggtcgtcctttgttccctaagttttgtctttatttatagaagtctaggatgatagttattctcttgggatttttatcacttgtaaccataagtgaaacataaagaatccccacattttatatgcacatgagataattacacaagtaactttccagaaccgtacttttaactttatttacataactgcctgattatgctttatccttctcgcagtacaacaatactcttctagacactttattgtaagccagcatctaagtatatgttatagtattccttgcattcttctattaatgttgagtgaagtatacacgagatgcttatcgcagcatgacaattgcgagatgaatcatgttgaaggtgttgtatttagtctttcaaccatgtatgtgggtcaatgagttaggagctctttggatcactaattatctaccctttccaaataattctattgtgtattttgtgtatccctagatggaatttctttgttcgtctcgctggtctcatcaattggtagtttttattcatgtcttgccattgtcttcaagaaggtgagttcgaatatttctactaactgtacttcccgaggcgaattgtctgaatgtctttattattccatgattcgagatggttcatattcctgctatattacatagcactatattgctactcaaaatatgggcataacactataatatatgatatttattttgtaaggcatatattaaatgataaaattgtcattatatattttatttttaataaataaataaaggtaaatagaagacattatctttaacgacattccttagaaaattggttggagaagtattcccttttttttaatcaagttctctcttacctaattttaataaattaaagcaaaaaatgtaagggaattaatgattatcttaccattgatttacattgcttattagtaaatgggtaaatagcgacataagtacccaaagttttgagtttgtaagcggcataaacccaatgattttttttagtggcataagtacccaatgtttgtaaaactgtaatttttctctattttcgtcagtacaggctccgttttaaatttattaaaaaaagatttggaagtaactgatactacatattttcgtccagaccaaataatctagaatttgagtcttacatgtgtcatgtttaagacaataacagactctatactaataaaactggaagaaaattacagttaaacattgggtacttatgcagctaaaaaaaattattgagttta

SEQ ID NO: 315293 - DNA, 2463 bp, Cannabis indica
ttaaatttttcaaaatttttcaaaaatttataagatatttagaataactacaacgaagacgactataaaaacaataaaacgaaatttgttttcaaatactaaaacaagtaagggtgcatcggtggaccccttttagagggattcgttgtagaattttcttgataataataataatagtaatggaaaattctacaatgcaccctcataaaagagatgtattgattcatctctatctattttgacgtttggaagaactttttagtctaatttttttcgtagtcatatacgttgtagttatctaagatattttacaaaattttgagacctttagtgaaatttaacacaccgaaaataaggtttaaacagttagttacacacatgactcttttattttatatgcgtgtataatagactgtttgaaagctactttttatgttgtaaatgattctaaattttttaaaattttgaagtatgtcttaaataactgtaaagtacacaattaagaaaaaaattatactaaaaaattctttcaagtgccgaaacagatatgtggtgtatcagtgtatcttttttcagatgtgtgcattatggaagcatccaataataataggtgtttctacaatgcacacactaaaatgagtatattagtgcaatctttaactgtttcggtatttagaagaattttttagcttaatttttttataatcgtgtacgctataattatttaagatatcttgtttaaaataatttataatatataaaattcaatgttcaaatcgtttatttcatactcgtataaaataaaaaatttaaacgtgtaacaaactctttcaacttttattttttagcatattaaattcttttaagttttttaaaattttatagaatatcttaacttaaataatacataaatattcatgaaaaatatatatatgaatatttataaaaaataattaataataatatataaataagacatattgcatgttcatttttttttttaatgtttgacatattgcatgttcattttcttttcctttttcgtggttgacttgacacttcgtgtttatcttcaaagttttcatctaacaaggaggagaaatgttttttctttagaaaataaaaatatttagtaaattcgtacattcgtactcaaaaaaaaaaaaaaaaagtaaattggaaaaaaatcattgcatgaagatataatatataaagcgagatcagtaatattagatttaaaaatgttcacaaaatagtaaaagataactctaggtctaataagccataagtgataaaacatcataaagagattacaaagtgtttgataaaaacaacaatgaatttacaaaatggaaacttgatctatcaagaggaccaaggctttatttatatagccaaagtaaaaccagagatatgatacatctcacacacacaaccaaacaactttattagctattaatcgttattaccccccctcaaactgaaggcagttgagaccactttcaatttgattttgagattgtggaaacgattggagaggggttttgtaactaggtcgacagaaggaacatagcgaacttctaattgtcgtgctaggagttgatcatgaacaaagtgcatgttaatttcaatgtgtttacactgtgcgacgtgtgaaacactgaattggcggcaagagcagcaacaccttggttgtcaacccaaaggataggggctcacgaagtttgatctacacgaagaaagttacgggtatgcacgaagttgatgctataactaactaagttgacagcccagatggaggccctaactaagttgatggttgctcaggtaaaacaggttcaagttacttgtgagctatgtgggaggcctcacacatatgacacctgccaggtagatgtgaacagtttgccaatggatcaagttaaagccattgggaactattctcgaaataataactatggttatagccaaggaggggtcgtcgtcataattatcaagggtagtcttcaaataagcaggagcaaggtttctaccaacagataaatcagccccaacaaaaccaacaacaaggttctagtggagggtttaacattcaaatagatttgtaacttcagttcatgacggagaccaggtcttccattaggaccttagaaactcaaatggggcagttggatactcaaatagatactcgctcccaaggtaacttgcctagtacaacggaggtaaacttgaaagagaattgtaaggcaattactttgagaaatgagaagaagtatgatgagcctagtgagaaacaaccaatggaagaataggtcaggatcaacaagcactggcaccagaggaaaagaagattattgctggtcttacattaaaagaagcttcaccatcaattaacattgaacaccatgtcaaaattccttatccgcaaaggctccgcaagaacaacatggacaagcagttttc

SEQ ID NO: 315294 - DNA, 526 bp, Cannabis indica
aaaatctcaaactctatttcaaaaattaaaaaaaaaaatacaatacttaactaaaaaaattaaatatacatgtattgcacttaatatcacttaattgaacctaattaaaaagaaaactaattatacgtgcattgtatgtaacatcaatatgatgtatagaataaatgtgaatcatagaataaaaaattaagagtagagaataataattataattaatagtaataaatgaaaaaaatttaaacatccatatttattatcattgataacactgttaaaatttgtgttaattattgggactaaattgacatttaaaacgctaaaagggtctatgtcagaaaaaggaaaaaaaaaacctaaggctgtaaatgcataataaaaaatctcaaggactaaagtgacagtcatgctaagataacaaaattcgggtttgcccctttcctgaaccggtttttgggtcttacagtacctgcggaattacctcctcagttaacggtgggttgagctctgaatagagagagagagagag

SEQ ID NO: 315295 - DNA, 1547 bp, Cannabis indica
atgcatcactatttatggggctagtaagcttggagaggaagagctttccctctcgtcacaatgcgtataaacagaaagatcgttggatcaatgctgaatacaaagatcgtgggattgatgctggatacactgatagtgggatcgtgtgtattccatatccctgtaatctgatcccttacttatagggatttcgttgatgactcacaatatgaaagttgaattcgttaagtgttggttgctctgcgcggattgttgattgccttgctctgggcatgccagcgaggcattctgctcggactatgcttcccgagcagatgcttcgagtggattccacgtttcgccattcatgcgatgccacgtcagagtgcgaaaattggggtaacacttatagtgtgtgtgattttgattcggatcacatatgtagataaacatgtagtaaatatattttgtataattagattatccatgagtagatcgatatataataaatatctttcattacttgtcgtttaccatgaaaagtgtttatcatataactataatgatcattagtagatctactagaatcttgagtatacatgaactcctttttgtgttcatagagttttttgattcactcgtgaaagtttcttagagaagatgattcttacaacttctattttggttgcttaataacatgattgcttgggaacatgttatacaattgtgaaatctaagcttcctaatggatcaaatattagttcccttaaagtgttaattctgggagtgctaacagttggatccaaatctataataagttatagattaactgttcacattgaattaataataaataagaaatcaaaagatattagaagtattaagttgtattttgaccaactctaattataaactaataattggagggaagactacttatattgattaatcaatgactacaagtaagaattctataaatgtaattctatatattcaaagagtttaatgccatatttatattagggtaacaattgagttgataaactagattattttgttgatgagattgattgtaatctttagtttattagagctttgaaatataggtccatagccctcaagacaactttatacattactgtacaggcgaaagtttatttgatgaatgaattttgggtacgaattaatttccataggaaataaactcttaagagcaaaatagtaatttataaaatcattgttttaattaattatggcaattatgaattgaataactaataatatttaactatttagttttattagataaaacaatattaattacttaaataaaatatgattattaaataatattaaagagataagaagagaagcaaaatatattattttagagaaaataatgttaacgcaaatttttgtcaactaattaataagtctttatcgtaataaattagacagcgaaactataagcaatttgagaataataatgacacaagtttttttatgtggttttgcagttaactctacatattccacgagtctatcttattaagatatttctggataca

SEQ ID NO: 315296 - DNA, 1638 bp, Cannabis indica
ttagggcataaatcccaacagttgttatgggcagatctaaaccagttgagtactcaggatccttggatggtattgggtgatttcaacaatattttgttcaaagaagaaagaattgggaagagagtaaaatacaatgcagccaccgattttatagattgtgtggggcattgtcaactagaagatatcaagtatagaggaagttaatatacgtggaacaataaaaggcaggggagtgagagaatttgctcaaagattgaccgagttttggccaatcctcaatggttaagtaatttttctactgctgaagctattttttgtagtggatgaattattcgatcataccccgactatagtcactttgtatcgtgggattctaaattggaagaagccttttaagtactttaaaatgtggacctcccatccaagatacaaagagatagtaaatggggtttggaagcagcaagtaaccagttctaaaatgtttcaagtcatttcaaaattgaagaaactaaaatgggcttttaaggagttgaacatgagatgcttctctaatattcaagaggcgactgaggaagcaaagaaggggctgctagaggcctaagtgaagctacaaggtgagcctctaaaccaggagttgattgaacaagaaggggcagctagacaaaaatatgggcatttgctaaaaggattgaattccttcctgcaccagaaatccaagataagttggattaaggagggagataaaaactcagccatatttcatgctagtatcaaggagaggagaaaactaaatagcattatgtctattgaagaccaatagggtgtgagaacagatgacaaaggaagatttctgatgcctttatttcattttaccaccaattacttggttctaaaatggaatataggaagaaggtcaaccgaaaggttatgaagcttagtcctttggtttccaatacacaagcagaattcttactgaaagagttctccaaagatgaagttaagagggcattgtttgatattctaggaatcaacgctcctaggccagatggttttactagctgtttcttccaagataattgggagttgcttggagatgatataagtgaagcagtcctttcattcttacactcaggacagatgctcagggagatcaacactactgttcttacacttattatcaaatgtaagtttcctaacacagttagtgaattcaggctgattgcttgctgtaatgtattatacaaagtggctactaaacttatctgctccaggcttaaagttttcttacctgatttaatagctcagaatcatggaggatttataactggcaggtttatagtacataatatcatgatttgtcaggatttgataagacattatggaaggaaaaattcaaaacctgggtgtatgattaagttggacctacaaaaagcttatgatactctttacagggactacttggaagaaatcattcaagcttttcaatttcccaaaatttttatcaagctaataatgatctgtgtgcgcactcctatatactctcttatgttcaatggatcattacatgtgtaaagtccttttttggcaagttagttgacaaaatattttttcttttatggtaagattcttgtgcattca

SEQ ID NO: 315297 - DNA, 796 bp, Cannabis indica
atgcatgaaatgtgtgtgtaagtggtaaaattgtaataaaataaagttgaagagtaaaaatgtaggcttaaccgtgtggtagtattttagtaataaaatatgtattttgtatttttagtgtaaaaatttctaacattaatattaatgtcataccacctttgtcaaataatatttgacagtttctatccaaaatttgtttagaaaagtataattaatcaaaatttgttaattttatttaagtcgggtccggagccgagatccgagtccgagtccaagtttcaagatctaagttggggtgaaagtccaaaaaattaataaaagaaatgtttaaatctttttgtttttaaaatttttaaaattttgattttcaattaaaaaattgaaaagtaaaaataatttataaaacatgattttagaaaatattttcattttctacttttaaaaacaaaaaattgattaaaaaaagtattaccaaacactataatatttaagaattgtaccggtagaaactttcgccggtactaattataaaaacctctagtattgagtattaccgacagattttgctagtattatcagttggtaataatgggtcactaatactattattagcaaccaaaatatatttctgctggtaataatattaataccgacagattaatagcggtgggttccatcagtattaaattctgtcatttgcacgatgacacaataatactggcagtcccactaaagtattttgccgatattaatattttttatataataaaaataattataatattatatataataa

SEQ ID NO: 315298 - DNA, 1619 bp, Cannabis indica
agtcaatctttacttgctgatgattgatcctgtttagtaaaggacgccaaaagtcattcatgtaattcaaaaaacttttgctacctttaggagctgacttgtgcctctaaagctaaattcaaataagtcacacatttactttggcagggttgatgaagcaattaaactagccattcgggaaatcccattgtgataatgaggccaataaaatagaaagtagtggattgcaatctttttcttaagaagattcaattgaaacttcataattgggcaagccatcacctctcgtatgctggtagatgtaattgattcactcagttttgttgggcatccattattactggatgagcatttttatgctcccgcagaaggtagtcaagaatgttgataaactttgttgggacttcttatggagtgtgaaaggataatactagtaagatgcatctagcctcatgagatcttatttgcaagcttaagatctatggtggtttgggttttcgtgaaagagacaagtggaataaagcttcaattgctcggcatatttcgactctttctacgaagcaagatgttctttgagttaaatagatcaatgccatctactaaaaactagattttggattgtggtaagaagggatgtaagctggtatcggcgtaaactcctttagacatgttttcacacaagaatcaatcctgaatgctggaaaagggggcaaattttaggttagcaagctttataatttatttctcgctccatatgctaaggttgataattgtaaaataatttggtgtcgcttatcatttcacaacatagatttatgttttggcaaacctcccataataacttattaacaagagatcacctgatgacaagagggcatcactattacttctacattctgttgagtctgtgatattggagatgattgtcatactcatctcctctttgagtgccctttctccaagcatctcctgcaagttactcaatcttggtttggaaatgctatttggcctgtgtcttacccaaataggttgatgtggttgaattcaaaacgagatcgtagcttgcttcatagtgttattgcatggtatactttatttggtagagctagaatacttgtattttttttaactaaaagtatttatgatatctcatgtggataaattaattagagtagcgttaaaatctaaattattacttgttgtcggaaagaaattctctaagagagaccaataagtttttaatttcatttgtaatgtgtaagaaagtgtttttgttgttatcttgtggatgctaaattatgtaccatttgctctgttttgattaacaaaattccgttttgattaaaaaaaacaattttctaaaaaaataagaaaaactataaaactactaattatgtttatgaaaaaaaatcaactaattaattaagtaataagacactaataatcattatttttaatttatgtttctagttaattaaatttatttatttaacttggagtttaatgtttgaaaaattgatataattatttggtttttttaaaaaaaatattggaaattattttaccaggatctttgatctactcacaagtatgttgattaataccctaaatatgaactt

SEQ ID NO: 315299 - DNA, 673 bp, Cannabis indica
gtagttttttcgttttttttttctgtgttgtaatactagaggaaatacaaatttatgtagttttattatttttttttgtaacaaaaatatgtattttttttttttacaaaaatgttattttatgggaaaattgaaaagaaaaaaaaaagttgaaaactataggaaaatcaagggtataacaagataaatttatagtaatcagggggtaactaattatggagtaactaggaactttatattattttttttcatatttctttaactttttctaaaattttcatatagaataatttttttgagaaaaaaccatatttttacaaacttgtacttaaaaaccataaaaatacagaaaagccccttttatttagaatgttactattattatacgtcactttgaagctggggaaaatatgtgcacctggtttgggcaacattttgggcttgatgtccctcgtttttgttgggattgttttgttttatattgagatttttataaaaaaactggactttgtgtaaaaatttacaattttactgtcatacgaattttttttataaaaatactgtctttttataaaataactgtaaaacaattaaaaaattgtagaataactaaaaaataatcatagaacaacagtgaaaacctaacacagtatatagtatttttttaaaaaaa

SEQ ID NO: 315300 - DNA, 1664 bp, Cannabis indica
tgtgaatgtgttattatttaattaattatcactattatatgttgtggttcaccactgcattttaaatataccattttgactttgtataaatggcattgattatttctttgatgataaaaaataaagtaattatgtcattaaattgattactaagaaaaaggatttaaaagactatttcaaacagtcaaatatagtattatcgtcagttcatataatcggcacgtgactgaaataaaacgagacagaataagtatcagttaaaacaattgttatgaacattatcgatcatttataactgacgttatagggagaaaggaataggtgattattttaaacagatggatagagtattgtcatcagttctagcctaacactatcactaacactaaccccctttaaaaaaaatcagatctagtcgagcacaaactactcgtctgagttatatttgagataacaaactcataatattcacatcataacaattgatcccagtacaatatctctagctattttgtcattccaaatccaaagtacatatattcttatccaaaatatgatcaaaatccaaaaaaaaatacacattgttaaatctaaaatagtttacaatcagaagtaagattcaaaaataaaaaataaaaaattaaagagagaggagagaatgatgtttaatagttgttgaccccaaaattctcccagtgagaatctcaaagtcataataaggatagaaaaatttgaagggagacaaggagaccatctcacgaagctcccgagggtctcactaggaagagccatctcggcattgccaatagacattttggcatgcctggtgaggcatgcatcttgacaagtcttgagctccatgcctcgaccatacatctcagccaagcatccttgaaccatctcggtcaagcttcctattaaagcatctcaacaaaacttccttgaagaccatctcggccaagcttccttgaagaccatctcaaccaaaacgtggtaaccatctcggcaccaacacatggtaaccacctcgacaccaccctcatggtgaccatctcggacatactctcccaagagaatctcagccatgctgctcctctcagagcatctcggccatgctctcctaagagtttctcgaccatatgctctcctaagagaatctcaagattctcaaccattgggtatactattattgtcaaattaaaaccgtcagctatagtacacctaacggcgttaaactgtcgaggatagcattataactcatttttgaattttaaaattataattgttttgcacaattagagatactaaaataactgtttaaaattaaacatcaagaatagtggagtattcctagtggtttttgttgagtaaattccacttataaccaatccctttacaaatatccacatcagcaaaggaaaaacagaaacaaacaagttgactcgatcctagggtggcttcgcctctagtggatcaagacttagtagttagttacaactgaaattgtaactaacttctaagaccttgatcaaccgactctactacactataaaagaacaaatcaaagcaaataaccctaagatctaagccagaaaatcagatcagaaaaagaaagagagaaagagaagagataaaccctagatttagtcttctgctccaagatc

SEQ ID NO: 315301 - DNA, 1016 bp, Cannabis indica
aatttcagattttacctttacctattttttttttttttgaaaaaaaagggtaaaatgggaagttcatgtaattaatggactaaatttgtacaaattaagggagggtataaattttgatatggcttgtattattaaggccaaaaagtgaaatttcccttctatttttaaaatttaattaattatataaaagaagcttgtttagtaaatagttgcaaaaactaattaattagtaattatatttaattttaattttgaaataaaattaatcttaattaatattttataaagaaaataaaatatgtaaataaaaaaattaaattaaattaattttaagttatttattaattatttttacttaattttaaaattaattacaacaaatcaaatataacctaatagttatgatgctatcattcaaaactcttccaaaaatagtgtattattatttttaataaaacaatgaaacaaaaactgcagaattatattggttatagattcttaacagaaatataactttttttttcttttttctttttttttttttattgtttcccccaattgtaagttataaaagtgtttattaatgggtggtttgtgttcatcacaataaagtgaaatataataatatatagtggttgttgaatgaaaataataaaggacaaaaggtttggttagaaatggggtctaagatgagccctatcagataacatgccaaaacttctttaatcgggctggtcatcactaatattaatttatttcttgtttaaaatcttctaaatgagttgccttcattctaactctctccctctcacctaatatattaacaataagcctaaatatagcaaatagaacttgacatatattcaaaagtgaccattactaccacttctactacctaacataagttaaatatattaaatgaaaccaaaccaaacaaaactcacatctctatttcgtttatgttgccttcactttatgaatctgaatttaatattatatctactctactaaagacc

SEQ ID NO: 315302 - DNA, 1359 bp, Cannabis indica
tctttgtcttagttggtttactgatggctttcttgtgaattttttacttttttcaaaactccctacccagagcatcaaaaccgcagagatagccaaaaagcagctcaatatagagcctttactgaggagaaattgaaggtcaaggagttagtcacgacggaaatgctttgcaagtctagcctaattgcaaaatttcagaacatcgattctgttaaactttaggggcaatgccaagctgcaaaagaggtgaaggaagccattgcaactgacttagtcgttgttaaaactaaggcgactaaagaggacaaactcctggagcccgattggttggcccatcacccaaatctcttatctgaggaggaggaggaggaagtcttcattaatcaactgaacaaatacaccctcaagcctctcctatacaaacaataagaaaatcaaagatagattattacattgtaatgtattcaataaaagcctctcatgtctagtcatttttctattttttacaaggtataatctatatagcactatattcttcacttcggcaactatatgcacatctctcctagaaaaacaatcaaaaatacacacgtttttgttcaacaatatatagtagcaaacgacagcgagaatagaaatgtatatacttctaatcaaacctgaattcttcaaggaaagccaacttttccagccctcatacttaaccggccaagctttgtaccccaaccaactaaagattcggtccactaccctttgagaaaggccacaatcaaaaaagaggtgatcatgagattccaattggtcctcacaaatagggcaaacctgggtatcaagcacaacatgaagctcactcaagttgtcacgagtgagaaggtgagaattcacaatttgccaaagtataaatcgatattttggcaaattcaagtagctccaaatggctttattatagttgtccctattctgagtaaggaggccattgtagagagttgcaacattgaatttaccaactttacttgccctcaaaatctcatcactagaaaattttgtctgaatctgcataattttttccaataccagttcgtgtctggtttttggatgtaagaccaaaaaggaacacctttgagataaatgagattcacccacttaacccaaagtaaattttttttgagtaatttgcggcataaatacctaagttttatgtcgagtagcagataaatacctaagtcctatttttggcgataaaaataccttccgtcactactctggaacttccgtaggtacctctccgttatgtgccaagttagtgtccacgtgtcactcgttcatttgtccatgtcattaatttttttatttattatt

SEQ ID NO: 315303 - DNA, 896 bp, Cannabis indica
acttgcctgccccgtcagcgccacacggctcctttctatttgctgacagtgccaacttggcgcttgtttgttctccagagccacactaacacatggcagttctggattggctgttctgccctccatctcttttcttccaattgcagcccacgcccaccgtgaagacccatgcttgtaaacctgcatgaaaaagaggacattacagtgaactttactttatttattttaactttaatctttatttttatatatttttacgatttacaaaaatgtttttattatattttttaaattaatataaattatatgttaattttatacacgaacaatctacttacaaaaataagtatattttattaaaacataaattaaaagtatttttaataaatagatacaaagaaatatttctcaatttattccataaaaaatcaatcaaacccatgttaacctttcactgccattaatcaaccaaagttaataaaatataataatgataaagataaatactattttagaccatatgttttgcaaataggactatgaactcaaaataaaatttaataataatctgacctaaatgaattatgaaaaaattatttacattttctctatccattcgtattaaaaatatattgttataatctttttattttttttataagcaatatattgtttttcatacatttcttaaatatatatttgagattaattatatgcttcaataaaaattaaatttaatatttaaaaaaaattaaatattaaatttaataataataataatatagtaacaaaagtaggctgaaagaggaatagtttttttaaaaaaaaattagttgaattgagagccttaagttattctgaaagtagttttttttttttttgtttaaaggaaagtt

SEQ ID NO: 315304 - DNA, 656 bp, Cannabis indica
attttaaaaataaaaaatataaattttctttttttgaataaaaaaattatgaatattattaagttttatttttagataaataaaaatcaaataaattaaggtataggtattcaatatcacatagcacaacatcttatcttacaaatgatttattagagaaaatgttgaacaacccaattgtaatttgttaggaatagtagttccttacaccaagacaaacactaaagaaccacaaacccatcaagtactcaatgatattttgttaagtagaatagttttgcaacaaagttttattagagtaacaacaattgtaactttttattactcaaaagtctttgggaaatttgattttttatgcatgatttaagagttaattggttaggaaaacttaaactataggtaattgttagaataggcccactttacctaaatctcaaaactacccctctcaaaatcccacactcattctctctccttccctctattctctctgttcatcccaacctagctgtcccaaccctagccgaaaccccaaattgtcccaaacgctagccacggaggagacccaccgacccacggcgcaccaccactgactcacggtacccacgacgcaccaccactgttttttatttttttattgattttgtttgtgattt

SEQ ID NO: 315305 - DNA, 1855 bp, Cannabis indica
aacatatacaatcacaaacacagtatggatatataatatgttttatgctaatcttacctcgtttctgaattcaagtaagttggccaatctgaacagatgaccttgtgctggtggatgccctaagtcacatttacataaacgggtaataatatgccaaaaccttaatccgagaacccaaactcactactaagggttctactattggtatttgttatgacgatacactaaatatcacaaaaatgagaaaaactagggttctcgaaactaccccaaccgctagagcagttccccaactggaagatcagttctacggggtttcctagggaccagccagaattccggttcctacaggtcccactgaaccgatcgaccagtttagtgttggaaacatcaaaaataccaccaacacgtcaatttgatcccaaattgcacaaaaacttacagaacacctatattaacctcaaacaacatatttcaagcagtaacagcaagtagtaaaacactcaaatactcaatatgccatttttcagtcaagtttgagttcttagaactcaaacttgctcaaccccaaaactagccaccaacaacaatccaattaagcttaagacatcaaacctaaagccatgtgcgtcgctcaacaccaacatgcttctacctggtcggatatcttctccacaaccctgctcagataaccgactattgcagatgctaattagtcatgtgaaggatgctagggatattgctctctgcccaggtatcaaaaatatggacacatgtcatttgatcctattgtcacattaaggtgctgaaaactggacaacaaccataagggaatggtcatggtcggcccttgcatgaggaaaatggtttcatttgcaaagtttcatttcagcatatatgtatcaaatacaaatgaaaaaagtcacccaaggcttcataaagcccacatccgaccattgccataagaaaatagcagtgcccatcaattttaatgggcactgccgcaaacgaatggcagtggtcggccgatacacaaggaaaggagtttcattggccaaattgtatattcagcatccctatatcaaatacaagtgagaaacaccacccatggcatcccacaagccatggccaaccactgccattatttggctccaactggtagcagtgccctcttgttaggtttttgggcatcgaaatgaagtttttgggtcccagaactcccaaaatataactcaccataaaaaaaacaagtgaaaatacaccccgaggggttcgagaacatgcataatcaaacattgccatttggccatgtcagtgctcgcaactggtataaggcagcataaactattttcaataaaatgggcattacgctcataattttttattcaaatgaccttgtttaacttgcattggaaagataatttcaagaaggatctaagtatgtctcatagtcatagcccgattctgaagttattgggtccaaaatcgcctcacaaggcagagtagtatattttactcaagaattgagtaatgtggttaagtgacggttgtttgaggacattgcgtcacaacccatgaggcattgtatatgcaagcactgacactccaaaacatatttttttgacacctattgtaacgccctaaataattaggcacgttacccaagatacttatgaaaccctaaataaaattagcgcataatttaaactttaataacaataggaatggaaataaacttgtaatattttaaactttataaactaaaagttacagaagttgggataccaaaaacatttacaaaatattattacaagtccttttcttttagccggcctaagcgggaaaatagagtctc

SEQ ID NO: 315306 - DNA, 2512 bp, Cannabis indica
caattggatgtcccccttgcatcaagattgcacctatgcccacattagaagcgtctgtttcaatcacaaactgctgtgaaaaatcaggaagagccaacactggcgtctcagtcatggctgttttcagcttgttaaatgcttcaactgctgctgaagtccatgcaaaattgtcttacttcaagagttctgttaaaggagctgctattgatacgtagtgagacacaaatcttcgatagtaccctgtcaaaccgaggaacccacgaagttgtttgagtgtttttggttgtggccagtcgatcatgacttctattttggctggatctgccttgactccgtcaactgatactaggtgtcccaagtattcaatagtgggttggaagaatgtgcacttgctggcttttgcaaaaaatttgtgttcccgcaagagtgtaaaaaccagccgcaaatgtgagatgtgatcttccctggatttactatacaccaaaatatcaataaaaaaaaaaaaaacaattacacaatggcgcagtaaaggttggaatacccggttcatggttgcttggaatgtagaaggcgcattagtgagaccgaatggcatgactagaaactcgtaatgcccctcatgagttacgctattttgtgcacatccttcgggtccatacggatttgatgataacccgcacgcagatccagctttgaaaagatagtagcgccacccaattcatccaataactcatctattgtggggattggaaaacgatctttgattgtaatgttgttgagtgctcgatagtcgacacaaaagcaccaagaaccgtccttcttttttaccagcaataccggagaagagtatgggctagtactcattctaatgaacccgcattcctccatttcccgcaccaatcgttcgataatatctttctaaaagtaagggtaacgatatggtctcacattcacgggcgacgactgtaagaaaatccggtggtcagaggtgcgataaggaggcaactgttttggttccgcaaaaacatccgcaaattctgtcaatagcccgcgaccttcttcagggagtgtggtctccattttttggatgttgttgtctattttaccaagctcagtagataacgccaccagaacaattacatctcgaacctccccttcacgtaacagggtatgtaatttagacagcgagagctgttgagtcgcaggcgtagtcgacccagctagtttcacccttgtacccttccattcgaattccattgtaagggccttgtggtcatgcaaacaagggcctaaggtttgcaaccattgcatccccaacactacatcgagcccccaaattggtaagacaaagagatcaactataaacttgtgtccctgtaaactcaattcaacacccaaacagacctgagaacaccacaaggagttaccatttcccatgtatactttaaacttctttgtttcagagcactgtaaacccagtctatttgctagagtttcttgaataaaattgttgttgctccctgtatcaataagaacttcaagcgattcggagccatgttgagcaattatccgaaaaatgcgagggttggatgtattggataaagcattaagactgacctcttccattatagtctcagcataatccgaattcccttcagtaatcgtttcagtgtccatttcttcttcttcttgagcacaaagaactaacacccgatttttgcatctgtggcctgtactgaacttctcgtcacatgtaaaacagaggcccttctcccttttttctttgagttctgctggagataatctcttgacaggtaaactgggcattggagtcttggttgagagagttggagtggtcaccgttactcccgaattggttggagatgttggggaagtcgttgtcggagaactgggttgagagattctcggaaaccaattctgacggtacccttccccgcgggcacggcttaggatgtcatcgtgacgatcttcatacaactgagctttcgccattgcgtctgcaagatcaattggtttcgataacaatagttctcgtcgaatttcagttttcagaccccatacaaagtaattgaggaagtactgatcaggaactcccgagattctagtcatgagctgttcaaattcctctcgaaatgccgaaacacgtcccgtctgtaccaactttgcaatttttcccaacggatcttcatagatggaagtcccgaacctcaatcgcagtgctgtctaaaaggattcccaatcggaaaatcctcctcccttctccatccattgataccaactagacggtgcaccctcgagatggaaggcgaccatcgacaacctcattgctggcgtaacatcgtggaggtcgaaaaatttattcatcttgtatatccaatcctctactcccactccttcaaacctggctacattaacccgcataatttttagaatcgaattcactttgcgtgaatcggtgtgagaattcgaacggtgcgttacgactgattca

SEQ ID NO: 315307 - DNA, 2181 bp, Cannabis indica
tgttaataaaacatacttggtagtaaatctagatcctgctaaaatatttccaacagtatcgactgtaagtggaagatggtgatcttccaacccgagggcgaggaaccatttgtgtttgtgggagcagttcaaggatcttgaattctaatgatttcggtaatgaaggctaaagatcttttacaagaaggttgtttagggttttggcaatggtgttggacaccacttcgcctgaatcaattcagtcagaagacatcggggtagtccaaatatttctagatgtgtttctcgatgaacttttaggtttaccaccacatcaagaaatagattttgtgattgatttagcacccgaagcggagctagtttccaaagaaccttatagaatggttcctacaaaacttaaagaattaaaagttaaacttcaagggatgcttgacctaggttttttgcgacctagtgtatctccctagggagctccggtgttatttatcaagaagaaagacagaatggtacacatgtgcattgactaccgggaactaaataaattgattatcaagaataagtatcatttacctaggattgacgacttgttcgataaacatcaggggaagacaatcttttataagattgatctctgattgggctatcatcagttgagaatccaagaggaggacgttccaaagactgctttctatactaggtatggacactatgaatttttagttatgtcctttggactaaccaatgctctggcagcttttatggatttaatgaatagggtattcgaggatttccacgatatatgtgttatagtatttattgacgacatccatgtgtactcttaatcagaagaggagcatgaacaacatctccagatggctctacaatgattaagagaatataaactgtatgccaagtttaaaaagtgtgagttttggctatctcaagtgtcttttctcgaacaaatttttagtaaagataggatcgaggtcaatctagggaagattgaatccgccatagattgtccgagaccaaaagacagttatagaagttagaagttttctgggtttggctggctattaccgtcaatttgttgagggatattctatgatctcaacacctttaacagaactcactaaaaagaatcaacaatttctgtggatagacaagtgtgaagcaagcttgtaggaattaaaacaaagatcgatcacaactccggtattagctctaccatctgataaagagaaattcatggtttattgcgacgcatccaggcagcgtctagggtgtgttttgatgtaggccgattgggtcatcgcttatgcctctcgtcaactaaaagaaattgaacagcaataccaaactcacgatctagaactttccctagtagtttttactttgaagatttggcgacattatctttgcagagagaagtgtgagatttatacagaccacaaaagcctcaaatatttctttacccagaaagattagaatatgaggcagagacgtttgttagagttggtgaaggattacgactgtgaaatcctttaccgtcccgaaaaagccaatgtggtggaagatgccctgagtataaagggcctcggggaggtaactagtatgactaagatttctcctcaactagcagatgatatggtcagattgggtattgagttttttgtaggaaaaattcataatttgacattacaatttgatctgttagacagaattaaagttgctcagttaactgatctagaactggtaaaaattcaagaagaaattttagctggtcaagctaaagattttacggtgtcaggtaatggaatgttgttatataaaaccagaatttgtgttccacgtagtgtggaacttagaaaggagattctcgaagaagctcacaccactccttattcagtgcatcctgacactaccaagatgtagcaggattttaaacccttctactaatggtgtgggatgaagaaggatgtggtagattttgtatctcgatgcttgacttgccagtagattgtaacgtccccgcttcaagcctccattaggcccttacacccacggactaatggctcttatacacgagtacgccactctagctgcttccttgattgaggactgatcctacagaccaacacaagtgtttccagcgtgctttgtcctcactcacacgcatcc

SEQ ID NO: 315308 - DNA, 1530 bp, Cannabis indica
gtgagcccccaacacctaacacctaatacccacacacaacataatgcacacacacacggcttgcatgtgagccccccactcgcacacacatgcactccttacaccatcatagctcgaatgcgagcccccatctcacacccctactattgtgcaccctcattgtgtactcacccgcatccatgcgagcctctcatgggatcccatgcgatcccttggctcactaccacattgcttcattgcatcgcacgaatgttaccatggctcacacggatgctccatgacgggccatacggatgctctaccacttgcataaatcctccacgactcacacaaatgctccgcgactcacacaaatgctccgcgactcacccaaatgcccccggctcacccaatatctcatggtctcacacaatagctcgcacaacagcccatgggcttgcacaatagccatgggctcgcatgccaagttgtcacaatttaagagtcttagtattttggccataactctcgcaatatatatcagaattggatgactcaagatgcgttggaaagatgagaaagagacctatgaatcttatgtttatgaaaagatctaattcttaactaatcactacgaaaatccttaaacaattataacttagtaagttggtcttactaactctactcatgcattgttacgggattgtcctctcagttgcacagatatatcctaatattaatgagccttagtccatatacattgattcattcatttcttgactaactcttacagccaatgtcttttaaccgttgggactaattgttgactaatctcgaaaatcaactttgtcaatttttggggttaacacttgcccccagtctacaagaatttttttaagtgtacttgtcggctgagtgagttggagaatctaccttgacgtagtgtgagaccctcttagttttcttcgaggcagtgccccctttgtattggggcttccctttcttgaaccttactttgcatcaatatgttagtgtaagggattttccttaccttggttggcccttttttctctcttcccccccccttttttttaccgagcgatctcatccctcatgcagtcgagcaacaattttactgacattggctgaatgactctgagggtcgttctttggcccaacaacttttgtaactggcgttggctaagcgactttggggtcactctttggccaagccatttttgtaattggcgttggccaagagactctaggttcactctttggccaagctatttttgtaacttgctttggccgagcaactctagaatccctctctggccaagcaattttcataactggcattggccaagtgactctggggtccctctctagccaagccatttttgtaaccggcattagcaaaatgactttagaggtcactctttggccaagcaatttttgtaactggcgtaggccgagcgactatgggagtcactctttggccaagccatttttccactgtggtaagcgggcatccatttgatgggagtatgg

SEQ ID NO: 315309 - DNA, 714 bp, Cannabis indica
aaaagaaaagatgactcgagagaattatctaacaataaaaagcgaacagaaaaagcacgacaaatatgtttcaatttacacagtatacacagagttaaataacactcgtgaaaacatttttcccaaaaatgaacacagggttgaattctgcaaacctgagaaatgagacatgcaagacataaacgagattcaacgaaattttgtcaatttcataatgagttggggcatactactgaagggacatgaaggaaaagaagttggtagatcttgcatgcaagtccatctaaaagacaacacaactacactaccagcaactttatttggccccattgccaataagttccttaattgctctacaactcaacttctccaacaaataacagaggtataatctactatatgttaatttacattacataagttacatatctataaactaattagtactatttatttactcgtagaatggcaatgaggatatcaaaaacatcatcaatccttgttcagaaaaagtacaacatcaagcttaaaccatcaacaaaagaaattgctagagagataaagtgcaaatacatagtagatgcactccatgatgtagaaagtggacaaagtcaccagatatagcattttgcctataaataatagctttgtgcctataactaatggtctacatgcatatcttgtttttttatgttacaactttaacaagaccaa

SEQ ID NO: 315310 - DNA, 838 bp, Cannabis indica
tgtgtgctaacaaaacatgtgctttccatccaaaaaaatatgtttgtagatttatttttctttctcaagctatgttaatatgtacgtgaaaatgaaccatgaacaaagaacaataaatatatatttatatatatattgacataatttttcatcaattaattaaaaaagtttttaaataagtggactagagtcaaactatatgggtcgtcaaattggaaattgatttaataaagtaaaagattatcacacctgagttttatagtaacatgctaatctacttgttgtttaattattatatcaatacttcaagacactaaaattatattctcaagaaatgtgtttgagtgatgattacaacaatgagatttcttcatatagatcgatctttataatttttctcttaatgttatctccaatgatagttgactataaaactaatcaacttgttctatgccaatatttactaaagcttcacagaagacaataaggtggtttgtatctcaagtatgtggctgctcagaaagtgaattcagtccattccctagatctaaattataactttatatatgcctaaggttagactagtcactcaacgacattctgcgagaatggttataaatattccttttggttctatatttacaattaaatagtaataaataaattgtaaaaaataaatatatattttcacttgcggaggtggttaagcctttgaaaaccttcaagaagcttccatcactaccaaaaactgctacttttagtgacaactttttagtcacaacataatttttgtgactaaatgtgacttttagtcacaacaaaatattacttgtgacta

SEQ ID NO: 315311 - DNA, 2030 bp, Cannabis indica
ctttttttttcattttttttcttcttcttttctacttcaacttctttctccttttttcacaacaaataatcgaacacaaacaagtttgttcttcaacgctgattgtcgagtcatcaaccatctttgccaatccaaaatcaaaaattttaactacaaagaaaaaaatttcttctcttatctctttgactacgttctcagtacaaaccccttctcatgaatatagtcaacacctataggaataggttgaaggaactctttgacttgtttagattcattgtaaatgggagaagctatgataaaatcaaatagtgtccctccaacagcgtattccagaaagacattgtaaaacactttctctttactatcaataatattaagagtagtatcatgaccaaaacattctataatgtaaggacaatcatcgaaatattcaataaatttcttctcattttttaattcttcactcttttcaagacgcgaagttttgaccgccgtaattggatggaagccacaaacgagcgtagttccataaaatgacaatggttctttagccattctcgcagcgtagactgaaccaaatccaccttttcctaacatcgaacccctaatccaacatagagaagaatgcaaactctcttctaaatctcattctctatatttttccatcttcaaattttttaaattctatctctctcaatctcttatctaatattactaatgtcactaatatttattgacttctatttcatccagatgtaatgtaatacaatactttttatatatatagacacaagtaaacactatttctaatcctaatcaaaatagttttattataaatttaaaattttctaattctaactgtaaactttttattattggttttgttctatatttgcaccattatttatggatttggcgccttacaaggctattgcgcctattatatggctagcccttaattatttagagtaagttgtttaaaattttcacgtcttcctgtattgaaagtataataaaattttaaagttaacaagttatgcactatacagattttactagttgggattaaaggatttttttggttaaggtatgtttaaggaatattttaaagtgaaatagggtttttaagaggattaaagcttaaagggtaatagctattagctatgtttgaatcatatttatttagaaatttttagcaaataagggaaagtgtttggaattgttagtattcaaattctaataatataatttaaaattaatcaagtaaattggaaaataataaacatgaggatctcgtaataatgggaggtgggaacactaattgtcaattgtaaatatattatgttcagatatatttggaaagtcaaaatttatgagatattagtttgtacttaagtcgtataggaagatatccttataaaagcattttatggtaatttaaaaggctataataatataaaagttttacaacctttctttagagattaaataaggaataattaataattgaattggtttattttaagtaattttaattcaatatagattgactataataaaattttaccctaaataaatatgtaaaataatattgcttttttggactaagtacaataaatgaattttgtaatattttaaaaatgaggacattaataatgaattggaatatttgattttttctattttgggaagcattctgaaataaatgggccattaatgcttaataatcaagggatagtaattctaagatgattataaagtgaaataaaagagttaagttgctactagccaaagcgtattccctttggctagttttagtattttatagggggtctagttgtttaatttttgggttttgattgattttgatcggattaaaataattttctaattaaaatttttctaattttctaatattttttcaggtggaattttagtgttaccggctgaaacttttgccctgttggttggtcttaattggactcatgtgtggtcttccaattcatgcagtttattcagattcgttagct

SEQ ID NO: 315312 - DNA, 1769 bp, Cannabis indica
ccttttttttaaaaaaatatatattaaaggtaaattttttttttaaaaaaaaatatatatatatgagaacttctggtgtgttaaacaaaaatgcagtgactcctatcaatggaaatgtatcttggattctagagcaatgatcctcaaaggttctatatcagtagcagcttcgggttccactattaatttttggaaccaaccttggatcccttggttggaataccccgattttgtgtccttgatgaatacaattagaggcagaggatataccatccagactattgaagatgtgtctcaaggtaatgaatggaatggtgaattgattttccaaatatttggtgatgagttaggaaaccgtattgttaagattcctagaatcccagctccttttaaggatcaggttttttggaagcaaaattcaggaggaaaattctcagtgaaagctgcttacattaccgacaataaggaaaggtttgctacagaggatcagatttggaaatggatatgggagccaggtatccatcccaaaatttctatcttcctctggagaattctaagtgaggcaattcctactaaatctcgcctatactttctgcaagataaatcatgtagtctttgtgatttagaggaggaatcggctttccatttgttatggaaatgtagctttgcaaaagctgtttggttcgggtgcagattggccttgaagattgatggcatccctatcgatagtatgtctaacacgttggtttatttaatcagcaattttgatagttttgagaggaaggagttgctgtcttattttggatgcatcctggaggaaatatggtagcagagaaactccttatgctttcgatcccatagagttgatactaaggctgctttggttaagattgagcgtaaggctacggaactcttgatctcgtcctcttttgtacaagatggcagtggtgaagttaacaaggatcagactgagatacgatttgatgagcaacacagaatgcttaactcgcgattgaatgaaggaattgggaattatattttcactgatgcctcatggttccaaggggatgcgggcattgctgcaatcagtgtagactcgaatacaggttgctggtttgttagtgctcaaaagctgcagacacactcggcgttggaggcagataatggctattttgcatgctctcagcacggctactgaggatgggtggaatgaagtgcaaattttctcagactcaaaagtggctgttagtgctctaaccactagagtaatcctggattggagggtagctaaagttttttattcaattctgaacttatctaatagttttactagtgtttgtttctcttttattaatcgttgttttaatagtgtggctgatggtgtagccaaacgcgcaagacttaatagtgatttggcaattttgtatcaaggagagggtattcccccggtgattcccatcaattttattaattaatgaacattagttcctttcaaaaaaaaaaaactttttgcgcctaccaatggttttcttaaaattatattattagtttaatatactttcagaggccttgtactagcgcctgtaaaagtggttctgacaaatagatttaattttataaatttatataatatactaggtgaatgtacgtgccgagccacgtattgctaatttcatttaagattttagtatttttaagattttaaatatattttatttttaaagattacaaatttttttcttaaaaaaattaaatatttatatttgaaa

SEQ ID NO: 315313 - DNA, 543 bp, Cannabis indica
tttattttttttttatttttggggtttggttaattatgggtttggaggttgaaataactattaaagttttgttattaattaaggtctgaatggttattccaagctatagctagatatagagaacagaaaaataagcgcgtcggtgagtatttatcatttgtggaaccacatgcatattattaggttctgtgtatttatgttattctattttttttttctttttttaagggaattattttgcattatgttttataaaaataattatgatccttcctgcgaagcttaaatgtacattatacagtttggtggtactagtaccggtaggtgtgttgacttgctttgcataagtgagcttgatgtgaatttttaatttctttccttttatttgttaaaataaaaaatagattcacaattgactattacgccatagaaaaaaaaagttaagtgtggatataaaaagtgattaagggctcgtttggaacgccgtattaggtcgtattgtattggattgtattatattgaattgtattttatgcaatattt

SEQ ID NO: 315314 - DNA, 1313 bp, Cannabis indica
ccatttctaaaaatggggcccacaaataattaaattcataagtaattgtaaaattaccaataattagtgctaattgcttttactaatccaaattaaaaattcggtcattacattcttcatctttgccatggtcaccatggatggtgcagagacccactgatctcctggtatcccttcccccctcaggggaatagcctcggtgtactctttagtaacgtagtcttcacgagcctccaaaacctccctggcctcagacacgggctccctttcttcattgaagccactgaatggaaacacccaagctactccttcttcctcatctccttcggcttcaggaggagtagcaggacggacctcaccctggtcctccatctcttggactttaacgtccctagttgtgtcctactcttcaataccaggctgagcctattcagcagtaggtagggcagcgagacaagtgatgtgtgggtcggacaatgaagatttccatacagtttgcttggttcgtgccatcattctacgcctaggtagaattttgtttgtgcgcctaacaatagtcacaacaaacgtggcaacaagtttacctgcaacaacagggtttggatggccctcgggcaaagtgtcaacaatgtttggacggactatatatgtccaatcagatggaagttagcgtctccaccccttcttgatttccctaatgaagggaccgtacccttgaccttggatctggccgagataaaaatagtgttgcacctcgagttctaaggaaggtgtgtgtttactacttagaaacagaattttgcttagaaacagaattttgaacccaaaagttcaaaattttgaattgaagtttgattcccactaaactgcaaatggataagtgaaagtgaatatcgtggggttaaaattaaagtgcagttagaaccaaacaacgtggttaagcataatcgagatttctaaatcttaaacctagaatttctatggttatcttagaacaagttcaagaacaatccaaattcacagacagaaatccataaaattaagcatgcaaatgtataaaagaaagaaatgaagaacttactaactgatttgaagcttttgatctgctcggatggtgctggcaggagtttcctggaaattcttcaaagaatttgagagagaaaaatttctttgctctggtttttcaaggatgaaagtgactaaaatgattaattagggttttgaatcctatttataggtagttcaaaaggaagaagtaatcattttaaattttaaatatcttgaattccccccaaaagtgtacgttatgtact

SEQ ID NO: 315315 - DNA, 3541 bp, Cannabis indica
atataataatatagttccattaagcacgtaattaaattaatttcatcaatttacccttctcaggtcataattactaaaatgcccctagctcaccaacagggtgtttacgtataattaatcacataaattctcatatattgaactatataataatataattcctcaattattcataattatcttattagggttttgctaatccatttcttaattctagggtattacaataaccctagctctcagtttcactataacaatcccacaatatataattgcaccaccgcgctatactctatgtgtataattcactgtcttaccttgtttccaatgtatgaggaggaatctcaatccacgggtgatcctaaccaagtattagtattcctagtcacaattcccgggtttatacacaatagagttaatccccaattccataaaatatttttataaaattaggactcacatactagaccaaacgatagagctctccacgagatttccaacgatatgtagaacgtccaaaatggagttcgaaataaaaagttatggcaaaatcaatttacaaaatattttggttctactgtatcgagagggccgcgaccttgcaccaaaggtcgcggctcttagccccttgtagggagcaaaaatgccaaaaagtcaggggctgcgactcgcatgaactaggttgcggtgcttggttcagaacccagaaaaataagatttttcacttctaaaatgcaccaaaacacatccacaattaacaatacttttcatacaaacttttgatgcaaaagaggtggtttctaaacccaaaacatagtaaaaatatccatataaaccatgcttaatacacagaagattaagatcaaaactcacataatttctatatcaaaagcttagaaaatacaaactcaaatccaagctcaaagtttaacattgcctgctctcaattcacaattccatattgaccaaatatcagaattcatgtatcaattcaaattaccacaaagtgaccacaacaaaaccttaactttcatccatggaattaataccataaaattatttcaagaacaccatgaagtaaatcattcaaattcaaaccctaggatgggaattttagaaattacaactatataaaaatgaaaacaatacctcaattactcttccaagctaagctcaagaatctaacaacaaaatccacttcaatttgcaacaattcttcctcaaaatcaaagaaatttttaaagggagaagaagagagagtagagaggtgttaagagtctataaaaccagaaaaatgaggtttatttcataaaatttcataaataagtcaaatatatcatctatactaagttaaggtcaaatgaccatcttacccatagggccaaaaattaacatacatagcattcaagggcataaaagtcaactccaatcacacacataattccaaaatcatcatatatatcacagatgaatgccatatcacattattcataattttggaccccaaacctagttcgagtcaaaatactcatttgtgactataccattctaacttgtcaaaaattacctacagtaagacagtataaacatattatataataatatagtccattagcacaataaacatcaaaattatgattttacccgtctcaagtcaaaattacaaaaatgcccctaactcaaaaatggggttataaatgataactctcaaataattttatataataatataattacccaatcatagttaatccattttaattagggttgctaatttattttctaatctcagaatattacagtccaaatcaacaaattatgctattgaccacaaaatcaagaaccttctttgatgtgatggtgggtaagggatttgctttggcccatttgatgaagtagttgacagccactataacatattgaactctgcctttccctttaggcagtgaacctatgagctcgattccctagacaaaaaatggctatggtgtttgcatactcttgatttcatttggggcagctttgggtattttggagaacctctagcatttgtcactctttctaacgtagtccattgattctttcgtcattatcagccaaaagtacccttgtctcaagatcttttttgagaggctttgcctctagcatggttgccacaaaagcccacatgtacctcgaccatgaagagttcgacttcttccttcatgacacacctcagaagtggcattgagaagcttattctgtgtattactccatccatgatgatgaagcgagctacttttctcatcaatcttttagcttcgttccagtcagttggaaaaataccttattttaaatattgtgcaatcggagtcatccatgatggagtgttgttaatcatcaagataggctctgactattcattaatactccatttggcgaggtattcgatgggaactacactaagaatgttaaaacatgttgtgctagctagcttgggtagtgagtctgcattggtgatctgttcacgcgacacttgttggatggagtagtgcttaagctgggctagtatatctttatctttgcttaagtttgcaatcatgtttgatcatttggcttgatactcactaagaatctgattaacaactagatatgaatcacggtatatctcgagtgactcagctttgattggtagtgctaactgtaatctttctaggagtgcctcatactctacttcgttgttggttacggtgaactcaaatccaaagcactgtgagtttgaaatccctctagagtaactgagatgaattcagtaccagaaccatgctggttggaggagccatctacatacgatttttcaagaaggtctagtgtcctcctagctacagtctcaagggtgaggacctggtcttcatatatcatgggattatattcatcgtggccagtgtattcaataatgaagtctactaatgcttgtcctttgattgttgtttgaggctgataggtgatctcgaactgacctggtttaactaccgacttgagttagggccctgatgtttctggcttcaatataacttacctaagtggttggtcagtcaacaccttcactatgtaagcttgaaagtattgccttagctttctgaaggctaggattaggcagtaggctagcttcttaatgggggatactattgtgatattttgcacacgcaagtgcacgtatcgtgacaagtagtaaactcaccaagagtgaggtcgatcccacaaggattgtagttaagtacgttaaaattaaacttctacttctatttggttgaatagaaattaagaaatgattaaaactagaaaataaaaatagtgcaagaataagcaattaaactaataaggaaattaacgacttataaaaactagggctttgacttcaattatttctattgattatggcataatatgattatctccctattatcaattataaagcaatagcaggttcactaaggtaatttatagtcttcacagatatataaatctcaatcacatgcaaactttctactctcgtgataaa

SEQ ID NO: 315316 - DNA, 3672 bp, Cannabis indica
aagaaaaagctagaacataaaaagacaagccctatggggacaatttgagaaatcatatcaacgattgcattcgtagaaaggaatattcaagtgataaaactcaatgcttgaaatgcaaagttgaagagtcgataaagccaacagagaatatttctagaaagaaaactggagtcctgttcaatttagaagaagaggacacataaccatgcgtgaaaagaattatagatgcacttctgccagagtgcttcagaatgccccaaatggaattgtatgaaggcaagaaagaccaaaggaccacttgtctaaataaaataacatgatgcaagttgcaaaggccaacaatgatgccaaatgtctttgcttttcactaactttgactaagtccgtagaatatttgtggaaaaggctatccttgggatcaattaacaactagagggacctacgggcagtgttcaagaaaaaaattgtatccacaaagaacttcgatctggaagctagttcctttactagtgtcaaacaataaccaggagaaagccttaagaagtacatccagcgtatgatggatgttgagcaaaatcaaaagttactaatgatatgaagatggtggctttgacatcaagactaattgttggatcttttctattgggagatctccaactcaaaaaagtaaagactttgactaatttcttaacaagagcccaaggatccatcaacacagaagatgcttacgcccaagcttatggagtacttctagcaccttccaccaacacaacagctgcccagactccacaaatgaccggtccatcaattttccctcaaacaactgcctttatgactcctacagtttacggaccaagtgcttccgcattaccagctgcatgtctagtttttctaggtttggagtagtaaaaactagatacattgatgctctcaggacaaacgaaactaaaaagtagaagctccagagtaccaatgtaagacaatcacggagcaaaaggagttccaagggtccaagtcagaatgattccgcgaagaaatagaagactcaggagtcaagatactttgagtacacaacccttgttgatacttgagagaatgtctataaggcaacttgtaacctggtccattacaagaagcctcagccaatgtacaagggcagaagacaaaaaagagatccaaatttataaaaaaaaaaaagagagagagaaatgaaaggtcaggaaaggagtcaaaatattaaaaaaaagagagagagaaagaaaggtctcattaaactttaccacaactacctgttgcttagcagaatgggctaaagcaaagacgtcatactacatgacgctcaaatctccatggctagctgagaggcattcccaaccaccaggtccaaaagttcaactgtaaattgggcggcttctttccctacctttggggccaagcgcttctccaagccctccacttccacagttggtctagtaggggatagggtgtgaaggctatctgaaattttggctttctgtacggccaagagcaaggtggctcgtctatgtaccaatcctttctctgcctcaagacgctccttcaaggctttattcacttccctctctctccgcatgtcatgtggattgaaaggaatagccttttttagggaatgtgaaccacatggaaggtattttagggagggcggaaggatagtgcggacgaggttggcccaacctcaacgatggatcgtgacgtggatggtgggcccctacttcaaaaatggtagtttcaggcctttgtctttttctgcaaagactactgtcacccacagctttagaagaactagttctttccatagcagacctaaatgtacctaccagaaattagcatgaagctaaacgggtcggcacgatgcaagatcccaggtctctctctctagtagaggctgcatgcatggtgccaacattttgagaacaaataatcgctggctaggtgtcggtggagagccttctctctcttctccaaattttgggaaatgtgggataaaggtacttcatcatcatccaagccataagcttgcccatctctagggtaggctctatctacagttgtcactcttacaactctaggagcaagaggatataagccatacttccaaaaattttccacattggtcgaccagattatatttctttgctcaaccgatgagacaagatgtgatttgccatatcccttatttgcaaagtaaggatagagcgtctgaagaattgcaccggccagaatttgtaatgcccaatcttacgaagactgtatgcaataaagtactttttggtgtacccactatcctttgacatggttgtgcaattagtttcaccaagcaattggtgaccaatctggctaaaataaaaaatatccagtcctgttctactttgacacacacttcagatcaaagtagaaccttatctcgtaaggggtaggcggagccagcttagctccctatacaagacgaaaatcatcgagagatacttgatgctcttcgacattagctgtgttgggctcatcccaaagtaagtagcgacatccagaaaatactggtgaagcagcaccgccaccccatgtgcaccgacagtttctacagggaatctcgaaacgtacatcctctattaaaccactagcaaggatctcatcgaaggcctcatcggatagaatagaagcaggaaagacccaactaactccaggtggtctcgcatccagtatctccagctcaagagattgctctaggacatggttcagtcctagctctaaaggctcaccgagcctgttcagtggattaccttgggcgtcatgttacccgagagacaatccatgaggatagaacaagtcctatacctcttcctcctcactggaacaacctcctctagctcagattctacatcaaaactctcatcccctgagtccatctctggttcagcatcagcaggaggctgagcggtcccctccacaattctaacttgaccccttgtggccaccttggccacgtaagggtcatatggaagcaccctatggagagtctatttcgttttggccataagaaaaatgtaaataaagagacatacgtgtttgtcaccactattcaatacccgacactacctgcatggaagaaagaaggggaggtgagcaacctgacaaagctataaacacattaaagtcaacagtacccaagggtaccttccagggaaaacaaaatgtacaagatcgatcaacgaccatgtattgtcttaagtacacttactaagacatatagtaagtcctaagttatataattgactatattaaactcactacctagccttatacaaagtttctgggagaaaccacgcataaggtcagatttttatatgcctccaaggccgtcacgagaccctagctaaggtcaaaaagggagaaaaatttgttgcccacttggagccttggccttgaccggccaaggttccaggtcttagaggtcggccaaaccctaagacccagtctagtggctggccaggaaccctaattctaggcatagactgccagcctagggacacagtccctatggccagccagaccccatgaaagccccttatggccggtcaggcctcaaacaaggcctccttggccgaccaagatctgcatggatcagaacacgtgtttttt

SEQ ID NO: 315317 - DNA, 846 bp, Cannabis indica
tattcaacaagcaatgaaaatcgaatgtgagctctctcgaagagattaaaccttgaattactaaaagggaatcggtctcaattaaatgcacaggtagttgaagatctcttacccattggagactatacatgtggagagaagcagccgcggtaagaagtggccatagcagccacaattgtaccattactatcccgaagaactgttccaaaaccagaggtcagcgaaatggcgttaacggctgcatcagtatcctacgtacacacttatacattggaccatttagaattaatataacccatgtcatatatagtcgatccatatattcatagcaaaaaataagtatggttattgagtataatagatagcgtgccatgattaataagttaagacttgatatttaattatacaaataataatataatattaaaaaaaatattaaatactaataatatcttttaaccattctaaaaaaaatagaaataattaaagaaataatgatacaactactacttcggtgtgtaataatgaatataataaatttccaactgatggtgggtactcatagttaattaatgtacaacaattacacaacattttttttttttcatttaactagcaatagtgatgttagaattttttataactcatcaaatatctaatattaagattattattttatatatatatatttatatatattcgagtcttatgttttgtttattaataattaatatatttgaataataaataatttttatgtaattaatttaatatttttatatatttaaatttataatatgtattttgtattttttaatatattagtatcatttttataatatttta

SEQ ID NO: 315318 - DNA, 535 bp, Cannabis indica
atagaaaatcaaattttccaaaagaaacaattgtattacttgtggcaatgcaatgaatgttttaatcttatttattgaagaaggttggtatctggtagtagtagtaacagtggataatatgtggacctctctcactctagcagtttagctactacaccaacacaacatttttttttttcatttatttaattaatattttccatgatttcatttcatggcagtctctggagtctggaccattataacacttctttaattattattaaaaaaaattaattatttattttgtaattagtcatattacttcagcattttattaaaaagacaatccctttgttctttttttatttgcttttttctttcttttatttccaaaagactgtgcttctcactgggtacgttacatatgatggagttggaggttgttctttctcaatatgatttaattttattttatttaatttaagccaattgtgttagttttcttattttagtcgattcttttagcagccattgtagactttttttcttaaag

SEQ ID NO: 315319 - DNA, 1002 bp, Cannabis indica
atatgtataacggtcggttttggctttttcggtcggtttattaccaaaaaaaaaaccgaccgttcaacgacagttttaatcgttagcggttttttcggtttttgatttcgtcggtttcggttccaacggtgttcggtagatcagtttgaacaatttttttagttttctagattttatgctcacccctatttataagtgtgtgagtttaaacttacaaatagtgtatgaagtataaaatttaatttttaaaacttgtttggtactccgtattataatatatagtattatgttaaattaatacaatactatgtttagtattgatcacttgtattaataggttgtaaaaaattatatattctttatcataaacctgaccccgatcctagccctaatctagtacggatccaaggcctaaaccctagaacccggccccaataccgatgccgaaccctaactctaaacctggactcagacccaaactcggatgttagctctgaactcgaaccctagactccgaccccgaacttgaacacgaacccacaccttgacctcgaccccgatctcagactcgactctcaactatttctaaatattataattcaagctaatacaaatcatttcttatgtataaataatgtgattcgtactgtattaaaatttataattataataattaatacaatataaagttttatctaaatatagtattgtttcttatttaatatagtacgatcctgataaggcctactaaattaataagcccttagtataccaatatataacactcaaatgattcaaatttaattaagattttaaattatacctaattttgattacaaaataaattttcaaatgtacttgatcaatattttaatcactgttgagtgactaaacaacagtcaagtgatttttcattattccataagagaaatattcttatttttgaattttaattctaaatttcgaatttaatgagaatttatttattagaataataaagaa

SEQ ID NO: 315320 - DNA, 2244 bp, Cannabis indica
tttttcttgatttttctctaaatgaattaaggattaagttaattaatccttgctgaaaaagcaatgggcaggtgttaaatttctaggttgccacctaaccttcacatccaatttaccaaaatgccattttcttacaatttaagttaaaataaagcctaggggtaaaatggtcaaaaaccataacccggctcaaactcggtattctatttcctccaatattcatcccactaagaaataaggtgctagacttcccatgtgatcaaactagccatccatcgcatttttcgttatcgtcgagcaaaaattataaaaaattgcttaattcacatataacataaataatacccctagagttttaataaaatctctgaaattgagaaattataactctaatgcccatttctaacaatgggacccaaaaataattaaatccactaataattataaaaatgtcaataattagtgctaattgcctttactaatccatattatgaaataccgtcattataggtgcggtttgcaattttcaattgttaatatgcggttcaaactgtatcgcaccggatactataaaaatactattttttttatatttatttaggttcaatatgttaaggcccaacctaagcccaataattattgtattgtgtaaacttgaaacgtttttttttttcagatttattttcaagccttatggtatttttgacaagtgttgctcaagctttgttgtatttgcgatagtttaattatttagtgatagtccaaaccgtaaaaatcccaccgcaccacaccattttttgcggtgcagtttttgtggttttaaagtttcacgaggcaggtgtggtttgggaaattgaaaaaaccacatgtatgggttggtttgaaaaaatattcaaaaaccacaccactagaaccgcgaacacccctacccgcaaacttaacattttgttagttctcgagcaaaagaaaaattaaaaacacttttttaaactaagagaaaaagaaaaaaaacacagaagctaaaaaaaaattaggctattctacccccttaaataaatgataaagtgaagaaaaaacaccaagaaaactcaccacccaaacttaattcatgcattgtcgtcaatgtaagaaatcacaaaaatagagagaaacgtagaaaagtacaagagtttagagtttagaatggtcatacctcaccttggagcatttgaagagagggaacaaaagtaaccaaaaataaaatacatacttatagtaaaacataaatactaaataaaaataccttaccaagagtacatgaaagagatcaatgaccttagtaaacaggatcctcaagaaggatctcttccacttcagcagatattaattctaaaaatggttttaatttttgtccattaactttgaaaacaataccactgtttcaattgctccatgtggaaaaacagtgcgcgcaatgtatggaccagtccatttagaacgcaacttacttgagaatagatgcaaatgggaattgtacaaaaggactttctgaccttgagagaagtcttctctcaaaatatttttatcatggtagagcttcatacgatccttgtacttttctgaataatcatatgcatcattcctgtatgtcttctaattcattcagttgaagcttcctcttctcacatgctttgtctatagaaaaatttaactgtttgatggcccagtaggctctatgttctaactcaacaggtaagtgacatgcttttccatacacaagtctatagggtgacatcccaatgggtgttttatatgtagtgcgatatgcccataatgcatcaatgagtcttaaagatcaatctttcctagttaaattgatagttttctctaggatgtacttaatcttcctatttgatatttcgacttgaccactagtttgtgggtgataaggtgtagcgatttgtgtgtaataccatattgtttcattaaatgctcaaaaggcttattacaaaagtgtgtacagttatcactaatgatagcacatggcgaactgaaacgggaaaaaatattttctttcaagaacttaagcacaactttatagtcatttgtttgacatgcaacaacttcaacccatttagacacatagttaactccaacaagaatatacaaatttctaaaagagctaggaaatggtcccataaaatcaatgccccaaacatcaaatatatcaacaatcaaaataggatttaaaggcatcatgtttct

SEQ ID NO: 315321 - DNA, 856 bp, Cannabis indica
ataaaaaaaaaataaaagaaataccttttatattacaacacacaaattaagaactattcacaaagtcaattattattggcaaaagaaatttcacatttttttttttctttttcttcgagaaagtattgaaactttaaagaaattattaggtaggggaacaatttataaaggcctttactagactctgaaatatatataattgtgtggtgggaaaaagatataatgaatttgaattttattgtacttaatatattttttattatatatatcacaaaagatctttaaataatgatatagaaatatcataatgagaaaagggtccccacattattttgtataaattgtttatctctctctctctatacattgaaaagtgtatatactttacataaatagaaaaaaaaatcaaactttaatatatacaaagaaattcctttatttttatccaaaagtatatattatggttaggaaaaataaacctaacaaatcagctcataaaagggtcatttaaggacaaaaaaaatattaaaaaaaaagggaaattatttgatacatctttctaaaatggatgtcccttagggtattatatgaaactcgatacttaattacactattagacaatagtggtataatatcgaaaaaaatattaagcactaatggtactttttaatatttctctaaaaatgagactctaagtttcaattttcttttttaaagaaaaataaataaataaataaatatgacacttaatatttaatgtgattaaatttattggaaaaaagaaaaacctttttattttattaaatattattttcaaaatatgggaaaattattaaggttatgataaatatggcat

SEQ ID NO: 315322 - DNA, 1527 bp, Cannabis indica
ttgttccatctcttgctttgtgtacatggctgctaagtgaactaagtagtcacctttatgcataacccgagctgtgttccaatcatgggtgatattagagaaacgccaaatagatcgagcatatttgcaactaaagagagcatgcccaacagtttcccaagcttggtgacagatggaacaagtagaatctgttataatcttcctcttaaccagagcagtagcaacgggaagagcatcattgtaggcacgccagatgaaaatcttgatcttttgtggcaaattcagagaccaaagaaatttccaccaagaagccgatggtgaagaacatgagctatcatcaacttcttcaagggatgctgctaggtgataaccagtttgaactgagtagatgcctgaagtgtgagggtgccaaacaagggtatcttcattgcgaaagaaactcagcgggattgttaagatccgatccacatcaggaggagagaattattggttaagaagcgctaaatcccactgcctttcctctgtaatcagattcgaaacaaccatatcaggaggccctgaaaaatgataaggctgaaaggttgaatgtcctggaatccaagggtcatctgcacacttgattctacaaccttcgcctattttccaacgtaaaccagcagttaaaagacttctaccccaatggataccttgccaagttaaagagggagagtgaccaagggtagcttgaaggaaagaattgttcgggaagtatctgctctttagaaccttagctagaagtgaatcaggttgtttgagaagcctccaagcttgcttagcgagcatcgcttggttaaagtgcataaaagaacgaaaccccatagccccactttccttccgtttacacataagtttccaagaacgccaatgaaccttattgccattctcatttaagccccaccaaaaattagccatcatggactcaagttggttgcaaaagtaagctggcaaacgaaagcaactcattgcgtaagtgggaatggattgaacaaccgcttttagaagtacttcgcgtccaccagctgaaaagattttctcgctccaattgtgcataagtcgccaaattttctccttgatatcactaaacatacgcttcttgtctctaccagaataagatggcaagcctaggtatctttcatggcattcacaaataggcatccgaaggtgtcgatggaagaacacttgagatgcaagagtggtgttaggagaaaaggacataaccgacttgtctgaattgagaacttgacccgaagctctgcggtagatatccaaggatctttgaatagcaaggcatgaagactcatttgcttgacagaagaggaggctgtcatcggcaaagaacaaatgagagatcgatggagcatgtcttgtgaggctaaacccatttaaacggccagaagcttcttcatgttgtaacaatcttgacaaggcttcagaacaaatgagaaacaagtatggcgatagtggacaaccttgacgaagccctcttga

SEQ ID NO: 315323 - DNA, 1750 bp, Cannabis indica
ttttaaatttatttaaattctatttaattatatatcaaatattaaattttatttataaaaaaatatataatatcgattagattagttgaatgtattaacgaggagtgtaaaaaaaaactctcttttatactttcttattgtcatgtgtaattttttaaagagaaaatactattttaaaccttgtattttgcaaatattaataattagattctctattttataaaattgatcctgtattttctaaaatagtacaaataagaccttaagttgattttttgtcaaaataaaatttaataataatccgatctaaatatactatgacaaaactgtttacattttttgtatctgttcgtgttagaaattgtcatcatgttggttatattaaaaaaacaaaacgttatcaaaaattaaactcagggtcctatttttatcattttagaaaatataaggtctattttgtcatttaacaaaataaagggtccaatctgtaacttttgcaaaacacagaatctaaaatagtatttacccttttctaaaatatgtttaaatataattacaattacattctcattactttttattgataattaattatgtcatcttttaatttttttattagattattttattaatgtctcctattttttctttttctttttttcttaatagatgatatgtaccattgtgtatcattttcttaattccttttttttgtaaggttttttttttcatgtatatactaaatgaaaaaaatattacacaaatgaattaaataggtcctacaaacatttatacagtctagcaacaaaaatttacaaaaatacatcttgctgtaaccattcagcctcactaaccaccttcttcaactacaacttccagcaaccaaactagcagaccaactaaaaagaaactaagccagatagagaatcaccataaattttggcgacttcacctgagaaaaagactggaagaaatctaaacatatataatttcaaatttatgcaaaatcaagtagaaaaactggttcgaaactaaaattcaatcctagattacgattaaaattacagaaaacttatcctcctaatattaattttcaaattcataaaatatagttaattgtataaaatagatgagaccttaaatttacaagtagtttaatagtttggaaggttttaccgtaaacattttaacttagagagttaagtgtaattggagtgataactgaaggaattttgccgcaaaaatcttagatgaggaaatagatgtgtttgcatatggaaccgatcaccttcaaaagcctatattacacgatgaaagggtcacatttggctctattatcaatggataataagatgatcagctatattttttctagctctaaactactgattaaactttctcaccaagtagagtctatgattataacaatagcatcttaaagcctcctatatattccaagaaactcaacttgatttccatgtaaattagcatttcaagaccctttgaggaatggtaatgatgaatggtttgattgcataatttttgtgatacatgttgataaagtgtctccaaagaggatagctcataggttgttcatgacatttattttaaagttgacatttaaatttgattttgttagacaagtaatttcaacactatacgtatcgttttaacaagtaatactcacaaagagtgaggtcgatcctacgagaattgtagttaagtatgttaaaattaaattcttacttct

SEQ ID NO: 315324 - DNA, 502 bp, Cannabis indica
ggtcggatcagatccgatccgaatatttgatccagcggggcggggcggggcagatccgtacatgatctggatcaggtcggatcagagtcgaatcagatccgacccgccccattgacattcctactaaaaacacaacttcctacccaaacacaaaagtttttaccatggataatgaaaacccaagacattcctaaacagggaaacattgtttattgccctggaaaggagccctagaggactcaacctaccagaaatcctaatacagggagatgccctcctcaatgggacctcgaaagaattggtaacaaggaaaacattccagaaaaaaagaatgaggaagtgtatgatcctactagatatatacctttagtggaattataaaaggggaatttgaattattatgcactttttaatacaaaattggtttggagaacacttaatgtaggtaatttttaaaatacgacaaattttcaaaaaaaccccaaaatagccttgtcaaaaa

SEQ ID NO: 315325 - DNA, 1178 bp, Cannabis indica
ggctaagttagctttcgggtttggtatgatcaaccctttgtactcaaattttggaaataaaaccttccaaacttcaattaaattttagtcttcattttttcatccattttagtatgttaagtgttaaggtaaactgttagtgtgcacataaatatacatgtattaaattttcattgttcaacataatattaattatttaactattacaaaaaataattttttattcttgaaaaaacaaaaataattaataatttttagtaatatatattttagaaaataataatttttgttttcctttttctttctttctttcacattctatcatctcccccctcttccttttcttcttctacatgagtagcaaccgaccaccaccaccagtgacagagattgggaatgaatggagcatcaacaacgaagagaccaagaatgaatggagcatcaacagtgagatcggggtcgatcctccattaacaccgacgaacaatggaagagagagaggaaaaaaacttttcattttttgtaatatttaaataattaatattaggtgtactaataaaatttgctacgtatatacttacgtacatattaccagttcacattagcacttaacaaaccaaagtgaattaaaaaaatagagaccaaaatagaattgaaatttgagggttttattcctaaaatttcaattcaagaattcatcgtacgaaatacaaaaaattagatagtttaatcgcaaattacttttaaaaaaaaaattaagatattgatgcaccatttttgagtcgaggggtgcacaaaaaattttcaattactgtttttttttttgttttagaacttgaatatgtttctgaaaatttaaaaagtgaaagtccgacgtgaaacttcttaattgggttagagttcttaaaaattaaattaagaaaataaatttgagtttttaggctaaaatcaatttgttttttttttctaaatattttttatgtttttaaatcattcaatccaaaaaaatttccaaatattgtaaaaaattcaaaattattaaatcaactgtaaccaatcatatttttaaaaataactttttacatacaaattttaaaatgttattttcaaatcattctttaatttcccatacttttttaaaaattacagaatgtcttttattattgttattattattt

SEQ ID NO: 315326 - DNA, 506 bp, Cannabis indica
ctatcacaattttgtaagaattaaaacacacatttttttctacagtaatttaaaagcaaagaaagactgatttaaatccatcctgatttcagaaaaaataaaattaaaaaatccatccataaaatattaaatcaacatatggtcacgattgttttcatttaagatagattttttttttatatatatatatatattatttttgaaaattttaggatggggattttattacaaaaattaatttaactgttaagaggataattgataattgccattaaaaatatttcttttattaaaaattttatttgcactcataaaataataagtacacttaattattaaaaaaaattaaataattttaaaaatcttataatattttaaatgttttccttgtattatttatgttaattttaataattttactttcatatttttttctatgttatgtatgtttttcatttttttctaacaaaattttatataatttttatttttttataatatttaaa

SEQ ID NO: 315327 - DNA, 1711 bp, Cannabis indica
ttttaccactaaattttagaatttgaaattagttacaaaaaacttgcctactttaagaggttatgccgcaaataactctaaaataataataataataataaaacaaaaaatgtaatatcaaaactctcaactcatattaaagagactcctaataatcttcaatcatagtattgtctaactatgaagggttttaattgcaggcactgtcattgctaggatacaagaacataatgatgacccttttacgctacgactgctactactactactactattgtaattcaaacacgcagccttatcatcattattattatcaattacagtagcactattctcatgatttaatccttccaccacaatgccaatatcaatctcgttaatcccaatatcaatcccgttaatcccaatattaatccggccattctctttttcttcttcttctttgtcttcattgttcatcaccacaagatcattgggctcttgttggacatgatgatcattttcatttgaggccaatacgacgtcgtcgtcgtcttcgtcgagaggaactaactgcaaggttagacggccattggatctgtgggctcggaagtactcgtgacgagggagcttctcctctgttaggatcaatcgaccgtcggtggtgtagtgacgtgtcaatacccagggcatacgacagggaagattctgggttcgagccaggagtggaattggaggtgggaatactagttttttcttcttcaaaaccattattgtttgctgctgctcatcatcatcatcatcatcagcttccttattattattacacccaaggaaatcatggtattcctcatctccttctttcaaaacgtccacgcaactctccatcccaatgtagtctcccatcatgattaacggtgatgatgaaggcatcatcatcagtactatcgaacaatgaaataaaatgggtacattatatattaattattaaatgaaagaagaacaattacatgaacactgagcttgtgctatatttatttatatatatattattgaacacaaacccaattaatctctgctgatgatgtcatgattgatgtttttttattattattattattttttattttgggagaaaccttgcaaatttcaaaaaaaaaattatataaatcatatgattaattagatgatggaaatagtattttaaatttatttaaaatattaatacatgatcatccatatatgtaatgtatatgcaaaattaagaaaaaattaaacaaaaaaaatcacataatgtaacaactcaaaattagaaattcacttatgggtgattgtttttctgattcacaaaattaataagatacagatgacaactctataatatcactgtatgccagctgggagtccaacaaaatccatgttctttatattaaatttcttctgtggcatttaccttttatatataccattaatataattcacaacattatagatttttgccatatttcttttaccaccgtttggattattattaatattatatagtcaaattttactcaaccgttacatacatacatatgtattttacagtatatgcgtggaattgatcagatattgttataacgaaaaacattgttattcttcccaaaagaaataacaattatgtacatactcctatcaaaatacaaaaaaagaaaaaaaaaaaaaaccaaaaataccaactccactatat

SEQ ID NO: 315328 - DNA, 2392 bp, Cannabis indica
agtagtttacactattatcattatcaaatattaaaataaaaattaaaagattagtctaataaagtgtcgacaattataaaaggaaattattatcttattaaacttttaacgacataacatatatactaatcaagttattgcattaaattgtctctaaaaaaattatataatatacatatatattacattatatatatcaagaataatatgttaacaataagaggttagaaaaaataaaaaataagaataatttatatgaatatttcttaaatttaattgtatggcttggactttataaagatatgaactgctcatgaaaagagaaatcataatgtaaaaattagtatttttgtagtatataatgcagtgtagcttgaactgcgattattaaatttaaatctgtaaactgcaccgcaccgcacgatttatagaaaacacaagctgcaaccgtaccgcaaaagatttcaaaccatattttttgtacgatgtgatgtggtgcgggcagttttaacacctctactagcgagcgagcgttggctaattttttgtgtcaatattttggtactttcattgagagccacaacttgagattcccaacaagatggttgcaacaagatcaacatgtgttgaaagaagcaccaccacttggggcacgccagctgctggagccagtgctgggacaacatctgcatcgcagatgaccggtgaaggccttataaccaattcatgagcccgtcctccaagaccactgacaactgctagtattgatgttggtaggtaagtttcacctgatgagcctcacgtggagctagaagactctaaggaagtcaacactcaagttgaaaaacttagccaatcacttgctaacttaaaatagcagcttcgtgaatctctcgacaagcaacgagaacagttctaaatctagttcacataacattatagaagcgttgaagctcaatgtccagagcaagagtagcgaagagctaaccatgcttagtgaattcgagaagcttatcgctccaacaatgtaacagctcccctaaagctacttccactcaagctagagaacaaccacatctaccaactggccacgtgggtttcacacaaggggaaacccttcacgtgtggaatgcttctaccgtactcggtagccgtgccactactcagcatgcaacaggtgctgaggctccccaaagggcaactaattacaagcgagtgtccaaaaggacttagactcaggaacgccaactgatgggacctctgcctgatgtggagcagtcgcctgttagggaaacaatctatagacaagagacaatatgagtttgtgaatcgatgtatattatggttgttatgatttgtatatgttgtatgttgtatgctaatgtctcaagtacaaatgaggggccatggttgggtatgaaatacgaggtaaggtcattaaatgtagagataccctaccctgtatttgtctgtttcgtgtatgacattgttatggtgaggtttgacacaatgaagttgctgttaaatgtagagataccttattccataacaatggtagagctaagtgtgcccaaattattatagggtcagtttaggcccaggttacgtatgtaatcaccatgatatgataattggcatggtatggttgtgatatagttatttcatagattgtggttattctatgagtatgatataagagttatgatgtctaaatatgatgttataattttttattagcatggacgtatttgatataattttccatgtatagaattatttacttattgttattagttaaagtataatgttaaaatacttaatacattaagaatatgatggtattgtatatagttgtatcgttgtgaatttaagacatgtatggtgaatgttaatatgtgctaaaagtatttcgttatcgggcttttagctcactcccttacttttctcctacaagcaatatatagggacattgcaaataagtttgatgagctgggttagttctagtatatatgttgcgagggactatggaggaacaaacggtctagaacactagtgaagccttgattttattattagatagtaaagtaatttgagctcagtaggatgttgtatatttattttaaaaatacactcaactacttattatttttttttaaaatatgaatcatcattcacattttgcatatttattataaaatcttttgtgtattttcaaacaattttgagtcttttcaattaatgcatcaaaaatagtattttgtaaaatggtaaataccattttggacccttcgttttgcaaaagttaccgattgaaccctgtgttttgttaaatgacaaatagaccctgtattttccaaaatagtaaaaaagggaccctgagcttaatttttga

SEQ ID NO: 315329 - DNA, 1441 bp, Cannabis indica
aggttaatgaagtgagcaaacccattgagaaccaacttagttagcaattagctcaattaacctctaaggtacaacgaatcgctttaggccaacaagtgagaccatgtggattttgtcacactgtgaggcatgctattaatacttgtccacactatttgagggggagactaaggatgtgaacgttgtagataattttcctggtcaactaagttagttgtactatgaacccttctcataaacttatacacctagctggcaaaatcatccaaatatttgctatggaaatcaacaaaatgctccacaatctacaccttcaaaacctggtttcaactttcaacaacagcctcaacaaaattttgtatcgaggcaaacacaagcaccataagctgctccaccctaaaatgccaaaccctctactgaagatctatttaattccttggctactaatactttaaggttctagcacacaactgaagcctcattgtaaagtttagagaatcaagtgagccaactctcagtatcgtataattgattgcaagctcatctattcaataagtttccttcccaacctgagaagaatcccaagaagaatgctagtgcagtaactttgagaagtggaaagcatatgatccacctatcatcccaacaccaagtatagtgccaccaaagccacatgttgatagatcagttgatgaagaagtgtcaccaaatccaactaatcattcacaaccaaagcatactttggtcacaccaccacctttcccaagcagactaaagaagaccaaaaaggaagaagctgacaaggaaattcttgagacattttgcaaggtggaggtgaatatcaatcttcttgatgctattaaataagtgccatgatatgccaagtttttgaaagaactatgcacttataagcgcaagttgaagggtaatgaaaaaattagtgtgggggagaatgtttctacggtattacaaaagaagcttcctccaaagtgtaaggatcctggtactttcactattccttgcaccattggcaataaaaggattgagtggtgtgtgttggattttggagcctctataaatttcatctctttcttcatatacaactctttgaatctaggtccacttgaagaaactgggataattattcaacttattgataggtcgaatgcttatcctagaggtgtcgttgaagatgtgttagttcaagtcaattaattggtatttccaacagacttctatgttcttaatatgaaagatgactccactccatgctccactccgattttgttaggaagaccattcatgaaaactacaagaactaagattgatgttcacgagggaaccttgactatggaatttgatggggagacaatcagattcaacattttgtaggctatggtacccaagtgatatacatgctgtttattctcttgatgtgttg

SEQ ID NO: 315330 - DNA, 1600 bp, Cannabis indica
aaaaaaataaaaaactcaatcacattgcatgagtgaggagccacccgacctaggtcttagtcttccaaatttatttaactataattatataaattcaataaaagaggggaatatgtatatgtatatagaaactggaattgagaagggtggaaaaagaaaaagaaagaaaagcatagttttggcggcccacactcatagccttatgatgtggagatatgaagagaaaaataagaaaggaaaatcaatgtcaatcattttcaacagatgctcatggtcggggattccttctgccacgtcacctgccacgtgggacccaatctcacacagacacacttctcgtagctataaaccccctatggaatatataccaatttagacgatagacgaaaaaaaaaaggaaaatgaagcattgctagctatacgactatatatatatatatatattaatattgtgtttgctttggatattcacattgtttatttgtgtagtatattatataacatttgtggaatctaaatccttgtaatcgtataagtataattagtacgttaaccaatgagattataataaactacatttttgtagacttattgattggaaaattcacgaaacttttctttttaattaattaattttctatgtatacactttttcttcttttccaataaggcaaaactacgtgtatgtcttgtatcatcccagacttgcatgatgctctgattatgttattaatattatatgatcttatcaagatcataagaatatgtatatgaaataatatgtatagtaggtagaatattcacactacgaacaatcaattttatatgattcttatcctgaaggataagaaaattacattcaataaatatatacgctacacgaattctctttttcttgtgtagaatatctaaaattaatcttcatacctgaatattcgtaatgatgttgtctctataagtaacttgtacagatagtaattggccaagtacgttaacccgtatattaattgtgtccattgattttgtgggagaagcttttatatatatatatatatatatatatatatatgcacatatctacatccataaagagccttttatatattctatcttcctatttttttcttctttgaaatgacctaaatataaaaaacacatgtactagctactgaatacaaaataataaaaaaggagatctctcttttaaaatttatatctacacaaccctaccccttgattattggtgcgccaatggtgaccttttagaaaattttctttataatgtgttgcaactaatttatatatatttatatacttggttaattagattaatattattaatgaatttagttatatcattaatttttattttgattatatacgttttatttgtataattaatttttttgttcatgttattcaataaataatataattttttattaattttttttaattaagtactgtttattaaaagaatataataatatttaaaatttgttgttaattataattttaatatttttttattttttaaaaaattttgttacattttttattttttttaaactagtaataacaattcaaaaatattttttag

SEQ ID NO: 315331 - DNA, 1192 bp, Cannabis indica
tgacttacgccatcaacttaatgtcaaccaatagcaagtggatcccatccaactgcgaatcattgagttgaaggtaagtttagaaaatatcaggatggtgaacatgggaaattacctggctctgacttggatgaggaaatcgagccatttcatcccgatattctgaattcccccaaggattcaaaaatccacacatctcccagtatgatgggactacggacccagtcactcacctgaataactttaataccataatgcgagccaacaatgtctcaaataatttgcgatcattttattcctaacgtctttaattggggcagcgagcagctggttcgataattttacccaccatttgataatgtcttgggaatagttgtccaaggattttaagaaacaattaaaagctgctagagatagacgacttgaagcatcatccttaactaacataaagcgtaaccaggcgagtcacttaaggcttacctgagtcgcttcagcacagcagctgcaaaagttagaaatttgaataatagcattcagcttactgctcttcaagcagggatcacagccgatctttcaacagctgggggcgagttatgggatgacttagaggtcgtccagtaagaaacaataatgaattaaatgaaagagcgcaagtgtttatgcacaaaaaggaagcaagaaatgagatgaaattgctgaagactggctaaggaaacaaacgcaatgcaagtactaccacagaaagtactatctcaacaaaagtggataatccgaatggttcaaacaccaaaagaaaggatgacttgagagaatcatctaaaaataagaagaaacagaaaaagcacgacaaatatgttccaatttacaccgtgtacaccgagttgaatgaaacttgtgaaaacatcttttttgcaaatgagcacagggttgcattctgcaagcctgaactaatgagacatgcgagatataagcgatattcaacaaaattttgccgatttcataaagacatggggcatacaaccgaagagtgtcggcaacggaaggacgagatagagagcctaaaattgcgtggatatttcaaacagtatgagaagcgtcaaaggaacgagccaaaccagcccaatcagcccaacaacccagataaccaaagattgcaacctcccccggttgagggcgaggatatactggttat

SEQ ID NO: 315332 - DNA, 1394 bp, Cannabis indica
aataattgtcctatctgttttgttaaatgagaaaatgaatcttttattttctaaaatagtataaataggatcctaagtttaatttttgacaatttactttttaatataaccagcgtaaaaataattttagaacaaaaaaagatagaaaaaacataacaaatttgtcatgacacctcgacaccgatatatcgaattattattaagttttattttatttagcaatattttaaaacatacataaagtctaatcagtaacttttgtaaaatataaaatttaaaatagtatcgaatattgtatagttttatcatctaaactttattatagtaactgaaatttcctatcaattttttttatttaatgttaatactaatagactccatttcggttacctttagtttgtaatggttcttataatttggataaatttttacccaaaaaaaacaaaaagctgtcgagaaatttttccaacataaaagttcatagtgcaaaactttacaaaatctacagttcactagaaaatattactatttagtattgtgcattgctattaggtattagtattggtgtctagtactattgtaaaccctaaagtgacgctttgtgaatagttagtgatatcctataataattatttaaatattagtttagatcttaagttttacaaaagataccgattagattttctatttcattaaataacaatttagatcctgtattttttaaaatagtacaaaatagattttgaactcaatttcgtcaatttttgtaatataaccaacttgaaacatatttatgcaagaacagatataaataaatatgtaattattattgttataacacctcaaagtcaagttatttattaattttaatttgagaaaaattaagttcaatgtctatattgtcctatttgaaaaatataaagtttaaattgtcattttataaaatacatgggtctaaaataatatttacccaattaatcacatggaatataatatttaatttctctaatttaatataatacaatacaatacacataataccgtatttcaaataatataataatataaaaaatatcccaagatactcaagatgtagtggacaagttgtgaaaatagtagggtccttgctactttggctagtctacactacacacacttgtatatgttaggtacccacaattccctaatttcaatgcaatagatgacacatttgcatgcccacacacgtgatgtggacctcatctcttttgctcaaatgaattttaaaaagagagagagagagagattacaaacttcaccattttgtacctactattttagaggttgttatggtatggtatgggaaggttataatgtgcattgttatcagagcttattctgtatgggaaatttga

SEQ ID NO: 315333 - DNA, 1042 bp, Cannabis indica
ttttcttttttttttcttccaaagcataaaagttacttctcctttgcacaatccttacgttttgaatcataccttaaatcttactttgtgggctccaacattcctcttttcaaatattataactgaactttgcattattatgcatattttttgtgtttaattgaatttctaatttttgacaattctaaatttttaagtattttttttttcttgagtgttgttaggcacttgaagtagcgccttaagaatggttagctatatttttttatgtgaaatctaataggtacttaattatactaataataatataatacattagaattgtactaagcactagtatcttttagtattctattttttttattaatattgtcccgtgacataaagtaagggaaatttgattttttatgcatgatttaagggttaattgattaggaaaacttaaactataggtaattgttagaataggcccacttcacctaaatcccaaaactacccctctcaaaatcacacactcattctctctccttccctctattctctatgttcgcccaaacctaaacccagtcgtcccaaacccaaatcgtcccaacccagccgtcccaaccccagccaaaaccccaaatcgtcccaaatgtcggccacacccgcacggaggagacccaccagcccacggcgctcccccaccgacccacgatacccacggcacaccactaccgaagcaccaccaccattttttattgttttattgattttatttgtgattttagtgttgaagatagattttgttagatttagggatagatttaggttttagaatctcaaatcagtgattttgggcaaggtctgatggggtccgatgtaggtttgatggggggtccgatatggtcgaatgaaactgtgagtttgcgagatagaagacgtaggtccgatggggggtccgataggtccgatatagggtccaatgggtccaattgtgtccgatgtggggtctgatgagggggtctgattgtgtaaatgggggtgatgtaaatggggggta

SEQ ID NO: 315334 - DNA, 846 bp, Cannabis indica
ttagatttcacttaaaactcatttaaatttatcttggatcacatttttttttaatttattcaaatctcctctaattatgtattaaaggttagatttgacatgaaaaaaaataatttcagtcattcaatcattcacaatatttattaaatattgaattcgatcaattcaatatttattaaatatatttcatatatatctattaatttaaataatttaaatttatttaatattttaaacttaatctttttatatcaaattcattcaaatttttagttctaatatttatttaattggattatatttattcaatataaaaaaaaaagaacaatttcaatattaattttcatatatacatttacattttaactataatatcaaaaaaatttaattgcttatccaaactaaataaaaatactaattaattcgattagaaattagatgtatttaatttttagacagttaatccaacatttgatttggaatattaaaaaaataacatctaatctgatccgattataattaaatatttaatgtgacaatcgattataattagatttgatcaatttacacacacctctcatcttccccatatattcttacggtgaagtttagtttttctgtttttcctttaaaaaccccatgaatttttgttcaagattataatttgtaagtactataatttcattcaaagtattactcgagtatgctcatttgtttcgccataatatcaaaattttattgttaatgttactacgatttcgttcaaaatttactaaaagaaaacaaaaagaaagaaaaaattattttctatttgttagtgttatcgttttgatcaagaatctcaaa

SEQ ID NO: 315335 - DNA, 2819 bp, Cannabis indica
ggagacataaaagggaaactaccaaaaaaataggaaactactaaatatctactaaacatctaattcttttacagctaatatctaacaaaccctaaaggtattatttgtattatatatgaaatatgtaatttctatgatttttgctcgacaacgacggaaaatgcgatggatggccatttgagttacatgagtaagtctagaacctttttcttagtgggattaataatagaaataaatagaataccaggtttaagcggggttatggtttttgaccattttacccctaagcttgaattagcttaagtttaagcactaagggcatgtggtcatttggcaaaagggggataggtggctggtgggttgagtgacacctggccaattctatttcagcctaagattgatattgggttaattagaaggaaatgaattaataaaagaaaatcaacaaattctctctcttcgaaccaaacttgaaccaaggagggttgctgctgaattcttcatttcagcaggattccacgatctctttcaaggtgtaaaattgtgtattagcttgaggtaaccctaatcatcttcattttaagatttcttgtattgtaagcttgatcttagtgtgatttttttatgaattggtggctgttagggttaggttggtttgtgtatcagattctaagtttgatttgagtttggtttgagttcttgcagctggtttagggttgtggtgtggtgaatgcacaagtttgagtttaaaaactcaagcttgattcatccatggcactttttggattctgtatgtttttctggattctattgcttggtttatattatttgaggtcaatataggtgttctggaagttttaatgaggtttgggcacgttttgatgaggttttggattgcttgggaaaacctggtgcaaaccagttaaccggttctgcgacaagtttcccgagcaatccatttcgtcgattcatgttagtttcagagccttggttgggtacttccttgttgtgtagggtattgtagtttcagttgtcaatagcagaaccttaagttggaggtttggagttcccagattagggttttaaacgtgtcgtttacccattcatgttatgtgaatagggcatccatacagcacgagatttttcgtttaggtcagccaactcacttgaattcgaaaacgaggtaagaatagcgtagaacatatgatatatatatatatatgaatgtatgtatgtgtgatatatatgcatgcttgttatgattcgtacactaccagcactagtacaatagtggtactgagtgcattggtatagcgtgcaatgtttaaagagtacattacggtgttaccagcacaagtacggagaggtacgagatgtttgtggtacaacacttagtggtactcatgatacgaaacaaaccctaccaacactcgtacaatgtcggtacgtagtgtatgtggtgctgtaccctagtaaagaatattcttactcatttgttaagccttgtagataggtgtatgggcgcctagatacaagtcgatattatatgatttgttatatgcttttcttactgagtttgtcgactcacaattgctattttcgtgtgtaggtaaaggaaaggcaaaggttaaacatgagtgagctttgagctaagatggtgtttgcacatgtcatggcggcatgacttggagtgttcgatctcgggacatctggggttttattttgtagtcgttgtgcgaccagactaaatattttggataatgttgtaaaagtttaaatatgggatcccgacctttgtaaataaatgtttaaacgtttataaagtttagtaattaaatctaaagttttaatttgacacaatttttaagaaaaatcctttgattagcgaaggtggcattgtaattgaaaaattactgtagcacgcctaagtatcagggtattacattggttttgtgagctatcttgtgcatctaattaggcttccataggatcatataacatttctcccctaataaggttatgaagaagataacaagcagtccttattctacattgagttttgattaaataaaaaaaggacttctcaatatagcccatcgaatcttaagcaaaccgaaacaacgctctataatattcctagtagaggaatatttcatgttaaaaaattctttctcatttgtaggtgcacatccatgttgccattctgtaaaatgatatcttcttcctctgtatggtacaataaacccttcacaattggtataactagcatccacaagataataataacctaacaaaaataaatatatattattgaggactctatgtggtttaaggtataagttaaagtgcattgcacatttcaaaacaaactctacctagtaccttcaggaactcttaaaccgtatgctctagttattgcttctcgtagaactcttaaatctgatgccgaaccttcctaactcggcaaaacaaatataaaattcacatttcgatcgcaaactcctaacatattggtcgtaaccttgccctttctattttgataggtcgacttgtcagtttgactagcatgcacctcaatatgtgtctcatctaatgctcctaaacaattctttacaaaataaagccaacaaaatattaatttgaatataaacactaaattttaatggtctaaaatctaataacttcttagttaaaaattgttaatacaccttgaaccatttccatctattgtcattgcaactttctaaacaagttctggcacactacaagctagcttgtaatcgagaactccactcaataccacattgaagtatctacta

SEQ ID NO: 315336 - DNA, 1584 bp, Cannabis indica
tgtgacaaatgtatatatagtttttttttttttttttaattgacagatatataacaaaattataaaactaggatacccgcacaaagcgcggcatagttctctagttttctaataaaatgcaaaatatggccttggcttgggtgatgagttggggcgttggcaggggagccagccagccagcgagattaccaacgagttaactctttttttttcttcccttgactcagaaagaaagaaaaaagaaacagagagagagagagagagaggagaggtgcgcacgttaacaatcccaatacaaagctcttccaagattgggaagcccattgataacctaagcaaatcctccgagctatcggaatactggatacgattagttttctttctttttctgaaatcttttccctttttggctgtcggtagctgagccacgccatgttcttcgagaataacctgcatttggagattttgttagctttctttgcaatgtaggtagatttgatcgttgttcccctgatttcgatctttttgatttttttctttatttcaccatgctgctttccgcgtggtatgttgcactggaatcgaggacttttggaggaatttgagcctttgatggtgcagttctgttctagggtttcctttttggctttggagctgaatgttaatttggtcgagagcctggttcgtggcctttaggggctttgattttgcagcattgtgagttaagggctttctgagaggagttttgcgtttatggggtatggatgaaatgaaggcatttcttgctttctttgtttccacgaattgacacacgctagttagttgagtagcgaagttttcttctcttctatcttctttttgtctgttctgtttcaatgggggaaagttggaaactagtttgtggtattggatatatctggggatgtgattgtttaaatgtgtattgggtagtctactccaaggcagcacttgatatcacaacttgaatggctgatcctcagaaaagtggtatcgccgagagggatatcgaacaggtatattttgtttgctttgttttcttctcttagttattcataaaactttgattatgtataagcattttccttgttgggttctaaattcgttttaattaggagtgttacatttaatatatttaaaatttttattttctttaatttggtaaaccatttttttcccaaaatcccattacaaacaatgacataaaaatttatgtacattcaatatgttctagccatagattcaaatagtccatttcattatgaacattttaaggtggcatttagttgtaatgaaatggtagaaatgaaataattttcatttcattttttttttgtttaattgcacatttaagtattgaatgcaatgactttttttttatcattttggtagtatgactattcgattttgaaatagaagcaaagaccattctagtgcattgagaaaaaaattcaataatttttttatgcattttaaattttattccattctattcctattctcattcctatttctttgccgaacttaaagactttccttacgtgctttcaagaaaaaaaaaaaaaa

SEQ ID NO: 315337 - DNA, 816 bp, Cannabis indica
ggtaataaataaaagatttggacatccacataattattaatatttataacatatgattcattttaatatttttcacttgctcttttaaaccgtatttacataaaaatttgatgtcaatttttaatattataaataagtaaatcatacataaaatattatttattttatttttttaaaattcaatattatttatctttttatgtttgctgttcccttattttaaatttaaaatcaaaatatcttaatttaaataaaatatttattgagaactaattatcaaaatataataataaattgatgatgtattaattgatataatataattactaattgattaaaaatatcaatacacatataatatctaatttcttaaaaataaaatcatctagagtgcttaaatttaaatttatatatatactatatatgaattaaatatatatatatatagtaataaagttaataattcaaatttgtataaaagacggtgtctattttttgtgatagtaacttctactacgtaacattaaaaaattcaaaaataattattatttagattccatcatttaatatttcaatatataattatagatatttgtgtgtacgtattaatttatatttactctaaatatatatatatatattgactttctctatattacgagtgcaactaatttaaaatacttttaccaactccaaaagtctggaagttattgagagttatattgttaagaagacaactctgaagaatatgttcctcaacagatgactatttaaaaattgactagagttcgatttagagagatacgatgatgacaa

SEQ ID NO: 315338 - DNA, 1125 bp, Cannabis indica
acatttaatgttaattaatttttcttagcttcccaacaagtattctgctctataaaagtaaattattacttcataagttgcatattttcttattctttaaaccatagaatgttcttctcttgtaagttctaaatgtctagtacagagaacaaatacaaacttttatctgccacagagatcaaacaggaacctagtggcgaaattactccagaaatccaagaatatatagaagctttttaaatgttttaaaaataaaagggtggcgaacaaatggaggttcatacacagtcaaataaatgatgagtggatgaaatacccatatccaccacgagggttccccgaagggtgtcgtcattgcagattagtttattttaatggcgaactggtcaagcctggatctttatgctcgtactacgagtctcaccgacacagtaaagacttctaaattgttatgttatgattgtttaatggttagttttaatgtttgtttagtctttacttatgtttaaaatttttcacttgtctcgtgtctactgtttaaaagttttcaatctttttgtcttaaagtcgataatatatcaacattctatcgataaattatcgacaaacataaataccacaaaatattcctaaatatcggcaacaatttaaatttattgggtgtattgtcgataaaatatcgacaaactatcgatacactgtgaatataatcagcaaaaataatttacaaatttaatcgacaatatgtcgatatactattgataacaatgaatttatttaaattattttatttatcaaaaaaaatcgatatcatgtcgataatggtcatcccgaaccttccttcgcatattatcgacatttcatcgatattctatcgataaaatatcgataagctctagaaaacacagatttcgacgaaaaccaaatctaccagatctactattttagactaaaaaaataccagttccaataaatatcacacacatataatgaaagcaaactacatactattacaaatgtctaacaaaatgattaaaaacaacttacccattgtaatggtgaatgattcttgagtgattgggggtgtggtcccaattttccaccaccgagagagagagagagaga

SEQ ID NO: 315339 - DNA, 2384 bp, Cannabis indica
tcatttatactcagacaattagaatcaaacagtcacacaccatagatgaaatccaaatcactactgacatctgtcacaattaaacataaacatagatatttagtaatataaaatcattctactaattatagaagttatattcctttaattatataaattatatctgttgccacataaagtaaccatctttattacatcacattacctaattagataagtcgatgctttaaatctaataatcatgtattgcattgcctaatcaggtaagctcgtgccaaaacctgacacccatatatttcatcacctaatcagacgtgtccgtgccttatcctggcaccaatatatcgcatcacctaatcaggtgagcccatgccataacctggcactcacatgtcattactacccgtacctaaacaagcatcactgacatgaagaaacctaccaacaatttaagtttagagtgatgactttattgcggttgcctcataggaacaacctggataccaatacccatataccacattacctactcaggctaattcatgccatagcctagcactcatatatcacatcacctaatcaagtgtgcttgtatatcacctaatcaggcaatctttacatcgttgcctaatatgacaaccttttcattattgcctaatcagacaatctttccatcgttgcctaataagacaaccttttcatcattacctaatcatacaatctttacatcgttacctaataagacaaccttttcattattgcctaatcagacaatcttttcattatgtaacaataataactgtgtcttaatctcaatatctatcaattctctacaatattaattgtattgcaacataacatgctatgcagtataaaatacttttcttacctctgatccaaattcatgcatgttgtccaatccaagtggaggaacatccccgatgatctcagccctatgtcaaaacaactaaaaccaataagtgtttatcccaaaacactgcttaatatttgcaaaggataacctagggtttcataccaaaccccgtggtacaataaaactaaaataaaactaaaattttggctttaaaacatataccatattgtagagctcgtcacaagccttatcttccttcctgcccaccggaagagcgaggtcagctactggtaggaaggctggtgagtcagccactagatgtatagagagggctatccctctcttagatgaggcattgtatgagttgggtgttggcgtgcctgacaggctgtactctgccagacttcgagacctttctctggtgaattatgctttcagctttgttcatctttttgggactgtataagctggtcagccatagtgttatttacttgtggctggccgaccttgggcatccatacaagggtttgtccggccatggcagtctaaagaggggactgggcggccaaaattgactgtttgatactgacattgttttaatttattttcagtccttgatgaaattgagttcggctcgaaacggctctagagggtctttagacgcttttgaggagcatgtgaaggtcttagaagcatctattgccgcaaaggacaaagccaatgccgagctagaggtccttctaatagagaagcaaagaatggtcttaagaatggagactatgctgagggccaagaacaccgagaacatcaaccaagctgctcttctctccgggttgcagacagatcttgaggaacataagaagaagttacagaaggctgttaatggccaagatgacattaaggagtattaccttgatttgtccgtcgaacttagttacgagttctgcctacacaacactaaagccaagttgtcatacatgggcagttcggccttcgtggagagaacactggcccatgggagggcattatttgagaatcgaatggagacacaccagaccgctgcctatcgagagggctcatcatcaggtacccacgacgaagtgttggccgacccaccagtgggggaggtggccgaccaggatgttgcccaccaggccagcaaacatagtgatgatggggctgacctagactctatgatcttgacttttcagctccagatttagctcctgtgcacatatgtagatggaatttttattagtattcaactttatgtttgtattgtatagaaaatgtttcatgttctgcgtagcctgtggcttttttagggcctgtggcatattacctgttgggttttatgccctaaataaaactccatttcaatgtaatctttattctttaaatatcaataaagaaacagaagtattttcatcactcttttgtgtgtcttttggttcatgttatcatttacttgtttatttgatttataaattcatccgaaccctttttacat

SEQ ID NO: 315340 - DNA, 1597 bp, Cannabis indica
ttttttataattttttttctatgaatcaggtaagtatatattgactttaaacttgaatgtgcacattaacaacacccaaaagaatttgagatctaaacttcaaactacctttacaacttaacaatctattttctatctacttttgacatcttctttagcatttgaatataaattctacttcttattatagttttaactttgtttaccaaaacaaataagagttgcacgctttgacaccaacaggcttaattttggcaccatcaaaatgttggttttatggaactaaatcaaatattgagcgaaagagttatttttaataattattgtaccatatgtccaagattattatatgtatatacatattaaacaaaaagtaaatagttgaaaagaataattggctctcgaagcttatcagggtatccttgagtcctttcgtatgttgtattttcagaacgataatgataaaactcacattgatcttcaagaccatccaccacacacaaggactagtgtaggctagtaggataatagtctatatgatgttcttgattaaatatcaacatatgagcaagaactatttctttattgatagagagaaaaatgtttactcgtgaaactatttttaggctttcatataagtctcgtaaaaaattctattatttcaaaaactgtatagaattttgttatgttgtatatttaaacaaactcaaaaaatgttttatttaattaattattcaaatttaattttttttattaaattatattgaattatttgattaaataatataactgaattcagttacacatatttatatgttataaccgattgagggaatctgtaaagcccgcttagttaatttggaaattatcagttaattatgattaattatgaaattatttatagctatttaaataatttattatactgttatttatggaattcagaaatgcatggttatgttattcagtagttttcatattttgcatttccggtgcccggtattttggaactcggcgtttggctcagtagaaatcacaacttagtatgttagtagtttggggacgggttttagacattgggaatgtcgggaatggccgggaatttagaatttcccaaaaatacccctttagtatgatttatgtggttttatggtggaggggcaaaatggtctttttgccccattagtgttttgtctttagtgactttattaattgaagattaaatatttattttaatgttacttggctgaaataatgtgataaatgctttataaactcctttttctcttaatttccacacttagtcaaaattagaaagaaaatttcaaaactcacacactcaaagctctctctctcttttcggccaaagcttgggctgctagggctgggatttttctgctcaaagcttgtaattttcagctcatctttgtgtaatcctagtcaaggtttgatcacttgtaacttcccctttatgtttcttgagttttggagaaaatttgatgaaatgcatgcatgttttgtggctgttgttattgctgtgttttagtattaatttctggaatgtaagcatgttaaattgaggtgattcaagctgtta

SEQ ID NO: 315341 - DNA, 1047 bp, Cannabis indica
tgagtaagtattagtttaatctaaaaaggaacattggaagataatcaaacatatcctgaaatacaataagaggaactatatgttagttataagggatatgaattaaaaccattaagctataccagatcaaattcttagatttgtgttaatgctacaaagtctacttaagagatagtgattaatctggcggtggagcagtatttttggagaagtgtaaaagccaattcaaaatcactcactctgttagtaaggatgaataataaggctgtcctaaagtcagttagggaacaattcaaactcgggaaagtttgatacaaactttgtcataattctagacgtggaataattgcttagtgtaactttgtgaaaaaataaatgcaattgctagatagtaaagaattttgtaccataagatgagtaaaacatatagatggagaattcacaaaatcatagattttaagactaaggaaaatgtgatggtggagaagattgatactaagtacagcttatcagatcctattaaatattctatgcaaaatattacatttgataaagacatcaagcatatgagattaaattaaaattcacttttatttttatatttgtacaagtgggagtttgttggaattttatgtcctaaataaatccaatttcattttaatcttatttactttcaataaagatcagaaatcatatcttcacattgtcatatgcttttttaacatgttttatacatgatcatatgtttaatatataatttctactaaatcccaaacaggtattcacaattacagtgatgtcatcgcagtgaaaagtaattatgattatatgctttaaattattaagtctcacgatttattagtgcactagatttacactaacgagataatcaaggataatgtttacctacacttagctaagtggaatgacttttccaagacattagtaaagtaaaccaggattggatatatcgactatacatctaaccaagatcgtgttgggctttgtgccctatataaaactctatttcaatgtaatcttttctat

SEQ ID NO: 315342 - DNA, 1269 bp, Cannabis indica
tactttttgggataaactcaaaactaaaagttttctattgatagatatagcgtgaaaataccctaaatatcgataaaacatgaaaaattggggtctaaaatctaaaaaatctggtgaatcgaaaccgcaaaatggtttactgttttctggggtccttcagaaaaactttgcagaaaacacctaactttgaaaattttatcaaatctaccctaaattctaccaaactctccaaaatacctattcaagacataattaacataatccaaccaaaaatagcagctaaactccctaaatccaatttcaccattaaagacctaagtttgagcttaaaagctcaaatcttgatctttctcaataataaccataaaaattagcataaaccaacataattttcttagaaatagcctcaaaaatactcaaacactactaattcaaacagtaacccaaaccgaaaacatgcatgaaactctaattttctatttaaaaattcaaagagaaaagggagagaagcttaccttaagctaaccctcttttaatctatgaaactgtagctaaacttctttaatttttgatctgaaatggagacgaaaatcccttagttgcttgggattgcttgggccgaactaagaagagaagggaaggagaaggagtttctaatttttggttttttctttaatgaaatctaattgtctaacataatataaatcctatattcagatttcattattgaacaacaaaacaaaatactagaatttccactacaagataacctttacgggagtattctaacttctaagccatttttttgtgtaaaggtcgaatcccactatgaggtctttttttggaagatttgatccaatggctctctggacaacggaacatccaaagaagaattatagttttatcggcttgttgattaattcaatacgaagtacttaattatttgcaacttggaaatgctgcatcttcttcttccagaatttaaaatactatcttattattcaaaattttctttgtggactaaaataatatattttcttcacaattttgagaccctgaacgttacagatatcaaatcgcacaccttgccttatctcaagccgagagcatcactttgctctcactagtaggggtatttttttgggcattttacaaaaatactggatttggggtaatacttttcaattttactgccacacggcagaattaacatttatactgtcctccctttttttttttttttcttttatactgtcaataccaaaacaa

SEQ ID NO: 315343 - DNA, 2457 bp, Cannabis indica
ttatatcttctctgatttgagttatcttccatatccaacttgataagaaaatatgataagtgttaggaaggtttccgtctcgctatattctctttgtgatatttataatgtgaggtaatcttcttgctgtataaaatgcgaggcatcttatgctgatacactcacttcgatcggatcggatggatgaatgttcttttcttttcagtatattccgaggcatgcatatgtctcgttagtcttagataaatagttacttttcttgtctcgatattgactataaagttaatgatcaatgagttttaagtattatcatttaacctttaattaataaacgagttatttaatatgcatttaatgatatcgttatatcaatcaaattgtttcgtattccttctgttggacacgtgtcaacctttgaagtgtagctgaattttgggtacaacaattgccccttaaaaagtacttttttaattaaaaggaactttttaaatgattataaggatatttttgtcctatcctaattttgaaaaattgcatgctttggctttcggtagttcagaacttcgaggcacgtcattagcattaaatgttcggtctcttccgatctgtaatgttcctatccattagaccaatctttttttgatctaacaatattgctcgatagggtataaatataaaaaatattagtctatttcaccatttttgaatttcaaacctccaaatttcccctgtaacttgcgatcacttccctttaaacttgcatgccctcactgtctttcaattatttcttgtgtatttcatttgattacatctccattctcaaagaatctcaggattcatcgtttcagttgtcgaaaccccaatcgcaaagttttccactacccaaaaatcttcatcaaaacagcaagtggctcattctctttctcctgccagttttctattctgcatttgtagttttatctttgtaatttattacttcatttattcgctatgtttggttattttaggtaattttgtttttcattttagggttaaagaaaatttttaggtttattagattcatagatttctgggttaggttgaatttatttcttccagaaattgtgattattcttgtctgcaaatatgacccaatttaaatctgaaattccaaccactgagatccttgaaactgtctaccttgaaaatttagcccttccatttgaatccaaaacttacatacctaaatccatacttgaggtaaacgatgccaaaattagggatcatttaataaaaaccaatcaagctaaaatttccagtcgctatagacgttttttgcaagaaataaccgagggtagatgtcattatctgtgagacgcatcttggcctgaaccacaatccttatcttctattcctttagcaagacctttgtttttacctcgagtcactgttgttttttttatcaggtgacttaaattttgaaatcatgaccactcaagcttgtaaatcaaagacccctcaagatccaacagttaccttgaggcagaattgattaaatccaaggtcagatctatagctccctttgtgggtaatatattaaaggcttgtggcatcaaatacgagaacggatgtcgcattaggtccatcacccaaggggagtttagctatttcttaccagaaagagtaattcgagaagagtgtgggactagtactagtggctcgtctggaataggcgcttggagcctcaagcacttcagggctggagtagtactccccctaagagagtactttaaggaattctataattatctcaaaatttccccttttaagttaattccgagttcttacagaatcctggcctgtttaaaggtcttatatcatattatgggatgggagtgtcctactccccttgagatagtgtatttttattctattaaagtcttccttgcaaggaagcgaggatcaggaggtttttactacctcggtgcccactcaaacgatcgcaggatcattgtgaggttacctaataaaacagaattcaaggatgaattcttctggacaaccggtctttctcccattaacacaatagcattctgcattatacgtaagtattatcttttctcaaaatcttggtttcgagtttttgatttataaattgaaggcatttatttatattacttattgtgttgacaacaatcacgagaaggccaattcctactcccgagatgattgaatggcataaaactctcttaggtcttccgtttggagtgtaattagcagattttctactgatcgagaccaatctgaagatcattaatcttctcgacactgagcaatccacctgcgattataagaatccaaaattttctaagttgcaacaagtttcgattgttgggttttgtgccctaaataaagccccatttcaatataatcaaatttactaaataataaagatcagaaatcacattttatgttgca

SEQ ID NO: 315344 - DNA, 1231 bp, Cannabis indica
agagaaattacagtgaaaaattcaatgtaacactcaaccatggaagatgaagagattgttcaactcttcaaataaatttgttttattactcttttggtcaaaaccatggaagataaagagattataaaaattgggaattaattttgctttgagtaaatttgtgtatttcatttgcttttttttttctgcatttttttggtaaacaatcaaattaatttgagtgatcatattaatgatatttggatggagcgatgttagtgttggattgttcctgctaccctcaagaagtgggccaagcccgctgaaaggcatttgggtggtggcgaccgcccacggtaaataatccttgcctcttttagttttcagttttgttttgttaaattttttagatgcatttatatttttgatatctttagattctttttttgaaaaacaaaagaaattttattaacattaattagaatgtgaatataaaagggcttgcatatttttgtttttgacttgagggcctgcatatttttgatattattagatttaagttttagatttgcatatactttcctaatacgaatgttagttttttggttggtttatgttgttgggtgaatttctcttaattaacaacaattgataattatcaactaaagattcaaaagctactgcaagtagagaaagaattagtttcatcattgatcctaatttagtctattattgactacaggagttttcaacaaccaactgagaaagatgttgaatgtactatttagcaattgtcagcagtggtttataatataaggactggattttcactgattaagctctctttgcaaatcttattaaaagacaagtctgtttggtatagatgatagataaaatcatatttttacgaattattataaatatctaaagtaaatagtagaagtatatatccagtgataaaattattgttgtattcaagtgtaatacttaaaatttaatttcttttattaacgtcgtattatatggctctattcagaggaattgtaaaaaaggatgtgaatgcaccacatgggttacgcctattgtaataatcttcttcctctttggtcactcggtaaggaatacatctgtacttattattataacacaaaatatattgtaatgccttgatacttaggcacactacagtgatttttcaattacaatgctatctttgttaaccaaagaaattttcttgaaaatcgtgtcaaat

SEQ ID NO: 315345 - DNA, 2290 bp, Cannabis indica
tcgtttaatttttattttattttctaatctcttctcttgtttcctaatttcttggacaaatcgttgtcttgataatttcttcaactagaaaatgaaaaggatttattttattcttattattttgtttattttccatatgataatgaccaagaacaaatatcatatttgtcttatagatatcaaattaatgagatgaaaagacatcatacataagtagctatacgatttttttcattgaatttattcatttcaagctagttacagttaattaataaaagaaaattaatataacataaataatatataattgaaagatcttattttacttgaattatctaaatcgaaagtaaaataaaagtattcaactctcagcataattcttaaaattaaaatatgggtaaaaaattatctcaaaaatgataaattaattactatataaaaatataaacatatagaaaacatgcatttcctaaagtcaaagttttatctcttaatattaattaattaaagacaatttaatatgattatataatatatatttggtagaataacattttaatattgttttcactggccgggcagtcgacaaagaggcatgagtaatcatctatatatttactgtagtgaaattaaatttatcttcgcgaattaatgttttattattattcaaaaagtaagggaaaaacattgttcgatctatatatgttgattgtgtgccatatttagagagaggaaatttgtgcaagagatagaatattacgagtataaaaaaatgtaagcgtctgaaaaattgtattctaaaaatttgaacgcaaattaatttttgtagtttctataaaacaaaaattgtttggttataatgtttattttaattttaataataataatattttaaaaaaaataaataaaagcaataatataaacatatattttgtatgataaatatatttaatagtaatagttgagttacaagaaagatgaaaacagagagagaagcaagaagagaaaaggaattctttattcaatgttatgttctgttatgatacaagagttggtatttatacagaagtaataataacagaaaacacactaactaactgtacaacagtataactgttattaactaactataacagcccttaactaacttcctaaccgtatggactctgtatctcaacatcccccctcaaactgcactgggattggcccagtgacagtttgttacataaaaagttgaacttaggaagagttaagggtttggtgaagatgtcagcaggctgctcttcagtgggaatatagcagacagtaagtttgccttcagtgaccaactctcgaacatagtgtacatcaacctcaatgtgctttgttcgggaatgaaaaactggattagaggctagttgttgagctccttgattatcacaccatataactggtgttcttgctggttttatgcctaattcagttagcacagagatgatccatacaacctctgttgcagtggtagatagtgatcgatattcagattcggtgctagatcgagccactgatttttgcttcttagacccccaagagattagatttcctccaagctttacacagtaaccggttgtcgattttctatcatccaaattgcatgcccaatccgcatctgaaaaggcctctaaagtaagacatgttgctggtttgaagatcagtcccatgttaagtgtgcctttaatgtatcgaaggacccttttgcatgcattccattgggcaacagttggcttttgcatgaattgactcagtttattgactgagaaggcaagatcaggtcgagtcatggttaagtattgtagggagccaatggtactcctgtatagagtaggatcttcgaacaagggactgtcagcagtgtataatttgtatcctggggttgctggtgtaatgcatgatttggaggtgtccatgttggttcttttgaggatatccaatgcatattgtgattgtgacaaagagatggtgttgccggttcttgtagcttgaaatcccagaaaataactcactgacccgagtgttttgagagcaaattgggcttgtagatcagtaatactttgttgacagctttagaattagcaccagtgatgagaatcatcaacgtacactaaaacaagtaagggactgccattggaagtgctgaaaaacaaactgctatctgagacagaattggtgaatccccaagctaataatgcacttttgagcttctcataccaagctctaggtgcttgttttaagccatacaaggctttcttta

SEQ ID NO: 315346 - DNA, 1158 bp, Cannabis indica
ctcaattacgcaacaatggtgatcaacactaaaattacataaatcctccacatgggaactggaagatcaaacacacatgagattgacccgagttggttctaagcaaactgccttgactttccaggaatataatctcgaacaattattaattcaatatgtgaattagtttcaaattcacatattttcataaccataatttatatttatacaaaagctttggatataatgcactcaaaaatccatatggtacataattacagaagctttgttcccatgttctgatatatgtatatttctttaccacataatgaggaaaaacatgttccctattaaaaaatgcagcgattatttgttaatttgtgtaacttcaggtgcttagcaaggcagaaaccaagccagagagcttttgtttcagcagcgtttaatgggaagatttgatcttgttgtgtaattgtaattaacatttttataaaataaaattgtgagccatcttgttattcatagcaccaatgcaatgccatcttagaatcaacactgagttaaatgtttaacattagttctaatctaaattctaaaccttttgactattaaaagaatttttaatcaatgactcagtcaatccactactaatcagacaaaacaaaataaatacttgaaaagttgaaaaattgctctatacttcctcagaaaaatgagtgtctaaatcccagtacaacagagttttctttacatacagtgagttattaaaacataaaaaactacttattttacattatcgattgtttaaaatctttcttcttttcaccgttttcaaccctgcttgcttccattttagaccgtaggaagagatgaaggccacatttccatgagtgacctcctcccaattttattcatagcggaggaaaaccggttacattctgctatgttagacactgcataaaatggaagaacaataagtcaataaaacaaacctgagattacatgtggtaaatgcaagttcatcacataaatctgacatctggtatgtgactaatcttgttccagtactcctcattcccacgagagtactttttctccaccagaggacatcttcgtatccataaagaggtgagggaggttggaaacccttcttctgacaatgtctccaactcagggcac

SEQ ID NO: 315347 - DNA, 1372 bp, Cannabis indica
ggtgctggtgggagagtgggttccacgtaagccactggcgagtgggaatacctgacaccgccgccgacgaaataacggacgcgagttcccgcgcgttggcttggatgagaaaacgtctcccctctgtgatattttggcggactccgtaaccgtcctggaggcagtgcccaagctcccggagcgcgtctatgtgaccaaggaaggcggcgcgtgcacaaagggccacgccggctcgtaagtctttgtcgcttttagagccaccgctaccgttgaactggataacggcgagagaataaagtgctggcgcgtgagaactaatcgccgccttggccatgagcgaggctccgcttcctcggttttgcaaacagtagaaacgaatctgagagagaaagaagaataagaagtggttgagttaatgccattaattaattctcttcaatgtttcatgcattcaatacaagactaattatgcatacatatatacatatataaactcaccatgcccagagtgtaacaggcctcaacattcccagcttccgcacactgtttcaagaatcgatgagacgattcagaccagtttttggcattaactgagaaagtttttggtgaagctttagataacaccattgaatgaagccccaaaccgtttaatctcttgcatctgttccatgcaatcaaaccatttataaacgttaaaattaaacaaaattcaaaaccaatcaaaagtcttaaaaaaaaagggaaattaagaatgatggcaaaagactaattacacatacgttatcaatacgttggtaaaatcggaagggcaacgagcggtgttgctaagtttagcgagaatagatataacaaggtcatcaggtaatgagtcgaataaatcaagaccggtgccggaagaagaaatcttcggcgaaaattttgttcttttccgacaatcaataagattcccttcttctccgacgaaatcttttctcttgctaattactttaaccttctccaaaaacattcctccaccaccaccaccaccaccacaaccaccaactcttgggtaacaaaggcctctccttgttctcatactggtggcttgttctttctctcttaatactctttacacacagagataaagagaggccgaaaaagagacccgaatccttatatatatataatagaagagaagagaagaaaagaaaacgaagctaggccgaaataattaattaaaattaaaatatataaataaaaaaagaaaaggaaactaatcttcgttatttacaaatttacccctccacttatagtattgacggtcaaatggggttgaccagatctgttggttcgtgacggtttctatttggtatttttttttttttaataaaaa

SEQ ID NO: 315348 - DNA, 1001 bp, Cannabis indica
tgcttttgtttattcttggatttaatggttttttcttagtgatttccgtctccggcgtctccccacacacgaagaaggttgtttcccgtgtgtttttctgttcacagtataaatgttatgctgttgggcttgggcagtacaaaagtaataaaattgggctggggcagtaaaaatgttgtttttgccgtgtcgcagtataattgtaaagttttggtccaaaagcagtatttttgtaaaattcccttaatatccatggatctaatatatgtgataaattttccaatgtattaattacacatttaatcatattttgaaaaaatttgcatttattgtcttgtgcttcttttgtgggcaacagtataggcaacctttaactcagcataggcaatagcatggtcctgaaagtttcaattgtgctaaatgtgttgtactcctatattgtatctatataaagaagaccgtttgtttggaaatgattttcttatcctcattctctaatcaaaaatagaaaattctaagaacaacaaaagcttttttcattaatttaaatattttctgaagaatttttctcttaataattctcactttacctaatataaaacaatgccttacatgtccttaagtttgagccaaacttgttatcttttcatggctacctaatgaccagagagacttgcaagcacataaaaaagaataagactagccgagtccttaaatttcccaactttcccagtagatccacgctacgcaatgtatcaaaagttcatgaaaagataacacaatgaagtcaagaagttccaaacttaatcgatggaattaaactctttaacaaattccatcatggtcctcttatcattgatctcaaaataatgaaaagcacatctttcctaaaacattagagaatttttgtggttcctgtaaagtattttttggtcaagttagttgacaaaatattttttcatttatggtaagattgttttgcatacatacccgatttctta

SEQ ID NO: 315349 - DNA, 1182 bp, Cannabis indica
atatagtagtttactttctattttttataaatatgtatttaaattatattacatatagattatatataaaaaaactttataatcttagtcgagttatttcgaattaattgagcgggttggtattattttcaatgtgcctaatataaagatttggcggattatatttttgtcagatttttcagtttgtatttttcatcgagttatctcagtttgatttgggcgggtttacaaaattttatgtacaaccctattacctccttcaaaaatccaaggatctaaggatcggcaataacaactctggcttttggcagcgactgtggcaacttaaaatcccgccaaaagttaaaaatctacggcgggtagcttctggttgtcttccaagtcggctaaacctccaatcgaaacatggatgtccttactatttttctggtatgtaatgcttctactgaatctacttctcacattttattgtcttgcccttttgctacttcttgctggaatagtacgagtcttcctgctggagtttcccttgctgcctctttcgggggttggttagagtctcttttccaacaacttgatgacaatcgtgtgtaaagtggtgatggtttgttggtctttgtggaaagtaagaaattctattatttggaaagacaaatttctcactatagctcatgttttagcttcgtttagattgaatccgatagcctgctctccattcaagcaatctggagccactctactttatgttctatttttggcttcattgttcaagattgtaaaactttactgctttctttgtctaatattaaaattcattttgttaaacgatcagcaaaccgactagcattctagactttctcgggattactctgatcgtagcatttgtgtagctaatgctctagctatgttattgagtaagggtgttcattggaccacatccaatatttttaggcctatccaaatctgatccaatcatatattggatgttagattttatcatctaattcaatccaattaatttcagtcatccaattgatccaatatccattggatgttggatttgatcggttctatctgttggatgtatttcatatatatatttattgatttaatttgagtttatttaatattttaggtctagtattttttggatcggatcggatcggatcagatccatctaat

SEQ ID NO: 315350 - DNA, 1638 bp, Cannabis indica
acttagttagtgtggatattcgagtttctaagctctctctaactttcttagatatagatttattatttttcacaaaatgagtagtgagtttggggactagtaccctatatttatatgtgggatatactctatcaatatatcttcaacaattccgaggcctaaatgaaactctttagccatactcaaaacaacttaattcaaatagtatttacaacaacaatattttttgtaactataaattataatacttaatcaatacaccctaatcacaatcaattctaaatagttattttccaagggttatagaataatatcctttacaatcaaataaatttaaaatcataaccattagaaacaaattatgcgacaagggcttgaaataaacactattatataatattcaaagtgatacttcaaaggttaaatcacttattaagaaattcacatatattaataattttaaaactatacacagactaagagagagtgcaaaactacatatgcttagttttaatacttataacctgttacacatagtacaataatgacatgaaagtcatttcatttgaataaattccaatattttaaaataaaataaaacaaaaagcattcttagaatttagacataaaacacagcatagacaacaattaaaacacataataattaagacacataaaacttgattaggtagactttttttagattaaccaaaatgtcactaaggagaatgctaatccaatattgctttttttattaagcaatattggtcaaatctacctagatagttgctctactatagctgaaaaagatagatttttcaagccacagaaagtaagagaaagctccacatatgacaagagtatgttaatgatctattatcacttacttattattaatagtttctcacataattttggttataaataactaatgtgcctaattttcattggcagcagaaatatatacaatgagataagagtacagaagagaggattcagaagcaactaaagtttattaaatagtgttttcacttactaattttgatatagattttttcttaatatatgaaatttttgaagacaagtgtacttaatttgtattctacagattttaagtgttcttgtataattactattatatgaaaaattactacagtgcaaatgtattcaataatttcaatcagtttttcctatatttggaaaaaaaaaatacaaattgaggaaaataagtaaacatacacagattaagagagaaagtttgagaaagttttgtctcagccttatctaagtctgtcattttactctaacttatttctaaaatgccaagtaatatagatgtttcggccataaataaagtcctcccagttcagcaatagatcaatattatgtgtaatagtgttaggtttataaaatatattatatttcccttgttcttttgggatttagctaagataaaagttcttactgttttgtgtgatgaatgttagacttttatgtgggcttacattaaattttattggttttattaaaacttgggttgattggatagttctttgctgtgttagcccatgttgttggtgatcaattgttaatgggcttagcatctgtgagtaaagtctaggtgaagcagaagtgtgg

SEQ ID NO: 315351 - DNA, 2066 bp, Cannabis indica
tcttcttttgattttgatatttttttttatatatttttgagggcaccaaaatttaattcgtcttaggcctatattcccagggttggccctgagtgtcccttaaccatttctataaccactcttatataaatattgtatatattattctgatttttactgacatgacctgacaggtccatgtggccaatattaataccacgtgaaagtacaactcgccaacaaggaaactaagccgtctattcaacacttcaactaatggaggatccgagtacttaggagagacaacgaaatgacaaaccagccacccttaggggttggccggccctatgcccagcataggtcgggcaacttccaagcattatgtggccgaccagcctgcaccctagcaagtgcatggccgaccaaattctggtgcgcaaccttcatctgtggacagcaagttaagcagcgaattaggccttgacaacccacgaaaataaagaaaaaatatcagcaactttcctattttttagggatatttaagtcatttaaagtttattatttaattatataaatatagttttatttacatatttttaagggatattagtgatgtaagctctactatataaaaagcattagttaaatcctaatttcctaagtcagttccaaccctcaagctctaagtctgaaacttaactttctcctctctctcacgccataagaatattctctccatcacttgagatttgccaactccattctcatattgtaatcttaagagagccacttcagattccataacacttgtgatcttagtggtattatctctggtatcaatataacaaaaaagggagcaggtcattacttgctaactaagagggccgaatctctataaaatctcatgtcttatttacttttttgttcttattgtgcagcacatggcaaacatcattaataaatacgactatgttgtcagttggccaaatttgaggtcaacaatttggtgtttaaatctgttataagtggataaataagcgtaatttattaattacggagatttatatagcatatgtgaatgtaatatgagctatttgtggaataaaaatatttttaattttggcgaccttagagactcgatcgggggccaaaaatatcataataagtttaattaatagatttggcaggaatattatgataagttgatagtataaatattgggataattaagagtatgtgaaatttggcctagtgtcctagaagtagagatttcatagtggctaaagaatgataacataaccattaataataaagtttttattattatattattatattattgttaatattaatattaatataattattatattattaattctaaatttcttgggcctggtttgagtgattttgatggattgttaagtgttgagcaagtttgagtttgaactcaaacttggttcaacaatggtgttttgagtttctatacaattttgctgcttttttgcttaaaatatgttgttgggtgatattataggtattttggaaagttttgttgagtttgggtatgatttgagagagatatacaatttttagggtttttttgcagtgaactggttaaccaattctgctagtactgtagaaccagttaaccgtttcactaggcaagaccctagaaatcggttttccatttggggaatctgatttactagtttaggcagtttctagagccttagttttgatgtttcctcgatatttagggtattatcatgccatttatcaattggaaaacttttagttttaagtttaatttaggtcctcagaaagagtcatagcaagttgtttacccatttatgtgattgtgacataaggcctccattcaatgcgtgattttccattcaggttgaccgatacgcttaaatttagaaatgaggtaagattagcatagaatgtatatatatttatatgaatatgtgtgtgtattatatgcatgctgatattgtgactcatatgttaccaacactagtacaatagtgttactgagtgcattggtacaacatatgatgttcaaagggtacgatccgatg

SEQ ID NO: 315352 - DNA, 714 bp, Cannabis indica
aaccaagttatgtcttatgcacataactcttgacatatatgcatgcattcaatagatatcaaagcatatagaatcttagggtaataaccctaaattgcatagtaaatactcattcctacaacatattacagcatgcctgaaataacatttattgagggtaataaccctaacttatgccttcatttaattaacaacacaaccatacactattgcttccttaccttataatattctagggtaataaccctagaccacattaaaattaactccaggtactagtttaccgagtctagctttatcatgccttagacacataattctttattccaacatatttatcatggtataaatgtcttggtggtaggctgagattatgttgaagaggaatacacagaggctcgatctctaggtactaaaggtccaaaggttccttagtgggtcatgccactatccatgccaacctttaagagattgactaatctctttgaaaaaggcttccttggaaaagtaaatgcatttctgcctagtcttgggcaacttgccacaatcctagaggcagattttgtgcatggtcggggccacatgtcaaacaaggtggaatgttgcctttgcatccatattttatagaaatggccaactattaccatatatgtctgttggatatattttaccaggatctagacttactaccatgtatgtttcattaacatccta

SEQ ID NO: 315353 - DNA, 1117 bp, Cannabis indica
tttttttttttttttgccaataataaaaagtttatgctttctacatatcgaaataatctccttaattttaaaaaaagaaaataatctccttaaaaattaagttgtgatactactacaaactgtacttttggtgtcagttataaactaacacttatacatttaatttcggttcataaaaccaacacctattccacagcgacaaaaaaagtcattttttttgtgtcaattctaaaccgacactattgagttttggtgttgttttaaaactgacacttaaagcatacatattatgttcaatttaaaaccgataccattgagttttggtatcattttataaccgacacttaaaggttctttagtgtcaattataaaacgacaccaaaagacttgtttgttgatattttttctttttgctttactttataaccaacacttaatttttttttgaatttttagtgtcggttttaaaacgactgtattattgacataaaaaaaattacaattatttatcaattttcccacctacacggtaagatttcagaattaacacaaaatatcaacaaaaattaaataataagaacatcaaatcaagtatacttatactatattcaataaatagtataacaaagtactatatctattctgactaattgcaataagaaaagtccatcctactaaaaaaaaaagtagttgtaattcatgtgggaacatggactatcctcaccactctcagttgtgttaacatgttgaactccaggtcccccaaaatgacactgcttaatacgaagatcgaattcattaatttagacatgggaagaagcatcacccaaatcgaaattacagcaatagcaacaaatgatgtatgccgacgcttgttactgtcaaatagggctgagcatcgatcgatttggtcagtttttttctatataaaaatccagaattcgattttcagtctggattggtgcaatctgaaaaccgaccgaccaatccaaaaactatcttaaagccgaccgttttgaaccactgtttagtcggtttaaaccgcccaaactgatttttttttttaaaaaaaaaaaatgatccaatttattctataaacacattattctacatttta

SEQ ID NO: 315354 - DNA, 1783 bp, Cannabis indica
actagtttagagtttcgggttgtcagattgacagattagctagaattactagaatgcccctaggcttttattttaatttaaggtattgggaggggtattatggtcatttgagtgggtgataaaagctttatctttagtgttaattaggctgaaatggattattggtaataagtttaattgtttttgtttatttttgtatttttttaatttttattagactattaggtgtaaaagaaaaataggtaagtcatatcaccttcacatttcttcttcttcttacttgaaaccctaaggagctacaaatcaaggatttctcttgcttattcttcagtccttggatcagattgaaagaggtagaagcttgtttagacattaaggtaagatcttgaaactttattcttgaattacttaggttttaagtaagaaatgttgattctctttgaggatttagagttctatgtttggattcaattgagggattgtgcttttagatctattttgaggtgtgttgaaatttgaattgaataatttctactagttgtttaatttggattgaattaaatgaaataagaggagttttcttcacttgagtatgtgatttttgaattaattaagggttgagatgttgtaattgatacttgagatgcattatatttatgatattgtactgttctggagcttttgggttgttttggtggtgtttggattgaatttggaggagtaaaactggaaattgcagccctgccagaaccagtcggcccgtgggttctggtgcagcagaaccggtcgaccggttagctgtagggggaatttttcagttttcctcagggtcgggtttacagctcggggtgatttccgtgtctgatatagattgtttagaagttgtaaaacctattttggagttaataaaagttagggtttaccagttatgggaattaggaatattcccagaatgattgatttaagttatttattgaatgttgttgtcgtgacgtaggacccggggtcatcaagctttgttttccacttaggtaggcatgcacgcttaatttctggactgaggtaagaatagtattaagcaccgtatacggttaatgttatgattattacaatctcgattatgatcaagatcccggtatgtgtttattgtgacttaatcttaatcgaggttaacagtatgtatttaataggaaatgattattatcgttgtgactcgattatgatcaagggaaataatatgaaatgattatcatcattgtgactcgattatgatcgagggaaatagtatgaaacgattgttatcgttgtgactcgattatgatcgagtaaaagaaacgatcattaccgttatgagtaattactcatgaaaccgcggataggtttcttacttatcgtttgttgtatcaaacaacgataatgacatatgtagcacgtggttaacaagtggtaagagtactttatgaagtatcgggattgtgtggttacgatgttgagatatggatcaagcgtgttaatatgtgatgagttgtaattgaatacatattgttatagtgtgactaaatgaacgttatgttgcttatgaatttagtcactttccttgtagaatctcagtgactcatgagaagtaagagtaagtattcataggaacctaagattggagtgctttatgaagcactaagaatatatagttatgtgctgattaaatattcatttagtataatgatgaagatgttgattgtaacgcccttacttacgtaaaataagatgccataaataaactggc

SEQ ID NO: 315355 - DNA, 978 bp, Cannabis indica
attttcttaaaaaataaataaatgaattggaccttgaaaaatagaggtgttgtccaattaatgcccgctactcaatacttgggccgattgtgaccacaatatatcatatggccattaatgatgtgattctgtactattataataacacaactactcaattagttattggttagtttcttttcttgttacaaatttgggaggacattcttggtagttggctcagctttctcttgtgacacatagagtgaattatatgggatgtgagataaatgttgtgaggattgagtgattgatcgatcgatcttagcagatctgagattagtctgtaatagatactttgtaagtataatctcttggagaaattggtaaggaataactctctaatctttatagccaaagagtagctcaacctttcaaaaaataataataattaattaactaaattataaatagatatttctttggttactaaggaaaactattggactgaattttcatataaaatatgggccatgcaatttttcatcttcatttatctaaagtttataggacttaaaatgtattttctttttatttttaccacaattaattattttttgtatttaaatctaatttaatttaataattactaataattattaaataaaacataatttaaatatttttattaatttaacaaattaaaaatatcaagattaataaaatattttttatttacttttttttttttcttatttttacttagtcataaaattactcaaaattgaataagttaataatgtaagtcataattaattaataacaaatcaattatcgagacttatgacttgatatttatcctggatattacgggagaaaattacactctataccctttttatattgtcctcttttattttttaccctcttttttaaagtctatcatttttacctcttttttttaaactattatacaaattcggccccctgtcacttcaa

SEQ ID NO: 315356 - DNA, 1643 bp, Cannabis indica
aaaaattgttttaactttttaaaaatagaaaattgcttttaaaaactaataggggtgtttggcctaaatttttttttttttttttgtaaaattgagttacaaaagaatctgaaaacatcaaagtgttattttctatttaaaaaataacttattttttggtctaatatatatgctttttacattttgtctcacttactcgggtctggggccgaggttgtggttcgagtccagggtcgtgggccaggcttcggggttggggccaaatctagattcagggtcgagttctggggacggggtttgggtttgaggccaagtttgggtctaggtttgggtccaggtcaaggtctaaggttcggggccagagcgaggttaatgtccaggatttgggtctaggttcgtggttgaggtctagggtcgggtgtctacggtccaggatttgaggtcaagttggagtctgagatctggatatgagtctgaggtttgatccatactgataagaattagcttatcttcttattaattaattaagttgttattatgttggttgtaatcagattgttacagtactctctcttactagcattaggaccacttctcaagtttctattagtgcttgtaaactttactcatgtataaatagaaattgttcccctcagcttcattattacaatataaaaatagtgtaatgtttggtatcagagctaaaaaaggactgcaccaatgtcgtcccattctcagactcctcaagtcaccaccattgttgcagcaagtgtcgtaagctcatctttcccaaccattgtaccaaactgtacccaacctttaaagacattgaatcaaccctttcctctgaagcttgacaaaaagaattatgtattttacaaaactatggtatctactgtcatacgaattcaacgatgatggattcgttagtggcactcgaccgtgtccagcagagtttgttccaactctagcaacaattgaaggtgaatttagttttggagtgactatcaatccaaaatttgagcattagattgtaagtgaccaactattaatggattggttatacagttcaatgactgagggaataactactgaggtagtaggttgtgaattagttgttgcattgtgaaaagctctcaaaaacatgtatagagcacactcaaagtcgaaaatggataatactcgagtgctgattcaatcaacatgtaagggttcaacatcagtggaggattatttgaagcagaagaaggcctggtcatattcactaacattgacaaatgaaccttatccaaaaaatcaaatcatatgtaatgtaacattcgttctagatattgagtacctaccaattgtattgcaaatcaagtctcatccttctactacttggcaagaactgcaaggaattttactagcttttgataacaagatggagcgcctccagaatctaagcctcaatagaaacaacaagtctactcacttccctgtttcaccaaatgtaaatctagcaaattgctcaaacacacactacaaaaaactgctacttttagtgacaaattttaagtcacaacaaaatgttatttgtgactaaaatgtagtatttagttacaagttgtcactaatttagttttagtcacaacaagtattgt

SEQ ID NO: 315357 - DNA, 605 bp, Cannabis indica
acaacaactaatgaaagttcattgtcaaaaaaaaaaaaaagcaacgaaatataccttttttttttgctattttgtttatgctaattagtatttttctgtgtattttgatatgtactaaatcatattctgtgaattttttaggctgttaaaaattatctattaactgttgagatcattgaattaagcacttttgtccaattttagttagataagtctaatatggatgaaagttcagggaatatggtaaatattaaagtttggggagcatgatttagtaaataaataatcatcgaattggtaaaatttaatgaaattggacaaaaatacttaaatccaacaatcttaaagtaaaaaaaattcagtagcgtgttttgataagtgtcaaaatttagagagcaaaaatcctaattaatttttttttatttaaatatttttaattttgtatcaattttttttatgaacaaaaggaataattccataaaaagagcacaaagcccaaatagatccatcaatcaatacaagtaagaagattaaaatagtgaaaattacatgaatatgggatttcataacaaagttagaaaaatatggcatttttaggtttgcca

SEQ ID NO: 315358 - DNA, 1682 bp, Cannabis indica
aaaaaagtaatgtcagctgatgtatcaacttatcacggtggagacggtggtggtatggttccactagaccctagtagggtaccgtcgacatgtgagtcagctccaccgccaaggaagggatgtggccttgctgctaaccttaatgttgaacaacgaaggcgagatgcatgaaaaccattaccactaacacttgatgaagtgacaggaaaagtggttagcacggagaaccaagcttttctacgtcaacggggtgttgaagtcacaatcttgttgccatgacactacttgaattttaaagatgtacctcaacactttaaagaccaacatgtacaaaaaatgaaggtaaaataaattaacaagtttaatgttgtagatttttaattttaatgaatacaaaattctttaacaagtactatttgtgtgtagtttttgtacgatgttgatggtcatgcagagcctgaaaaggttatgcaaactctctaccatgagatgaagagaaggtattctgagagaaagaatatcacgcataatcactttttagaacattattctggggatccaaatgatttgaaaagtgttatcaatgttgtacattattctggaagcaaattgtacgaattatttctgagcccaaattttattgcgcgatctaatcaaaaaaacaaaaataaaaaggaaatgaagtatacgtccacacaaggcacaaagtcgatggcatcaactcgtaatgaatttgtaagtaaaattattcactttctattagtaattttttttacacattacacaaactaaccctacttttgaatagaatgtccctgaagactatgcaatttatgcttggaaaaaaagccacattaaataaggaacagacgcttgggttagcgagacatgccgagaactatatgtaagttttaaatttttgttttataatatttttaaaatgaatgaatgaaggtaatattgtgtttctaacattttatttgatcaagaaaaaatgaatgaagaggttgcgaacatgataggaatagaaaatgattcttgctatggatcttctagcaaatacaagcaatttcaagctataaatagagttcttgggaaccagtcgaactatgaaagaggagtgggttacaaattgaaagacaaatcggcaacaagctctagcactcaaagtcgagttcaatcacaaggcccttctccatccattaatcccgaagatatgggagtctttgctgagtttatgttaaaaatgtgtgataagattgatcaatctggcaactttagtgacccttccctatatgacccacgatttgaaaactttttacaaaaatttttactatcacaatgacaaggtagtgcgtctgcttcaaccctacgttcaatgtcaatgccacaacaacatgtttttcaacaaccacaaaatatgtctcctattatgtccgttctttcaaaaacatcaacaaaattctcccaacatgtctgctagcccttaacagtcgcctcaattacattacctattcaggcatccctcacagtctcctcccatatattttccagatgccacaagaggatctcagtgttggaaatatattttaccaggatctaaatttactaccatgtatgtttcattaacatcctaatatgaattctaaaacaatgaaataagcacatataaagtttagaaa

SEQ ID NO: 315359 - DNA, 690 bp, Cannabis indica
gttggcattttaaacttgtggggaacgacaagagattgatctcaggtgggaaaggagttccgcatgctctgtctagctcaagatcaaggtttctttgtccatccatgatgtgaatcatatatttcagttcgtctagctgtgcccgtacagctaggctaacctgctcggcattctggtcaatttgaatttagtcaacatctttttcagcgggaatttgagtgcgggttttgggctgcacgatcgtcgcgagattctgcttgtctacttccctacttctatttagatcattccttaggtcattggtcgcccccaacctttcgaatactgaagtgcctggctgtcttagcgattgattcgcttggttgacgggtggaatggcaccactgatctggttggaacaatcaggtatgacttctcctgatgaattacaagacaaggtttgcctgcctactgtaaggcccacgagtggaactcatgaccaggtattgggcggctgaccatttgcagtctgggaagtattcattactgcatcttcgtccatcttacccaggggaatgatatttggaagttgctgacctacagtttggtaggcttttcgtatcagcacgacagcttgccgactacaattttcaatctctgcatggttagcccttaatgcctccatctgtctatccctccattcggtaaaca

SEQ ID NO: 315360 - DNA, 874 bp, Cannabis indica
aattttttaaaagacaatatttttgttagtgggggctataaccccacattaatacaactgagtccgtccctgcacacatacatgtagtgcatattatattttttaacaaaaacttacaaaaataaaaaaacacactttaaattaatatttatagtactttttttcttctctactcttttaactttagcatccatatttttcattcacatcaataccgatagtggtacgaagacactcattttttaatgtttttgtacataaaaaaatgataatcaagccaccatcggactataatcggaccatattctacatttatatatatgttaaactctatttattaaattcgtcaggaagacatcggagcaccatcagataccattagtatcgggccagcactatcagaccaccatcagactatatcttatatttataggtagcctttgaccactatcagacatttgtctttaaccttgactcatttaaacaacaggatatcattaggccaccatcggaccaccattgagtcttgcaagaaaacctacccaaaactcaaatccggttattttcgaccctaaatttaacatcaacccatataaacagacattaatcttataaaatttaattctaaatcaataaatctataaataaaatcatacatttcaaccctaaatcacacgaaatacaatactataaaatggaaaacttacattcatggcgcgcggtggtcgtggtttagagagttgggtcttgggttggtagtcatcggtggattagtggtcttcggttggaggcgcggtgcttggcaaccgtggcttactatagggtcatcgtgagagagagagagagagagagagagagagaggagagagagaga

SEQ ID NO: 315361 - DNA, 1761 bp, Cannabis indica
gtattgacttaataacaaagaatataatgatcccttttcttagagctcttacaataatatctctaaatatgaattcttagatcaattttttgacccccttgcccagtgagagtagatcactatttatagggctatgagctttgcgggaagagtttcccttctgattacaatacatataattggcaggattgcatattaaatgcagaatatactgatcaagggatttggacagcttgccatatctctgtgatatgatcccaaaatcatggggatttcttctgtgattcacgatgtgagtgttgaaactgctaagtgttggcgtgctgttcggattgctcactgcccgaccaagaagacttcgcctgtgtaattatatgcgatgctctgtttggcatatctcgtgcaaacagatatgtaaagtttattacacgtgtcaccatcgtgtgatgccatgttagagtgaaaaatttaggataacacacataatgaaacttgtgactcctgttccaaaatgaaacaaatttgtatcttactctacctaaaaatgtctaaacaaaatgataataaatgaaacaaattaaaaggataattgtctatttatttaaactaaaaaaacagatatttcatggattatgagaacttgttagttgtcatttgtcactaactatcatggcttcttagaggaggtacaccatgcccaccagcttccatccgtagaataattgttactgcaagattaatgaatgcatgctaactcctcctaatctttataaaccctaatgaaattctgtaagtgttaaattgaattaatatttcaatagagatatatatattagacagtagaattagaatgtgtacctcatcaatatcttccaatagtataatcacctaaaataacaattaatgcaaaatgtttttaatgtattattgaataaaataataaataataataatgttggacataaaatattatagtgatgagaacttttcattttgtgcatctacaaatcaaagtactacgctgccaatctaaaattcgtattcactatatgtgttcttatcaaagtaaataaatcttataacaattcataacaaaagcatatttcatcttaggctattacattactaaaacaagttttcttgagttctttttcaaaaaggaaaatcatatatagtaatgtgccatagagagatatacataaggccataatctaagaacgatctctcaaatgtagatgaataattgtgatcaacaatatgaaaagaataccacattatattcctaaaaaatcttgaattcagctacaaaggaaaaagattatctaagcagccaaacataggaaaatatttcttggtactccgattcccataaacaaatatacaaataaagattattcatctcacttcatatttgggcttaggtccattcttagccctaaccacatttataatgatttaaactttaaacaaaaataccacaaaacaaaattatctacattgccaataatattttcatagtaagtttctatttatgaaggaatacataaacatatatgcctagtgaagagtcaaaacgttgtaaaagagaactacctggaaccatttacaggatgttgcattaagactttatttataaaaacattaacaaattactatgaatattattaaaatagaacatatggtaagctacacaaataataaagataaacagatacataagatcaaggagcagaatgcaacttttgaaaactcaattccatt

SEQ ID NO: 315362 - DNA, 1217 bp, Cannabis indica
tgtgttattaattagactactacaaataaaacaccaaaatccaattagtaatatttagtataaatgaattttggtgtaatttgtttgtagtaaatactaattaataacacatgaaaattaattattagttgtacattttcatattatttattaattagtgtactacaaataaaaaaccgaaatcaaataattagattaaataatactgctgcatgcatagatatagtggtggcaatttgtgttcgcggttcgtgttcgtgtcgtgtcgtgatccatgtatgtataacaggtacatacttgacccgaacacgactcatttaataatcgtgtcaaaaaataaaatctgaacacaacccgtttataaacgggttgactcgacacgacccatgtaaatcgtttataaatatattttatttaaacatgtcaaccaataacacgtttaagaagtattcaacatgtttataattcatttatgatatattaaagtactaaaataactttaaatgagtcattaacgggtcaatatcgtgttagtcgtgtcaacccgaatacgatccgtttattaaacgggttagacaagtcaacccgaatacgacccgaacccatttaaaacaaacctaaactcactaattcttatgcggatttcaaatcgtgttatcgtatttaatttaacttgtttggatcctacaataatattaaccttatatattttcatctcaatttctcccaatacacaacatatacaaggactggtccttagtttgatttggtttttgtggatcctacaataataataataatgttttattttcgtaaatgttaagaagtaatagtatatatacaataaagttgagagacttggagtcaggggtcatatgaaacgacacgtgtacaatgattaggacaggagtggggactgaattgagaacgatagcacctaaaccttgagttgtgcaaatgacatggcgcctacctccttttcagcctacaccatctttgctaccccactttaatcataataattcatattttaattattatatattttcggaacagttttgtctcatgtagttcgcgatttaatttttgcagctcatagtttaacaaaacatatttttcgattagacgatgagctattataatttaaaaaatttcaccgccgattataatgtattgcattattaatcataaataactttattcacctcgtcaaacaa

SEQ ID NO: 315363 - DNA, 1232 bp, Cannabis indica
ttagggaaataagatagcaagctgttaatttcagtaacaaaatgattgagatgcagattgtgagtatcattattacaaatataatccactaaaaccttacaattcgaaacaatactatccagataaaaggaatgagtatgacaccgaaacagagcaaggtgtaaagcttgtgcttccattaacaaaggtgagggaattccatgccaaggctttgccaaatataaaagtacctcccctttgtttgtttgaatggacataccgaaactcatcttgtttagctgtgtatcttgagcagcatccactgaaagctgtagattgtaattgggagcagatggcgcactgccattggacatcaacgaaacatcctgaggctgtctaatagtaggagctttgtcattgcagctttggtattggtccatatattctgttacttcacgtaatacctgagcaggaggagaagagaaaccagcatgtagccaactgttcttgcagttccaaattttccacaacaagcatacaaagtagtgataatttcaaacagtaaaaatggtggcagcaaggtgtaataaatccaaacaagttagtgaaatatttttagtaatgaaatcatgaatactagttaattcccatacctcctggacagcggggcatctgaaaagagcgtgctctagggtttcattgtgatagtgacattggtaacaatgtggggaaggaagggttttccgtttaaaaaggttatagttggtaggaaggatatcatgacaaacacgccaaagaaagtgtttcagtttgggaggtaaaggaagtgtccacaactgtttccaccatgtttgagaggctttgttatctcaaggtgttgggtcattttggtggatctgactatgggcttggtggtaacctgagttgactatgtaagtgccatgaataagcatcagttgcagagatgttggtaagagggatgctgaggatagcttgagtaacatcttcagggaaggtggcttggagaagggtaaggttccagtccttggtaggtgttaagagattttccactgtcatatttgcatctgattggtgtcgaaggtaatgaagtttaccatatcctggaatcaaggcatcgttgaagatagagattgtggtatcatcaccaattgatcttcgaagacctgacttgagaagttctttgccccaagtgatactagtccaaacaagagaaggcctatggccctttccag

SEQ ID NO: 315364 - DNA, 1106 bp, Cannabis indica
tttttttttttttttgatttcaagcgtttatatattacatcatgttttacctgggactcgaacccaggacctccaacactcacacacccacctaatgatataattcaaaggtttttggtttaaaattatcttactacggagcttaaaaagagggacacttgtacttgaaaactacttcattgcaaacttggtattgctttgggccaaccattcaatttttccttctttctaacccttcaaaaaaattctagtcggaaaccaataaccacgcccttattaccaatgatatacagattatcataatacagtttaataatatcccacaaaattgtgattaataacttatttgagaacaaataaacaccattcatcaagtttttttttttataagtggaggttaattttttcttttttgctaattgcatcctggaggttaatcaattattcaacacgatacacactattttatagctcacaaatttcataacatccacagaaacaattttttggttttttcaattaatgagatgcaaacatttatcataaatctacttatataatattttgatttgctttactattcggaaattccatttggtccaattggtgaattttaagaaagggttagcaactatgattatagggtaagctactaattcgtagtaaacaacgaataatgatgatttataatcttttgtctttccccaacttgaaatgacaagattattctagagtctatggatgagaaaaattatcaaaaattatgtaattataattttctcacatccaacattccacatatgaaattagattataattttaaaactagaatcaatatcaacaaccattgccatcaacctaaacaaagaaaaaattccagctgctgttacaatttacaactaatttgaaatttctattaaggtatttaatttccattcatgtaaaaataaaatcaaataacactcatagatttattatactcaaaatatgacttgattctctgttgtaatttcagcggaaataaccttgaggattcaatcataaaatctgcaatgaactcacaactttgacagtaaaatgaacataaaccaattaatctccataat

SEQ ID NO: 315365 - DNA, 1144 bp, Cannabis indica
tttttttttttttgagataaagataaatctgaaactgtattaataaatgtttgaaaataatcgtttacttttcacatgtatatgcgtacaagcagtaagtgttaatatatatggtatgtccgtgtgtgactttatgagctcagctgcaacttccattttgtaattttagcccatttttctatgtttgctactcgtgaggagtgagaggactgagtagtgcagacaccgagtcactaatcaaccaatcaaaagaatacttaaataagcttgtgaaattgtttcaagtgtgtggattctcttttattatagatgtcattataaattagttaattaaaattattatagtatctctgtttactagaatctaggttaattatggaaattagaaacattctcatgaaaacccaagtatgagacaatagaaataggaaaaaagggcacaaaagaaaaaaaaatacaaagtaaaccaattatcatctttagaaagaaaaaatgttgagcgaattagtatcaagcactacaagatgtgatatactgttactagtacatttcaatatctggtctcatacatttttatttaataaataaaataaaaaattactaactaattataaaattacaccatatactattttttaatttttttttttcaaatttacagtttgagttatttttgtagtttttacggtagtttctatgtggatgtcatataaattttaattacgatttaaattacttcgttagttgctgtaaaaaatttcgtgtaaaacttcgtaaaaatacaaataaaaaaatgtttcgaattttaaaaatgaaaaaacccaaaagaaaattggggttaatgaatttagcctatgatgacttctgatcgtccttgtaagtgacatcactaaattttgttggaagttttattggagtatatatatttttgaacgattaatatatattaattggcatagctaaacataaatatgaagcataaaatcgaaccaatttagtaactagtaagtaatgaaatgttgcattctaacgaaaaccagtaattaagcaattttacatgtgatagggaaacttataaaaataatgcttttttaccaaatgctttaaaaaatactggaacacggcaaattttacatttttactg

SEQ ID NO: 315366 - DNA, 575 bp, Cannabis indica
cctatagcctatttcaactcaggatcggccttgggttaaggtcaacttacttgatttggttgttgtcagtgtttaaactctctccttaattagtgtcatggccatcctacgatcaaagactcttctcgtctaatctcagatctacaaggatcggccctaggctaaggcgggctaggcccgtgcttagggctcgctcctatcaggagtccaaatgaaattttttaaataaatatacatattttgttaataatttttaaaaatactattttttataaaaaagtaaaaaaattatttttcgtaaggtccaaattaacttaggatcaacctttggcttcaacataccatcaaaagtatcattgatgacataaggaatttttatttgcacctttatattaaaaaaatgaatttcaataattttttaaaatttctttttcatattattttctcttaaaatcaataattattttaattttattttcacatttttaagaaaatcatctattattttttttctaataaaattatatataattttttatttgaacttttttgtgttaatatttcaaatatatttt

SEQ ID NO: 315367 - DNA, 1985 bp, Cannabis indica
tttttaattaaatttgattttattctctaccgatatgactctgatatgaaccctaaggagtagcttggctaagtgttaggagaaggaagtagcaaatgagtttgaagatagaccaagggagggggagctcccttggtgcatgtggggagtgatgggagcgaggagctcccttgggcgagcggggagtaaaaggtgagagagggagcagggagctcccttagtgcatgtggggagtgatgggagcgaggagctcccttggacaagctgggagcaaagggtgagaaagggagcggggagttcccttggaagttcggagagaaaaatgtgatagaggaagcgagtaacttctttggaagtttagagagtaaaaggtgagagagcgaacgaggagatcccttgaaaatctgaggaacaaaaggtgagagaggaagcggggagctcccttggggtcaacagttacaattttaataattttgagtaattttatcgcaaaaagaaaaagaaattattgtatatgtgacacttaaaaaaaaacttatttaggtaactatatgctttaaatatgtcatatgctccaaagattctatataatatattatacataaatgatgtatattatctaccaacacatacgtattgagggagtcacttttagggttattcattaaactgctcaaattgctcgtattataaaaaaaaaatatatggtttgaaattttttgtggtgcggtcgtgatttgaattttttctaaatcgcgcagtgcggtgcggtgcggtttacggttttgaattgtaatatgcggttgcaaatcgcaccgcacattataaaaatactaatttttatatttatttagatccaatatgtgaaggtctagcccacagcccactaattattgtattgttgaaacttaacttttttttttcatatttattttcaagtcttatagtatttttaacaagtgttgctcaagctttgttgtatttgtgatgatttaattatttggtgatagtttaaactgcagaaactacaaaactgcacttcaccacactattttttgcggtgcgatttctgtcgttttttagtttcgcggtagaagtatagttgtgcaaattagtctaaaaaaatggccaaatattgcaccatcctaaccacgaacactcctactcattcttgacactaggggacgtgtagccctccaacaaaatattttacatacattctcatatatattttcacatattaaaaaataattatttatagtaattactaatttttccctcaaaataattatttataaagcctccctccgtcagtgctgacatgcgaacccatcattatagggttgtacaaaattacaaattaaaaatctcatgcgctgattgagtttaatctttgtatacgtttgctatgatgtcagcattttacatgtgggattggggtccacacgtgtgtgattgtgaacactcccaagggtcacgtagtactactagtatgtgggagaatttgttgggtgcgacaagggccacctttggaaccgtgcgtcatgaaaccctaattatcttaggtttcatgaaaatagagataaggtggattgagacaatcttaggccttgaatttctcagaagagtctaatgaaaataccttaatctccaacctttttatatgtaccagcataaagtatcatgtctcttcatattggttcattacataatgatatagttaagaataatatacaaattttccccctgaatttatgtcactacctacttgtgcaccctaaaatatactggttcttaaaaaatctctccaatatattaccactatattaatgtcccccttctgttaagttttttaacaaatatcagtttatttgatgatgtggcataaaagaatctgaggtgacaaaataatttgatgatagttaaaaatttattgcaatattaaatacccttaccaaacaaaaaaagatttaattaaaaattaa

SEQ ID NO: 315368 - DNA, 2829 bp, Cannabis indica
aaaccaatgaacatgtccctatgtccgacttatggcataggagacttggtcatccttcaagtcttgttttaaatcaagtgttaaaaatagctgatgtaaaaccaattatgaatgaaagagtcttattttgtgatgcttgccaatttggtaaggctcatgccttgccctttaaacattcaaactctagagcctctactgtcttagagttaatccatagtgacatatgggggcctgcacccgtggcctctcataacaattcaaagttttatattcacttcctagacgactttagtaggcacacatggctttatcctctcaagcacaaatccgatgcattagcagcctttaaacacttcaaggctttggtagaaaaccaatttgataagaaaataaaagccatgagaaccgattggggaggtgagtatgaggctttctctgaattgttaaatgaaaatggtgttcacttgcaacactcatgtcctcacacctcggctcaaaatggtagagccgagagaaagcatcgacacattgtcgagatgggcttaacacttctagcacaagcacacatgcctttaaaatattggtccgatgcttttcacacggctgtctatctaatcaatagacttcctactgttgtcttgaatggaaaatctccctatgaacttctacattcaaaacagccagattataaattccttaaggtctttggggctgcttgctttccgtgtcttagaacttaccaatcccacaagtttcaatttcattctatgaaatgcgtgaacttgggatatagtgagacttttaaagggtataaatgcttgagtcctcatgggagaatatacatttctagacatgtagttttcaatgaaagtgagtttcctttcacatctggttttttgaacaactaccaaaaagaaaaagaagtcactctcaatactcctcaatcctggttcactcttcccattgctgcaacttcccaacaacaaaacaacatgcctcggactgatccttcagcactcaatgcagaaccggctgcttcaacaccttcggaaacttcacaccaggttagtcttcctgattttgttcctggttcaccaacaacttactctccagttgctactgctgctagtgaaaccatacagccgcatgatgaatcgccaccaacagtctcatctgatactacagcaccgagacagcacccaatgatcactagagctcgtgcaggcatattcaaacccaagctgtatgttcatcaagcagaacttgatgtatcttgtcaagaaccaagttctgtagcagatgcacttaaacacaaggggtggcatggtgcaatggatcaagaaatggaagctcttcgtcgaaatcgaacttggatcctagtaccacgtactggttcacattcagtagtcggctgcaagtgggtacttaaaaaaatttaatgctgatggcagctttcaaaggttcaaagcgaggttagtagcaaagggtttccatcaaagacccggagtcgattttggagagacattcagccccgttatcaaggcctctactgtgagaatagtcttgacattggctgtggcaaagtcatgggaaattagacaaattgacattaacaatgcattcctaaacggagtacttgaagaagatgttttcatggctcaaccaccaggatatgaggatgtttcaaagcctgatcatgtgtgcaagttactgaaatcaatctatggtttgagacaagctccaaggtcatggtatgatcaactcaaacggaccttactggagtggaattttattaattcgaaggccgactcttccctcttcatgttgcagcaaccaaagtttgtgattatggtgttagtctatgtcgatgacattataataactggaagcaacagtagagagatcgacatctttgtacacaaattgaacaaaactttttctctcaaagacttgggtgcactaaattactttcttgggattgaagtttccgagacaccacgggtatatatctttcacaggccaagtatatttctgagcttctacgaaaatatgacatggaaaatgtgaaaccagtcccaactcccatgacagcaggaaaaccattgtctctaaccgatggtgaacaacttaacagtccaacgcattacagaagtatcatcggagccttgcaatacttgagccacacaagaccggacatctcattcgctgtaaacaaactcagccaattcctcaaagaaccaacaacaactcattggaatgcagcaaagcgaattctaaggtatctaaagggcacaaaacaccttgggatacacataactccaagtgaccacctgacacttactggcttctccgatgccgattgggcttgctgcccagacgatcgacggtcagttgcaggatactgcgtgttctttggtgagacacttgtatcatggtcgtctaagaaacagtccgtggtggctcgatcaagcacggagtcggagtatagagcacttgcacaccttgcagcagagataacttggctgcaagagctattgcaagagatgaagtttagaatgaactcaaggccggttatatggtgtgataatatgagtgcaagtgcactagcttctaatccggtttaccatgctcgaacgaagcacatagaactcgatgttcacttcgtcagggacaaagtgctacaagaaaaactcgagatacgattcgtaccctcacatgatcaagttgccgattgcttaactaagggattaacacacaccagattccaatttctggtcaacaagcttggactgatggaatcacccctacgcttgaggggtggtgttaaga

SEQ ID NO: 315369 - DNA, 1179 bp, Cannabis indica
aataactgataacatctcacttggctattaaaacaaaaaacaactaatgtcggtaaatttgaataaccgataacatctcacttgcccaatgctctttcacttcatcaatttcttcttctgtatactttacatcacttaacaacaaaatttaaagataaataatatattaattaaggttatcatcatatgtattcttaataataataataataataataataataataatgtatgacaactactacaaaaagatgtgaaaacacttggcaacaccactactatattaaatataactatgtgtctaaatataaatgttgcataatttcatgcaatgcaagtataagtttatcttttattttatataatgattcttttttaaattacatcatcaagaatcttcgttttttatattataaaatatattctacaaattttgctttctatatttttctactttcatttcttcctttaataatactatctgtttctaagaaaatagtgggaacctgggacaaggagcacctaaacaatcattttttaccatatgagaaacaataaattgtatatttatataaaagaagaaaagatagcaatctaaattaaagttaatggtgccaatcataaattagcatctttccttcacaagtgagggctcccaatacatttgggaggaggtcactcatggatacgtgatctttgcctctttcaaaaaataaaaaatcacaaattaacatcaataaaagattcaaacagccacactatatttcactctctccaaatggacttgaaaaacattattgtttctttctatctataaggcccaaaagtaaggaaattattttgtgctttaacttacaaatattttgttaatctccgacaagcagttatgagtaatgttacggtaaggaattaaaattaaataacatgtaggggaagcatacatttccttgcttaaattctaaaagtctctcctgacagttccaaccaattcctaacaaagggcacaaatcctttaattatcaactcaaagccattatgatggcatttaaaaatactttcttagccataaaaatgaaaatacaatacctaaatataataattagaggataccatgttcacagcgaataagtaaatacataaattatgccttagtcaattaaaaatataaaaagaagatta

SEQ ID NO: 315370 - DNA, 1747 bp, Cannabis indica
ttcttatatacaactgacatttgcaaaaacacggtttctcagactaaactcggatcagaccaagataagatgtcatataacccatatcgaggtaaaacttgacatagcacatattaagacatcgtaacctcgaacttgaccgaagctagtcaaatctcaaatcgagttaagataaatgatacttttgatcgagctaaggcgaaactgatgtatattgtttactgaatttttggcaacttaatatatttaaagcttaagaagaaaataacggaataaataactggatcgcaaataagagatttttacgtggttcagacgttaaccatccttagtccacgaatctattttattaggctcatcggtcggtaactgtttatacaagtagggatacaatggactgaaactcaattttcctaatgttcctcttgaagaagaggacacttagtaaggatattcttggagtttctctatgtaatattatttagatcattacaagtatgtttgccaaaggttgaaagaatgagtcttgccctatctcgtgttttacaggagtatttataggccaacttctttccatgcgctggcttggattgatcatccttggcagaaattggatgttgatttggtaggtgccttttctctatatggcatttaatggtgtcagattgtacaagctaggcctcatacacacgtcatcttagggattttcctttttaaatttccttatccctagccgttggatcattcagtcaggtacaatgagacacgcgggctctgtatgatagcgtgtcgtgggggataacctctgacgtcgtacctaaaaaagcctggtcactaagtccatagtctgacatgttcgagcaaggcctccacgaaataagggtgtagcctggttaggcacactttaaaatgcccttgttcttctgggaaaaacccatactcttcgcgggagtagatggcttcggttcgcgggatcgaggaatattttggctcacggataccatttgcgtcactggttgtccgagaactcccaatcacggaagcccttcccgtgagttagggcctttatcttcccggagcatcagttgaagaggttgatcgtctgatggcctcttaatctttcttgaataaaatccacgtgtcacaaacacaagaatctggacagcatataccatattctgaatcaaggaaaggagaaatacaccaaggatctgagataactcgtatctcagatgaaacaaaaaaagactacaaattgaatatagccaatataagatgaatgtaagagccgagataagacctacaaccgttcagtaagaactaaggccaatagtataaaaaaattagtttgaagaagataatcgcaccataaaacaaatcatgaaaaattaacaatacataggtacacgtgttttcctaagtattaattaaagaagtatcaacactaccatacatgcaaagaacgttttataaaaattaaagggagggttcacgtagggggaccaaacagacaaaaaccatgagagaggatatattatgaatttttgagaagaagaacttgagggaaaaaaagttctaactgttgatcaaaaaaatcactttttgttttttggtcaaaacaatcatttgtagacagttaaagaaattctaagatagaattcaatattaggtatcacacattttgatttaataaataatataaaaaaattactgtggcaatactcattaaaattaatatatatatata

SEQ ID NO: 315371 - DNA, 685 bp, Cannabis indica
gtttgagacgggtctgataggtgatattattcttctcaccttaaccaggcctttgaatataagtaaaatataatttattactttttatttaaattattatcttctcttttataatatacagggatggataggtacaattttttataatgtatacatattgtgtaacgaccatcagatctagtttcttttaatatatatcttcgattatgttaaaaaaaaaaagagataatatatttaggatgaataaagaaaatattaaagtaaaattttagtgatataaaatagaaatcaaataactcactcaagctcacatatgatttaaagtaatatgtgcatttataaattacatataaatgtcaagtaaatagtatccatcttaaattatattaaattgttagattaatccacaccaactttgaacattttattggtgttgataactataagtctaatccctttactcaagtgtctaatggcaaaatgttattaggttttattattattatttttttgaaaaggagttatattatatattactgaaagattaatatgtattatatttgggtaaatactattttggaccctgtgttttgcaaaagttacagattggaccctgtattttgttaaatgacaaaatggaccctgtattttctaaaataaaaaaataagatcctgagcttaattt

SEQ ID NO: 315372 - DNA, 1303 bp, Cannabis indica
atagaaagtttggtcaacatacctaaaagaataggaaaatattataagtacatttttgagttgtttcggtaaattttctatctattttgacataaaaaagtattgtttaatctattttttttttcataatcatgtgttatagttatttagaactgcctgtaaatcttcaagaaaatactgaataatttataataccataaataaggtttaaatactttgttgtatatataattatttttttttcttttacgtgtgataagtagttgtttgaatcttagtttctcgatactataaattttttgaaaatgttttaagtataattcctatatgacatatacgatcataaaaaaaattaattaaagtattttttttttaaaaaaaatgccaaaataaataactttaaaggtaccctgcaaaattttccaacattatatgtaaagtgagatataattaaaaagtatttatattaattttatttatatataaattaattaaccctttaaaggggttgttgattgatgtaaaaaatacgcgtaatacagtttaacttccattaacgtttttattatatatatatattttttttatatatatataagtggacacatgtatatatataaaatatattttgatataaaaattaataagctaatatataattctttttttcaacataagctgccgaaaaaatgacattgtactaatcatatattttatataacatctcttaattatcaattttaaatttaactttatatatatatatgtaaataattatttaaattttaattttcaaggaacattttgatcaattcaatcttagtatctattcattcttattaggcacacatcatgttattaccaaagaagatcctcaagcaaatcaatactatttgtagaacttttctttgaaaagaaaaaaaaaagaataatgacccaagttatatttcgtggataaatttgtgcaaacctcgtaaagaaggtggattgagctttaaaatgctcctagtttggaatcaagcagttcttgaaaaataagtgtaggtcattttctcaaagcaagagaatttttgggtgaaatgggtccatatatatatagtatttacttgaagaataaaaactggtagcattattcttccaccatccagagtaactgatattggagacaaatagtggatgcgaaaaataaaattaagcaagtgtgttgtgagcaacagttcctagctcatcgatacttgttgtgtaacgtcctcgcttcaagccttcattgggtccttacacccacggaatgaatgactcttat

SEQ ID NO: 315373 - DNA, 961 bp, Cannabis indica
attaattttttttttatgtattttaaattttattccattcctattcccatttctattcctattttctatattttcattcctcccaactaaacgccccatagtgtaactctataactaaaagagtaccatgtaatacaataaaatggatttttatgtgtttgatgatgaagatgtactcgatcggaacaagttgataggattacgtccccatgtccgaatggcaatgtgggccccagcaataaggttcgacagggacttaataaatttatggcttatacatttttttactattgcttgatagctttgatgggtttaatcggatcctcatggttttctcgatgagtagtcactattgaattttattgagttttaatcgagctcatgatgaaaatcacacattaggccctattgagttcttattgaacctaatcgagttgagtatgttgatcactagctcatacaaaacttatcaagaacccattgaacacccatcaagctcatcgagtacatcttcaacaatcgagtgtgtagcaaatacatataaaacctatgaagcattaacaaaaaaaaaggttgtaaaacaaagcaaatttaaccaaacaaaattaatgggcaatcagccaaacattgtagtaggctagaaagagagatcatcgtacttagactaaatcataaattaagaagtattttagttatattaaaaattatttaactaaaatcaaattcaaaagtgaaattctaatttatttttaaaaatacaacatctaaattattattttataaaaatataataatgtatttgggccaaattgatatttttcttaggtgcttctataatgatcccttaaaaagagtaaatcaatacatttcttactagtgaaaattacatcaaatatgagatttcataaaaaagttagaaaaatatggcatttataggtttgccactcttctatggcatttt

SEQ ID NO: 315374 - DNA, 1534 bp, Cannabis indica
ccggcccgactgacattcctacaacctaggcattgggcccagcaccaggtgtcaactttggcactaggtccaatttcaggccacctgaaagttccatttagtccgcaaaaatagttaaaccttaatctttgctaaaaatggaaaataatccccgaagacttcttagaaaaactcttcgaaattggcccaggttaacaaaatgtcaacttgggcagtgggccaactacatgtgtcaacctaggcactgggccctttttttagcacctaggatgggatagttttttccctaaaagtacctctttcctcgttttagatgaagatgatgaagttatatgagttagatttttgatctgatgtttggaaatagcccaaattgatagattgtcaacctgggtgctagggtgcccgggcaccgagtgtctaggtgctcaaaaatgaaaattcttcgaatctaattctgatccctaaaatatgtttttgttatgtctatttcatgtcctaaagcaaattttttcccattggcactaagagggttccaaaaaattatatccttcttgaggatgtcaacttgggcgctgagtgaatccctaggtgcctaggttgacttccaaggtgttgatttctatatttttagctcccaagaccttgacttggttgctccatgtcttcatggtacaaaatactaaaatatagtgagttggaaacaagataccaaagtgtgaacttccactttggagttcccaaagttaacctgggctcagggctagggacccttcctaggtcgactactatgactcgaggctactaaactcgaagatattatctttcttgagatgtgtcaaacattgatgtccatgtaaccaaggaaaggtttttgttagcatttgctcctcaagtagactttacacttgtgtggagttgacttgatgaagtgaaccgagtttgcttctcttgaaactacaaaatgggcatcaattttgtaagccccaagttcttgtctaacctatctttttcatatttagattgattttatcttgatttaagcttgaatataaaaagaacaaaatcaaagattcaacaccagaattttacaagcttcacctgccctagaaactcattctaggcggctagtgcttgggttccccgaaccagggtaataactttcactatattcaaagatgtatcttacaaaaaccaacaatattgtaaacaatacactcttttacaaaatacagtgaatctatacccataccaaccaagacccttgattggagacacaagatccccttgtgtgaatgatgagctctcttcaacacttcttcaatctgaactcccttcagatctggtgatgaagatgatactgaaatcccttcagtctgaactcaacatcttcaagctttgatctgcaactatggagtaatacctccaagctcaaagatcacctgccatggaacataaagaagaaacaagaagaaagaaacgtaatccctaatctccgatcaaaaaagttcgtcaacaaaatacccagaaatcg

SEQ ID NO: 315375 - DNA, 1216 bp, Cannabis indica
aagtatagagatacaatacttctttctcttttactattttggaaggtattagcgaggtggttacttcaaccgtataaagaggggaataaatgaatgtagttattctttccacataccaatatgtgggtcaattagttacaagctcttattcccgagtatgtggatcaatgagctgcaagctcttattcccaagtatgtaggtcaatgagttgtaagctcttggcttactcatctcaaacagcttttattatgtactatgtttatcctgagatgagcttattgtctcgccagtcttacctgttaattattatcctcatcttgcatttgcctacgtggtagtgagtttgaatatttatatcaaccgtaattcttgaggcgagttatttaaattgtatttaataatataattattaagctgattcatattccttctctggtacatgtgtcagcttctggttgttagctaaaatttgggtataacaatggactttaagtattttgagaatcttaatattcttgagatgcttgataatattggtgagctcttttttgtatacttctttttttgctaattttgaaaaatagatgcatatattagaaacaactatagaacttcaataagattttttattttaaaaaaatattttgtgtttaattgatttaataaatatttattttactaaattattttaagattttaaactcttactagtagccatgatacaattcttactaattatttcataaattagctatttttggcttatgtaaataatataaaatgtgagatgtttcaagtaaaatatatttatttggtagagtatttggtgtgaatcattagagttgttacaccaaaaataaaagattttaaaactctattggtgtacattccacaccaaatttgtgtaactattggagatagtctaattatctagaatttggtgcacactaatttagtatgttattggagtaaaatagtgtgaacattctacactaatttggtgaattggtgaattgtgccaaattagtgaagtaatattatattggaaattttataaaaatattagattttgggtaaatattacatttatactgccacatggaaaaatttatatttttactgccttcgccaaattttttttactgtaaacactaaaagtaaaaaatgaggcctccatcttccacacccacgaacagaactaccacaacaatatca

SEQ ID NO: 315376 - DNA, 740 bp, Cannabis indica
tagggcacaaaacccaacactatactagcaaatgaaggcccactcctgggtgcaatcaaattgataactcagcccataagtaggggcaagttatggctctagatctggatgcaattacagttacatatataagaaggtcagaccactctagtttgggagatgttgttaggttcagaagatgaagagtccagcaaggctgatcctgataacctcatgggtaatttggacgcgagtagtcgaagagacatttaaatagttcctggatatcaccttccatgatgtccagcagacacagggtcccatgtgtcatgagtttgtctcctatttcatacccatagagtgcacccaccactgaaagaagatcacctttttgtccaatgacatattctacgacattctcggtacgaacatggctgcaccagacacctgccatcctcaaatagtccccactcgcacggacgatcgctaccacgtgaattgggcctcactaaattggcccaaaattaatatatattctattttatcctatcaatcgacatatttgacacctaaagaccctattaggtctagatatgctcatacccagttctagcctataaatagaacatgatcgcttcatgcgaagagatcagtcgattggtggaagattgatttatgagatcaagaattgagaattaaggttcttcgtctagagcaaaagtgcttgtataaaaataccttgaagcttttctagctcaata

SEQ ID NO: 315377 - DNA, 499 bp, Cannabis indica
atttattctacaaccagagtttatttctcaaattgtgaaaatccatttacactttttgtgaaaagagactccatgattttgaagatttcaactgtcccttatctttcatgcttgaaattactcaaatcactttcaatgaaagtaccaatgatagttaacgggtcatcttctaaacaagataaatttttcgaaataaactaaagttttattttctcattccatatctagtgttctctatgtaattatatatttataagttctatacaccacataccattactaataaattgctaataagtttctacactattttcatagtttaacatttcactaaaatgtttcactttcacatgtcaaaataaaatgaggaactaaggttgaaaatttttcaagtcaaaatcagcacaatgattccatggtatacatagtttctccatttttatatataaaagagtagattgaatgtgaaaaaaaaaaaaaaaaacctacaaatatacta

SEQ ID NO: 315378 - DNA, 1706 bp, Cannabis indica
atattttcttatatacaactgacatttacaaaaacacggtttttcagatccctttcagactttctctccatagagcgaagtccccaattccatcgaatttctccaactcgaatctctacattgatgacatttaagtttctttaagattgcagcggaaaaaatcttaattttgcgatcttgatcaattaccgtgctctgatttgtgagaaaattaagacgaatggtgcaaaatcaagatgatcacatctttaaataattaaacaattagtaatgacaagattaacaatcaagaacaacaatcagataaaaacaggagcaaatatagtatttaaaccagaaacggtaaatgcaggaaataaaaaaattaacaccaaaatatattctggtgcaagtcctatagatcgatatgatatatggctctactccagttttggaacacctccgtgatccttctttattgattgaacaagaatatgtacagtaaagtcgagatgagattctctattgagttctcacaaagtgtttcaactctcacacattacaccgaagaatcttcttcatctatagaagattattcttataaaacccaaacccatattctctcttttctctggacctctctctctacctcttaatcttctctctctcaaacagtcaatctcatctccttttcgtacataatcttgtgttgttcaaatgataaagtcaaggtggtatttataggtttaggatcaaaatcctaaactcggtggctgcaagaaacgaggttgttaagttagttagaaataattaacttaaccaactcctcttcgagtgaagtcttcagcttaagtaccagagcctctgggaacatatatgagcttccagactcgagggccataaatccttactgaagacgcttccggatatataagactacgtagtcgactattgagaactaccattctaggagggacaactcagccagttggacctcctctccagggaaggactagcatattctgaagtctagacttgcagtggacatgatactcatctagaaacttccttctggacttgactatcattttgggatcgataatagcgagtgaacaacttcctaaaaatgaggatcacggagaacttttttatttggaagaactataccacaataatcctttttctaattcttttatagcctatttcaattttaccttaaataaactcaaattattatcaattatttaaacatataaatttattaaactatcttttatattctttaataaattttatatgtttgtaattaaattaaagtttggctgctattaattaatttatcaaaagaattgacaagaatttagctataaacaaaatatgtaaatgaatgtgaatggtctttaaataaatataagtttgaccacgtatagagtttttatttatttatttatttatttatttattttttgaaagtgaccacgtaatattattttcatatgaacaataaaataacgattgagacacatatatctagcaataaagtaactttttttttctctatagtttaaagtggaaagtaatgtagaatttgattatgtgtgagtgtgtctcgtaggtatatcctaataaaagtattaatgtataagagtaagagacccagaatttttattttgtggagggtttatttatcattaaaaatatttatacttatattataattactctta

SEQ ID NO: 315379 - DNA, 1431 bp, Cannabis indica
tttatttagggcacataacccaacagataaaaccaaaacctcaccttaactccagcactgtcgcactttggggtgcccgtaagcgatccctctggggtgagcgtccagcttccgtcccactccgcaccagccatcagtatggtaggagctcagcaaagctcccgaagtaagagatcttctaaaggtagcacgtaaactgaggataaaaggcaacaaagggggtatactccccaatacacgtagtacactgagctcacagattctcaagaacgtgtgtactttgccacctaaaaaaatacgcattatcagaagcctccacccttgtatagggatagctcccagaggaaccccaacaaaagatgcgactatcacaacaacatcagccacatcacaaacgagtgtaaaaatctgaaggatgaaattgaaaacctaatccgattaggccacttgtatgagtggatcaacaataggctacccaacttaaatttagcccaagtcagaggtcccttacctcaaggaggaactgggggtacgctcgagggtcaggtgcctcctaaaggagtgccccctcagtagacgcctgaactgccaccccggtcgaatgggagagttgctatgatctccgaagggcctcatgttagaggaaccaccaggaacgagtttaagcactacgttggagccctaaagcatgatgaagaggtatgggaggtcactcaactcccagctcagaggcctaggctcatggatcagcccatcactttcacggaggaagacgcaaagccaatgtgtttccctcaccatgaccccctgttcatagagactcccatccccaataaggttgtggccaggatattggtggataatggaagctccgtgaatttttccgtttaaagatgctttcacgaccatcgagctcccaacggtccacagctcatagggttcaacgggacaactctcatcccgatgggaaaggtgagactcctactcaccttgtgttctgacaccccacaaagcacctttaaatattgcatcttcgtggtggtggactaccctaccgcctacaacgtcatccttggcaggccaaccctagtcgactttggaacaattacctccattcgacacttgcgccttaagttccctacacgcaaggatagagtaggaattgttgggttttatgccctaaataaaattccatttcaatgtaatctttattatttaaatatcaataaagaaacagaagtattttcatcacttatttgtgtgtcatttggttcatgttatcatttatttgtttatttgatttataaattcatccatgttgacttcgcttttagccaacgaaaatgagtctttttaataagcaataaacaatatgtcgtaatgaatatatataagaaagcaataataatacacaagaattttatagaggtt

SEQ ID NO: 315380 - DNA, 1106 bp, Cannabis indica
taatactaattaaagctataaacgcacaaaacgactctctaatgagaatccaaatacacgtagtgaggtatatatatatatatagactatcgtcatattattatatataacacaccaacacttttttattcttataattatatatataagctggaaaaatcaccatggagtttactgaactctgcatcaagaaaaataaaaaaaataataaaccattattattattatcacaaaagagcatatagtgtataaatctaatgatcaatgtccaatataatattatatatgtttgggggaaaattcgaacttagagactttttcagtgagaaaaagttttcttatgaaattattaagctatgtctacgaacacaaatgtgtgcaatattataatttaatatcgagtttctttaaattaaaaaattaaatcataattttacttgataaaatgtattatatatataaaatgttaccaatttagttggtgaaggggctaattttgcaaggaatgctgacaccacacttgccgggaagtccagcggcaagattgtagtcgaatcctttgattctacctgcagtttctttcaagcaattgcaggtagcttgacggttggcgggagtcctggctgcattgcttaacgacttaagaccgttacagcacttagccgggacagtcccgctcccgccaaaagttaggtaattcaaacatgggtcaaagttgctatccacttggctgcatgttatggcatgtgtcactggtgatgctatcaccatggccaataccaccaagcaaaataccttcacaattgaacttgccatatttgttgtatactagggactaaatagcaaatcaaaattatatatatgtatatattttgtgtggagtatataactatatatatatatttatagcttagaagatttgtgtagtgatgatagtgtgtaccttgtcctctcattttataggcaaataataaagtaatactatgagttatattattatagtttttagaagggttagttggtggtggttgtgcttctattaaaattgatatttaggagaatatatattttttttataatatctattggggcttttttatttttat

SEQ ID NO: 315381 - DNA, 599 bp, Cannabis indica
tgctacaactgttttttctcataatacaattacaactgctttttcttacaatatagttgtgccaaattggctcgaaacctaaaacaatgaaagaaactttgatggatgaagcataactttgtgcaatgcaagaagaattgcatcaattcattcgaaataaggtgcggaccttgattctgaggctaccatttatcaatatcgtaggaataaagtagatttttaaaaataaaagtgataaatttggcaccatcattcgaaacaaggcaagattagttgctcaagaatacactcaagttgaaggtatttacaggaccggccctgagggtagccgggctaggcgtgtgcctcgggcccccgaaccctcagggccccgaaattgtaaaaaaaaaattaatatatagataaattgttaaataagaagaaaatataacaaaaattgtttggtgtagtggtgaaaggtcttactttaaagtaagaggtcatggatcaattcccaacctctactttttaattttttttaaaaaatatttaatgtgtagttatgagggattgaacctttgacctcttaattgtttattaaaattttaccattacactaa

SEQ ID NO: 315382 - DNA, 1024 bp, Cannabis indica
tatatatattaaaatatcttcaaattacgtacctcttgattgggagagtaaaccatgaccattggtacatctttgaaatgcaagttattgatcttgttgttttgatcatccatttacaattgttaagccaaaaaataaaccaaaattccatctccaaatgatggcatcactgctcaatcacgtcctcacgatctaagaatgtaaaacacctatgtatatattatactttatctttaccaatatacatacactaaaaaataaaacattcatttttttgtcaaaaaatgtcatagaaatttcaaaacacccaccaagaaaaacctgataaatttaagatttttttctttttttaaaatgaataaaagtaatagaaaagaaaagaaagacactagctaaccagagaaatgaggtagtgtaatccagatatttatttttgttgacaagaataatatgaatgaaatagtcattaatgatgcacataatgcgattgaagaaaaaggcaattaacgtctgaaatgaatcaaaactaagaaaagaaaaaagtaaggtacccaataagagaggttttgatgaaacaagggaaaggaatgttaaaagtaacataacacatgtgaaccaaccacttgaacccgccattgtcgccttatatatttcttcttcttttcttgctcttatttattatttttctatttttaggacaatggcttaaaaagaaatgaaaccacgtcatttatttttaaaaaatagtactgctaataataatttggtatagattctatgattctgtatgtaataatttttctattattagctttatgtttattatatttgtaaaatgttgtcatagtcttaacataataatttttctaatttttttactaataatataaataaaattttaataaacaataaacaaaagatattcatatatcaataatctattaatttactattattactattattattattaggggtgttcacaaaatatccgatccgatccaatccaatccgcacgatccaa

SEQ ID NO: 315383 - DNA, 854 bp, Cannabis indica
tttttggtttttaattttttttagtataactctatttacttataacatctcaatcgaaatataattttctaagtgtattgttgaatacagaattctattgtattaaattttatatttaaatatttagttgtacatgtttatttttaaaaaaaaaaattaattaaaagtgaataataaattaaaattataaatatatatttatttataaacattcataaaactacttaattatatatattttttataatattatataaataaaaattgtccatatatatagagaacttttttatctttggaatttggaatccgaagaattcaatggaggaagcagccaagaggtatttggagaaaaaggagaatgagtttgacattgaaacagttcccagaagattgtttgaggttttggtgagtcaaggttaccatctccatcttattgagccaggtcgtattatatgttctctcacagtcccaactcgtctcctggtcagctcacctcagctttctcttttttttttgggtgggttttttttttcttcttttgggttatgattatgaaagtgaattgaattgtgtagaagggtgataattccctacacggtggtgcaacggcgactatggtggatttgattggttcagctgtgttgtatacccatggagttccagctagtggggtctctgtggagatcaatatatcttacttggattctgcttatgctggtgtaagtaaatgattaaagctttaattttatttgttaatggtgaaatatttgcagattcttcttcttgttcttagagcttaaagcttgaagcttttgtttgtttagttattgggattttaatataacaatgat

SEQ ID NO: 315384 - DNA, 1348 bp, Cannabis indica
caacctgagtggaacaactgctaggcgaattacaggcccctaaaccacatcgatcataacatggataagtgacacgttaaatcacaactggggacttaggttttaaactaaaaacctacatattgtaagttaacatggcaataccctaaactaacagggaattaaccaaccaaagctcttacactaaaacgaatcgacaacatgaaatttttggggaacccatcaacaaattcgcttaatcggtttcacaggtcctgtaaaactggctaaccagtttacaccagaaaaccccaaaaattccaaaacctaaacaaatcaattccaatccttaccaaaccttccagaccaatattataccccaatagacatattccaagcaacaaaacagctaaccaagctcagaataaaaaattaccattaaatagccatgcttgagttctaaaacttaaagcttgctcaaacttaataacagccttcaaaaacaactcaaaacaacatatctaaccataatttaacttcagcaaacaatcacaagccacaacagcaactacagtagtaaaattaacaaatcatgcataaagtcttaattttaaactaaagaatccaacaagggaggtactagaaactcaccttgaacttgaaactgccaaaatcttgctagaaaatacagaatttgaagaagaagaaaaccagaaccctagctggttctatggtgttcgaaaagagagagaattttggagacaaaaagtctttcttcaatttgttattttttttgtaaaaataatgagaggaataaaaggtttattacataatatcaacctaatacaaaacaatttcagattataaaacctaatctaagtccactaaaagacaaaactaaaataggcaaaaagaccaaaatgcccttgcccacactaaaaatcatgaaaatcacttaggggtatttttgtcaattctaaaatctcggctattcccgacatttccaatgtctaattattttgccccgctatactaaaaatactaggatgtgattctaatagccaaacaccgcgtttcaatgttgcggggcacaaagcatgcaaaaatatgaaattccatatgtgacatataaaatgcattctgaattcaaatataactccgtaaactgaaaattcataactaatatgtaggtttcataattaaacctaaattatctgctaatttcaaaactaaagttaagcggtctttacaacagcttactgaagaaattaaaacgtgtgcctattcagctatgaggcttctaacatgctttgtatcagacttttcttataacatactaatgaaacatactactaaagtaataaaggct

SEQ ID NO: 315385 - DNA, 1671 bp, Cannabis indica
tccaaggtcataggttcaaatctatggcattcttgttttgatattttttttatatatttttgagggccctgttatagtattaggctataatattatagttgacaatagtagaaactatagcctacgatttaaaatcgtcggctatagtatcgcctacagttgaaaactgtcagctataatatcatctacattttaaaaccttcagctatactatagtcgacgattttaaaccataggctataatattatagtcgagctcaattcataaaatcatactatagtccccatcaacctcaagcttctcaagctgaacaagaactcatcaaagtaacattaaaaaactaaaactaacaacaaaacacaaacatataccacatttcacatatcaaagctaaaaaaaacgttaaatatgcatagatttatagaacaaagttaacaaataaaaagcactaccttttaatggaatcagagaggcggtgatccccctcagacacgactgccaaatttgtgccaaatcttgtgggaggcgttgcagtcaacttctcttcaaggagacgaaggtggttggggtagaggagattagggatggcgtgagtttctcgagaatggtggtggaccggtggtagtcgtcgatgagagagggaatggtggtggtggtcgtcaaggtggttcatcatgcgagaatcactagagagagagtgaggcacggtttggatctgaaatgatgtttgaagacgaaatgaaaatttttgaggagtttattatatgcttggaattgtcgacgatttagaaccgtaggctaaagtatagtcgtaagcaattccaatttaaaaaataaaatttcaattttagttaaagtatagtcaacaagtttaaatcgtcgactattctcattgagtgtttaaaaattgacgactattctctactataggcgtcaattttaaacactcacttaattttattaccaaaaagaaaacgatttgaggactaacgagaatagtaatttttttagtagtgcctagttaaatttcaccgacaaatactaactagattgttatactgaacacttgtgtatacatgacatttttattggcttcgaagttttgctgtcacgtgtatagaagtgtatacagtgacaattccatttaacatttgatagtaaagtttaactgtcgcctcaatttttttaaagaaaaataaaaattaaagaataacttaaaacataagaggattttgcggctaattaacctatatattatataaagctataaaaaaagatgccaaataataaatattatatcaatttacaccttgcgtaactaagattctataaaaggaatgacagaaacaaaccttatgtataccatatattatatgtacacaaaggaatattacaaagacatgcaaataataagcatgcatgtaaacaagagtcatgcatgcatagtatatacaagtatatacagtagaacctctatttaagaatactctattcaagaataacctctaatttgttataaaaaaatgaagtcccgatttgggtcagttataaataagaataacctctatattgtaattagttatacattttttaagtcccgtattaataaaatatacctctatataagaataattacatcttaaaaaaatatatacatacattttataaat

SEQ ID NO: 315386 - DNA, 1565 bp, Cannabis indica
caaggtgtaagcatacctattgctgattatcatgctagctaaatccagtgaacttgacaaatcagggaattaaaacttttgaacatataatcataattatattccactgtgctgacaacactataatcatgaacaaatacatatgttctggacctaatagaatttatacattaaatataatcatgaaataaatcatgtgaaccatgcaacataaaatgatttttggtctttattaattagtaaatctgattatattgaaatgggttttatttagggcacaaaacccaacatctgcagcagtatatggtttagtgatttcagcattcatctcagctgtaatagagcaaggaacaggagatgacttgctgtacaacatcataatcgaccccttcagaagtgaaaatactctgaaaatagtcttcaattacactgcttataccagaatgtgaagtgtgcacgattccatcatgatcaatgagagacttaatagtattagcgttcttcctactggttgctttttgatgaaaaaatcgtgtgtttgaatcaccatatttcaaccacgaggtgcggtatcgttgctaccagtaatctttttctggagctaacaactgttccaacacattctcacttcgtttcagttcttcaaaataagtaggagtaacatcatatgaattgtttaaagtagccacttttctcttgtgaaagcctaatcttttttggcaaatcaccaaatttggactgatgccatgtctgcaactgagaggcacaagcagtaaaattttcaaggatttgtttagcaggattagtgttttatttccaattggtaactatgatagaagaacgggactcttcttgtaaccaaagtcttttaaatctaaactgagatttgaattgttgaggaggattatgcagtaatgaaggaatagtagccttcaatgctctatggtcagattgaaagaaatccaagtgtgagataactggcagtgagaaattgtcgatccaaagggagttgacaaaaccataatcgaagtgctctttaacattgataccacgcgagtttttgttgtgccaagtaaatctatctccatcatagttaagttcttgtaatccacaaaaatcaacagtatttcaaaaggcattaacttgtgattcatgttttaatggtccaccaatcttatttaaatgagagatagtttcattaaaatcacccataacaatccaaggcatcaacggggcagtgtcctttagtttcattaagagttgccaagtcaagttcctttgagagacataaggggcaccataaaaacctgagaagtgccaagaagggccatcattgagagacatataagagtcaacaaagtttttgccataatttaaattagttacatttacatcaaatttctaaagagaaagaagacctccactaaaacctattctaggaacttcaataccataagaaaacttaaaagcattgcaaaatttagaaattgaaccaatactaagtttagactccataataaaaattacatcaggttgattttgagaaatgagcaaacgaagttgac

SEQ ID NO: 315387 - DNA, 1664 bp, Cannabis indica
acaatccgattcaatcacaatttgagagtattcttgttgtttgatccaacttacgtgctttcttcaatccaatcgcctcggccaacaccagttgaacacgacaaggtatagtttcaaagaatgatagaggacagtaccataatagtcacgagcaaaccacccaatacctataaaaagttaggtactaaaaataaaagatgtatatacatattaactttaatcgtatataacactcgaaactgatcaatactctacactaacactagcaagaagctaacagccaccataccatattagcaacagaacttttactttgtcacacatttcaagttcgctaaagagaccaacaaatcataacaatttaacatacactttcaacttaaaaaaactcaacatgcctcattaacccggtgtcagcatgcctttgctatataagcaagatcaacaaatatgtgaagaattaattaattccgccatgaatttgattaaaattaaacaaaatattattcttttaatataatataactataactcataattaattaatatatggtataatgcgttacattattaatggatattatttattttgaatggtattaacgcatattattgaacatctccaataaatatttattcgtatatatataattaagtactattgattcaggaaattctaatatatctttggaaatttaaagaaatatatatagttatatatataagagagacattgatcagaaattaaaaatataaatcaaacaacattccttgtttgaaaaaaaaaaaattaaacacccatgatcacaacatttgggtgaaaaaaataaaataaattgtcttccatatatctaatttttggtattaattaaacaatatatattagtaattaaagacaacactttcacattaatttgtaattaactaatataatcgatgatcatgcatcatgatgaaaggagattataatatataaaccgtacgtcttcttaagaaataaaagaaacattatatatatataattaattaatagttataatgaaaaatattgtagtgtctgaacgattgaggaatggacggacgtgattgaatttgagggaaaccagtagatgagatctgatgatcatgaccgttgatctctctatatattaataattattacagcttaattatttggtctcattttttaagcttcccttgagaaggaaactcttattattaggctccagaccaaatcccatggcatcagatttcttcatgatcctcagtctcttacaggactcaacaaacatcctgaaaaaattaatacataaataaaataaattagtattaattaattatacccaaaataattattttgtaaattatctataatatgatcaatattaagcaaagtatatttttaaaaagaaaagcaataatttggttttgtatgcctaccgacactagtatggtacgaattttctcatgtctggggtataatatatataataagtggtccaacaacatatataaaaccgaaagaattaaaaagatttatgttgattaagaaattaaattattaagtaggaaaattaagaataataatgattaatagtattgaactagggagcagaatttattagactaatttgtaattagtctgactaatttgtaattagtct

SEQ ID NO: 315388 - DNA, 926 bp, Cannabis indica
agtcaccaactttggtgggcacgcataagtgtgtcaaagtcacttatgtggaccctgggatccgtactcccatcatacttggttgtggtcggcatcttgaattcttgtgggtatggtagggccaatattctaggagagtaaggctctggctcctcatccaaatcatatccagtggcattttggttattgggcaccatcagttgttgtatcatttgttacaaagcattgagcctagggtcattaacttgtccttcctcaccatcgtcagcttggggatgttgttttgacgtcccccattgatattatggttgttatttgctactgatggaattggattctgccttctattcaaatgttccctcaaatcagattgtctttgattgaggtattctcgcaaatcaggtcttcttgcgtcccttgggggacgattgttgtggtgacgctcataattgcgaggtgcattattatgaatactaatggagcagcttttagaatcagaccaaccactattcttagcaaagctcattgttctttgttttgtggatgatgaggagagagtgggggctgctcagagtatggctcggagtatggtgtcaaagtattgtctgatttagacacagctattttttggggcaagttggcacctggggcatcctttgtttttgtccacaatatgttggcctctgacgagaacggtctttgcgaggggtagtgtgtcgccttagccccctaggtggttgagcatgtggcgcattaccatgagaggtggatcgccttggttcttgcgaagtggtaccaattgacggatcggggtaccttataagtgatggtggtgctcgaatcggagaaggttgctctctcctttcttctcgacccatgatattattctcacagttaggccttggaggaacagtttgggtcccatg

SEQ ID NO: 315389 - DNA, 1662 bp, Cannabis indica
tggtaaaataattccaacaaaggtaactaagacacactttttaattttagcgtacaacttgtgttctcttaattactgcagaataatggaagacgttgctcatattgttcctttgactgtgagtaaaccaagatgttgccaatgaatacaatcacaaacttgtctaggttatcaagtcaaaaacttgtctaactaatctttgaatactttattccttaaatccataaaggttgttggggcatttataagtacaacattggattttaattttgattgaataaaagattgctaaaatctaaaatgtgtccattttagatgagccgaatattctatttaactaatggtatctttgactcttgtctaaaatgggacactacgtatcatttagttaaaaaaccatagaaaatatttaagatatgtttattttgtatttttctatatcttcattacttgttaaatatttacaaatttccgaaaatatatgtatgaatttatattgaacaagtattgagttctgttattaataatggagtatcaatttcgatctacattgttggtcaaatttagttgatttttttaatggaaccttacaacgctagattcatcatcctaatggatggtcatctgttagacaatctaatagtgttaaatctcaaaaggtaagtattttgtaaatgaggggagagttctcatcaattcaaatttagaattattaatatatattataatttaattatagtaattttctaactaaattaaatatcaatttttctattaaataaatggaaaaattataatttaatttttttcactattataatttatgtttagtggctaaaaattagcctgtaacgctctactaacttaggtacattaatgtgttttcttaattattgtgttgacctttgctaaccaaagggtttagtataaaatcgtgattaataaaaattttcataatatataaattttttactaaacatacataaagtttacaaatcctaagatccttaatatatttttcgaaaaaataaaaatttaaaatacaacatattcaaaatgtcgcccaacaactaacaagattgagcccatgtcccaaagatctggacactccatgtctaaccatctagatatgtacaatcttctttgagcttcaaactcatttttgttcagctttggccttgccttaacctacacatgaaaacacatctgtgagttgacagactcgataagaaaaatataaaatataaacatatattcaacttgtaattaggcacccatacacctatttagtctaaaactcgcatcgcacgcacatgactgagtctcgaccattcttgactatagtacttgggatacaaatcctcagggatagaactaaagatattcttcggttgtctcaaaaaacttacattgatcggatcttgaaaaggttcaatatgcatgcttgttcatctggaaaggcaccaatagtgaaagatgacaagttttctaagggtcaatgtccacaaaatgataaagagagagatgaaatgaaagtggttccttatgcgtcacttgtgggtagcttgatgtatgctcaagtatgcacacaccttgatattgcttttgttgttggcgtgttgggtagatacttgagtgatcctggacttagccattggaaag

SEQ ID NO: 315390 - DNA, 1158 bp, Cannabis indica
tcctacacctatgctatctttgtcatcagtctgacatttacctaatttgtcctttaatttgctttctattagtcaactcactcataatctaaattgttgcatctcattctttctcaatcattgtttattttaggatcttataaagaagaagattattggtaaaggacatgaatctggtggcttgtatgttcttgacccacttcgaccaatctttattgcttgtctgagtgttgcttccacttttgaggctcattaccgtttgggccatccatcccttcctttgatcaagaaactttgtccctaatatagtaagatgtctttattagattgtgagtcatgtcagtttgccatgctgtgcatctcacacgtgacggggaaccatttgaagatcctgagaaatatcacaaattggttggaaagttgaattatctaactgtgacacatccagatattgcattcccagttagtgtcattcattagtttatgtcatctccaacaatttatcattgggcgacactaaaaaatttgttacttgaaaggaacaccaggagaggtatagtttacaaggtatatttgtttagatctagatacccccagcctattgataatatcatctcaagtggtccgcattccaagctcatggaatcttcgatccatccagtctttttaattgatatgttctgttacccactttattctggagctcgtagggtccctctagtttgctcataagattcccactcctaagtcttgagaagttgggaatacctttcttaagacgagatctccaacctcaaatattcggctcttaactttggaattaaagtgcctaacgatcttgttttgatacattattagttggacatgagactgttcctggagctcttcgattaactccaaataatcttggagcagagcgtggttctgacttgggtcataggtttctcgtctgtgtgaagggatggtgttttcaatcgagatgatcgcttcacatccataagccattgagtaaggcgtgtgccctgctgaagttctttttgatgtttggcctgcccagagaactctgggaagctccaaggtagatagacaatctacttcaggatattgtatatttgttgtgggcaatctgatctcttggaagagtaagaaataaaatgt

SEQ ID NO: 315391 - DNA, 1134 bp, Cannabis indica
tattaagtccagaacatatatgattattaatttaatatctcacactcacaaagtgtaactaaacttttatatgattagttgttaacttgaccaaaaagcgatactttgtattttcaaataaaaatatgagatatttaagttttaaaattataaagatgagaactgtctcataggctcaatgaaattgactcgataatgaccctaaggtggcaattaattgtcaaagaattttattgtgtaataacttaaatattattttatgtgttttatttgtatgcgctcatgcatcacatttatagtcattctaaaatgatatttattattcaaatatattcattatgttatctttatttattttagtcatgtttactataacaaattctcttattgcttcattagcaattaaaaaaatcaatggtgaatattccataaatggaaatctaattaatatgaatttgatgctagtttgcaagaaccacacatttatctttactaaggagtgtctttgtagaaactcatgtattacacatgattgagctaatacatgaggcggagacacaaggtaacatgtggtgaatatgttagaacctggttggagcatattccccaaataggctgactagattcctcccaaagataaatttatccaagtaaagctatcttgcaaccattctttgaacgaagctagtatcttgtgatatgccatgcaattgagcatgtcgggctgaatatattgttcgtatacatatttatggtgggaatagatcttttctagattcttttctaattgctcccacgacaatagaaaccataatccctattcattcgggattaactcgccagaccgaagattcatgggattgttagcctggagtcgatcttcaactgatttcaactaaatagagaatttaatttactgctagaacttaaatgtattacctctcccctcccctataaatagtgaaaccattcagtgggggagggaccttttttaatgctcttaacttgcgattattttgcagaaatattttttacattcactactacaatatgggcctttagcttccctttttttaacccattttataaaagggaagctaaagggtctgaaatacccgcctattgaaaatttac

SEQ ID NO: 315392 - DNA, 1569 bp, Cannabis indica
tattttattaaatatgtattgtgtaatggagtaagattatgatcttacttggatcaattaatgaaaatctattaaatgattatataaagcgtaatttattaattacggagtttatattgagatatgtgggtatcgtggataccattttttaaataaaaatatttttcgagcccggtgactgtggaaacttgacgatgtggtcaaaaatatcacgacattaatggatggattattttgaggctattccggactagtttagaattttagaatgtaagtttgattgattagtaaaattaccataatgcccctaggttatttttaaagctattaagttattctttgaggagtagattagtcttttcgcaattaagtttttgtccctttttaatgttgtgggctgattataaaaattgaaaaaaaaaaaaaaacagaaagaaaagaagaaaaagaaaatagatgttgttaggcaaatattaatttaagaataaaataataaacaaatagtaattatccaaattatataccaaaaatatctcaaattaagctttttaaattttctacaaaaaatatctaggttatttaaatatttcaaatactagtcataaatttctaataaataaaatgatataaaatatcatttttctaagttataatttataaacaattaaatatttcacaaaataaccaatttatgaatttgaaaatataatggttagaatgtctataaaaatatctaggttactttcaaaatttataattatttaatatatcctataagataattttaatatagtatctcaaattaagaagataatgctatttttaattttaattaaaaattaaattttttgaaattggttaacaaatcacccaaaaatcggattttaggtgcatgatgcacctactgtccaagaaggttgcgtgcagcctaggtgcgcacgcggaatcgggatatatagcctgagatgtgcggtaaaccctgacgcttgcagggtgtctctcgacgtggatgcatggtcctgggcgagctgatcgtgcgtgaccgaggtttcagacaatttttttctaaagcacgtgcgcggacatcaccttgtccgagacacttctcgcatggtgctcgagtgcttgacactcaatgcaccaaaaatttcaaaccagcataactctctcattttttattagaattgagttctgtaaaaacgaaagttgcttaatttttcaaaagaaattcaaataaattatattcatgtaaaatttttgtaaatcacatacattcatcaaataacaaaaccatgttacatgaatgtaaatcattaccatggctctgaggccagctgttgggaatattttaccaggatctagatttactaacaaatatattgaattaacatcctaaatatgaatatctataaaacaatgaaattaaacacataagagtttagataaccttacattgattgcaccagaataatatgactccttccgctcagatctctaacccttgttcctttctgtcgcagagtattattaagatctgagcctggatctctttctctccttcgggtttgg

SEQ ID NO: 315393 - DNA, 963 bp, Cannabis indica
acatactttaatttaaaattacgttagtttgtttttttttttttttttttgattaattttaataagcttcttaaaaagtatatattgtaaaaagatatgtggaaaaaaatgaaaatgaatgtgtttgctaagaacattaacttgagattaaaacaccacattaacttttaattaatgtattgagtttgtgattaaaaaatcactccaatttggaggaaatttggtatgcaagtacttttactattttaatagcaattaaaaaagtgacatttagaataaaaaaataagctatagtatttttttattgactgaagtaaatatttattttttaaaaaataataataataaattatgttaggtatatatattaaaatgaaataaaataaaataaaaggtgttatccatgtatatatttaggtatacatattaaattgaaaaaatatttaaaaaaaaaaaaagaaaaatgaaaagaaaaaacaaatggaatagtaaaacaatattagacaaaaagagtaaatactaataacattgacaaatgaaacaatgaagatagttcctatatatattgaaatggttactacaattttttgaaagtgataaaaaaataataaaagaaaaatttaaataatatgtaaattcttctatgtaaaaaaagagataaatgagtccctgctaaatttatagaataaattacttggttttaaaaatttctaacacttgtattataaccaaaggagaatttgaaaattttcttccgaaataaaaagatataatttagttatagggataattgcggcaaaagttcccaaaaacttgaggttgatgccgattagtcctcaacctcgaaaattggcggtgaaaatacctaaggtcccaatttttgtttgtccgttcatacccaatttaacagcactgttaaatgctgacaaaaaaagccacatgttgagagttcattggtacaca

SEQ ID NO: 315394 - DNA, 1472 bp, Cannabis indica
tgggcccctaaaatgagtgagccctaggcacgggcttagcctgcctatgcctaggaccggccctgctccttattcttgtattgacttgtgagaggagaagtaaggaaaactttatctctctcaaaagtgtttactgtgatggatttttcaacacgaaagtatacgtatcattttaacaagtaatactttggtaagtaaaatcgttcccaagaggattgcatgtagctaaaaaccaaataattaaattcttagttctatttggtgataataaaaataagaaaagatattttattttttgctaaaaaaataaagaaaacaaataattaaggtgaaattaacaatgattgaagcttagagtgattaatttcgattgtatttactttatatggttaacataattcaattctcatttttcaaatttcatgtgatagcgaattaattaaataaatttttattcgggctaggacatataaatctcaacctatatgcaaattatctactttcctgatagatttaaacacataggactataggatgcattaagcataaaaatcttaaatgcaacataaactatataggtactcttttcattatagcataatcaacactcaattatcagatgttcattgaaatcataaaatattcaattggtgatcaagcaattaaaaataattaagtacgaatgaaatagatgcacatagaaaattgagaaagaactaaatcacattaattaaattcaaaataaagtgtcaaacaatcttcattaatgcccttttgaaaaatctacctactcataatcattgaaacatctgataacaactaagtaagaatataagaaaaatagatgaaaagaaagaactcttggaaaaataaatgttaaaagtcttcagagtcgcttctcgcctctaattttcgtactccttaatcctttgcttaaatgttcctttatatagtctttcaaaaagataaaaaccctaattttggcactttaaaagaggcgggcagcgacactaccttgtagtgtcgtggcgcttgaagctcgatttttggcagcgaacttcctggtacaataaccgataatgttttggccataactcttttaatattgctcgaaattagacgagtcaagatgatttggaaagacgaaagagaaatctagaacttttcttcataatatttttcctcaaagtgaacgcatcatagtcaaaaattcgcttaaagcattaaacttgattttcgattacaaacagatcgtgttaagcatccaaaacttagaatttttcaccacttaaatcctagaactctaaattttgaactcaatcatattcatctcatttaatatgtttcttctcattttcaattcacatcatggatttcaccatttaagcctgaaacaaatagaaaacaagtgtaattctgcataaatgaatataatcaattgaaacacatctctaaaatattttataaaatgc

SEQ ID NO: 315395 - DNA, 1282 bp, Cannabis indica
tactcaaccctactagtgttggtaacgccgtattgtactcgttaaacatgatacactataccaatacactcggtaccgctatcgtactagtattggtagtaaacgaatcacaaatagcatataatatatcacacatacacatattcatatataaatacgttctacgctagtcttacctcgcttctaaattcaagtgcattggccgacctgaataaaaaatcacacgctggatggatgccatatgtcacatttacgtaaatgggtaaataacacgctaaaacctaaccgaggaatctaaactcacaacaaaaagtttcgccatcgataactaacatgacaataacctaattatcgagaaaacatagaaactaaagctctaaaaatgacacaaattggaaaagcatgtttttctgagatcctgcatgtgatctgtttaaccagttctacacgacatgtagaaccggttaatcggtttatactaaaaaaccccaaaatcccaaaacttgcacaattcgtacctaaacctcaccaaaccttctagaatacctgtactaacattcaagaataaataccaagcactaacagcatgaaagcgccctaaaattaaaagtgccatagatgagctaagcttgagatttcaaactaaacttatctaaaatcaactcaaaccaacacaatcatcaaaaagtaatcaattttaacttaaaataaactccgatatcaaatcacaatcaaacctaactctaacagcaccaaaaaacctcatatttcatgccacaacgaacaagaacttagataaatcatgaaatgggagtttctagggtttaccttggttagaattcccttaaatctttgatgaattcatagaaatcagctgtaattgaagatgattcctctagttctagctagtgtcaaagggaagggagagagcaagataatattttctaatttttctttgtcttttctttaattgattaaatcaaataatacttaggattttaggctaaattaaaatggacagatttccaccccataatcagctacctaaacctattaaccaaatgcccatttacttccaacttaagaaaatataagcctaggagtaaaatggtccaacaccataattcagcttaaacctggcattctaaatatcttaaatatttgttccgctaagaaatatgttttaaacttacccatgtgactctattggacaatcatcgcattttccatcgtcaccgagcaaaaattataaaaattacataattcatatttagcataaata

SEQ ID NO: 315396 - DNA, 1037 bp, Cannabis indica
tagtaatagaattgtagtttttacgtacacgattttttttaaaagagtccaattttaaaattttgcacaaggtccctaaaatattttgatcggccctaatctcaaatgatttgatctgaattagttgaagtttggaaccaatatatattacgaattatatgaataaccgttggtgtgatttttttcccattatttacttggatattttggttgctctacctcacattatttcaattatagtttataaaaccatatgacttgagtgtggccctttcttaagaagaaaccttcatttcaaaattttgacattgaaaaacacacaacacacacaaaaatacttttcaaatacaaactattttgaatgatgtgattatcattcctataaagtttgatcagtagttttaaagataaatttattgagaaagagactatcattcttgtaatttttgctatgatgatgaagaagaagatatggatgtcgcgcactggcctattttaagtacgacgagaaggatgacaatcttttcgataatttctcagccgttacccgaaagtttgaagtttactttacactgccaagaattatgcttattatatgtgtaaattggccgcagaggataagaaaattggaggagagagctcagggaaggaccaagcaagcataatggtagagaaatcaagatttgaagtggtcctgctgctgctgagttaagcttggtcaccaatggcaatcaatcccagatacagtatataatatagtactaaatagtagtacgagtaagtgtataaagagatcatcatcatcatagaatagaatatcattatgctgctgctgcagcattttccatcaccctttttttctttagtctctttctttgtgtgatcaattaatctaaggctttgtacatactgtttgtttttcttttgttggttgttaaaagaatcaactgtaaaacacaactatcaatactcgtgtttctttctttctttttctttttcttttttaaaagccttagaatttctataacaacaataaa

SEQ ID NO: 315397 - DNA, 528 bp, Cannabis indica
gagttcggccgcttttttaaacagaccggagcgtcgcttcgagaaggtaacttgcttgttactcttcttctccaatttcttgatgtctatctttcgtcttccttgagaagttctcttattatgaggtttggtttcttcaatggatgccattattgaatattgaagaagttaagaagaagaaaagaaattgagagagctaattaaggatttattatgtatggaaatcttgaatgtggtttcctttaattttctttatttctcttttcttttatattgaatatacttcgtaaatggaccttcataaacaaaatcttaagctaaagattattgttaaaaatctaaaattgtagtaataaagacagaatcaacacaagtgtctctaaaatagaaataaaccacactaacatccatatttttagccaaaaagtgcaaattaacacaatatccttaatatattttaaaaattcaattatatattttcgattttatatatttaatgtagtttataatacatcttatatatatata

SEQ ID NO: 315398 - DNA, 813 bp, Cannabis indica
ttggtcttatataagttgatttgcttgtagcgacttatattctaactttgtacatctttagctagacaattaacttgttgactggaagttcttccgcgtcgacgattatcatagtgtgattcaaatcactctctcaaaaaaaaatatggcatgactatgttttgatgtcaaaatattttaaaatcatatcatttcatttgtgctaatgaaataaataataatttccttaaaagaatattttatcttgattttttatatatggaaattattagtatttattcttatttctttatttgaattcttgtttaaaccaatttgaatattgttgtagtaaatgagaatttcattcccttatttaaggaaattttacttaagaactgtccaagttcattgaatttgttctaggggattcttagactgtttgaaaagattttgatttttttcagaacattttgcatttgcttcctgactgttttctattctttttttttacgatctaaggtgtctctaaggagtatatacacatcataaggtcgcgagtttaaaatatctctcttgtttattatttttcaaatacaatcaagttttgagagaagtttattatgtgaagaacttgagttcaaaatgttcttagtgttttatatagtgtgcttttgtatttttttctttgtgataattgtgcagattgaatacacttagacgttattcatcaagcttcgggagaaattttattcatgtgacatttttcaggagaaagattagggatgagtgttttactctaataaattttactaaaaatgaatattttgagaa

SEQ ID NO: 315399 - DNA, 737 bp, Cannabis indica
gggtcaagtgaaaaattcttaaaaccaaaattgtagcttcccgtaaaagctaaaatctcaaagctagggtgagccaaattttcctaaaaattataaatttcacttaaatttttaaaaaagctactttttaaattttaccaaatacatattaactcataaatttttttttaaaaagtgattttagttttttaaaaaactccccatacgggacctaaatgcataaaaaaaataacatcaatatatttaaataaaagaaagtacaaaaaaaggtaatttggcatcttaaaaatatataattttatgttatcatttttcttaattttttttacatatttgatttattttgaaattttggtgatttaagtcctgagtgagttctttaggaaaaaatctcatataatttaaaaacaattacgattgttgtattataagctatatatacatcactctttcttcaaccttagtttgtctaaaagttaatattttacattattatgtgtggtgattagtaaatttagtcttaaccttttctatgggtaatattacatcattataggcgttgcgggtgttgtaatataagctatatatacagcattatttttctaaccttagagcagctccaagaagactgcaaattgatagtttagtatatataattgatccaaagaggtatcaaattgagcagcaaattgtagattctctacagtgcacggcatatataccgtgcattgtagaca

SEQ ID NO: 315400 - DNA, 850 bp, Cannabis indica
tttttaatgattaatctaaatttttatctgagattattcatgttagagatgacatttttacccttgccctatgtgtatactttattttggccttaggggcatttttgtcctttgacattgattattaattttttttattaaatgaatttttggcatggaagaggttcattttctggttccttcatcctcttacccgaactctatctctctcaaactctttattttctactttgatttcggttgaaaagcttgaatcttaccttggtttggagctttgtaactatagaattttgagcttgttcttggattgagtttgaggtaactttctatggctttaatctttgttttattgctgaaattaattattaaaagagcatgaaatgtgatgtgggtcgtgataatgaacttgagatgcatgttcatgtttgttgggttgtcttgagcatggttagagctttaatttcttgagtttgtttgggttagatttggacagaagttaaaggattttattagggtaatttttctgttattaaactctggaattaattgtttgaagcttgagttcaagttcttgataatggaaatttgtttgagattaagctcaaattgaagctttgattttcatggttgattaatctgaatttttcagggtacatagtgggttttgatgcatgttatatgtattttaatgccatatctttgcgcttgataatttatggaaaatcactttaagttgtgtgtaaatgttgtatgaattggaggtgtttggaaccgaggtgctgcagcatggcttttagcatgccaaggcccgcccctttgaatggaacctgggaattggtcccaggtgtcg

SEQ ID NO: 315401 - DNA, 793 bp, Cannabis indica
caccaaactatttatacttagtttttataccatgtaatatacgctaagtgtttttatcattatcgtttctcttccacgcgacgaggttgaaccctcatcatgcacacttgcacccacatggtttctcgtcgatacataagttagcagttcgtatgtttttgtctcgcagaagactattcagccagccgatttataaacatactctgcaaattatgtttctaatgagttgttccatgccaagtgtacttatggttgcgtgtttgagttcttcctagctcgacatgtgtctttctctgatatgctcactgaattttgggtataacaagaatatataaattgaatttacaataataagtttttcagaatttaaattaattttaagggttgagtttatgcaaatctgattttcttcaaaataattaatcaatcggtttaggttgcttttctatttggggttctatttttatcaagtcgcgaatcaccagaatttatggtgttttctggtccccaaagttgtttcattattgttgaactcgtatcctgtggggttgatttgtttctctagtgcgatccttacgttggtaggtaactaaagaaagaggtatttttataatatttattggttgcactgtacagatatttaatatgtcaactcattgtatcttgtaatattattatcctattcagctataatagaaaattcttttaaaacttaaattgttttttctagaaaagaaaaaaataatttaaaaatactttattttagtagaatttacgtggtatatggtttttt

SEQ ID NO: 315402 - DNA, 1892 bp, Cannabis indica
aaatatttttatatttatactttctttatctgtatttttcattttatattatggttcttttatgtaaattaatttttattatatcttaatttttaagtttactcttccattgatttttttgctttcactgaacaaaatttctaagttcgccttggacacaatatgtatgcacaaaaacatgagttagtttgactttttatttttcagccaataacaatatctggttacagaacttacaatttttttaaaaatagctttataatattactggaagtcaatttaaataagttttgatattcagttgatatgcccgcacataatattcataaaaagttaaatattattttggatcttatattttgtagaaattattaattgaactctctatagtctattttgttaaataataaaataaattatgtattttttaaaataatacaaatatgactctaaatttatttttattaaaataaaatttaattataatttaatctaaaagtgctatgataaaattatttacattttctgtatatgttcgtattaggaattatcttcaagttggttatattaaaaaaaaaaaaaacgttgttaaaaattaaactcaggatccaagatttattttgttacaaaacagatgttctaataaataacttttacaaaatacagagtctaaagtggtatttaacttacataaaaatgcaacatacaagttaagatagaactcattaaagatagcattttgatgagagtacaaattagaagaacctacaaatactcaattattttgcaatgactaatgagtaatgatatttagttttaatcaaactactcaatgaaaagaaaaaggttcagcactatcaaatgaaatagttagttttaaatcaattatttattagtatgacatataaatttgtgattcgaatcttaaattagagatataaattttaatagttatgtatttttgtgatctacatatcacaattcacaacatattcggtagttttggaatacaaattattatttattacagaaaaataaaataaaatatatttggtcaatttttaaaaaacaaaaaaaattaaaaagggtaaaaagatatttgatcttttaggtgatatgaggatttttttttcgaccgtccataatataaaactgaaaaatgttatataactatttatttctttatagggattgtatgcattctataaattacaaaaggtagttcttgaatattgctgtaaattcttgaatgaaatacaaagtcaaaatgctttgattatatgccaaattaattggaattaaacttttcttcttttttctttttttcttttttgaatgaaaactttccttctgtttttttttttttttgaaaggtaactttcttttttttacaagcgcaataacttataatatattgttaaaaaaatgcgcaatatataaatactgatgttttgataaagaaaaaccaaaaaaaaaaatgtcatcatctgttgtattattatactatggtggcaactggcaaggatgtgctgctattttttttttttactttaaaaagttatctttagttaggagtgttcggggtacaggtagtacaaattataaactttttttaaaaaaactaaattgcatatacagtttttataattttttaaactacaaccgcatcgcgaaatattaaaattgcaaaaattacaccacaaaaatacaagtaaaaattacatgaaatatgagattttgtaaaaaaattacaaaaatatagcatttataggtttaccactcttttatggtattttttcacatttaagattttttatggtatttaatagaggaaattacacttagtatgggattttaaaagttcttatgataaatatggcacatttaagttt

SEQ ID NO: 315403 - DNA, 1049 bp, Cannabis indica
gctgctgttggtggtggttcttgttgtgccatttcgcgagatgcgaatggtgtggcccacgcactagctaagtctgttactagttttaatggaggtcatatgtgggcagatgcttgtcctagatttattagtgatcctgtaacagctgatttgatttgagttaataacatactttctttaaaaaaaaaaataaagctttcactgttataaattgatgatgtgacacaaacaaacaacaaaaatatttcacgatgcaataaaagttgtggctagctatagctcttggaaaaaaaaaatgttatgcgtatataattacgtgtgtgatacaaatataattactaatatatttttcatatatgatatatattatataattccactatacatttaaagtgaaaatattaattagtgactatatagctaataataactgactagactctttaattcaagtcaagtttggtttgaactctttataaacacgttggaccctttacaaagatatttatggaaagttaacaagttaattaaaatcgtaatatatggtacgtaacgttgcttacgatatctgtagtgacatcacacaacgagcgtgcgtgtggtggaatttccaatatctaattcaaaggtcatctttctgataaatgtatatataaatatattgaaaaatattaaaacgtaccactactaatattttgttactcgtcaaatattattattagtgtaattaattataaattaaaaaaataccattaactaattttaaaatgatacatttaaaaagtgttaaacactattagtacttaagaatgctcatatatataagtattgttacgacgccaaaatgcatggcacctctacgatattatatattataattgattagtaattttgtataatatttattaagttaaataaataagatcccatattaaattagacttataaccatattacactttataaaaatattagtcaccatgtaacctttacatttctatatatatatatagtgtagttagtgggtttgaacctttaccctctaacct

SEQ ID NO: 315404 - DNA, 673 bp, Cannabis indica
ttgaaatttttactagtatattaattagatatttttgccgaaaactctaaattaacttaaaatagatatggtacgaatatatatgagaaaattatattgtatatctattttactttacatattttaatttttacttttatttttatattctttaagatatatcttttatagatgatgtcacattataccctttagattaatgtaaattgtgctagacttacgtacagggtgagggtatattgggcaacccactcacaaaagtcgatacattttaatgaaatataatataaagatatttttgattaatggataaaaaaaagaaatatttttcaacttatcttaatatatattgtaagaaaaattgtaaatatcgtggttctataaaagtcatatttaggtctcattaaaaaaatgtaatcaaggtctcaaattaatctagatcaacgtgtgtcctagaaaaaaaatgcatcgaaagggtggagaattacgaccaaaagagaataaagtgtgaagtgatattattaaggaattatttataaatattaaaaaatgataaaatatttacatcttgatgaatttataggttttatatatatatatatatatatatatatgagtgactattcaatggttactatttttattagtaaccatatggttactatttttcttt

SEQ ID NO: 315405 - DNA, 1170 bp, Cannabis indica
tcaaaaaaaaaaaaaaaatatagctcgagcccatctttcatgaatgcaattattattattattttgtaagggagaattatgtatatatttttatatatagataaatggattgtaaaatagtttttgattttatttcctttccttgacaatttttgttaaaatgtaaataaaaatcatcaaagggggtggggatggttgtagcaatttttttgaaactaaactatgcagttgttgtaatttttcaaattgtaattgcatcgtaaaatttcaaaactgcaaaaatcacattgcgagactatggtgtggtacagtacggtttgagctatttacactaacatcattatcaaatattataataaaatttaaaaataaaactaataaaaattttaacaatacaaaaaaaaaagattatattaaagttttaacatcataacataaaattattatattaaattgtctctaaataataatatatattacatatatttgttcttttattaaaaaaaataaaaatcatataataaaaattgataactttgtaatatatagtgcggtacagtttgaactgttattattaaattcaaaactgcaaatcgtactgtactacgcagtttagcaaaaatataaattacaatcgcattataaagaatttcaaactgtatttttttatgcattgtggttaagtacaaacagtttatacggtttgatttacacttgtagtagataattgacaatagatgtttgtagataggtaggtaggtaggtaggtgatagatgcaccaaagggagtagagaggaggcttaattaaaacccaccattattccattcaattcaattatattcaatctaactacaactgtctcacagttacaactagctacttaattattacttactataagagtactctattgattaattctaagtttagtagtagtggtggtcacgtctcaatctaaagccgcatttaataaatctgtacattttcaattaaactctctctctctccctctccctctccctctccctctcgtttctaatgtcaaccaatccgtaagtaacgaggaaattacactctatactctttttatattatcctattttatttttattctcttttttaaagtctatcatttttacctcttttttaaaatattataccaattttg

SEQ ID NO: 315406 - DNA, 3535 bp, Cannabis indica
agtgttatgggattcgaacccaaacattgtatagtatgtcatacaccttaaccaattaagttatgaatatttgttatttaccatatacttaattttacttaaataaaaacttaacaatttttttaattttttattttgggccctcgaaagatgtgggccctaagcacagtcctagctcacctatgcctagggccaatcctggtttcatattagaatgatattctcgaactgcaatatgggactgggaccaatggtataaggtaataaagttctaacttttcaaagatttttatattgtggcctaaattaaattttatgcaaataaaatagccaaattaacttaaagctataatacactcaaaatagtaatgaatctttttatattacatttaaaatgttagtagggttgcactttgtacatgttatagctaattcagcatgccttgaatataaaactcgaagtagatgtagattcattactattgcgatacagagaataaactactataaatttactgtatctctcttataattaattaattacttttttattctcgccaatttagccagcgggttggcttagaagtctagtccagatatttgagttaatattttggttctttcgttaagagccacaactcaagaaggttattacaagatggttgcaacacgttctacacgtgttgagtgttgacaggcagactccaacaactagccaaacaattgggggcacaccagttgatggagttggaaccgggacttttgcaccccaagcgccaggagtaggcctcggaaccagctcctcaactcttcctccaaggccactatcaactgctcctgggactggcaccaacgaccagatcccgcttgaggagcctcacttggagatagatgaccctaaggaggccaatcctcgactcaaccaaactatggctgacttgcaataacatctgcgagactctctcgataagaaacatgaatagtttcgacaatggtttgtagaaaactggaggaaccattaaacgccaatgcgtaaagcaagagaagcagagagctaacctatctcaacatattagagaggcttattgctttaatcgcgaaactacttcccgtagaggtatttccgagttggtgagagagaccccttgtcgaccaactagtcacatgggaactagtgctcaaggtgaaacccttaacgctcaaaacaccactactacacctagtaactgagcgagtactaagcaaataccaagcatggagacctcccagagggaaagtacctttgagcaagagcacgagaggactcaagctcgtgggcacaaaccaatgggccctccacctagtgttgaacaacctcgcaacaatgagagaaccaacaggaatcctccaaaaagtccttctcattgttctcaagaaacagatcttgagaccttgcaacgggaaagggacctgctactcaagctaaaggaggtagtaggagacactacttggaaactagaggctatgagatctgatgggtaaggactaaagagccacttcatacttgaaaatacttttgagatgaaaggggtgaattatatcgttactttgtctgtggccctgatggctaacagtgtgagtacttccctcgagggcatggagagaaattaaacctgagcaaccaattcaattcttttcacacttataatctggctaaagactacttcgagggaagtatccactacattgctccaaatgaacactcccacagtgggtcatcccgagacgatgcatagttcattctagaggactcactaaagttgccttcacaactttgtgattaggagacaacaacaagatccaagtcgaccagagtataagatcagtctagaagaccaagagacttgtgtgacctcttaaccaagaagagaatggtggatgcaggaacttctagagaaggccctattcgggtaacagaagctccgactgcgatgcaaaacaccactcatggggtcaactgggcataactccacaccttggctgctttagtgaaggagatcacaactcttaagttttctgaatttgagttcgatagagagcaacgctcaccactctcagaaagaattaaatctcttccaatttctcttaggctcaagagccctttctggcatcaatacacaaggaaggaagatccattatttcacagccactactttgaagtgcagaccaatctacaaggtgtgagagacgatgttaggtgctgaatcttgcttgccacactgacaggcctagctcaaaggtagtacatcaagctctccattcgtttaatcaactcatggaaagatctagtggatgcttttggcaaccagttcgctccttcctaaaaatggcagattgagcccaatgatttgatagacatcaaaaaacaggaagacgagcaccttaaggactgcatcgatccaacggttcttagaggcagtcagtaagaccaaaagtcttagcgaggatgcaagggttatgagactcgtagtcgggctcaaggagatgagtcctttatggttcgactttcgtctcaaggtggtatacaccatgaatggcttcttagataaagcaaatggctttatctaacttgcagaagtcgtttcctgacccaagggctcaaagagtggcaataataagtcaccaaacactaaatcccctcctactaaagcgcaaggaaatgagaagaagggatgttcgaacgaaagaaagagaaccaacaacggtggtaagtcaggcaactcccccggtgaaaagaagcccaagactataggggcaagcccttacgagattatgagcctcacttcaccatttactccattctcttagctccaagagaggagatctatacgaccacacaatcaacattgtcattctgcatttaatgtagatctttggattttgcttcataatgtgaatcaatttcatcaaaattgaggtaaaaagcattcagacctacgagccatccaataagtaacatgtaatatataacgtcatgattaaaactcttggaggaaaacgaaaggacaccctatagcaagtcctaacttacagttaacctagtcttaacctcgtactttgcgacttaccgtcgacccaatacactaccgaacctgcaaaaattaagcaaacaaatagagagaatcagcctcaagctcctatactcacattataaaaatttgaaaaccaatacataaattaatatgcataaaaacatttaattttcaatattaatatttgttatattattttataatataataagtgtagattaaaatgtagtaatacatattattatgtgaataatgtgtattaagtgtttggtaaataaattatgtaacatataacctaaaatttaacctacactttataacatggagaggagttacaaagttaattgcttttgtaacttcttttggttgatcataatattgtgtaataagagagatgttacacaaattgatgataggattcaaatattataaaatatagttgttacaattatattaatgctcat

SEQ ID NO: 315407 - DNA, 1113 bp, Cannabis indica
aacattaaatgttatttctgatctatattaataagtaaatctgattacattgaaatgagttttatttagggcataaaacccaacatttacttgagagatattgtctaagaatttatactcaaagatattattgtaagagatataagaaaaggaatctttctccttgttcttgagttaatacaaataacgaggattaggctattaccgaactgctcgcggatgaactacttgttgcttactaaattagactcactgtgtcttcatattgctttattatatttcaatcgttataaactacttgttgcttactaatttagattcactatcgttggctaaaatcaagaatcaagaatcgctctgggttggcatccgagtctgggtcccaattcgggtgaagttttgggttgcagtccgggtcctggtccggttacggttttgggtccttgtctaggtccggctacggttccaggtccaagtccaagtcctggttccggtcgtgtttctgggtcccggtctactgccaatttcgggtcacagggtacgggtttgggtccaggtttgggtctgggactaggttcgagtctgggtctgggttcaggtcctggtctaggtttgggtccgggcatgggtccctgtaacagcctaactaattaggcacattacccaagataattaagaagccctaatcccctaaatgggagtactaaaaaaatagcgcacaaattaaactttaaatacgaatggaatgtgttgaccttgtgtttagccaacgacaacgagtctagtttaataagagataagtgatttatagcaatcgatatataataaagcaatataaagacacaagaattttatagaggttcagccccgagcagttcagtaatagcctaatcctcgctacttgtattgacttaagaacaaggagaaagattccttttcttatagctctgacaacggtatctatgaatatataattcttagataatatctttagggtatagtttaagctaaactgttttcgaccctttgcctagtgaacatgcatcactagttatagggctagtaagcttggagaggaagggttttccctctcgttacaatgtgtataaacag

SEQ ID NO: 315408 - DNA, 943 bp, Cannabis indica
  modified_base (909)..(909): a, c, t, g, unknown or other
ttgcaaattaataagtaaattgagattacaaaatttttcatgaactttatttgttcacttttttttttctataattatatatacatgtataattgtagcattttcttaacaatagtattttttttagctaaataaaataataacataacaaatattctatattttaacattgtgaatttgaataagtcagagaattattaaccggtaaaaaaattcaaaaatacgattcaatagttataagagttaaaaaaaattcttaatagcatatttttatttattgttacacttgaattttggttgagaaagttagttattagtaaaaatcttactctggtatgtttatgttttatcacttaaaacaatgaattctactaataatgttatgttaagttataatagataaaagtaataacttttttaatattcatatcattttattttaatgtctatcgaatagggacaaggcttcgactgaaaatataggaaaaaaaaacaatgctatgacaacaatggataaagatgaaaagcaaccataaaatcgcctcaactataatcacttttattaaatgctcaaatactcatatagcatcactatacaagattttgtgatcaaaacgtgtaattgtaaaattgacttgtttttatgcttttaatgtcaatcaaataataattcataagtacttttgtgacaagtgtagtttaactaaaaaagttgcctaactcacatttatggagccgagtttttactaatttttttctaattttttttgacagaatttccacattaaaaatagagtataccaatagtgctcagaactttttataagtgacgttttattattagttattgatattttttaaaagttattttgttaaattatataaaatcctatattttttttttttttnttttttagacaaagtgattaaaatcactcatgaa

SEQ ID NO: 315409 - DNA, 1732 bp, Cannabis indica
ttggtacatgtcaaagtttaaaattcctaattagctttaaacaaatactacaaaagaatgtcataccataacatcttttaaatcttctttttattattattattattattttatcacaaaataagaaaacttgttgatttaataggagaatttgaatttatatgtatacatttagtttttattaaattatttaacacaaacttattaaaattaataaaatatatatgcatactttatattcatacccattatactgttatctttgcttttctcttctaacttcaccatctatactccacattccatcgatactgatggtggcccaatgctacttattttttttatgtttttgtacataaaaaaaatagcatcagaccaccatcggactaaattttacatttatagatgttaatcctcattcattaagctcgccaaggaggcatcagactactattggactaccatcagaccatatcatcgggctaccatcgaacatttgtcttcaacctttactcattttaacaacaggaaagcatcaggcctgacaaaaaaaccaattttttgctcaaaactcaaatctggccattttcgaccctaaatctaacatctactcacaaataataaatattaatcatacaatttattcttttgacaatattgttgatggtaaagccgtgattgatggataagtcgttgggtctgcagtgaccattaggtctgtgggtccttggatctgtggtcgtagagagaagggaccaatattgtgggtttgagtcaataaagtgagttcatagagcaagagagataagggaggaagaaagagggttgggtgtttgaaatgagaagggtagaattggattttataaaatgttagcctattctactcatatgggttaacttagattaaaaaaataatttcaatctaataaacatataaattcaaattttccttttaatatatatattaaataataatataataatacaaaaatattaaatttccctttattttaataattttttagagatacttactatttattttagaacaaaattggatatttaagcggtcgagtgtaattggatctgtctgttctcattagttaataatttgtagaaatacttactatttattttaagctttcataattattagccaatcaattagtagaaaaaaaaaacacaagtctattctattttgagtatatttttgtttgttttgatttttagttttcgaattattacaactaccaaatcgtagttttgaaattttttatgggttatataattttgtttgaatgtgctgaaatatagggtttagttgatttttttttttttttggttaagttggctaataaaatattggttgtcattattatatgagaaacacatgtgtaatttaaaattcaaaatttaattttttatatattattattaattataaataaaaaataaataaaataattttaattttttttattaattgttgataaaacaaatagatttttttgattttaagttgatttaagaattatttatatgacaatgacacatcaattaagtcagtattttattagccatgtgatatactgaccaaaagttttatatttcaacatgtgaggaattgtaataattgaaaggtgaaaatctgaattttgacatgtactaaatcgtgcccctctaaactttttttttgcccgttaaaaattccccctactattgagattgttaa

SEQ ID NO: 315410 - DNA, 997 bp, Cannabis indica
aatagtatttaccattattattattattattattattattattattattcaagcactcttgcagtaattaaatcgatcaacatgtctttaattatcatttcaaaatatctttcaatgtttttgcataaaagctaataatattgatatcgactttgcgataattataagtggccgagtagtgaagcaataacaattttttttatttaatttgatttatttatttaattattttagtgcaataaccaaattatgaaagtcaagagtcaatggagcaaaatccataattcatggaacaaaaacataattattttaaccctatatatgatgtgtaaaccaacatataatttcgaactatatactaagattcataaaataaaaaaaaaaatcatcctaccacatatcataagtcttaagtaccctccttttatacttttgaaggataataatgctcttcttccaaacttttcccattaaattagtgtgaagaagacaaccaacaaatgatgggaagaaagactgtctagtcctgtctagtgatgttgaatgtgataatacatgtacctaaatattttatcacacacaattaaaagatttcaaagtagttgtttccattcatagaaaaatctagtgatcgatattcgataggtcttgcatgatatcaattataatattttcctttaatcgtgatttacaaagcaataatcttaggagttaaatttttatttgggtagatgtgattaaacatatgcatattgaaaggaataatgtggcatgatgatattaatttctccttattgctatctaccttttttttaatgaaaatttattgagatccactttacttgttcaataatgtacaaatttatgttactaaccttaataattgtacttcaaaagatattgaatgagtgtcaacattcaacaactaatctagagttagacaaagggaatctcaaaattgatttattgaatcttttattgataaacttcaatgtgg

SEQ ID NO: 315411 - DNA, 1503 bp, Cannabis indica
attccttgcacctgggcggagattaatattctgaatagacttcaagtagcacatctacaagtacaacgtctacttacccaagcatggtaaaggacagacaaccacaataggggcaagtttggctttccgaacttctaccatgacttgactactttagaatgatatcgtggagtccaagcacgaagacaatccctacaatcgtgggattgaattagatggatacgacaggctgtctcaatcccctattttgggtattttatttatgtaatgaatgttccttcctattataaacattgtaagcaaaagggaaaccttctctcatgcattaaggccctataaatagtgatctagcttcactataaaagggagctaaagaatttcttcagagagagatctaagagaattacttagagatttcattgcaagagcttagagagagaaaacattgtattcttggttctcgagttaatacaacctaaggggagtaagctattaccacactaatggggctgaagctcttcaaaatatggtgttcattatcatttagtagcttttgctctattttcattatattcttaatggctttataattgactcattgtcgttgactaaaagcgaggtcaacaatatcaattggatgtaaatgatgcttttttacatggagatctccatgaagatgtctatatgtctctacctcaagggtatagacctaaggggcgattaccgtcaaatgcagtatccaaattacaaaagtcactttatagcctaaaaaagcctcaaggcaatggttttctaagttttctagtgccttaactgataagggttttcatcactctacaataggccattttttattcatcaaacacttcaatggaattttcatttttctattggtgtatgtggatgatgtcattctagcaagcaacaatttgcatgaacctcaggccttgaaaatcagattgaatgatagattcaaactaaatgatttgggaaatctgaaatattttttaggccttgaagttgcatgttctgaacaagggatttttgtatcatagagaccctatgctctgcagtcgcatgaagaccttggatatctaggttgtaaaccaatgaatacatccatggacgcaaatctcaagcttggacaagatgtaaaagagaaattgacagacccacattgtacagaagaattgttggcaagctacaatatctaataatcactgggccagatatatttcttattcacttaatcagttgagctaattcttagcaacacctcgagttactcatctgcatgctgcacaaagagtgcttcaatatgttaagaatattggacatggtttattttttgcttcaaaacagaggtaaggttgcatgcttacacatattcggaatgggcatcttgtccagatactagaagatctaccacagggttctgtatattcatttgaagctcaatcatatcttggaaaagcaagaaacaacaaactatttcaagatcct

SEQ ID NO: 315412 - DNA, 1129 bp, Cannabis indica
ttggatcctctattttgttaaatgataaattagactctgtattttttaaatagtactaaatagtaccctgatcagaggtgttatgacaaaattagttatattttctgtatctgttcgtgctagaaattatgttcaagatagttatattaaaaaaagggtaaataccattttagaccctgtgttttgcaaaagttatcaattaaaccatctattttgttaaatgacaaaatagaccttgtatttttcaaaatgatacaaataggaccctgaactgattttttgtcaaaataaaacttagcaataattcgatctagacatgttatgacaaaactgattacattttatgtatctgtctgtgttagaaattgccatcaagttggttatattaaaaaataaaattatcaaaaattaagcttatgggtgatatgttgttcttattttttggaagttttggctcataaactttgaggtagatttatggagtttcaaatcaatgtaacccatggttgttggtgttatttaagataaaatcttaccatgtagaagtgaaattaagagataatttcagtttgtttgtagcaaaagagatgataatcattactaattctcaagattacatctattcataaatttaaatattcttttgtttttcatcttaaacttttaatacttttatttgaccacagttacaggacatacttaatatgaattattctcagtttcttcttgttgcgggctcttacaagctaccacttttgcaaattagagcttctgcataccaggtaagtattcataattgtaatacatggccgactgaaaggtgagacaatcatgacctagttcaaggcaggccctaaaatgaaaatttgttcatatatatatgtagtgcaattaatattagagattatttcaccaaaacataaaaacaacaaaaagaaattacaaaaatacggtttcatggaattttaaacatttttacgatttttttgattttatttacagaaaatacggtctttttatgttgcaatcttgttaatttattgttgattttttgttatatgtatgttattttttgttgttattttgacgttattttcatgttacttttatgtaattttcttgttgattt

SEQ ID NO: 315413 - DNA, 3336 bp, Cannabis indica
tatcatattcttaccttttctctcattactattttttcgcctctgcaaacacaagactacaacaaccgaaaataccacaccagaaaccgctacaacaactccaaccatgatcttaatcttgttatgattatgtcctaattaaaatcacaaaacacacaacattaaacaacaataacaataataataataatggtgatcaacaatgttacattgtacttacctggtttttgtagtggcagttgtgattcaaacccgaaaggcgaaaaaagagatcatctccagtagtattggattcaaactgtgtaatatcaaggagtgtgtttgaatctgaccaaaccaaacacccaattccattgatgaatgaataagctatgcaagaacagttcttcaaacacaatgcatgacatgaatcaatggtgtttccaccattttcaatgtactcatagaaatcaggaacacaaacctctccaatcacaccaaacacatcaccatcactcttattatggcaaagattcaactcagattctctaacacaaccgccactccaattcccttcactccattcctccattgattttggcttaaaccctttcaaacacttacagattggagactcagtgatcttacaaaccccaaatggtccacaaattccgtactgatcgcattcgttctgaccttgatagctagcgtaccagtaaccgccgactctgtctttgagcatgatcgtcaccattccgtccggcgaaagcaaaaccttggaaacaacggaatcgttatacccattgttgaaataaaggtaagttgttccttcttcaacctcttcaacaagattgtacggacttttatacgaagaacccatttcaggtacgcctgtgaatttcagcttatcccaaggaccgctcctagcgtaaatctcggatccgatccaaaccactgcttccggcggcttcttcttcgctataccgaagctgaagtttcccggagacggatcggtttcggatttccaggaaatgagtttgtagttgtctccggttttgaggttgaaaccgaggactgagcttggtaagaatgtgtctccggggttatggaagctctgccataattctgatcctgaaatggagtctttgaggactaagtttccattgtttaagagtatagcttgtgtggtgtttgatgaaatgtctaattcagttgaccagattacagacgagttttgatttgatagaagctcgagatttccattgatggagctgatttgaacaagtggagaagtgagagaggagagtgggttttctctgttggcaacccatacaactgaatgaggagaagaatctcccttgtaccaaattcccagatacaaatttgaagaatttgttggattgaagaaacccaattcgaaaacttggttggatgagaccaaagtttgtttgggggagagtggttgtgatgaagaagtaagattattagaaactgcatatgttgatgaacaacataacagagttacaaacaacagagttagagttgaagaagaagaagaagaagaaggtgctgccattttttaacaatattaactaacactgcttatacatatatacatgatgatgatgatgatgatgatgatgatgatattggttttttggttttacttagtggagcagagaagaattataagggttttctgggttcaaggaaggaaggtagtttggattaactctgttgatttcattgatgatgataatattattataagaattgagttgaccattatgaaatttttattagtattataatgaaatttcatgatatgaatgacagccaagccaccaaccagtgcccactatgactacgatgatgatcatcatagattgacaaactgttgaaatttcattcatgttacactttgtcctgaatcaatcattaatccttttgattttgattatcataggtggattacatgtcaagtaaaatgtaatgaatctgattgattctgtgtacttgacatattcattcatttaaaacaaagttgctttctttcttttcctttttttgtattgatgtttggatgaaagtgtcataattaaatacagtgcatgcattattggtaagaaagaatgaaaccaaaaccacactttttagctatgaagtttctcattaatgaaggtttagtttagtttagtgggcttacaaatgaatcttaagagataatgtaattaagtggagtggttgaaaaaataggatgaacaaaaagttggccgtaaagcaaacaagtggtaggtaggtacacaagatattcacatttggctatggaaaatgtgtcatatataagggatattattatgtttccgttcacaaattgagacttggcttagaaatagaatagaaagtcaaatgaattttcccaaaacaaaagaaccaaacactgactagtactatgtaatgtggtgtgaaaatccatgtttctcttcttcttatatttattataaaacaataatatgacaaccctttcatgtttttgccttattgtcatcactcatcatcaccatcaaataataataataataataataatgcactgtgtgtacatacaatattaataaatactaataataatataatataatataataagattgatcactcttatttagtttttatgtattgttagagatattttcacttattgtacggctattgcaatgtttagtggtattatatcaccgctgttttctaggcatacttataattaatgatattatcttgcagttctcaagtttatcttgctggtgggtcagatatgataacacggttcaaaatttacacgagagttggtgaatttgaattttccttaaatgggttcgaatcgtattagaattgattcgtctaacccatttaataaactgatcgtattcaggttgatgcagttaacacttaatctattaataacttatttaaagttattttagttctttaatatgttataaatgggtcataaacatattgaatatgtcataaacgtgcaattagttgacatatttaaacaaaatatacttataaataagttacaggtcatcttgtgtcaacccgtttataattaagtcgtgttcaaattgtatgacaccattattaacgagtcccaacacaacacttaactaacagccctttactcaattggtttaaaaaggtcgttttctgttttctaaaatatataaacatacagtagaatctctattcaagaatacacttgggactaagcaaattatattctaattgagaggttataactaaatagagttacactaggaaaaaaaattaaaatactaaaaaatatcaatgtaa

SEQ ID NO: 315414 - DNA, 688 bp, Cannabis indica
ttgtgactaaaaagtaatagtagcagttatttcaaaatctcgactatttatttctaaccatatataaaccctacacttatcattttagtctttaaggttccattcataaaattaattttttcttgtaaatatctactttatcaccattttattaaacgtgacaattaatatggtggaaattaatggaaagaaaataaatataattgatgatagtgataataattaataggtggtccaaaataaaatgaaaaagattatattcatttataaaaggaaaattataaatgaagcaatcaaagtaatttttcctaattttaatctcttgttttaatattgttatttgtctagttttattttcattgttcacttaaattggtctcaaaaaaattattttttttttaaataaaactaaaaattcaattaattaattattaattacaatttttgtgagaaggatctcactcacgtgagtaattacttgaaaaatagtttgcatatttcacaacagcctaacattttcatatatgaattataatataataaaataataaaggtgatcctataataaattacatctaataatatatacacatcctataaataccactacatctcatcaagaaaaaatatagaaatataaatgtatatatatagaaaaatgatgatgatgaagagatctctcacatta

SEQ ID NO: 315415 - DNA, 1280 bp, Cannabis indica
gtatgaaaagtgactaacttttttataattggaaagtttgtcataaatggtaagttgatgaataaattaatttctatctttccaattgtgtaaatcaaatcatatatgagttttctatttggtttcatcaaatttcttgtgaaaaaaatcaaagcaaggattttttttttctataaaaggaaaattgcacttattgctcacgattttataggtacaagtagaaactcattggctagttgaagatctattttagggaagtgcctagtgagttgtggtcttgttcagaccgtgtataagttgtcaataaggtgtatattgattataagtactctttatagtagctagatcttggatctctttcacatatttgtatttcattcatatcttgtaagaaatagtgtctttgttgtgtagaggagagggtgttcgtctcttcttctgtatttatgtactttatattatcttgagtctgtaaacaagtctacaaaaaaaataacaacaacagtgctaccttcaggagaaagttctataagttttcgggagatagtttttcaagtcttgcctcgagaggaaacaagcactcttcaagtagatcaaagggagtttgatcacttgaagtttcagcaagattcagttagaaggtggaatacatcaagcttgcgacatataataagagggagtctatttgtgcataagttaattattttgtattttgtattcagtaccactgatgggcaggctccgctaaggtgtctgggaagattctataacaaacataaccacacttcttgtatatctatttgcattgcaaaatacttgatatgagatagggaatcttctttgcccatatacattttccatgtgggcattttgaacttgtgcggaaggtcgagttcatttattcgagtaaagaaaggtgatcttcgtgtccaaatgagttctaggtaggggagttttggatacgttaggctttgtgctaggctcttaagattatttatttgggcttgcatccctggatcaacttgacctacctgttgcctagtctatgtcacttgttgacgctctagagctcatactatcacgtaagtatccaaattaattggttgaacataaggaaaaatcgtctcgtcccgcttttctctcctttggttcaaggtattcctgagatcacccacttggggtcccattctatcaaaaactgattggtcgtggggcctcctcgtagaattagcattgtgtaaagcccgcttagttaatttggaaattagcagctgtttatg

SEQ ID NO: 315416 - DNA, 1988 bp, Cannabis indica
tggctagcaaagtataatgcaaccatcgattgtaaaagaaagatggtaacttttgaaccaaaaggtgaggacccattcgtatttgttggtaaggtccaatgatcaaaaattaatcttagtgcttaaggcaagagatttgttatggtaaggatgtgtttgtttcctagatagtgtggtggatattaagaaagaaataccattgagactagaacacgttccgatggtccaagagtttctagatgtctttctagaggagctaccagggttaccaccaaagtgggacattgactttgaaattgatttgataccgggggcaacacttgtatctaaagctctgtatcggatgtcagctacaaagatgaaagagttgaaggttcaattacagagggtatattagatttgaaattcactagaccgagtacctcaccttggtgtgcgtcagttttggtttgtaaagaagaaggacagaacattgcaaatgtgtattgatgatcaggaattgaataagctgacagtgaagaacaagtatcctttaccaaggatagatgttttatttgatcaattgcaggaaaaaaaaccatcttctctaagatcaatctttgatctggttatcaacagttgaggattcgagaggaggatatttctaagacagctttttgtacccagtatggactctatgaattcttagtgatgttcttcggattaactaatgcttcggtggcattaatggacttaatgaaccgagtgttcaaggattttcagatgattttgtaatcgtcaccatcaatgatattttgatcttttatgattcagaataggtacatgagaaacatcttcgaatggtattgcaacatctctggaagaataaactatatgctaaatttaggaaatgcaagttctggctgccccaataagcttcttagggcatatggtgaacaaagatggtatcttggtggacccggtaaagattgaagtggttctggattggccttgacccaaatctacaactaaggttagaagtttcctgggattagcaagacactacagagggtttgttgaatggtttgccaagatttgtgcacccttaacggaattaactcaaaggaatttaagctttgtttggattgacaagtgtgaaagtagtttccaagaattaaaacagaggctaattattgcactagtgttaaccttaccagttagtaatgagaaatttgtgatttattgtgacgcttctaaacaagggttaggttgcattttgatgcagtccgagaaagttattgcctatgcatttaggtaactgaaggagtatgaacaacaatatcccacccatgatattaagttagcaacaatagtttttgctttgaaagtttgacaccattacctgtatagcaaaaagtgcaaaatttacacggatcacaaaagcttcaaatactatttcactcaaaggaatttgaatattaggtagcaatgatggttagaacttgttaaggactattactgcagattctttaccatattacgttatagtctgatttgttagaaagaatcaagacaacccaacaaagtgatctagaattacaaaagtataaagaaaagcttaaagtcgggtcaacaaaggacttctcaatttcatcagatggattattacgatataaggacaaggtttgtagattgatggtcagtctaagaggactattcagatactttgaggatatattataggtgagtgtgatggactttgaaggctcttggaaaagaaccttcttctcatgcagcaattgtagtactattcgtacggaatcgtatgaaattctttattgggaggaaatgtcgtttgtccaatcattgggatgaagtctgtgtacagagatatcttggacatgatgcagtccaaagaacgagtagggccattgagatgattcaagcttatattcttgcctcacagagtaaacagaaaatactacgctgatccaaagcgtagagatatt

SEQ ID NO: 315417 - DNA, 987 bp, Cannabis indica
aggggaaatttttaacggtaaaaaaaatttagggggcacaatttaatacacgtgaaaattcgggggaaaaaattattaattagccctaatagaaagctaatgtaccattattcacttttttacatttccaatgtctacctaactacctttctacaatagttacgtacgtaattaggattccatgacttcgaattatatatcattattttcttaatttatttcttttatactttctataatgttctatattgaaaattgattagcatgataaaatttaataaataagaattaagtatatattttttcaaatatgtacgtatataataaaatttattgattttatattgtttattatattatatatgggcttagtgtatataggtgtcgtactataaatatggacgtatcatgtcatgccataaaaaagtacgaatcataccgtaccataccttaaaaaaatataaattatgtcgtgtcgtacaataaaaaaatatagatcatgttgtgtcgtgctcagatttgttatgctttacttgagtcgatccgttttcttataagagttcaaattctattttttcacattttatttttataattactaaagtgatgtattttttatagtttcgattatttttatttagtttttcaaaaaaatttcacataaattatataaaaaaaatcattagaacttaaattgaaatatttactaataagtattttaattattattattattagtattattaaacgatcatatatctaagggatatgtttctatattttatgatcttgttgatgatatacctcttttgttatcctcttttcctagagttcttgtatctcatgtaaagcgtgatgctaataaagcggctcacgagttagcgagatttgctcttcgattggataatgattgttcttggttgggggaaattccatctccaatccactctgttatagttatggattctattcaataataataatagt

SEQ ID NO: 315418 - DNA, 1366 bp, Cannabis indica
gttgctagtacagttctttgatgtttgtcttcggtgcaagtaatcttagtttggattactgacgtagtatgacatctaagtgaaatgtgttgtatataatagagattacatatgacgaggaccgatatgaataaaattgtctttatcaaatatgacatttactataaagacctaatttatatcataacgatgatcaatagatcggtctaaatcttgagtaactatatactcttgttcatattattaatttctttgattcactcgttaaagtttctaagagaagatgattcttacaatttctgttttatgattcaaataatgtggatggctgggaacatgatctacaattatagaatcttgactttcttaatagatcaaatgttggttccctttaagtgttaattctggaactgaaaagttgtgcataaatttagatgaaatctaaattatattttcactagtgaataaacagtacttaaggataaagaagtaattagaagggtaaaatagtaatttaattaaaactaattgcgaatcgacacaatgagagttaatcattaaaattgattatattattggacactgcaataaaactcaataaatataattctatgattattaagaattcaattttatataaaatatttatagtaaagtaattattgatatttaacatgtaaaaaaaaaagggtagatccattaaagcaaattttgtacctaaattatgctttgatatatcttaatatataatataatataattgttgtgtatacattgacattccattcttttcttgtaagtaaaataaatggagtacaacgtttgctcaaacatcggttgtaacaatcagttcagtttacatatacagcttaccatttagttaatgatgtgtataagtgcagaattaattagattatttattttctatttttttaaaaagtgtaaactctagtactaaattcattaatttatcttttacacgtttaactaaaattaaaatgtgtttcaagcacgtttaactttagtactttagttggttgaagagaagaccaaggcagcaagtttttgttgaaactgattgtcttacggtggtacaagcacttcagagtcaggtgaagatgatttcattatttggtattgttatttcagactgtaagtgtttacggtggtattgttatttcggagataaaaaatgttttaatttgttttgttaagcggtcagttaatatagtagctcatagtcttgcaagagcttccatcttacatcctgatcatagtttcagtttggggatatcccaactgatctgctaccttatttggtagctgaatttgctggctaataaaagtttctttgccttcaaaaaaa

SEQ ID NO: 315419 - DNA, 900 bp, Cannabis indica
tctttgtaaattagttacgatctttgtaaatcgagaatttacaaataaataaaatattttatttttgagtaaattaaacgaggcatcgcaactaatttatgtataaatcaaatgttttatttattgtaaaattactatgcttattctgaatgttacttcgatttacgaagctcgcaactgatttacaacaaatccaacgtttgatccctatgtaaattcttggactgatatgtcaaacgtttgatttcttagtaattcttatgaggatctttattagagttaatatagttgttagttcggtaattcagttagtttttcctaactaattcctaccacttggacatgggtatataaagagggatttttccctattctctgtaatatttttcacataataataagaaatacatttctctatttctgttatggtattagacgcaaactattacactttcgcttcaatctgtcaatggcgagaacaaggtccaccggtccttcctcctctgatccatctccggctacagctccggtcattgcttcgatcgaatctccagtagaagttttgcctccgactcaggatccaaacgagccgcatccctctccgatcccatctcttcgcaagactctggctctgacatcaatggccacaattctggtactcaaccagctcatcgatccacatccggcatcgatacgaatcacacaattcttcaccgttctaaacgatcccaaccagtcgatcacaagagcccatatcacctcaacaatggcgatcatcctgggtatcttcttgttcccactcccttgacgggttaagaaaatttcctctcttggaaacgcgctgcctccatctccattgcagcaaagaacaaaactcaattcattgatggtacgttacct

SEQ ID NO: 315420 - DNA, 1451 bp, Cannabis indica
gaatggtgatatacaagagttttggtcttgttgatccattccagttatacatggtggatttagaggaaaaaagaaaattgaggagaagaggatctgatcttgttggtgtataaatgaatatcatttacatgccctataagtaataatgtctttaaataagaaaagaaagtaatactgaatgtattaataaattatcctttaaggctaatgtgagtgagtgagagtatgattactgaatactaattagggttcaaatagtgatgttctaatgtatggaatgtgattaacaacagacaagtaagattacatacataatttttatcttccttgaactacgaaaaatgaaagtttgttttaatatgtaatatattaaataaaataaaatacaaatggtccgaattttggagggcgaattttctctgttatatttttgtcctcaagcgagtctagtgcctagaattttggcttgtgagttgtgactctgattgggactaatgctttattatgggacattaatttaggctacaagttttatttaatgaaactaaattttattgtccactgcccacctatatataaatttttactgtccacatttagtattttgtatatagcatttaataatgtctagctctctctatgtatatatatatatagttacactagcactggtgctcttcacacctatcaatggtgctgatttttcttgctcttctttgttccagattctattggagaatgtgaattacagtaaaggtttagatcttttggaacaagccttctcataaggaattcaagttgatgttttgttgtttaataccattattaagaaagcatgttaaaaggttgagatggtttttgcttcttatgcattgataatgcctttcttggacttatgatatatgtgattgagtttgtaaattttttttaatttgattaggtttcttatggggtagcccctcattacgctggaactttgcttgatgggactaagttaaattccagctattatagaggattcctttcaagtttatgcttggccaaggtaattaattatcagtatattgatacacgagaattatttacctgctctgctcatgatacaaatttagtttctcatctaagtgaagtaaaaaatgttacatatttagtttcaagtttatgattggccaaggtaattaattatcagtttattgttgcaagagaattatttacttgccttgctcatgatacataattagtttctcatctaagtgaagtaaaaaatgccatggagttttagtttactttgtgtcagctttgtcctaaggtatatatatcacatgaaattcaataagaaacaaattaaatttaaaattaggtttctctgtttttgtaattttctttcttctctttgtataatcagttttatttgctatttgtttccttgctagtggactttgttatacatc

SEQ ID NO: 315421 - DNA, 512 bp, Cannabis indica
attgccttttctaatccaaattaataaggcgatcattacagttaaaaaaactaattttgtaatagtgcatgttagaatttaggatgaatgttgtgaaagtaggattaaacgagtgtaatagtgtatgctaagatgaatgatgttccatctcaaaaataattgacaataaaaaaaatagcttataaatcttatataaggtattattttttcacatattattaatatgagactcattaacataattttttttaaaacgaaaaagaaaagataaattaattccttatactaatatgtcaaatccaaaattatattaatctaaattaactaacaatcatataattataataaattaaaatacacacaatataaatcaaaattctaaaacaacaagatatatacaactataactaaattatgtggacaaaagactaattaggatttttatcttttaactttaacacatatcatatcagacctctggacttttaagatcgttaaaaataccccctgaa

SEQ ID NO: 315422 - DNA, 916 bp, Cannabis indica
tactacagtacttttttatcgctatgtaccttaatgttgcctttagagctaagtcgtggttggttcgagctgcatgcaacctcgaaagctccttgatattgcccatagtgaacgccatgatctgattattatttgggaaatctccggttgcatagatcaatgatggtaacagatattgccaggtcttgaggatgacttccatgttcttccaattacaaatactgaaatcacagtcgtacacattcattttccacagctcaatgtcaacttcaacaaccacccagtgcctctgtgtgggtagatgcataatgaagtaaatgaagtcattacccgcccagctcggatagaattggttgttctgtaattatggagaacagatgaacatttaacaaatgcaaaataagtattaatagtaattaaaaactcgacaaaccaccgataaaatatcgataacctatcgatatattatcataacaagaacagaaatagacgcactagaattatcgataacatatcgacatcctatcgatatcatgtcgataaatataaaacaaacataaagataataggaagtgtaaggatttatgacaaactgtcgaaacgttatcgacaatctatcgataaactatcgaaaaacttgcaatattaaaaatattaaacataataaacttgtaattatagttaaaactttaaaaacttgctaaaataaagaaatacctgatgaacacctatgcagtactccaagatataatcctctcaaacgaaattttttctgggacccttgtggtttgtccatgcactgctgataacagaggagacatatgttgagagaatgatacccttatgaggaaatgtcaatggaaagaagtggcatcgcctcctcagtagatggacggctgcatccatatgttgcata

SEQ ID NO: 315423 - DNA, 1073 bp, Cannabis indica
tccgcaagcacctcgaatatggctactacagctagcagtaaattgaaactgtaatgcatagtgaaacttaaagtttttaggagataccattataacacctgcctcgagccattctcattcgaagcaccatcttcaaacactttccacacttcatgatctattcctattctggagtagtttactccttccattaagtagtcgtctaaagtctgacccttgatggttactcgaggatgatatgttgcccaaattcaatcaaccactttatcaatcttctcaacgcatcaggtttttataatacttgttgtaaaagttggtctatcagaactttgatgggatgcacttaaaatacatcgtaattttcttgaggtgtgtaccaagttgagtgcgagcttctcaagtggagggtacctcgattctgctcagtaaccgtttacttatatagtaaattggtttctagtttttcccctctacttgaattaatactgacttatggcattttctgagacggctaggtagatttacaacacctctttagttattagttttgctaatactggtggtgttgaaagatgtctcttaatttcttgaaaagcctgttcgcattcttcgttgcactcaaactttttattacctagaaaaatattgaagaatgtgagacttttatcatttgagtttaaactaaacctgcttaaggctgccattcttcctgttagagactaaacctcatttttctttcttggataaggcattttgagcagtgcttttatctattatgggttatcttcaattcctcttgtatttataataaaaccaagaaattttcctaaggacacctcgaacggtatttttaggatttagctttatattgaattttttcaatattacgaagcattccgcgaggtcttctacatggtcctttctcttgactaattttactagcatattatctacatatacttccatgctctgacatatctagttttcgaacataccgttcacgatgcattgatatgtgttggaatttattttaccaggatcttagatctactcacaagtatattgtttaaaca

SEQ ID NO: 315424 - DNA, 1297 bp, Cannabis indica
tcattaacagttaatttaaatatttgtcacactcgaatgtccgaacaagataattaaaagatgtccaaccaagatgcaaatttatctgtaccaagcagggtatataagttggcaattccagagattagtctcgtcgcttctaatacacaaagaccatccctataatcgtgggatttagtccgagaataatggcaatatgccttattttcctattctttacattataattatggaattgatgtagattcctatctcatttattatagattaagagaaaccattcttcatgtaataagcttctataaatagtagcactatcacactagtgaaggaaacaaagaattaatccaaagaaacattcgagagagaacagagatctaagagagagattactcaaagatccattgtaagagctttcgagaagaagaacactttattccttctctcaaatcaatataaatacaaggggaatagactattaccatactcacggggccgaacctctttaaatctggtgttcattttactttactgtttttgttttgttttatttatcttatttgatcgctttattttgactcactgttattggctagaaggggggtcaacaagaggagtagcttatagatcatggtcgaccttgagtaataatgggcctaaatttttttttgagtgtgtgttatgtctaaagtaaaatatgagtattattgggtctcttttcacaaaattttacaaaaatactattttttttcaatgcaaaaaagtatacattataaaaaaatttgagccctgggtttgggtacgccctaggcacgggcctagctcaccttagctcaggttcaacttattagtaatgtgagacttttaataataataaccgagttagttacatattttttacatttattcattctagaaattagttttaaaagaaaattgtttgatcagtgtattattatattattttaaaaaatacaaagttgatattattatttaaaggtctaattaatttttgtaaaatacaatccaaaataaaatttagtttaaaattaatagatataaaggtgtaaagtaagtcatattgtgtttgtcaaaaaaaaaagtcgtattgtgtggctgtcattttgtaaattggccattaattagttaattaattatagattagttatagataaacatgtattagccacgttctacacggttacctactaacggatttttatatatgtccaatttacatatttttctataatcatattatttttcataatattttttataattaaattattttgaa

SEQ ID NO: 315425 - DNA, 1703 bp, Cannabis indica
accatgtctgaagccaactgaggagatatcattatggtactaaaaacttgcccaggaccttttctgtttaaagcgtccaacactacattggctttcccgggatgatataaaatctcacagtcataatctttgactaattctaaccactgccttcgcctcatattcaaatttttctgagtgaagaaatacttgaggctcttgtagtctgtataaatctcacacttctccccatataaataatgtctccatatctttagggcaaacacaacagcaaccaattccatatcatgtatcaaataacgctactcgtgatccttcaactgtcgaggagcataagctataactctgtcagcttgcattaggacacatcccagactctgtttggatgcatcacaataaataacaaatttttcttggtctaatggttaagctagaactggtgtcgtgatcagccgttgcttcaactcctgaaaattcatttcacgcctgttagaccatacaaaaactattggttcttcttagtcaattccatcaatggcattgaaattttttagccataatgattttttcgacaacttttccgatgccaacgacttttccggtgactttttcagtgactgtatcttcttcggtgatataactattaaaagttttaccaactttatttatagtcttttggttggtttttcatattttaaactttaattattttttattttcaattttttttataatttatttatatcatacaaaataaaatttaaatttaataaatttagacttcaaactcactttgagagagccacctttagctagatcaccataaataccaacaactcaaatcaagatgactactcaaattaggcggcctattaagcatagccccagggcgccgcagccatactacacttagattcaaataaataatatactgcaattaatttgccatcacaataccataacctaacgaataaccaattaaccatcaactcagccacacaagtggataaaaataacgtgacataaatgtatctgcaaggacaaaccccaaataatcatgcaccattaccactaccactaccactaccactacactactactagtactacttcaacaacatgcactaatatatcatcgcacttcatcaacattaataggcatctcgccgacttaggggggtgctatcaacaagacactgccgcaccactttctcgtcatgattaggtgtttatagtacgagttggaatttttgtttttttttttttcaaatcaaattgtttatgcagtttttgtaatttcacaaaccatatttgtactgtaagattttaaaaccgcagaaattacattgtaaaaatacagtgtagtatgatttgaacagtttacactatcattattatcatatattataattaaaatttgggtaaatactattttggattttgtgttttgcaaaagttaccaattggaccctctattttgttaaataacaaaataaaccctatattttctaaaatgctaaaaataggatctaagctcaattttcaaaaatttatttttaatataaccaactttatgataatttctaacacaaacagatacagaaaatgtaaccaattttatcttaacatctctagatcaaactattattaaattttaattttgtataaaaaatacagttcaggatcctatatgtacaatttta

SEQ ID NO: 315426 - DNA, 891 bp, Cannabis indica
atcccacaattttagggataattgctgtaaacatattccggtcaactttgtaattaattgccactatgtaattataaataatgacaaataagagcaaaacaaggatgaaaaaactcatgcgtgagagttcctaaaaaaaataaacagcaatctgaatatgattgactcgtggactatgcagaatttaaacgccaaaaccacgtaaaaaaaaccctgcgttcatatcattatttttatagcttttatttttcctctgtgaaatcagtattgtgaagctcaaatatagttaacgaaaatctgcattaacacattagtaatactaatttgaattttgtacaaaaccatacaaaaccattcccataatcaatagtctggtctctcaaatagcatgatccacatgtcattcgtcctattatttgcccttcatttttcatagcatgcacttctttgatattactaatctcccactcttgctctctaattcttctcaacagcccaggtatgacttctttggatctttcacaaattttaggatcaatccaatgaaaaaagttacacccacctgctgactgaaaaaaaaattaaagaaatgaataagaaccatttgtgaattggtaattgaactcagagctcaaaaatatggtttccaacaacaaaagactcaatacataaactaatcatcatcattttagagaaatgttgtcgagtgaatttcacaacaccaaaatgtattatttaattaatataaaagagaattttcagggaagtgacaagtgcgagtattcgacctataatggcgagtactcgactgggaatgcaagaacaaacaacaaggctggaaaatgtaaataagacaaagaattatagtggttcagtcagattgtgatctgc

SEQ ID NO: 315427 - DNA, 1930 bp, Cannabis indica
aaaaaaaataaaaattaattcaatgcttcaattcaaataatgaccactattttgaccttttcatcaaatagaaggttttgcctcaaaccaaaatgttacataatattgaacaatcactagtacaccctctaaataagtgttttggtacactttatatgtatttacaataactttttaatttaattattttttttttcatgatgtgtaaattataattatttataagtacttataaattttctaaaaattatgaataatctaccgtatcaaaaataagattcaaatagttattttttacgtatataaaaaaaattactcgtgcattaaaatatttgaatattattttcaacgctattcaaaattttaaaaatttattaataactttaaataactaaaaggtataggattataaaaaaatgaactaaatttttttcctaaaatatcaaattagataaacgtcaattaactataaacttaccctagattattatatttacaattgatattggtaagttttttttttcttttttatttagggtgtctacacatttggtactttgtgttttatctaaatacaagtttagtaccctgtatttttaataatgcttatttggtaccctctattttaaaatcatacttatttggtaccttaaattcaaatttttttaataaaatttaatcaatactatcaatagtttaaaattttatgaattttaaattcaaatttatttatttgattacatataattaagaattgtttggttaaattgataaaactgtattgattaattttatttaaaggtaccaaatatgtacaatttagaaatatgaggtaccaattaagtattattgaaaacatagggtattaaatatattttttcgtaaaaatacaagatactaaatgagtatattcccttttatttatttacaaaaggttatttccgtttgggtttatatataatcatgtgttataaaattgaccaaaacacttgctaatttatatgtccaactaatcacgaattgttgcttttagatatgagcagacaatatcattcaaataaacacacaaaataaataaattatttaattatattatgaagattagttcctaacccgaattatattgtattaattaacactttcctcaatattattatctagtttttgtttttggtcccaccttataccccaagaacttgaaaatgtaggttttttatttttaaaataagaaacataatttgtaatagggtgcaattcaattacatcatataatattagctaaggcgccggtggtggccaccccttcccatatttttttattaaatatttcaaaattatatgcaagaaaaataattaaaaataaaataaataaatttttatattttttgtattagctctttataaatattttggctggtctggtcagtgtatatatttatataatttattggtatttgtgatgatatgtagtatagtagtagtagtagtaggggctgctaatttgtgtacacatcaacaatggctgtcatcttgttattatctgttgttgaagctttcaacttgtattgatcttttgtttatttatttatttttggatttaggatgtcacagccaatttatttgaaatttctcttctgggtagataaggtacttccgtacaccatacaattagaagaaaaaatatatatgtatatattttaaataataattatgttggtattataactttagggtatggtttagaatttaaaatggaataataaaaaaaagataaaaataactttatttaaactcttgtggtcgaaatacttatgtggacccatgaattttaattttaccattttaattaaacttatttttcttttttataaatgtcaatttaataattataattaattatcaaataaaattatcatttaatttatttatt

SEQ ID NO: 315428 - DNA, 1383 bp, Cannabis indica
tccaagtctactcatcacaaccattgttttcttctttagctttcttgttgcctatgtgtctttctgtcttttagttataatcaaattcatcaaccttgaaaacatgagagtttcttggttttcctattgtttttttacactagccaatccacttttctatcttaaataaatatatgttagtttcatccaataaaaatttctcatgtaatcataaagtttgtttttacaaattttctatttttaacgtttttttttttgttgggtttaggaaagactatatcatatgaatatttgcaatggattaccaatacaaataggagggaatacatttatttttcattcattctcaatccaataataccaaatcaatttattataatcaaaaggcataaattgatattttttttcttctttataattaagatgggaggttataaatatttttgaaattgtgatagccattcccccctatttcatcaagataaacaagatagattttataacttgtacatactaacaataaaagcacgacactgaaacattctgacttgtaggttccgataggtcaatattttatgttgtgctgaaggaggttatctaatatgattcgtttgagttaggtaggattatttacttcatcggtgtgacatgatattgttttcagtagatagataacttataactccaaaaaagaagatcataacttattcacgcatacaaaagaaaaatattaaagagtatcagtgatgtctagcactcttataaaatgtaatatcgatattagtgtaatttaatatcggtcctacttattttattttaataaaaattataaaaaacttttaactaattataaaggtatacctctaatggtattatgtactttggtaatagcaatactccattcaaaacattatagtattgtagtactatacttatatagtaacaaaaactatcttaatcgaaataataattaaaacaggattatccttatataatcataattttaactaaacataagataaaataagatttaaataaaaactctcataagatgaaataataaataagtatatcataattgaaattcattcatccaaaattagaacaaaaagttattaattaattatcactatcataataataatctaaaaactaattgttaaatgaaactagactttttgaatagagtgttaaacgagaccagtacttggaaatatcaagtctcctaatcttcttagttcgaatgttgtaagacaccatggcttcattggaaggtttaatcaacaactcttcatggttccaaaaatccaagggagagtagaacacataccattctgttagactaattgtaagatgtttcctccaagaattgctcccattatt

SEQ ID NO: 315429 - DNA, 581 bp, Cannabis indica
aagggaagaactaagcagatggaagtccgaaggtttccttttggttttatttttcattttgccctaactttgaaattttatttctgttttgggttgtgtatattctattaatttaattctaggatttagattgtttatttgttttgatgtttttgtagtgttattttcttggttttgatggctaaaaacatttccctccatgaaattagcttgtttttttgggtacttatttctaattttttgtttattatttctaattttttgtttatgtatttttatgtttattgttggtattagcctgatttgtaacctatgttgttggtttgatattttgtggtatttttatagtttgttaatagttgcattctccatcttctaggattgtccttccaatatttccccatcttctagggttgtccactagttttgcatagtcaatgaagtcaaatattattttctcatcttccaaggttgtccctgttagaacttattttaccatgatctaaatttactaatatgtatgttgattatagaactataatctaacactctaaatatgaatttcctaaaataatgaaata

SEQ ID NO: 315430 - DNA, 835 bp, Cannabis indica
tcaagtaggccaccattttttcacatagagttgtgtactcacctaggatttgattcacgactagttaaggcttgaggctaaaggctagaattagacttagctcctttaagttagagttaaggctctttatacaggagagcttaaactctaatttacagttgaaatccttagatatttatatattaaattgattaaatataaaagactaaaatggccttaaacatagatattttctagctactttattgggttgttaaggccaaattcccagcccaactcctagtccacgtgtaaaactgtgcaaaggatcctgccaggtccagtcctggccggccagggacctgtagagagcaggctggttagccttgtgtgtctagaggctggccagccgtagggctgcccaagggtggtcgaccagctcctttgaggaagctggtctgtcacttgtcccgtttaagagtcgagattcccgttggctgaggtgctcagttgaccttctcgtaggcaagctgcattgccacatggtactgatattgacctcgtaagcatgccacgtcaaaaatcgggataacattactccttcatgaaaagagagagatttttttaattcctgagaagaagaactaagaattaggattcttcaactagagcaaaaatacttgtaagaaataatttagagtttttctagcttaataatattgacttgtggattagtgttcgttaacaatcaaaccacgtaaaaattaggtctcttcatctgttgaccgaggttttcggcaaccattaaaatatatttatgataatgagctgtaagaaagcgagatgaagacttttt

SEQ ID NO: 315431 - DNA, 902 bp, Cannabis indica
gtcttactttgtgataacaatggagccatagccaacagtaaggaaccttgaagccacaagagaagtaaacatatagaaaggaaatatcatatcatcagagaatatgtggcaagtcctggtcgatgtggtgttggcttcccttgaaatctctagggttcatctacaaaagataggagataagaaaataagagttggtcggaggaagagatgaaaaatagatattatatgacgaccatgccgtacctggtaatctttaggatctataatctttgcttttttgtatttctcaaacataataaaatttatcttagtaatttgcgtttttttttttgtcatgtttagagtttacattttgtttaatttgtaccaattattaatatttttgttattttccttttttttaaacctcacttttttttttcaaaaaatctctcattttttgtgctccactttctcttttaaaatatatattttttaaatcctttctactatttttaccatcttttttcacacatatgatagtaatcttttttgtgttgttattctttttttcttcataaatttttgttaattattattttatttttctttttaactttgcttatcagtaaataatagtaaagaaaatcacatgtgcttacatttagatagaacgactgataatcttagtttcaataagtgaacctataccatactatgtgcttgtactaacaaaatttttttaacaattgtttaaacattattaattaaagtaaaacgtatggttataactcagcagttttgatgggagttagatgtctttggcatatcttcccggcctagtgtgtatatatatatacagggccgtccctgagggtaggcgggctaggcgtgcgcctcgggcccccgaacgctcagggccc

SEQ ID NO: 315432 - DNA, 1745 bp, Cannabis indica
gaaagggaggctagaactgtcttgagagtttttttttggccattttagggctcataggtgtattgcatgtatatacatcacaggggtttatcgattggaatgcaactctggtaagtttttattctgggttattagcttgattgcttcaaaaattttggcttctcttcatgtttgtgttcatagagatggacttgaaccaggatttttcacctaggcattgtggaagcaattgaaggtgcgcctgttggcctttgaaggagaagtgctcgtagaaggaacccaagttgtggttcctgcttaagtgtcccaacaagggatggttttttgagactgtccttgaggacaaacatatcacgaaggaaggaccctccgtgaaggctaaaggagaaaggagggctaggaccccccaaatgtaccagctttcaatgactccatctaggagatggatcagaaggccaactacttccgttcttacaaaatgttgacgacatatgatgatggtgtcaggctttgcaattttctaggattgatgtagcacatgatgtgtgccacgagagagcaagagtggctgacatccagtggtctccagcacttgaattcggtaagttatatatctaattttactcaaattgttgcactattaaaggatggtcagccaggtatggaacaatgcaaagctagccggccagagctataatactgagaagctggctagctaggaaagcacaacatatgggtcggccagccatatcttcttctagcactaacttggtttttcttttgatttcaatctctcttaaagttcaacgtttcccatgaaagggccaaggggtcctcgggcactctcttggagaagcttaaggctaaggggactaagcttatggcggagagggatgcccttaccaagacacatgctcttgtggaatagaaacatgatttcatcaatagtttggagcactttcttggcatcaaaaactaagaaaacactacccttgctgtttaggtctctaggttggaggtggaactcaagaagaaagatgaagcattgaaacatgcttttgatgccagcaagccatcagagacgagtatgttggcttctcctcagagatattgtacgaggcttatttgcgcaaccccaaagttgacctctcttacatgggatcctctttccttgaaagaacacttactaaagggagagaactctacgagagcaaaataaatacagaccaggctgaccagaccgtcatccagcctaaagattcatcatcgggccatcttaatgaggcaatggcccaccaacctatagaggaggtggtcggccaggctgctaatcatgtggttggctagcatggagaagctatggccggccaattacttggcgacgcaaatgctccagctctcagcttcactccacctacgcctacacatgattagacacattttattagtatcttgcatttatgattttattttaatagacatattcagtttcatgttcttgtatggcgtgttggcctttttctttttaacactacttatttttgatcttaggggtttcatgttcttacttttggcttataggcactctatttttgaacactactattgtttagccctatagccttttatcttggatatatgaccgaccaagcggtctttaatcatggctatcttcttattgccttgatatgtatgtatcaaaatttacttttctttatgccgagctgaagtatgtctgtacttga

SEQ ID NO: 315433 - DNA, 1027 bp, Cannabis indica
atctataggacttgaaccagtatatatattggtgttgatttttattgtctcattacttttatcttttctggtttagatattctgttcatccctgttttatcttcgattcttatttgtgatttgttaatcttgtcattgtccattgtttattgattaaagttttagttaatttcattctgcacactagttgtaattttctgcataaacctatcgtcattgtttcattaggtttgcttacccttaagcgactcttgtaaatcgatagcaatttcttttatgaggttaaaaatgcacattttaattattgatgcgtgagtgtttaaaatcgttgggtttttgacttataggaactgccaacaatgcccaacaatagtagttggtttacaactaatgaacatttttaatagcgtcaattctccatatttttttattttataatcgagaagaatcattttttttaatactgaaacacccatctaataaagaaatttttgtcatccatctagaaatgtcgcactcaaaccaccccattagataagaaaacaactcgcacaaaagacaaaaattaggcacaacaaccagtagacatcgatttatgaaagcttgtggcaaatatcagaaaaatcctctcgacatccaccctacccaagatcccgacgatgataactctaaacaacaccccaaacggaagcctaataaccaattgacgataacaagcatagatcctcctccattgaaatcctcaagatgcacaatcaatgagacacaacgaccatatagccacacccatctccattgaaaggacggtgagccatggcagcggaggaaagaaagaaacctcggcggtggcagagtatgagaaaaacctaaagacaaaaccctagctaataatatatttattactaaacagggccggccattaacccgtgcaaggagtgctaatgcacagggcccacaaattaaaaaggctcaatatgactttttaggaattttttttttaacttaatcttccactaatttgttattc

SEQ ID NO: 315434 - DNA, 763 bp, Cannabis indica
gttttattttaaaaaaataaaatttaataactttataattaattttattattattttaatatgtaagataataaaaaataatataaatgttttataattgaatgtaatagttaaatatactaataaattaataaaaatgacataattataaatgaaaaagtagtgcatttcttatggtgtaaattttacatcatagcaaatattgtgctaaatttagcacaaaatttgctatataacaaatttacataactttttggcacattattagagtatatttttttattaaataaactatattttagcttttcactacttgtttgcatctccattaaaaatgctccaataaaactttataattacaataaaaaaaataatgaatgatgacctttataattagcatctctacattataatatatatattcatggttgccgttgtctaattctgattggacttaacatatattatagtgtgaatatttacactttattctaaaatctagagattcatttttatttaaataatggaagaatatatatatatatatatatatttatgtgtatatcttacgattaattatatattatgaatgttacttgatgtttttccttttcttctattaggttggaaacctatttgcaaataaatgtcaagtatatgtatattatttcttttctttcattctttctttgaattgaaagaaaagaaagtattaaacatatatgagcttaatttttatttattgttgagtaatttatatata

SEQ ID NO: 315435 - DNA, 780 bp, Cannabis indica
tatataattaaaaaaatataaatagtaatgtattattctaataaaataatataaatgacgaaaatgtgaataaaaaaatagtatatttattgtgatgtaaattttacatcatagtgttatgctaaatttgacacaagatttaatatgtgcatgctaaatttgcgttacttttttgcaaagtgcacactgttacttgaagatgctcttataaagtattgaaatgtcatttcaatgtagtgacttttttattattttggtggaatgactattcaataaattatcattctaatacaatgagaaaaattctaataattttttttatacattttaaatttgattccaccaaattcattttcatattcttatattttcattcatgtcaatcaaacaccacttaaaagtgaataatatgaaataatataagtgagaaaaaattaaattaatttaattttaaaaaaatcactttttatattttaaaattttctcttttacattattttttttaatatcaataattattttaattttaattttatatattttaaatcttgtataatttttttttataaaatttcatataattttttattttatttttctggttcctaatatttaaaatatattgaacttttatttatatatatattgtaagaatatgagaaggtggaaattatttaaaaattagaatgaattaaaataggtgtgcttataattaattactgtaatatgaagattaaaatagtttttaattttttttttgggatattaatagtgcgagga

SEQ ID NO: 315436 - DNA, 1894 bp, Cannabis indica
tacacaaggacatgcacgctctaagtgacatgagagacaatctctgacaccgtacatagaaaaggtgtgagtggtaggcccttggcttggcgcgcgctgacttagagaatatagtgtctgttagaatagattgtcctagctagggagtgtttaatttcatagctttaaatttattttcacattaattttaaaaataaaaactgcttttaaaaagcaacaggagtgtttggccatatttttcaaaaataatttttgaaaattgagttaaaaaaaatgagagaacataatctattttgataatttctttttcatcattagcctcgacccttggccaatgatttgggctgggtctaggttttgagctagaatctaggatcaggagtgggactaggtttgagtccaaggctataggtttggagttgggtcttgggccgaggctagtgttcagtctgggtccggggtccaagtttaagtccgggtttggattaggttgggcctagtgtcgaggttgaggtctaagtttagggctcagggtcgtgacttggaccgagtccaaggtcaaggcccaagttagatttgggactaaggccgacattcgaagtgcatgatgagatcggggttgggttcatgtcgaggtgtggaatattcaagggtttttttttgtaagaaaaaatctaaaaactaactgcacaagtattgtattttaaaaataaaaaacataaaataatttggagcaccctcttacattgataatatgtggaataaactgttagagagtttcatttgataatgtgtagaaactaaatagcatacataaaatgtgtatggactactcatctaattgtcaattggttttggaatggaatcccatacatcttatcaaattctcattctctttttaataatttttaaaaatacaaaaaattagctagggacatacctctgcaagacaaccatatcctaggattgctgatttacgagcaatgtcaaaagcagtcatccccatcttattgatgattctcttgttgatattctgattacttaccaaacatttaaaaatcctagaataaccatccatagcagctacatgtagagctgtatttccttcattgtcttgctcatttataagattaacaaaaggtctcatacttagtaaagtatttaccacaaaactctgtttgtgttcaacagcaatatgaagtgcagtccgatctctattgtctaacaactcaccaatatctggacatttctccatcaatgctctcatcactcctacatggcccatccttgcagagatgtgaagagcagtcataccttctttatctttgatgtaggcaatgcattttttggcttccaaaaataatctcacaagtcttgattgtccattgtttgctgtatagtgatgaggcatccatccaaactcatcttctgatttttctaaaatctgggatccacatctctctaacaactttttaacaaaatctgaagaaaaaaaaaacatggactaaattaatgttttggtgattgttaggtatgtagtttataattaattaattataaagttttattttttgacacaacaaaatttgtaaataaattaaaaaacaaaaattgttaggaatctcaattatcaaactcttatgaaatcactactaaaagctatttaagctgccttgcgaaagtatttaagctgttctaaaaactacacttatttctcaaaaaaaaaaaagctacacttagttgcaccctaagtgcatgtttgacatcataactaaaaaactgttttttgtttttaaaaacagaaaattgttttttgaaaacaatttggcatgtttggccttgtttttttaaaacagttttcagaaaacaaagttacaaaaaacaagaattttga

SEQ ID NO: 315437 - DNA, 915 bp, Cannabis indica
agctcaagaatattaagtttttcaaaattaaagtccatatagctaatagctaatatttgatattttagctaagatccacaagtgatgaaattattattttaattaatgttattatttttagttttataacttagtgttatattatttttatttaattagtattagtattttttattgttattttgtatttttaaatacgttagtattttaaattaattattatttttgtaaaaaaatttaatttgagagttaattaaaatgtaagattatattttaaaataaaataaaataagggttagagtacaattaaaaaatgtatatacaaattggtgtaaaatttggtgcacactaatttagtgcataatttgagtgttattagagtaaacttgtgtaaaaattctacgctaatttaataaaataatgtatatcattgaaaatggtctaataagacaaccatccatcttgtattgtcagtacaagaatcactatatagaactcattatgagagaagagtacgatccagatcagtaaggttattattactgtgccaaatcttgagtagtagtactgattaatataaatccgatcaaaccccatatttatacgtttcttacgcttagaattataatattgtctctcatattaagatgagatatgctaataatgcagcttaattattttcataaaatttagcaaaaatatgatctagagagtatgaagattacatatggatggatgaaacctcctcccctatctatttcctcttattgcttttaatttatgatgtcactatttttcttataaaaaagataataaagataaattgtgattttaagatattttactcaataaaaaaagaagacgaagatatttttctaaaaaaaataataattatatcataataataataataat

SEQ ID NO: 315438 - DNA, 1443 bp, Cannabis indica
gcataaaacccaacaggaagacagattcgggctgcacttgatccattgatacctggtcaagaatccttcactcccattcgatttactggtcctgcagatgcaatggttgcccatttaattacagatgaacgagtttggaatgtcctcctcaacaatggttttctccataagatgtcgatcgtatattaacactgcctctcagctttttttcagagtcttgatgctctcatatggcactacaacatctcgggtacctacacagtataatccggataccatcttgcaacatctatagcagatgtggaggccaataattgctcaagttctaactcacaagcttcttggtggaagttcttttggtctttacaactcccccaaaagtcaagatctttgcttggcgggttatccacaatgctctaccagttgctacatctttagttaggcaaaagatcataacagactcaacaggttcagtttgtaaatcagcttgggagtctattgggcatgcactatttggctgcaaatattccaaaggtgtatggcgcaacatggatctgaatttcgactggagtaaagcatctgcaatgtacaagggagactatttggtacatttctcaactatttacaaccaacaagagatggaataaattatttgcacactttggtcaatttggaaagaaagaaatcgagttgttcatagctctactgcaaaaccagcaccagcacttgcttcctttgctgtcaattatttatctaatttacgaacagccaagtgcaagtaccataatgctgccagcaacgatgctcactttctagcaccagtaactgctaatgctccatggaaacctcctactggcacgaacctaaaattgaatgtggatgccaccattgatgctaatcgaaatattattagagtaggggctgttgtccataattcagcaggtcatgttcgtgctgcactggcgaaacaaattattggtaattttacatctcatgaaatggaagccaaggcaatattttatagtcttaattaggttatacagctgcaattgccgattgcaatagtggagactgatgcgcttcttgtaacaaatgccttgtgaaaatgatctactacaattacttcctattatgatcttttaattgatgtttctagtcttttatcctttttccttcaagtgaatgttgtccatgctaaacgttaagccaacatggttgcacattgtttagctaagttcgctttagggatggatcaaacttactcttagttggaggatttacctctacctttttactctgttattataaatgacatacgagtttaggtatcgtttggtaacacttttttaatcagatttctgtttttaaaagtggaaaagtgaaaatatttttcaaaaacatgttctataaaattgtttttacttttcaattttataattagaa

SEQ ID NO: 315439 - DNA, 3609 bp, Cannabis indica
tttttatacatatatatttatttattatacatatatatatttatctttctctttttgactcagtcaaccgagtctttacattctcccctctttaaagaaatttcatcttgaaatttcaaagtacaacctcaagttgaaaattaaacaagtgaggatacttcatatacatctcagactctaactccctagtagcctcgtcttctttgtgatttttccataagaccatgaatactggaatctctctgttccttaacacttttagctctctcgccaagattttgacaagttgttcttcataagtcacatcttcctgaagagggatagcctcatactcaatgacatgtgacgaatctggagtatacttcattaacatagacacatggaacacattatgatttttagcaagaatggtgatcctttagtccggtcgagttatagatctgtgagttttgggtcggccaagcattgaacgaggcttttaagttgatctaattgtgtagtaggaggaatatcttgtccgtctaatcctcttttgcgattcagattattcttgaggtcgtgcacggtgccccatcgatcaaacactgatgtgcctagaggcttttgtgcttgactattgtgaattatgggttggcccgatacctctgtctgaggacaggtgttaagctgatcattccctctcaagtaataagttggtaaatactatttggcccatagtctgaccctatggccttgaattggacggtccgttatctggggtttgttgagtatgttcagctggtcgttcttctggcccgtgttgtggcctagtgcgaatataagcatcaatcactaattgttggcaggtgacttgataggctcttctgatcaatacggtggtgtgtttggaacggttgttaatcattgcctgctgggctctcatgacttctatctctcgatccctccactctttaaactgcgtctttgctcattaaaagcaagatttatagctgctcgaatatcttgttgttcgtagtgaagagtgttattgtggccttgtattagccccaatgcagctcacaaattttgcaatttggtgtcatctctgactagcctttgagattttgtaatggacaggattcctataccaggagtggtctgctctgttgcagtactggcatttccaatttcttgcatgcttggagtgaacccagctagaggggttgtcactccttaacctacagtttgtggacttgttggtggctaaggattaaccagggcagggtctgtcttggttggatctcttgggtttgtaggtttctgcacgctcgaatccatcaccattagatcaattgtatcaatctgatttcccctccgtgtttgcacaaccatcatgtgtcctaaaaaagacttaagacaaaaacttatatctgttctctcaatgaaagtaccaaaatattgatctcgctttaagccaatgatagtaagttaaattaaagtgattgagaataattaaataacaaaatgtaaataatatatcgtaaagaaaacaccatatttatagaggttcgaccccttatagttagtaataatctactcctctttttgttgtattgacttgtgagagaatgaacaagaactctctgtaaaattcatgtccctgaatagggagatgagtccactatttatagagtttaattacataaaattagtttccctaaatatataataaataaaatgggaaactagtttattttcataattacagtaagcaaagtaagaaacttaggctagttgtctttcttctctaaagatacaaatccatcactgaatgtagggattatgctgtgacttgcaagcttggagatatacaagatatatctctgaacttaccaactcacatcacttggtcagtgcatgcgagccacctgcttgagaagatggtttgatgtctatacatgatctgtttggacatcccatcctctatttacgacttcaagtatcataattgtctatacgactcatttggaggagtatcgctcattcaggtgatgaaatgtgctctacgtgtcatccagatagatgtcacgtcattgtgcaaaaatttgaatacattatatattagagtaatttcataaaaaaatttactaaatataatatttgctcaaaaatattatattcttatgtcatataaataaataaacaatataaaccctggataagctctacaaatttaaattaatctctaactatgtacatattaattcttatatgtatgtaaaacacttaaaattttaaaataaccaaaaaggaactaagtacagaactaaacccaacacttcaaggttcccagtattttcatgctctcttactttccacttgttgaactaaaatgtatatattatattattttttttgtatatatattaattttaatattttggggcctccaaattggtggggcttggggcctaggctctggccgccccaccctctggctagccttgaatacaattgtatacacaatacatgtcctctggttggcctttattaaattgtatacttggttactactacggtcacactcttagggattgtttggttgtatttttagtattcaatttttcacaatatttttttcaaaagtaagaatagaaataattttttattatttcaaaaatgtaatagcatttgactaatgttttctaaaaattaattaaaaatttttatttaaagaaatcttcaatattctacaccataccacgacatgaacctagccccacccccgacctggaccccgcctagatcccaactcggaccccgctcgaatcttgacccagaactcgaactcaaacttagacccgaaccccagagcccagaactcggactcaaacctagacccgaaccccagagcccaccctgcaccagagacaagtatgtgaaagaaaatgtaaaataaaatataaaatatatatagattagccaaaaaaaaataaaaattattttagaaaatagaaaaaaaaatattttgatgttttttaattcgattttcaaaaaagtttatagaaattttatcaaacgctcccaattaatttttaaaagctgttttctttttttaaaacattgaaaacaatttttaagttataaagtcaaatatctcattattctctctaattaagttcttattctactatatatttttatttaaagtataatgtatatttaagagtattgttattaaacaccagtggtgcgtatcactttttataggtgttaccttatgattggttaacgatatttcttaaaagagcattgttattgggcactagtggtgcctagcaccttctcgacatgtcgcgttgcgattggctaacaatactccctaaaagctattatattaaactttatggaacccgatacttaattggaccaatagcgatattgacacgtaagaaagtgttaagtaccactggtgccctttagcatttctcttcctaaaacttattttcttaagttatataggactcactatttaattaactaatagtaatttgaccttaaggatagagctagacactaatcatactattcagcaattttatattaattacaactattaatatcaaaatt

SEQ ID NO: 315440 - DNA, 744 bp, Cannabis indica
aacgccgagttccaaaataccggacaccggaaatgcaaaatatgcaagatactgaataacataaataaccgaataataaattatttaaatagctataaataatttcataattaatcataaacaactgataatttccaaattaactaagcgggctttacaaatacattatctatgatcaatcttgatgagaaaaaagcactttgtgactcagagataacttgtgagaggtacggtttcagtcttataacaattgatttggagacaagcttatagagaacattacaaagacagataggtcgcacctgagtcatatttagcgattttttgactttggggacaagtgctattaatgtttgattgaaactagcagggtcgctgccttcgttgaggactttgaggacagaactagtgacatgccatcaacaccaggacttccatctgaattcattgattttaaagcctcatagacttcggttgcaaaaaaaaaggccgagtaatctctctgttatcagcatcacatattgaccgtggcaccttagatagaataaaatggagggtctcattgtctacaccatcagtagtgtagatgttttgaaaataatcttgaactacattagcatagagaaccctgtgaagtgtgtgttagacagtttatatgtataaacgtgtaaaatatatatagttttatgtataaaatgcggaattaaatcaaacatatatacactatgaataaggatcgaaata

SEQ ID NO: 315441 - DNA, 820 bp, Cannabis indica
aaaaaaaatgacatataagatgccacatcaactccactaaactactccttatatataaagatataaatatatattaatattactggttaacatatagtacgtataatagctagtctagtgtttatcaggacatgttataactactatatatttatatacttgatccggaaatcatataaaatttgatatgaaatccttataatatataacttcaattccaaaaaatttaatatacctgcggtagacaatggaactttttatatatgttgctgctccacccttttgagctagttatgagatctgtcaccctgtcaaaaaacacttgcaaatctttgaatcattacattacattaaaacactcactacagtttgtatatattgataaatgttgtagatttatacatctatatatgatatttatatggaatattcctgaataatatattattattattataccaggacagaattactttaatcaagtagccgcatttcagcgtaatagtaattagaatagtagaacaacactatatatgtaaataaatattataactgtcatttgcagagtaaggaattctaacaatatatatggtaaccttagaatcatttgactagtttttttttttcttcttgatccattcagttaattctgaacgtttttcttaactgcatatacacatatctatatttgtatcctgtcgtacttaatatatatgatcaggtgtttcagttaatttcatacttaatatgtataaaatgatttgaatcctgtcagcatgaagaactatatatacatacacatatatataataataccaat

SEQ ID NO: 315442 - DNA, 606 bp, Cannabis indica
gcagtatggcacaagaaaagtagaccatgatgaaaagtttcttcttagcttgatgcgagacaagggaactagttatagctcagcccctcaatcattattgatgtcaatgaggagtattttgataactgttctaactctatggattcctttgattcctttgatgtggctcctttatcggcagctttctgctgctaacagccctgccaaaaagaggcaacgtgatacagaggtagttggttttgatgatgttgaaggtgttgattctgctaaagtggagctcatggaggtaagcgctaaacattttgccatttgaggttacatccaatgttaaaaatattattcttgtcaatcatttcttatcatggtagttagatgattaactagataatgatatacctttctttcctatgagaatgtggttctggataaataattatttttgacatataagcagttgatatggttaaaatcccttctagaattatgggaaacgtgtcctggttcagccacaatgagtattgtgtacccataactgtatgttgagtgctaattgttataggccttgtttgtctagggctattttgtaaccaaggttttcctccgcca

SEQ ID NO: 315443 - DNA, 771 bp, Cannabis indica
gggaaaatagggcctcgccgcggcgagcaaagatgtggccgcggcggcaacaaccaggttgcccacgtcgtggtgagggccctggaaacccccaaaaattgcaattttacaaacttcgaatttcatacctaaaactcataccaaccaactccaatcatgcaaaatttcaaattcaaagctagaacaacctatatccaatattatcatgaatttttaagcaaaccaaagctcaaatttaccaattcaaacacatactaacaaaagcatgctacaacaccaacatcattccaccaagatctcatgtttaaaatcatagcatttaaacctttaaaatatacccattaattcaagccaaattcaaaaattcaagcatcaaattctcatcctaaaccaatcaaaaatacatcacacatgaatctaagcaacacaaacacaccaaacacctcacaaaccaaccaattctcaacaacatgcatcatttacataagatcatcaagaataacatttaaagagcttaaattaccaaaaattaaacataaataaagagagattagatgcttaccaaaaatacacaagcttcaagtactaaatcacaccaaatacactctaatttaagcttaattttcaaaattggtttaagatttaggaaagatgagaaaggaagaggaagaggtgttacgaaaattattaataactacgcaagtgcacgcaatcaagtagtatactcacgcaagtgaggtcgaaccacagggaattggattaattattact

SEQ ID NO: 315444 - DNA, 1128 bp, Cannabis indica
tggtatatcgacagtggagctacaaaccacaccactgccaatgcttctcacatacaacacaaggcagatctgaaaggtataacccatctccttgtaggcaatggttttccactcactgtcactacatctggcacaagtaaaatacacaacaaatctggtcatcttgttcttaatgatatgctttgtgtccctgaaatatctaaaaatcttatgtcaatatctcaactaaccaaagataacaatgtttttgttgagttttatgctgatttctgtgttgtgaaggatctaatcacgagggaggagctgcttcggggagtgcttaacaatgggctttatcagttgaaacttgctgcatcatcatcacctactcaaccttccaccagtagactaaactttcttgtttcctccaagagcagacatactgccaagcttccagtccagtcgagtccaatagatagttgtcagtccttatttgctgaatctaacttcaattcagatgtcaatgtgtggcatatgcgtcttggtcatcccaacattaatgtattaaaacacatgttgactaatgaaaaagtttcattcaaaaattctcctcctttttgcaatgcatgccatataggaaaatccaaatataagcattacagtagttcacacaccaagtctcaatctccaattgaactcatacatacggatgtatggggtccttctccaatcgtatccaaagaagggtatcgatattatgttcacttcatagatgattacagcaacttcacatggatattccctctcaaactaaaatctgatgtgaaaaatacattccttaactttcaaaagtttgttgaaaggaaatttgacacaaaaattaagactctccaatcggattggggaggagaatataggaaccgtgcaccttttctagagtcaataggagtccattttagacacccttgtcctcacactcacgctcaaaatggaaaatccgagcgaaaacatcaacacatcattgagatggggctcactcttctctcacaagcctctatgccattgcggttttggtgggatgctttcagcacagccaccttcctcataaaccatctctccaccccagccttagctcacaaatcaccaatc

SEQ ID NO: 315445 - DNA, 833 bp, Cannabis indica
ttttatttggtgttgttaaaatttctccaacaatactaattaaaaagaaaaggtcataaaaaatagaaaaaatagtacaaacttatttataacaacacataatgatttataagtccacataagatgtattcgaaacacaactaaaagaaaaaataaaaaaaaatcacgatccttgtgcacaggtacccacacactcatgggcatagttttgccatccaccaagggcacaagttgcacaaatatgaaacttttaattcttccattagactttacacagtgtttggacacataaaaaaagttgtggataccaattttcatgacaaaaagataaatctattttcttaatttttttttataattgaaataaattttaaaaaaataaaaaaatcggtacaaacttatttacaatgacaaggaatggtttcacaatccatgtgggatgtatttggaacacaactaaaagaaaaaaacaataaaaaaagaattcaataataaaattctgatgcttgtacactggcgttcacacacttctcctccttattcttctgtggcatgggagaagtgttaaacttcccctttttgccattgttcctcccagatttgttggtgctgcacttattttgtagtgtttttaccagtagaggtctgagcatcattgttattgcatgcttgtgtgcctggtgggtcatgaggatgttgggtgcctcatgactacttgctactgggcctatcgtatggcttcctcaagtttgatgaagttgtctgctctatcgacgaattctttcatgttgttggtggatatcctcttgatatctttgttgggttttgtgccc

SEQ ID NO: 315446 - DNA, 1336 bp, Cannabis indica
aggagccataactcaaaaaattctgcttaacaaagatatcttgaatggcctacatttgagactttgaaaagtgggttgcatgctaaaatcgagtacccaaatagttacggcccatgccaacaactttctcggactagcaaaatgcaagctaccattggcaacaattaatgttatctttaaaaccccgtgttacaaagataataagcatcggaataaaataagcaccaaaaaatatattcaatttaaaattccaaagtcaccaagatatggaatgaactaagttatatatgcttaaaaaattccaaagatgcgaaaaagacttgttagtcttaactaataagcactccacgacaagtggacatatacaaacctacacatgagggtcacaacataaatgcacaaccaaaaagtgtataagaagaacaagagaatttaactctattcatggcagaccttacttgccaaccaacttgagcaagagatttaactctacttaaggatgagcttgagaatgggatacaactctactcaacgctcaaaacttaagaaagagattttaaaactccgtaaaagttttaaattcaagcaagagatataactctactttgaatcaaaaaccttaagcaaaaagttttaaaccctgcaaaagtcctaaaattaagcaagagaaataactctactcgactaccacatgagacatgagatataactcagctcacattctaaggagaagccacatgctttaataactccacacatacaagtccatgaaaattggccgtgcccatgcacacctcttcacaacaattacagacattgatcgtgcccatgcacaccccttcacaacaattacagatattggttgtggccatgcacacattttcacaacaatcaaggacattggttgtgcccatgcacacatcttcagaagagaagttacattcatgcactctacaaagaagtatttttttgtgcaagccttgggaaaagtgcgaaagcattacttgaaggcttacaagcaaatactttttgggggcaaaagttatacccaattcttgagggtgccatggcacttctgaagggctcaaaaatgtcaaacaaccatttggctctgagactcacacacccaagtgtgtccaaactagggttcatgggcctgcccgagcgtttttgccgtaaagacctcaatccgccaagaaaaccaataaggacttgacttgtttaggcatgaaaatgacttgggattatgtataaagtcaaattagcactaaaaccataagaaaacaggaataaatgaccactgccaaaaggaaatggcagtgctctctaattttgg

SEQ ID NO: 315447 - DNA, 971 bp, Cannabis indica
attttatttgcagaaaatacggtcttttatgtgtttttatgttatacacttgttaatttgttgttgtttatttttatatttgtatgttatcttctgtacacttgttattttttcaacataaaaatgtaaaagctttacaaaaaatagaatttacgtaattatctctaataaattcaaaatgaaatttgtactaacgaaactgaaagaaaattacagtgttacaaatattgagtacttataccgttaaaaataaatatttagttgatgctgcttacaaacttaaaaatttagttagttatactgttatttacccaaaaaaatattatatacaatgcttgagtgattggataggaaccatctaaattaataaactctccatacattaaataaatagtaatttgcggcataaatatataagtttagctctcaaataaatacttaagtttaattttttactgtaataatacttaagttatatttttggcactctataggtatttgaccgttaaatgctaagtcattatccacgtgttatttttttattagtatatttaaactaatttttttaaaaaataaaaatttaatgacttggaccaatcaggaattgccacgtgacaatttacttaacacttattacttaacaactaggtacctatagaatttccagaattataacttaagtattattaccggcaaaaattaaacatagttatttatttacaattgaaaattaaacttaagtatttatatcacaaattactcaaataaatctacattttatcaaaaaataaaaccaaatctcaacttctatttatatatatatatataaatttcaatcacatattatttatgtaattatcaaaattctataataactatgtgtgtaatataaactcccaaatcattagcaatataagacaaataataataataataataataataataataattaataattattattatta

SEQ ID NO: 315448 - DNA, 1525 bp, Cannabis indica
atcaaactataataaaataaagcaatcaatagttgagattttaaataaaaaagatataagtaaaactagtttaataaaattgtatattaattatgtacaaaaatcatatatattatatataatatatatgttcggtcggttctcggtgaccgatttttcattgacactaaaaccgaccatgttaaggcggttttaaccgaaggcagttttttcgttttcagtttttttggtgtcggtttatcggtgttcggacggtcggtgtattcggtttggtcggttttttagttttttttctcacccctaatggagactaaactctcagttggtgctattaataagttttaatctaagtttacttttgcaaatggcattaaagtccctcgagtcagccttagtggcggccttcttttgttatggactcatgatgttgatgtaactttactttcatataatataagccattttcactgttatatttagtttcctaactattgtcatttcactttcactagctttttatggagtttcgcatcataataatcgttataacatgtggcaattacatcgccttggaggcactattcaaaatacaccatggctttcaattggtgactttaatgacttcttttcaccaactgataaaactaggggtgacattaataaacggccttcactcttgtttaagaaattttcagataccttcattcttcaccctattcatggccatgggagtccctacatctggattaacaaacctcgcatcgcacccacattcaagaaagactagattggggcctctcaaatcttatatgggactcttctttccccatggcgcacctcctccatggagacttctttggctttgatcaccaagcattaattctatccctccaagatgttaaggatcgtatggggcctcataagccacaattccattttcataatagctggttagttgaggatggatttcaggaatgacttcgtaaggcttggatccctgatcctgaatctttagagctcactcatatctctaacttaagcaacaagcttcaacattgtgctctcgtcttgtctgaatagaagaaatcgttggatccccctcttccacaccaagttcaaaaggtccaatctcaactatatgttgctcaaaaacatccccaacccactaattctcaccttcttctatgtcgacaacttcaaggggacctcgatcaggtactttataaagaagaagagtattagcaacaacactctcaaattaactagcttaagcttggcgataagaacactccatacttttaccaattcacttcctcaagatgtgctaagaatagaatttgctcactcactcgatctaatggttcaactgtcactgatactcaaatcattatgaccactattgaataatatttcgtgcaactcttcatcagccaaaatcccaactgcgaacatatggaccatgttctgtctcgcatctctgaaaagattactcctatagatgttggatattattttaccaggatct

SEQ ID NO: 315449 - DNA, 1221 bp, Cannabis indica
aaataaatactatatttaattatagcacaattctaaataattttcgatataacatttgcctattttcttctaactattttggcatgataattcacaaatacattagagataatccaaaatctacaaatagaagtaaatgggaaggaaaaaaatttcccatatgttaaaggtgaaaaagaaaaacaaaaaaactaggagaagtttgagttttacaactattaatctgaatctgacgatattaaagattcaggatttaatgtcatcaccattttcgatagcatctcccccatgtcttgtaactcatcctgttcaaagccccaacttctaagtaactgcgccccaggtgctcctctctcgactccatatcgacgaagcttccccaacctattatccaaatatggcaacacagcattgcttgaacgtagtctagctgccatgggaatggagtgaacatcaagagaacctcttgatgagaaaccgctgatcgggctgccaagcagctcccatatcttttacttcaggaactgaagcccgtttaagtcctgtaatatcaaaaagataacttacattattattttcttaaaactataatccccgcccaattctacatgtataaatcggcaactgataataataacggtataagtatctaaaattttaagtttataatcagtataaagctaatgacgtttttttagcaacataagtacccaatgttgtaaaattatattttcttgtctaattttgtcagtacaaactctgttagcgtcttaaccagaacacatgtaaaatctaaattctaaattattaggtcttgataaaaacatttagtatcagtcttcttttaataaaagagtctagctataaattttagacattaacagagtctgtactaataaaatggaacaaaaattacagttttactaacattcggtacttttaccgactaaaaaaataattaggtttataccatttacaaactcaatactttgagtccttatgccgctatttactctagttactatagtgacatctcttgggtgaaaataaagtacattattgcttttgaaagtgttattctaatcgaaaactcgttgtgttaccaagcgctccctagtttctagtctatctatcttatatatacaagtaaaagccaacttgaacaaaaacaaagtgaaagggccaagagcaagtgcatttttacttttagaaaaatgaaca

SEQ ID NO: 315450 - DNA, 2118 bp, Cannabis indica
ataaataacacataatacctcataaactaattacaattaaaaaaggtgggatcaatttcaaaaatactaaggcataaatctaaattgagctggttcactaacaaaataaataacacacaataactcaaaatataagataaagaaatcggttttatataactagttaaaaatctgagacaaataaattggttccgtaaagcaactaagataaaaacttacacataaaaactagttaaataaagcaaataaataattaaataactgattccatgaactaactaaatcaaaaataaattttcaaaataactaaattaaaaaccagttcttgaattaattaaatcgaaaactagtttttgaaataaataaatcaagaacctctttttgaaattacttaaataaaaaaactagttgcgacataaattaaaatagaactggcatcacaataaaaataactaaaaataaataacacataataactcaaaaactagttataattaaagaaaaaaaagagttaatcagtcctaaaaacactgatacataaattaaaacataaatgattctataaaaaatgagtaagaaaaataacaaacaataactcaaaaattagttctaaatgaaaatacttgctatgatttttggaaagtaaaataataagagccaagaaataataaatagcattcttaaagaagatggagatttttacgaggtttaggtgctaattaaccctagtccacgagtcaatctattagccttagaaggcgtatatgattttttttatagtgtttatgcaggaaatcctaactttgtattctatgtttctcttgaaaaagaagaaagcttagaataatattagcagagctttagctatctaggttgtgatccccccttcgtatggaaataaaagggtatttataggctaatggtgggtatggacatgcccatgacccacctagggtttctgcaaaagtccaataatggggtaaaatacatgcaaaaaagagctgacagctgggtcccttggaagaatttgtgcttatgtgctgaagtagctggataataagggaccactgtacgtaatggacgtgtgtcgccaagacgtttaaccttgaaaagtaaatgcttgcaatagctgtctggaagaaaggtgtgtgaggtgtgcacactaccatgtcttggcacaggggacaagatctgatcatgtgtcaaaaaaagcataactgtcactgggcaatctgggtttgtatccaaggtagacataagcaatccttttgggtggtcagcatccgtgatagcccctttgagtacccatccatgtatcatttaggcagactttgagtttgtaataagtcctctgtgtttgggaagccaaaataaggcaaggtggatctccgtatacctcttggccctaacctttcccagattagtgaagcctctccaagacttggtttaattaaggggctttagttaatgagatcgtgagattatctctttttatgccacaagtcacccgtctaaaaacacggataacatttaccgcccaagctcctgggacttttcgagtggttggagctggcagtcttcttctggatctcagagatcagttcatgacatgtcgtgattgtcgggatcatagatgcattcctcaagatatctcaaattaaaggaccaggaactaatagtgtcacaggcgtggcacacatactgcgtctttaatacatccactgacaacacacacgtgtagggggcacgtctttctaaagaaatggcaattatggcaagtcaattgaaatgacccttttttaattcacgctggacccaaggtgggcaatgaaaaaatgaatgccctgagcaagttttaaatgccatctttgtagcttctcatctattagatcaaatcgtgctttttggagggaggatctgatctattcatttcaaattgcatggatttagccgagatataaatagcttcatcaaacctagtttctccttttgcactactttagacttttcaaaacctctatctttaaacttcaaaccagagcctcttattccaaaaaatatcttatccttgcaatcattccaagcggtgaatgcaagaagtttttgactgcctgatcc

SEQ ID NO: 315451 - DNA, 1645 bp, Cannabis indica
ggcataaaacccaacaggagattattcaaaaatccaaattcacttctaggacgtcttttgaagcatagatactactcaaggaattccttccttgaagcccaccttggccactctccttcattgacatggcaagagattcattggggaagagaacttctcatcaaagggttgagatttaaaattgataatggttttcagattcaaagtggtcatgatccttggattcctgggaatgatgaattccgacctattagttactctgggccaccttctctgccggtttcaacttttattcttgacactatggaatggaatttacctctccttcaagattatttttctcaaattgacattgatcgcattgtcactattcctttgagtttttatcaatcacaagataggatgatttggcattacaacacaactggagagtatattgtaaagtctggcttccaccttacaaattcaatctctgagaaaaaccaagaatcatcatctgatgacttcaagatctagtggaaatttttctgggctttacaattaccaccaaaagtaaaaatctttgcttggaaagtgattcaacatgctctgcccgtggcatcagccttgcacaaaagaaaaattattgatttagcgtcatgttcgaggtgtaatagtgcttgggaatcgatagggcatgcgttgttctcttgtacttttgccaaatcggtatggaaaaagactcgctttacaattgactatcaacacgctcatggtatgtttaatggggattatatcatacacttggcaaacacaatgaaaaaaactgaagttgaacttttgatatgtgtgttatggtgtatatggaatgatagaaataaggtcctacatggtggttccaaaagagacccttcttctctggttgcttatgcagtaaaatacttggataattaccgctctgctaaggctcccagctgtaagactcaggatttacataccaatacatcaggaactgttgtgcgtaactcttcacaccaggatggtccttcgcttcagcaaaatacacactagcaacaacaagttcttggcaccctccctgctggtgtaatatgtgaaaaccaaccaaatgtttcatggtaggatgcacatcagcaacatcgtcctttctctggaagcaattggaaaccaacaactgaaatgtcatggatgccacctgcaggtaatcttcttaagatgaatgttgatgctgcagcaaattttaacgacaagaaattcggaattggtgcagttgttcgtaacaacaagggagaagttattgctgtgttttctaagccttctcaaggttgcttccgaagtaatgaaatggaagcaaagacgctcttccacagtcttatttgggctactcagcatcaattgccaatagcgcttgtggaaacagatgcccaaagagtctccactgctttaaattcttttcatagacttatcttatttttctgatctcattgatgatgttcgctgtcaggggcggagccaaaacgaaacacttaggggggccaattatttaaaatttatattttgaagaaaatatttttatagaattgcacatcacaaaaattattaataagaacatgtttagatataattgtataattactatgatattaat

SEQ ID NO: 315452 - DNA, 975 bp, Cannabis indica
gtccatcaatcaactgctcagagtccagtgtattcatcatatcgtcattcttaaagaacccatctacacagcaaaatcaacagacacactaatggttttgcttgaggtcacacataagatgatgtttaaatttgaaaacttcttgattcatatattatagaatttcactgaattttatcccctcaaatacgtatgtaacaccacaatttagtactcgtatttttcatgtaaaaatcagttgatgaatttttgttgttatctatgctagattgagggccaacttgcatgcataaaaagaaacaatgaaagtaatactgttttccttttatggtttcattatttttgttaaatgcaattaaaacgattttacagtgaatgaccactcttatccccctagaaaataattactagtggaagctgaatgttaatttcttgagaaatagattccgtatccaattcgtttgaatgaaatttagatgcctatgatactgcagttagtttctgttacgtttgcagtggtgaaacatttttattttcttaacaaaaacattaaaataaatttgaccttctaaggtaatgagcaatatttgatatgagttctttgttaccttagcttctcgtggatctggaaagcatccttagctgatgccatcaactccaaagtgggcagtagccaatggtgttggtgttaaattaattgtatgtgaccaggaagttgctcgatatgaaactgctactttggcagcagttgctgtccctgcacttttgcttcctccacgtacaacagctttggatgaacatctagttgctgggcttccagctcttgagccatatgcgtgtttatttcataggtgttggatggctcctttcctttttcaattaacattgcagaagatcatttctaagtgaccaacttggctttgttgactacaactattaaattttgtattaggtattatgccattgctactccaa

SEQ ID NO: 315453 - DNA, 967 bp, Cannabis indica
gtagttacatataacataaacaactcttctttctttaacattgtaatttaaatttaaactcattgtatttatctaaaaaatatttttctattattatttttttattaataaaatattaaaatattgttaaactaaaattataattaacaataaattttaaatattattatatgtttttataaattaatagcacttaataaattatatattttttaataaaaatgaaattaaatatatgtgtattataagtatatatattgtcaccttttatatcttatctcgaagagctatgacactcatattgtgcttgggtaagttgttgttcggttcgcaaacattgtaccaatgaaactgataatcattaacatagtattagagcatgaccaatactaactattttcaaagtagttaacatagtccctttttttatttttaaccaattaaatttaagaaaagtatgtaaagtaaattaattagactacggtgtttaacaacaactatcttttttaaatattaagtacttaacttctccacctcattaaattgaccccaacatagtgacaagctattctttaaactacaacattgatgatgctcttatgtgctctaattatactcatacatggaaacttgtaataaaaaataaaaacaaagaagccctaagagcaactccaatacaagatccactctaaaaaaagcctataatctctgtattattccaaaatatactatattttctttcatccacatcattttaagacattttactcttaaaattactctaatattaagcacctccaaaaattgacagcatggaccaacacattatttaatgaaattactaaaaagtatcactggtgtcactgtttaccattctccttagtgtcatattgttattcgtgtaattaagtatcatgtctcatataattttaaaaaaaaaatagtttttaaaaaatattgttaacta

SEQ ID NO: 315454 - DNA, 3953 bp, Cannabis indica
aatatatcacattctttccctgagatctttttcccacaaattggtatacccagtaggtgaatggcaactcctgtctgatgaaacctgatatctgcataatgtggttgacttcatcaggttgcatgttgctacagtatacggcagttttgctggcatttggatataatccagatgtgagtgagaatgtttttaaagcctgcagcatgtataagacactcatgaagtccccatgacaaaataatagtacatcatcagcaaaagcaaggtggttcagcttcaaactagcacatctatcatggaatttgaacccctctttttccctcactttcttcatcaatctagataagtactccatgcccaacacaaaaagtaagggagaaatcggatcaccttatctaatttccctttttgcttcaaagaaaccatggagagctccattgaacatcaatgagaatctatgagttgtaatacagttcatgactagctgaatgaattttagaggaaaattcaaaccagctaacatctcttcaagaaaactccactcaattgtgtcatacgccttttggagatccagtttaatcatggaactaggcttatttgcctttctaccataatgcctcaccaaatcttgacatatcaagatatcctatgaacctccctttgataaaaccaccttgagaccgtgatattattgaaggaaggatgttattgattctagaactcaaaagatttgtttaaattttataaatcacattgcaacaagctataggtctaaaatctttaacagagttagggcatttaaccttacgcaccaaagtaattatggtagagtttatttctttcaaaatgttacctgaattcataaaagattgcacaactccacatatatcttctccagtaagatcccaattgtcctgatagaagctactagaaaagccatctgaactcggggatttatttccaggtatgctgaaaacagccttttttatctcatcctttgtgaattcctgcaataaccaatcttcctgagttgaagttaataaaggaccattgctgagaatgcttctttccactaccttcgtctgatatcttttggttccaaggaggtttttgtagaagtctaggaaagctgttgtaatgagttctggatctgtaactctgctgccctcttggttttcaatggataggattcggttttgcctcactctatgctttatgcaagcatgaaataaggcagaattagtgtcaccatcttgaatccactccatcttagctttttgtttcaaaaacaaagagtaatcctgctgcttttgaagtaaactctcacgggctaatctttcctgctggtgtaggctgtcttcaaggggctgttgttgcagctggttttgaagtctgtcaagagctgccttggcctcatgaacctactgctgcaaatcacagtaggcttccttgtttaacaaccttaatctctctttgaatagctttaatttcaaacggcctggaacatttggctacccaagagtctccatctccacgcatctcttaacatagaatcatacttaggatgggatttccacatcctaaagtatttgaacggctttccccccccccccacaacatgaggatgcaaggaaagaattgctggagaaagatcaaatagtccctcgttaacaaatacagcttcagcaaactcgtatttatcaatccaagcttgattggccatgatcctgtctatcttggagtaaatcctatcagcccctggttgtttattagtccaagtgaaaaaattcccactagatttaacatcttcgagcttgcaataattcacacaagtaaggaaatcaggatcaggataggatctcaccctatgccccaccctctcttccttagctaaaagatcattgaaatcccccatcacagaccaatttccatcagaatatagctcacacaagtccttccaaagcactttcctctctccccggttgttggaagcatatacaaccgtgagtaaactgttgaaaccctcaatagttgaaatcctcaaatgcattagttggctagtacatttgatggtatcaacattaaatctataaggattccaagcaatcgtaatcttacctcccggatgccaagcaatgtttgaagagaagcaccatccatcaaaaacattagagtacaagactccaagctttgggacctttaccctagtctcgaggagacccacaacatcaaccttttgagaattaataaagttctttattaattgttgtttagattgatgattggctcatcggacattccaacacaacaatctatccattagaaagaaagggacctcccccccccccctcttgtattgtgtatattatctccatctgttatggtcttatcaattccatattcggcatttacttccccaatatttccatcttgctcctccaagctaagagcctggaacgtattctccattcttactacaggatgcacctgctgcttttcacttctgtccacttttggcccttttgaaatcttgataaaaccatctgcatcaggtacattggcctatctattgtcatttttcactacccactgttgttttaaaggagcagcttttttacaatcttctgtagaatgtccaattctcgagcagtgggagcaagtaatcggcttccattcatatttgacgctaacaaaagtattgagaccatatttattttcaaactctatcatactcgggagttgttgatccatttgtacctcaattaacactctagcataattcagcctctcccgatccttggtgatagaatcctccatgagaggcttaccaagttgcccaacaatcttaaagagtgacctttgaccccaatatttcaattctaaatcctcagctgtacccaaattgggacacaattgacatcctctttcttgaaattgacattagggtcctaaggtttcaagattacaggtctgattgaaaaaaacgtatcccccattcatgacctggtctctgaattctagggaggtaaaccaaatgataaagattccatgtgacaaaactttcactcggtcaaccttatcatgccaaatcatttttgcaaatccttcaagcacgtgcaatggtggattaactccaagaacatagcacacaattgaaggattccaaaacaaaatctcctcttcaatatcatcaagagtgattttcactttcccattaccctgctccgtatccttaaaagagttctccaagttacgcatcacagatttagaacgcataatagggggaattgagttcttaccttgccgtatgtcactgttacattattgttggccatgaggaagtgaatgaaatcattctgagcgtcactcctagcctcatcctgcctttgaatctcttttaatgaagaattgggagatagaggttgaaaatcatggcgatcttttccctggttgagacgttcttccccttgcaaaccttcctcatccgagacctccaatggctcgattttagtaattcgccccatagaaacagaaatatccatttgaatttttagcagtagatttagaatttccatggtttttcgatcttgttttagccatagcaccagcctctcagctgtaagagctagaaccaaagaaaaaattttattttagttatatttaattctctaaattcaaagattaagaatataatgttagaaatatctaaattttaaattaagatattatattatattatattattagatatttaattaatttacattatttaaataaactggaaatttgaaaatttgttagatatttgaattttagttaggattttaggatatttaggatatttgttagattttaaatatttttaaatattatctaacctaaattttaaattctagttaagatatattttaaaattaaaatatcttaacctactttccaattatctgttacat

SEQ ID NO: 315455 - DNA, 722 bp, Cannabis indica
gaccaaaccgaacgatgcttagccttaatatagccatgacaaacactatatgtgagattatttggatactatatgtcttaaaagaattaaagattgagtgtgaagggcctgctttgctatattgtcacaataaatctgctcaacatatagctgcaaatccaatatttcatgaaaggaccaaacatatagagatagattgtcacttggtgagagaaaaggtccaaaaaggaattgtcaaaacagttcatgtatcaactaaagttcaactggctgatattttaactaaacctcattttcccaaccaattcaagaatttcaaaaacaagatgggactaagagacatttatagtctatcttcaggggagtatcaaactgtttagagtgagaggttggttggagtgttagttattttagttaagtgagccggtttgttagagttaattagttatgattgctaatgtttgttatttttgtaactgttttcagctgctataagtagctagctcatctcttgtaaatgctcaatgacaattcaatgaatgaagcttaattttccttctctttgtctctgttttgtgtctggttttcctgctaacaaatacacttcacttctggtatatttaaagttccaacaataatgaataaaaatctctagtagaaaaaaactgataatccatcataaagttggagaaaattatatattcatgagaggacatgtatta

SEQ ID NO: 315456 - DNA, 1221 bp, Cannabis indica
gtaaaatatcaaagtgtaaattttacttgtcacaagttgtacctctcatttactacaaaaaaaatagtcagatgctcgagaaggaatcaaaattagataagcagaacccaatacaccaggctatatgtcaacttgggcgctaggtgcttttcgaggggtttcccagggctcgttttgatacttctatggcatttaagattgtgacgaggtctcttaccccgtttatgactaaaataagaagaatgcccggagtagaatttgtgtttgaggaccaaaaacatgcgaaccatgttgtacgtcaacttgggcgcaggactcagcacccatgtcaagttgggcgttggggccctccccgagatcacttgtttctttgttatatctaaaaacagaaaagatgtgtgaaacacttttttgagaaaacacttggaaagcacccatatcaacccaggtgttgggtctcagtttttcccatcatatgattccatttgattcttgaaaatactcgtatctcaattattggtgaaagcaaataatatgcctataatacttctgaagaaaaatatttagaaatgacccaggttgacaatatgttaacttgggccctgggtcctaattttggccttcaggttgatctgtttctttcttgaaagcacttgattcctcgtttttgatggagacaaataaaatactcgggatacttcttcaatattgcagttggaagcaccccaggttgacaatatctcaacttgggcattgggtgcatcaccaggtcgcccgggcaccgagtgcccgggtgctcttaacaggaaatgttttgattctgattctaatgcttccaacatgtttgtgacaggtcttactcatgtataagtacaaattttgagccattttccctgagacaggcctgagaactaaaaccatagtcgggaatgtcaacctggtcactaggtgaaaatccaaacacccattctggagttctcggagtcaacctgggtacagggctaaggacccatcgtaggtcgtctgctatgactcgggactactcaactccataaatgttttctttcttaccatgtgtcaaacattgatgttcacgtcaccaaggtcaattttcaagtaaacaccaatcaaattccaaccccggtgaagcctgaccccgactaaccaccacccattgcctctacctgtagagaaaagagcgagatagagagagagagagag

SEQ ID NO: 315457 - DNA, 1859 bp, Cannabis indica
ttaatcatcaaaataaggagacttaagagtttcagtccacaatcttccaatttttgatgatatcgaatatttaattattttaaaaagggaaaggaaataaaagtagaaacaatatattagattagctctcccttaatatgtgcaagggttaataatttataaatttaccttttagttttacctttcatgcttttataaactccccctcaatttgttacttatattcaaacatcattagaagtctaaaataattgagttgttgccataaaaataatcactatgaaatttcttccccttttgattcgtcaaaaaggatggcaaaagaattcacaaaataaatttcaagtagaatgaataaaaaaaaatcataacacaccattcatttgaaacatagaactatagactatagattttcaagttcaaacacacttaccatccaagcataaaaagaaaatacgaataatataacacactaacacatagaaagtcaagcatactaagaataaaaaaaaataaacatgaagaacaatgctaaaacataatgcaagtgaactaagttggtagaggtccaaagtggtccatatatgctctctattgtgccaattcatcttgagcatcggcaaacacgtgctccatgtcactcctcataatggccaagtcacttcttatggtggtcatctaattttggagagtagaaaaatgattgttcattttacctctcaagttggtgaaatttgaagcaatgggggtgtgaaggcgatcgaaagtatcctcaatgttctgttagggaaaatgaggcattggcggcgcttcttctttgccttccttttcactttgagcttgggcttcttatttttcctgttaactttcacttgaggccgaagtgcttcctcatgggaatgtggaccttgtttggtggaaatccagttctttttcaactttattagcgtacatacttgaatgtgatctcaccaagactatcagaattcttaggttcataaaactcaatttcatcttcgattgggatttctaaaagtgggaacaagtaggtaagaagagaaccttagggtaaggcttttctttggttaggcttgttcaattaatagatggttttaaggataaggtagcctaggttgatttggttttctttcaaaatgacgttctataaaattatttggtcaagtgaactcacttcatcttgatggctttttctaggaacaaggttagaacacatgaaattatggagcattttttcttgaaggggaagggatgttcatctttgttttgcacaaaagttttcacctacacaaacgatattattgaaaaggctatagttaatggtgtcatcattcttaggcaaagtttaggatccagtaagaggccattattgggtgcatttagaagatcatttagtttatcaacagttaactcaaaagatacccctttgaggcttcctttaacactatatgaatcacaattagtttcaatgcaagcataaaagctctaactaacctaggatagatagtggtatgaatttccaacaaggttttccatcccatagattcaaaaattgaattaaaattaacatactcaagaactttgagatcacattgcttaccattgagtgtaacccttgtggagaagtcttcattgaatttccctgcatatttccatggaaaaagaggtcattacttgccttggacctttgttccctttgttgcattgaagaagaagcatccatggtgaaggtgaagaaagggaatagtgaaattaggtttagagagtgagatttagagagaagaagggtagaaggcttctaattagggttataatatctgaatgggggttacaaaacattt

SEQ ID NO: 315458 - DNA, 802 bp, Cannabis indica
tatttattttttattgaaatacatttagatataaaaaaatatattaaaaagtcatttttttgtaaaaaataaattttatgggaacaagtttgagtttattttttttctccaaaaatctagattttttttaagtaaacatagcattttttttaatttaatttcaatttttttttcaaaatattttatatttttattaaatttttaattattttttaagatatgagtttataattataaataagcttgattttttcttaaaaaaaatcttaatttgtttgaattatttattggattttcaagaattttggttagattttttaagaaatgtgtttataaataaaataaagtttaaaaatatttttttaggaataatttaggatttttaagtaaatttaatattttttaattagtttacatttttatcagttttttattaattttttttagaattaatagaaaattataatttttaaaattatttttttaataaaagaggtcaaaattccgtattggttagagtttagggataaattgataaatgcctttttttttggtcagttaaccacaaatgcctgcatattaaaattaaatctattcaaatttatccacttttataaggttactatccaatttacccttacatatgttaccttaattaataactggtgggtattcatattattggggaggcacgttaattatatgaaacaggaggggcataattgaaataataattagaaaagagggcataaattaatgagttttaagaaagaggtaaaaatgagatgaattaccttaaaaa

SEQ ID NO: 315459 - DNA, 545 bp, Cannabis indica
tgtataaattagtggagggtatatatattttgaaatggggtattttattagggtcaattaatgaaatttcccttcatattctacatgtattgtttgacttatattgctttttattcaataaataattaatacgaactaagagatatattgtttgacttatattactttctctttgaattcatattaagggtttctgcatgaaatatattttaatttcaataattatcggagaagtagtatttagtatcttttagacgtatcgtcttgcaattagttaatgatactttcaaaaaattattatattaaattatatatgttaattaaattaatattaagtttatcatttctattcttgtaaggtacacatatatagggaagaataaataataataatgtaatatataattacgtacgtttgatatttgagaacgtaacttaattatatacctgtatttatataagtacggccaagtacagtgagtgcatcgtaattagatcgatgggggaagcttcgtcgaaagttctgaattatatatatatatata

SEQ ID NO: 315460 - DNA, 1181 bp, Cannabis indica
aattaaaaagacaacttgcaaagcctcctatactctcaaatcccctggacagagaagaattaggaatatacttggctgtcaccgaatatgttgtaagcgtcgtgctgataagggaagaaaacaatgtccaacatccagtctactatatcaacaaaagactcgttgaagctgaagggcaatatcttataatagaaaagctcacttaccacccaatcttagcaacaaggaagttaaggccctattttcaagctcacactatttgattttacactgaccaacaattgccccaagtattacaaaagcctgatgcctttgggcgattacttaaatggtcaatagagttgggtcggtatgaaataatctttcaaccccgtacaacagttacaggacaggccttggcgactttctagttgagtgtataggcaaagaagaaagcaacgtgagggacaacccagaggcattacaatagcccctaccagaaaagaatgaagacagacctacccagaaattgcatgtggatcgattagctacagaccagcattttggtgcaggattttcccttgtcacacctgggggccacacctgcatggagcaatcaaatttgggttcaaggcctccaacaacgaagcagaatatgttgccctcatagctggactaaaacatgcttaagaggtacatgccgagtacattgaggtttgtagtgatttgcaattggtagtaagttgtgtctcaggagagtacgtatcctaggaagataaaatggtggtctatctaagaaagatacaagacgtgctcgcacaattcaaggcttacaccctcaggcagattctaagagaagaaaatgccactattgatgccctaggacggcttgcgagcatcactataacagataaggccaacctagtcccaatccaattcttagaagaacctcgcatcacttgcgtggaagaagtcgaaataatagacaaaacaccaaactagatgacacaatagcagtttacctcaacactggagaacttccaaatgacaggaataaagctcggaagatgatgaggaaagcttcacgatacatcatagtcattggagtgatgtatagaagaggtttttccgtgccattacttagatgtgtaacaaaagaagaggctgcatggctcctacctgaggtacatgatggattttgt

SEQ ID NO: 315461 - DNA, 1255 bp, Cannabis indica
tggttgattctcttgtgatattcttatgtttataattcatctttattatagtgtaagacagcttaattagttattcttgctaggacctagtattactttacaattttctttttcaaaaaaactaagacgccatgtggggccgtaggaaggaagatcccccatagttttcaatctgaaaaaaaaaaaaaaaacttataaatagagctcaaacacaacgcgttataacagtctcaatttctttatcgtgctcgtataataaaaatttcaaagccagctgaaagcactagctatagtgtaacatatatatatatttatttatatatatatataaatacaaattaaacagaatggttaaaagtcctcagagcagaggagttatgggacaattgatgatacgctccttgattctgctatctcttcttgctgtggctgttgttggtggccgaactcaggttcgacactacaacttcgatgtagagtacatttttggggcaccagattgcaaggagcacgtggtgatgggcatcaatggccagttccctggccccactattagggccaacgctggcgacaccgtcgtcgttcacctcaccaacaagctccacaccgaaggtgtcgtcatccattggcatggaattagacaggtaaatattacctcatagtaatggtctaatattgtaaattgtaatgtaaattgtcctaattaattggtttgtgttttgttcagttgggtacaccttgggcagatggtacagcctcaatctcccagtgtgctattaaccctggggaagtatttacgtatagattcctagttgataaggtaaacttttatactatatttcttaatttgtcacttagtgatactcattttttagttaaaggaaaaataaatgaaaaaagaatatcaagattaagatgatgatccataataatatatatgatcagacgaaattcgaagtggaagcgcatttgccaaaattcactcacttatatattaattgattatagcaatctaaaccactatatggtggccaacactagtatccattttgaaagatagctagtatgatggtcatttgataaaatataatgatgagtattaatattatatatactaatatccaacaagaagcaatcaagcaaatgactttttctttttcttttatagaaagaatatatatataattaagtatttccattgtcaagaaaaaaaaaagcaaagaaaagaaaatatagatatatgatatccaattat

SEQ ID NO: 315462 - DNA, 1298 bp, Cannabis indica
atatgcttattgatgttgctatagataaaaagggttaatttcttttttcgtggaatatagagaaataggtttttataatgtcttggataatgctaaaaaaattgctattgaaatgaatatcgatctaatatttcctcaaaggcacataatttaaagaaaaagacaatttgattaaattttgaatacctcatttgttgagttatctggagagatatcttttaaaattaattattttctttaccttgtttatcaagtcattgcttctcttactaagatatttgaacaatatcaagaatatgaaaatatttttggtttcttgtttacttttgacaagctacaatcgtgagccaatgtaaatttgaagtcttgttgtagtcattttgaaaaggcattaaaacataatgaacaatctgatattaatgggaatgaattatatgtggacttgaagctattaagacaaatcttgcctagagagaagatgagagctatggatatattaaagtttttgaaagacataaattgttttcctaataaaattattgcatatagaattttgttgactagtcctgtgacagttgtttttgcagaaagaagtttttcaaagttaaaattattgaaatcctacttgcggtctaccgtgttacaagaaatgcttaatggattagcattgatagactccgaccaaacttggacctaaatcccctcacgaccctgacctttgacctgaactcgaatccgaccctagacctagacctagaccagacttaaataaaatcaaaaataaaaataaaaataaattttacagaaaacacttttattttctatttttaaaattataaattatagccctccatagagatgccttgctttttttataaaagaggtgtgcatgcataatgttaaagagcatatttaatttttgggatgggatgagaatggttgcgtgtgttttggcaattgtgaatgtcaactgctttcattccttatttttgccaacagttgtcaatggctattccccatgtccaaacatcacacacaacacaattactacgcccatcccatgaaagcacgtgctccatcacgtgactcattaatgaactatctatctatgagcatgaagtgaaacaaagaaagaaagagagaaacaccttataccctttttttttttttttttgggtaaatactattttggagctttctgttttgcaaaagtttaccaattggaccatgtgttttgttaaatgacaaaatggaccctgtatttttaaaatagtacaaataggaccctgaattgattt

SEQ ID NO: 315463 - DNA, 616 bp, Cannabis indica
gtatatatcctataattataatattaatatgaataatttatagtgtacatactcaagtttaatttttgttaccgtgtttaattttaactgtaataatacttaggttatatttttagaatcatggaagtatttaagtgtcaagtcattatttttatttctatgttaattttttattggtatatttaaatttatttataaatagaaaatacaaatttaatgatctagactaatcaaatcttaccatatgatcattcacttgacacttctcactcagtacttttgaaattccaaaaatataacttaaatatttaaatgataaattactttattaataactataataactacactacatacattccttgtctatatatataaatttataagtagttattttgtatattaatcttcttttgacaagtctaattcaacatttgttttcccatttgagaaaaataaccttaatgaaattccattcttatccttatcttaattaatatatagttctcctaagggaattttcatatctatgagtgatgactttttccacaacatttttataaaaataatatcaaaacaccgtaaagtaatttcatttatttatttattttgaaat

SEQ ID NO: 315464 - DNA, 1428 bp, Cannabis indica
tcacataataataattatcacattttaatctatacttattatattgtaaaataatataacaatatatatcatctagagggaggatgagatactccgtggaggattttaatacaatttggacaggactttttgacatgatacgaaatcggcacgagcacgatccgacatcaaaaaaatatgtgtttaggcacagcacgacacgaacaaaatatgagctttagcacgacatggtacgatgttgcgaattgagatgacacaacacaaaaaatatgagcttaaacacaacacgaaacgataaatttgacaacacgacacgtaaccaggaacgaggccaaaaaataaaacaagatgaggtgaatatgattattttgattaagtttctaaaattattaataaaagggaattatagcttttaaaaagtattatattatttatagaatagctactttaatttttttaatctaattaattgtgaataaataattttggatcttatattttgtaaaagttactgattaaattatccttaattttttgttaaataacaaataaaactcgatcaaaatagaacataataatatcataaggtggaggtattataaccaacttaattatattttttgcacacatttgtgttagaaactaactttagattggttatatttaatcatattaagaaaattttgattaaaattgtgctcaaaaaatagaaggccaattagtaaattttgtaaaatgtaggatttaaaataatatttaataattaaataattttaatagataataaatataaaattatataagataaattatttttatatagattataaatatttatatatgtgtatatttatacgagtgaaaaaggagaatagttaaggtgagaggtagctgcatcaccttggctaaagtagcttcgtcaatgcacataagcacgatacattaaaagcccgatagtttgataataataataataaaagtaagtagcggcataagtacttacagtttttagtttgtaagtgacataaatttaatatttttttcagtggcataagtactcaatatttataaaactgtaaatttttttcattttcatcagtacagactccgatttgcttatattaaaagaacatttagaagcaactaataccacatgttttagtctagacccaataatctagaatcggggccttatatgtaccctatttaagacaataacatattatgtactaacgaaattaaaagaaaaattacatttttataaacattggatacttataccgctaaaaataaatattggacttatgccacttacaaacttgaaattttgagtatttattgttggattaaaaatcctattatgagcacatatgtatactgtatatgctattataaagtgtgatacaaaattaagtgaccaattatgtt

SEQ ID NO: 315465 - DNA, 2273 bp, Cannabis indica
cagctatactattattgctgacggacggttttgcaaagtcgactatactgtaatcgccgatgcagaaccaaaaattttggctttaaaaatgaagattttttttttacacgtagtgttgcagaatagaaaaatgcaaattttctaccatttttccgtgcattgcttgtacatttcaaatttttgcacttttatataacatggtcaacaattaatctaacaatgtttgaaatatgcaaatatgtttaactaaattaatcaaaaaatgtacaaattataagttatattaaactaatcacttgggcttgtttggtatgacgtattgtaatgtattgtattgtattgtattgtgttggattgtgttgtattgtattgtattatattaatattatttaatacaatataatgtttggtattgacttgtattaattgattgtgtaaagttataatatatttttaatacactcgatcccaacaccaactacgggtctagagtccgagttcgggtccgggtctaggtcggaaattggtattaaccccaaatccttttgtaaatattataatataagctaatacatatcatttattatgtattaaataatacaacatgtattgtattaaaaaatttggtcgtaataattaatacaatagattatccaaacatagtgtcatttattatgtcatttattatttaatacaatacgacccttatacggcgtaccaaacgagcccttaatgaaaaatataaacataaattgagatatatacttataatttccttattgctctacttttgctctcacataatctacctattgatcacgtaaaatattaatctgatccctgtaaaacaaaagaaaaaaattatttattattaacattaaaattattaaatcaaaagaaggaaagtactaaaacgtacaaacttaaaattacttattaattgattgacatcttctaatcaaagcattagatttggttcgtttatgtaaccttcaatgaacttcataacgtagaatccatattatataccacctggctgttgtggacatattggagttatccatctaatggaatcgatagtgtgtcatttttaagcgtggttgtaacagtccagtgagctacacaaatagcaaaagtataataccaaataccaaacaaaattatatattgtgacgttgattatatattttacatagtaatgatatctcgcagacccgcaagcacttcttcgttgttggaatctaagaaggccactgtttgcgtagcaagttggacgaatacaagcatcctgtgaaatcgagtttttgacaaacaaacatgtaagattgttaatacaatattattctaagattgttaaccagtgcactgcaaccggcaccgcgatctcctgtctgagtgccaaaggcactaagatttagaaatgcatattttacattcaatccattaatgctaaggaattgtttgtgcatgtacttgataaaaataaataattaataagtaattccaataaaagtatcaagtttataaagagttgaatattatccctgcaccaaattattattggttgggctcttataacatgcatattgcataaatctctaatgttgacggtgagagctcgtcaactaacttgttggttggaaaatcaaactctacttcaaactaagaactaagatgaataaaaagataaaatatgaattcaagtgtctatctcaaaacagaaagaaaattaaaaaaaattctattactctcaatatggtggttacaagaataatttttcaacttctttacacatctaagggaggggtatttaagtctctaatggcctagagtatatggtggtcccaagggacaaggtgtcactttcatgctgcttattgcagatgcaggtgatggtcttgcgccttgtacccttgtctagtgtaaggtggtcctgagttgcaggagtagtggctgcattgtacccttggtcgattcttcaggctctgcaggtgcagtgcctccactactcgtactttcttgcttttagagcttccagaaggtgtgactgtactttcattgagtgtttaccttgtccttgtgattgtattcttgtctcttcactctcatcttgcttggggaaatttcactaagttttgcaatgtcatggccgaatgacttcccgagggtgcatgccgagtgacttctcaagagtgcacactactacaatgttagcctttagaggcagttttttcaaccccatttataaaaagggaagctaaagggtgtgaaaa

SEQ ID NO: 315466 - DNA, 1118 bp, Cannabis indica
taaatatatatttaattatctatatatttttttccattactattgttaactattttaatactcgttttgccaactaaattaaaaaattaagattttccattaataaatttatagcttaggaggttgtctttattttccaggtttattgaacataagtgcaacttggttagggttgcactttattattgtgatttaatttttgctactgcacttagtcttgtctctaagacatagttatgagtattttaattttgtctacatgattttgggtgttttagtcttctgtgtgacattattttgttttgttttattgttagttcttctttcttctttcatggatcgtcatcaaatcgctgttagtggttgagagtagcaagttctctgcgacggaaaagattattagtagtgcagttatgtaccttgcacaacatttaagggctcaagctacgagattgaacgaacatgctacaacagtttctactattgtgtcttttaagtggtagatgacactaaatataaatgtttttaaagttaattgtgatgttccaaactttttcatatgattttttttttgtgtttttttttttttatcaaacgatctagaaatcaaacagctcattatttgacttgtttttctaatttttattttaatcgtgtctctaacaaagaaaatatttcaattagattttagactattatttttattttaactattgctattaataaaattgcataattgattaaaaaaaaagtgtgttttaaatttggcaatacggtgcgttttgcagtttataaaaaaaatacgaccacagtgggagtcgaacccacgaccttctgatccgaagtcagacgcgctaatccactgcgctatgcggtcttgtgtgtgtatagcatagtctatattatatatacataattaaatacaaacaaataaaaccaaattaagaataattatacttctaaaaaccttgttttgttaattaaataaaccacatggcgttattaaaaacaagaacctaataacctaacgataaaccgacatgtgaggaaagcgacacaacattaaacacagaaaaaaaaaacaaaaggataacgaaaaaaatggctacgtgtctcga

SEQ ID NO: 315467 - DNA, 938 bp, Cannabis indica
aagaaaatcatcttacccttaactcgactttcagatttaaaatattgctcccactcctacaaaagaaatgaaaacaaaaatcagcatagacatattgtaaactattatgcaaacagatttaacaaaaaaatcacttttctgattatacatcataaactaatacgtatacagattttaccaaaactaaaccacaaaatcaaataatccaaacatttcactgtctaaaaagtactgcattaagctttatcccaaatcccaaaaatgagcttgatttcttcataatcaataaacaaaacaaaacacatatggcattttaatcttcaataaatataacacaaactagattcattttaaaatataatatgacctaaatctagtttatgttaaaaaaagtataaaaaaaatgaatctaactgtataccataaaaatacaatatacgaattatatacaaactgaaaacaaaataaactaaaaaactaaaatagaacaatcacaaaaacaaattaatatttgaaatatatatactataatttattgaaaaatcaaaaaaaaatataaatccataaaaaaccctaacacaaacaaaataaacaaaattaaaaaaaaacacatgcaaatacaaaagtcgaaaaccgaaaaacaaaaaaaaacaaaaacaaaaccataaaccataaatccatcaaaacaaatattaaatcaaaaaataaaccaaaaaaattacaataaaatagaaattatatacaccttaataatatctggaactccaatctccaaatcgtcactgacctgcgatccggttgtcatcaacttagaatccaggaagaagatataccaaagactgcgtcccgaaccagatatgggcactacgagtttttggtaatgtcattcagattgactaatgctcctgcagcctttatggatctcatgaatagggtgt

SEQ ID NO: 315468 - DNA, 1946 bp, Cannabis indica
gcataaaatacaatttaatataatattatacaatacaatatggtgtaatacaacgtaccaaacaaaccctaaggtggcgtttggttggaggtaatgaaatgaaatggaatggaaaggaaacaatcttcattccattcttttctttagttgcatattaaagtattggaatgtcattctaatgaaatggtctttctaccattttggtggaatgattattccattttaaaatggaaggaaagatcattcccatgcatgatgagaaaaaatttaataatttttttatgtattttaaattttattccattctattcctattcacattcacattcctattcctatgttggacaaatgatgtgtacctttaattctttgatggtatctgcttacaaattacaattgatcaagatggcctccaaatttaataatatctttaattgtgagctttaaatagaaataaaagatattagtttagatatatatgtagagatatttaacatatttacacataataatatatatatatatgagtaactaaaggtggatatagaaatttcactgacctaatattttaaagaaaaaaaaattgtaggcaaccacaatccatcaacaaaaaaaaagaacaaaaattaataatattcaaaaattaatcaaatcaaaatcatgaatcaatgatgaaaagaattcaaaaaaaaaatcaaaatttccaaacaaattaatcatttgatattattatacagggtatcaaattgtactcaaatctacctaagatttgaagacaaagtgtgacaaagatcatcaatggcatttaaatttgaagattggcggtgacaactctgagatgtaggcagcagattaaattgtaggctgaaaaataaaaaaaaatgttgaacaagaaaaataaaatgatgatttagtgagaatgatgataagtagagagaagaatttctacaattgggttataggtaatggagattttagatttagagttttggtttagacattgagattttctcttttattttggaaagcaaacattaaagaaagttttggtaaatacaaataacaagttattttgttttataaagacagttttcatatgatattttgtttttactatttgagttattgtaatagaataggattaatctatattattgtaataattttttcagaaaaataatataagaatttggcaatgaaaaatgacactttagatataattagctaatttcccaaagtcttatttctttgtatagataggaattcattctattagagtgatacacaacctttcaatcttaaattcgtcatttattttttctctctattgtctcccttctctctctataggaaagtcatagccacacctcacccacatagtcatcctgccagaccaaccttgtcggagctcaactcttcacactggccttgcaccaaggggaccattgattccagcaacatttacccaccaaatctttgcaaaaaaattatgggtagataatttatttatcatggttatttagtttacttgtatttagtttgatatatatagatctacacatttctttctattagtttggtcactctgtgtctacaatgtattctcggttttctggtttttttcatgtcttagcaatgtatcacaatgaattttgcaatatattgcaacattagtggtggttagaggttagggatgaagtttcacgtctatcgatgtgtctgtaatgtattctcagcattttagtatttctcatgttttagtgatatatcgcgatgacttttgcgatatattgtgatgtaagtgttggttagaggtcagggatgaagtttcacgatgtgtatcaatgtgctgcgatattttacccacaagttcattgttgatgttgttggatatttattttacaaggatcttagatctactcacaagtatgttatttaaacaccct

SEQ ID NO: 315469 - DNA, 625 bp, Cannabis indica
agatcctggtaaaataaattccaacagtttcatcaacatgcttctcttattgttgaccttttcgaggtggacagttggccatttttgacgtcttgctacctcccatgatgcccgcctaagcgtctgcaaaggaggccagttaaaattgtcagcaacaacattatcgttattgttgcgagcggatggtttttcggtcgtagttctggttgtaaccatggttgtagatgacagcaatggtgaagacttccttcaagctctcaatgaaagcaccaaaatattaactaatttttttagatccaattaagaaatagattaagcttatagaaaatgattaaatataaagaagacaaagattttacgtgtttggaaccttaacaagccttagtccatgggtcaatattattgagctctttggctatggagtattttacacaagagtgttcttgccaatatctaactggtgtttacagccaaaaatcattacccttttcatgaaggataaaagccttatttataggctagagttgggttttcaggtaaacccagacccattagagtttgcatgtcaaaattgttggaaatatattaccaggatctagatttactaccatctatgtttcattaa

SEQ ID NO: 315470 - DNA, 771 bp, Cannabis indica
gtaaaaataaataacaagctcaagaaaaaaaaagaatagtttgcacgaataattatcaaaacaagggaaaataataattgaaaaaagataacgaagcctgatgtcaacctgagattaaaggccgcccgatagctagttgtctaacaataaaatgaaatgctacccaagtttaaaaattgcttggttggtcatattatctctaataaaggcccatgggccgaacatataaaaaatagatgagaaaaatgttttatattgcaagggttcctggctccttgtatggattagcttggttagaaggggccagagtttcttcactctggacggtaggggtctcagtgctttagttagttggaactgaggaattggctgcctcaaggctttctttggccgcctgacccacatagtaattaagatatgcctctttggaatctctgaggtaatcaaaattttctgatgggtttgctttccaaaattcataaagagctccagggctgtagtttataagttttccacctccttcaagagctcctcttccctcgtcttcctagacttgacgacctcttccaggttggtctttcccttcgttaaatttgaaggaagagtgcagacactctccctctcgtctttaagagtgttaacctccttgaataaggaatccttgtttgccttgagttaggaggtagaagcatatctagaatctctctagttagctcctcgacccggttgttggcactaaggagcttcttgttcacctctcccagctcattt

SEQ ID NO: 315471 - DNA, 1552 bp, Cannabis indica
tctaacataacatcaatgcaacctatttttttaaatttttattggttaaatttagttccctatagcatagggtaaaaacaaacgtacctactatagatttatcctatatatatatatgtacaccaaactgtatatataaaacataccacatatttatatagatttataagtcaattcaatgctcatatatatcattttttttatgatccaagatcaagtatatcataatttgtaaagagagatttataatataatatattaatgtaacagcagtattgaacttattgaacttattaaattgcatgtgttatgcatttattttatctatattaattaatgtttctaaataaggctacattgtttttaggagaataatggttataaatataatttttcttttctggtgtaaataatatatttatctattcattataaatttttcaaatcacaaatcaaagatcacagtgcaattgtttttttttttttaaatgaatgagatgaatttcattactccattaacttcatttagaacatatacagcatcttttatataataaataaataaataaataaaacctgtagtgaatctacaacaaactcatcaatttacaataatgaattgaaccatttttttccagcaacttttttggttacacactcacaattctactcttactaatccctttaacttgctacatcaaaacattttgagttaactatagaattattccacaacaattcatttctggcacgctacacattatagaccaaggttgtaatgacagccgaaaataccatcttcctgaatttggagagctttaatctccattgcagccaatctttaacctattgcaaacattcttgggcaaaagaacattcaaagaataattataacattgtttcattatctcttttgcaaaagaaatagtaggcattaggtactatattgtgtctatgtaatctcttcctcgtattcaatttatcttggacagctatccaaagtgcaattgttgcaagctaacatttgacaaaattgccctaatttttttttttttattgaacaatgccctaaaaaaatttaagtacataacctctcatctcatctttctaaaatgcatttgtcccagagcgctcgatacatgacaatattatggttagtttggagttacttcattcattgtttaaaagaaataacggtagaagaggatttatgactatgaccgaatggaatcaaggttcttggccaatatgatgcaacagttcgagtttgctgagagctggattagggttattatggattgtgtgacgactttggagtatacttttttaatcaatggtcattctaaaattcaagtgatttcaacaagaggattacagtaaggatgtcctttatctccttatttattcattttcattgcggaatcgttgtctcgttgttctctcttgtagaggccagatctgaactgatggggtttaggtgttctagatcgggatcacgtgttactcacttgttttttttgcagatgatagccttgtatttggtagggctaat

SEQ ID NO: 315472 - DNA, 1046 bp, Cannabis indica
atttgctccacagtaaaaaaaaaattgaaaatttcagtatgtggtgtaaaaatctcaatatatattttgcaacaataacacatactccactcttctcacctcaaccggaccttcattattctttatatttctttgtagaaacccaccaaccaaagtcgtcgttaggaatgtaatgcggtagggtcgaccccgctatgccccgccaccaacctgttgggtcccattaaagttttattaacggggcgggttagccccaatccaactgaactgagacccgccctgattacatttttaactaaaaatatacattggttatttgtgacaatctcaaactagtttctttctctttctctttattttcttgattatgttgatgtctaatgttaacccatgataagttttcaaagggaataaattagaaagttaaactaatttcgaaattttaaaaatctcaaagacaatttatgaaaattttcaaattcaatgcaatcacatagataaacacaactatagacaaataataaacttaaaatgtaaagagtttagggatagaaatcgcaaactcttaatttttacaaggttcaatagaactaagccacctacgttcttggtcttcaaagctatgaacctagctttgagtttaactatcgagtcaagttaacatgcttaactagcccttacagccaaggaatttttcaccaagaattttcccaaacctctcacaatgattttctttcaaggactatcaacctcaccagattgttgaagtgccaatctcactgactgaattattttttctactggtgccaactttacctcaaccaatagttttccaaaagactatcaacctattcagatttttggaatgccaatcttactctcagattgtcgtagtgacaatctcactcttctcgggttgtttacaaaattggtttcaacctcacctacaaccgagttatttttctactggtgccaacctcacctctcaatacaatgaatatgtgattttgaaatacaaagcaaactctctctaataagatgaaata

SEQ ID NO: 315473 - DNA, 1093 bp, Cannabis indica
cacacaatcttgattactttcctctgtgttgacaacacaacaaacaagaatatcaatgtgataagggtttggatgaatttataatttaaataaacatataaatgataacatgaaccaaatgacacactaaataagtgatgaaaaatacttctgtctctttattgataattgaatgatgaagattacattgaaatagagttttagttatggcacaaagcccaatactatgatctccagaggcccccatataggaggttcgacccgtaatgagttaaaacggtatgttagagccaatcctcgtctcatggatcaaccgataacttttaccaaggaagatgcccgaacggtgcattttttgcaccatgaccctcttgtcattgaaactactattgccaacaagatagtagctcgaattttggtggataacgggagttcagttaacatcctgttcgaagaagctttccttgccattggcctcacgcaccaagacttgtccccaagtggtttgcaacttattaggttcaataagaaatccctcatccccatgggaaaaatcaggctcctaatgaccttgtgccctgacactcctcaaagtacatttaattactgcacctttatcatggtagatttttcaacagcatacaacgccataatgggacacctaacattggtggatttcaaagctgtaacctcgatcaggcacttgtgccttaagttccctatctattctactgaagtgggaactatgtaaagaaaccagggggaagctaggaaatgctatagtgtagccaccaagcaagctgtcctcatggtccaacacacgaaagaagggaacctagtagagatacatgatgaattggatccttgaatgggaattaaccaaatggtagatgctacatcaggctacgagttgctagcatttatggatgcttatttaggctacaaccaaatttagatgcacgtgactaaccaagaatgcatttctcattgaaattgggcagtttacaaaagtttatgtacaaccctacctattacctcattagaataatcaattatcttttattattttctcatatttttttttttatttttt

SEQ ID NO: 315474 - DNA, 1440 bp, Cannabis indica
aaaggttaatttatcaaattaaattgaaaatggattttttcttttgaatcaaaaatgattttatttaataacttttagcaaaaacaatagtttttaaatcaaaatgagcatcatactcactaaaagtacaatatgattttaaataagaccctctagcaacacaatgagcttgttaacagatcgtttaacaaaaactatagaaacattgcttaatgaagataataaaccttgacaatcacgaacaagcaatccaaaatgggaaggcatttcaattgaacgtttaatagcttgaacaacaatgaatgaatcattttcaaccaccacattcaaccattgctttttctttatccaacttaaagcctccttaatgccaattatctccgctacttctggttacaccaagccaaaacggcttcccgaaatagtttcaataagatgaccattggaatctcgggccacacaaccataaccaaacttgttctctggttgaaagatagcgtcatcaacattaaccttaaccatatgtaacattggtttcttccagtgctctctaacattgttaatatcatctactaacgatgcttctattttttgtgattgagcactaatccattggtcaagagtagttctaattgatcgcatcacttctacagcagaagaagtttttccattccacacaatatcatttcgaacagcccagattttccaactcaccattgcagcttctcgaataacatcattggactgcgaatcaaacaagctaaaaaactacaagttaagtcaataccacttatagcagcagcattgacacaagaaaggttcccgcatgctctactaaaaccgcagccaataagtatatggaagatagtctcctcggctaagttacacgatgggcacataatctcaacattaacatgttttgtgttcaattgaaccttagttgaaagacatcccgaagtagcacgccataaaaaatgatgtaccttaggaggaatatcaagctgccacaacctcttataccatctctgtcagcttctaaagtcacggtgttattagactgctgcaatgcattgtaagcagtcttaaccgagtaaaaaccagttgaagacttattccagaaccaagaatcgatgaccacactatcacttagctggatagagaatatgagttctttatctctatcattaaaaagatcattcaccacttcagcatcccactgtttcgaccctaccgatagcagatttgacaccaaatgcccctccaatgcaggatgattagagctaacataagggttctgcatatcaggcaaccaaggatccaacaaaatactaaccgaattcccacaaccaattgatcttcttgcaccagctttcactaactcttgggcttcaaagatacttctccaaataaagcttgggttttgtcccaaagtagcagtaa

SEQ ID NO: 315475 - DNA, 2992 bp, Cannabis indica
gtggatagaatgcctctattatggagtcgtgggcccatagcctctcgactttatctttaagaacttgggtgcgttccttgtccaacatcctccttttctattgaataggtcagatgtttggatcaatgttgagagcatgggtcatcatagaagggtcaatgccgaccatgtctccatgtgaccaagcgaaaaggtacaggtttatccttagaaattgtatcaatagtgattttatttctggactagacctttccccatcttcagtcttcttgtttgagaagtgggatcaacctccacttcttctaactcttctacaagtccgaagctgcctacaggagccccaaagcgagaatctatgtatgcgtccctgctttgggatggactttattgccctttgtggggctcttctttagagctctagataggcatcttttctttcttcgctttggacagggccaagttgtaacagtgatgggcagattgttggtctcccctcaaacatcctaacccatgccttgttggaaatttgaggcataggtggtagatggatattactgccttcaactcatttagggctagtcaacatatcatggcattgaaggctgaaggaacgtcgattacgattaactgtgccatcaaaattctggttattggattttcttgaacgatgaggggtaacctgatatacccgatgggcgcaatgccttggccaaagaagccatacatcacttgattgcagggtgtaggtcggtgagttagagccccatctttacatatgtttacttgaaatgaatgttggaggaggctccatcttccaccatgcatcttgctacagtcatgttctcgatttacgcagtgatgactagggattcgttgtgcgagaaactaacttgagtagcgtctccttttgtaaaagtgatcgtggttgtccaagctttgattgcttagtaccccttttttttactgccaggatgttgcttttaggctcgtgacaaagtgtttgagcatagtgctctctagctttgatggtctcacctgtaatgtggtgttcgccaatgatgatccctaagtgtcatgctactggtggtggcattgaatctccattctgggcaccctgtgcttgagtttggtcgttctgcacataacaacgtaggtggggattgtttcgccttatgagatattcaatctcccatttaaaattctgacacacattggtgtcatggccaaagtcgttgtggagctgatagaacatcgacatgtccctcttgctcaattcccttttgatgggaaagggctttctataggggacagttccctgagtagccatgaagatggtctcaggctcctttgtaaggagggggaagcatgtatacttctcctccttgtccttctagttttgtagcatgcaagaagtgttaaacttccctttttttccactatttctcctagagcttgttgcgcttgtttctagtgctcttaccactagagatttgggcagagttattggtgtttgcttgtgctcctggtaggtcatgagactgcaggacatcttatgactacatgttttttgacatgtcctatttgggtctgtcgtatagcttcttcgagtttgataaagcaatcagctttatcgaggaactccttcatgttattggttgagatccttggatatctttctagaagtcgctcaatgggagtatgcccccccaatatggtcatatatcggccctcttttgtaaggcctttgacttttatggcctcaaccatgaacctctagatgtaatccttcaaaggttctcattattgttatttgactttgacaaggtcttctagctacgatggtacaagtcttgaggacgagaattgtgtgtaaaaatcttgagagaactcgacccaagatttgaaccttcctaaggcaagtgtaaagtaccattgctaagttgtttctaacaaagtggttgggaataggcgacattgcacatcaccagtaattttctagagattgagctacatctcgaagtacttgatatgcgccaatgggtcttcttgtctagtatacatctttcataccggtatcttaaattttagcaagggtaaggcatttatatatgccaagaatggtgatacccttgaccggtctagttcaagatctgaaggttttagactagctatgccctgaatcatgtcccttagttggtccaactgtgcttgcacaaaaggatctattgctatagggatttgactaattggccttgcatggaggggttgcagattctgacgtggcaaggtctagtcgaccatactctgatagaatgtattgtggaggtcggctagacctattttgtattacaaaccctggtcggccattcccaggtaggggtgttggctctggacggccaggcctacactaggaaactgtccatggccgtctaaacctacatcaagcagtgtctggctgcccataattccctgatttgctaatgttgttaatgcattgacaggaggtagatcacactagttactagagtttggtggatctaagtacctgaagtgattaatctcatttctcaaattgttgctttaggtgtttctatccattcctggtccatgtcaatcgaagattgacctttgaatggctcgctcccctcggggagggaatgctcccctttggtcggccaaagggactcctacaggtggctggccggccaaaggctggatgtcgggtaggggtgttcattggatcacatccaatggatttgtacccaaccaatccaatccaattatttattggatattgaattttttcatccgatccgatccaatccaattgagtcatccgattcaatctgatccaatgggtgtattggattggatcggttccaaccattagatgtattgactggttttttattagattagattggatcaatccaatctattttaactaccatttaagttaatttcattaaaaagaaaaaatatatatataaaa

SEQ ID NO: 315476 - DNA, 2749 bp, Cannabis indica
ttttagcaacccgaactaaattgggttagaaaatatatagaataaacagcccaaaccgatcgatgtacaaccctagtcgctttacgacaaatttgtaaagtttattttgatcatgtaaataagtttaaaagcaagattctgacctttttgtataattatatatttatagttataaaaatttaatgttaatcaaaagtttaatttatcacaactttcgagaaaatcctttgattagcaaaggagtgtacagtaattaaaaaatcactgtagcgtgcctaatcattaggacattacagtatttgtagtattgacacgaggtatacatggaaactctgttgttaatataattttggccatctaaaataataatgtgtgaaatgaacaaaattatataaacgacaagaatataaatataaaaactataaaaagaattacaaatttaactaaattaaaaggtcgcaagtggtataaaaatatattgtgcgaccatgtgcgatcctatgcgaacgttatggtcgtcgtacataattttaaaaagatttgaaaatagattgtgtgactgtgtgcgaccttagtggttgttcagagcaaattcaagttttttaaaattagttgaagaacataaaagaccatgatagtcgcatagtgtaaattcaaggtcgtttataattgcttagagcaaattaaagttctttaaaattggttgaagaacataaaagatcatgatgatcgcatagtgtaataaatttaaagtcatttatggtagttcaaaacaaattcaggttctttaaaattggttgaagaatataaaagactatgatgatagcataatgtaaattcaaggtcgtttatggttattcatagcaaattcaagttctttaaagttggttgaagaacataaaagaccatgatagtcgcatagtataaattcaaggttgtttatggtcgttcagatcaaattcaagctctttaaaattggttgaagaacataaaagaccataatattcgcataatgtaaattcaagatcgtttatggtcgtttagagcaaatcaagttctttaaagttagttgaagaatataaaagatcatgatagttgcatagtgtaaattcaagattgtttatggccattcataacaaatttaaaatattttatccataaaattacaaaaatcagaattacaatccaaaagagtataataaaaaatatatgttacatgttcatgttcattgggtggtgtgtgtattgtggttgatgcatcatttattgattctattataatttcgaatgattagttattgcaaataagagactgaaagaagaaaaatgttcatgtcgacaactagaaaagattaaagaaaagaagcaaaatgagaagagacaagaaaattatttggagtttgcttctattgaaataaatgccaaattattttgtctataactgttaccatttgctactattcatgaagaagaaaaagaaagagaagaggaaaaatcgttcactttggaccatttatgaaaaatcgtcctacttgcatgaagaaaaaagaggaggagaatcttatgagactactatcgtggaattgtcggggtttactcagggccccgacatcccaagctttgtatgcttggattcaaaggtacaaacctgagtgtgttttcctcatggaaacgaaatgtgttggggaaggaattaaaaaggtatgtaattcattgggttttaggaactttagtgtaagcccagcagtaggaaatgcgggaggttatgctttgttgtggaatgaggaaataaatttatctataaagatggtggaagatggagtattttatgctactgtgtgggatcctgggaaacaatttgaatggacccttatagctgcatatggtactccgtatgagaaccaaaggagagttttctgggagattatggctagtgaagttgtgaatttgaatcagccatggctattgatgggagatcttaatgtccttgcaaatcctgacgagaagatgggagggcgaaggttagtggataaagatacgaggtacttacgtgactttttcaggtctaccgggggaatagaccttggatgtaagggatgtagatttacttggcaaaataatcagtttcatgggatgctgactcgagaaagacttgaccgtgctattgcttcacacgactggttgttggagtatcaatttgctgaagttactaatcatccgattactgtttcggatcatggctttattgtgttggatacaggaaatggtagaaggaaaaaattcaaaccatttcggtattttgatgcctggagtagagaggcgtcttgtaatgaagtcattaaagaagcttggaagtctgatcttgaagcaagaaatgagagtctcacgcagcgttgtcaacgaactagaaaagccctccaatcttggaagatcacaacttttggcaattgcgatcgaaaatcaaggagactgaaaaccggttagcttggattcagaatcaaaccatctctcccaggttgtctgctgaagaagatacactgaggagaaacttgagtgaactgtggtttaggaaggagagtatgtggaaacaacagtcgaaggaaaattggctgaagttgggtgatcgtaactcgaagttcttccacacctcaacaatcatccgacaaaggcgaaacaagattcaagagattcgagacaagcatggtcattgggtgtatgatgaaaaggaagtggctggggtgttctttca

SEQ ID NO: 315477 - DNA, 779 bp, Cannabis indica
ttttaaaatagtataaaataattttttaaatttaatttttcgttctttttaatataatatttaacctaatttctaagatacaaaaagttataacatttttttgtcaggttattaatattaagttttattttaataaaaattaaattcagagcgtatactattttgagcattgagtatcagtgttgcctaactaatgtttttttttagatgtgtcacctttaaaagttattacatttaattatataaaattcggtatttaattataccaataataatattaacacgtaaaagatggtactaagtaactgatatgtattattttgtaccatttttaaaaacatatttgaattttatttaacaaaaccgagtatctaaaatgatattaattagtagccaaagtaaaaacaataaaaataaaaattaatgattgagatttcatttaataataataataattaattagggttgtgtaataataataatgatagtttatataatgtgagggaatttttgttaggtgaggaggatgatgacgttggagaatgagtgacggcttatattcctctctctctctctgttttggaaccaataatttaatttatgccctactcacccccacactatacatacatacccctataattatatgtccttttatataaatataatcataatataaacttctataagttatgtatatatatatatacacacatccattaatttgtatgattcaaatttggaccttcacacacaatcacacgtatgtatgtattgtt

SEQ ID NO: 315478 - DNA, 1032 bp, Cannabis indica
tcattctaattctttaaaatgcaaccaaacaaaggaatagaatgaaaattatttcctttccattccatttcattacctccaaccaaacgccacctaatgattaagtaaagttttataaatataacttagctattattattaccgcaaaatatttaatttaaaatttattacaatcaaaaataatatataagtatttatactataaattactcattaggaattacccaataaattttaagattgtgccctaatgcacaatttttcttttgtgtgatatgaaactcttcatctacttttactttttctttttgttccttttaagaaagtagttactagaaaaggttcaattattaaattgtgtgtaacaattttagaatgatttgagttttagaaacatagaattttagaaaaatctcatcctcacactatacattaatagcctttgtattcaagtaggccttctattaaactatccaatccaagtttggttggttctttctaactagaaatctcaagccactcatatttatttatgggtgattggtccttaatcttcagtgtttatcaaactatccacacataaaaactatctatattgtaccataatgaataaaaataagtgagttgaaattatttgcgatgtgattacgatttgcatttttaatagatcgtgtggtatgcggttttaaattctaaaatagtagtttaaatcgcatcgtactgtattattacaaaaatactaattttttaaatatagtttttaaatttatcaaaaatcaaatatgtacaaagtttatgtgatttagatacattgaattataaaatgatattatgaagaaatgttgctcaagatttatgggggatttagtattaaagtgctcatatgttatactcctattagattgtttttgacaaatttattataatgtttaattattgaattatttacactgcatttttatatggaataaattgatgaatacttcttgtttgtatccattaatcaaaaatactttcatattatatttcatt

SEQ ID NO: 315479 - DNA, 967 bp, Cannabis indica
tatgaaattatgaatattaataaatttttacacctttataacttgaagcttaattaaagatttaggccctttattttattttattttttttcaagaaaaaaggttaggaaaggtagatagaataatgcataataggggggaacaagttcatatagtttattgctacaaaaatttaacatcgacgaaggtatattccatcccccaaatgctaattatggtcccttttgttaaactttaatcaaaagaatgtagtgtaacgttccataaataaataaataattattaattagttaataaaaaactaatagtaatttcaaaaaaaaaaaaaaaatgctaatagtaaattgatatttttaaaatgctgtactcttaaatctaatttttttagcagcagatatatttttttattttaattttagaatatttcaaaaatgtacatttaattatttttctttttttaatggaaatttaaaaaacgtaaattttattattactaccgtctaaatttttaaaaaattacgaataaattataatattttgaaaatattgtgtatatttactactaaaaaattaaatttagtataaaataataaaaataaagcatttttaaacaacattaagtaatattttcttactaaaaataaaatcattaggtaaaataattttttaaaaaattaatttctaacatttatatataaagaatattgacctcaggtcttgcaaaataatttgatgccatgagactatcaaaacaactagatatattataagtgaataatcactcacatttggatgtaactcataaagtttcagtagtgggaacagagtagcattacttttcaataataataataaattgaaaaaaataggacattattgaactgtaataataatcatgataatcatgcatgccaccatatcttcttttcttttttttttttttttttttttttactttttacttcct

SEQ ID NO: 315480 - DNA, 1039 bp, Cannabis indica
acgatactcgatttatcactttattacttgttacgattgcgtatacttgcgtacacaattttttacaacaaggacaaaaattaggataacattttcccattaagtccctgtccggtcgtgtatacgaaaaggggatttaccgacaatattgatgttgctgggacttttgtcagcttcgctaaataaaaaatggtgcgtgtgttgaagcattttgtcttgattgtctgatcttattgcaatagagaaataactcatttatgttcctttatgatgagttggtgaagtaagtgagaaaaagggggcccacatgtactacataagtaagttttggtggaaaatccttttttcacttttactttttcccactaggatttggctctttaaaatgctccttcttctctctaggtggccaaacccataggctccattctccttgggatttttgtgttctttcaacgatccaagcttcccatcttcatctgtgtcagaatcttgttgtgggctttctattccctctctttcactttatttgatttattttaccatgaatgcaagggcattatttcttgttttgaacatgcttcttggccagccatgggtgcctttcatggggtctggccggccatggggactatgtccctaggttggccggcctatgcttggaactaaggttcgttgctggcctctaagctgggtctgttggaattattttaccaggatctagatttactaccaggtatgtttcattaacatcctaatatgaatttctaaaataatgtaaataaatacatataaagtttaagaaaccttacagtgggtgcaacagaattaaatgactccttccactcagatctctaacccttgtatcctttctgtatcagagtatcaccaagatccgagcccgattctccttcttgttgattggattcttcacagtcttacatactatgattgaggaccaacttgatttgtgtgggtactcactctatcactcaaggtatgaaaatatgaagaaagaaagagagggatagggtttcgg

SEQ ID NO: 315481 - DNA, 1111 bp, Cannabis indica
ttaaaaaaaaattgtgtacatgtcaatttatatttagttgtcatcacttttattatgtccttttcgatgatattagttgtcaaaatatttttaatttattgtaaataacttttgagaataaaatatacgaatacatgccacactagttaagaatatttcagtttatccattcctcattctaaggtagcttcatttttatattacggggaatgttataaaccaatctcatttgagctaggagtagaactgacaatatagagtagtcgggattaatgggtaaaatactttgggatttacttagaaaatttggtctatcatcctcattcactaattgggctaaggcataacctattactgggactttctcttcgtccaccgctaacccaattgcatcatgatcatctatatcctgaccatagtactcctctgcagcagcaacaagaacgagagacgaggcatccgaaacctctctatcaaaatcaccatccatgtacataaagaccacaccagtcaacaccactattgttatggattttccaacacgcaagtatatatatgtatcgttcataagtaatagactcacaagagtgaggtcgatctcacaaggactgtaattaattaccaaacaattaaattcttaattctatttggtgacaataaaaaataagaaatgatgttcaatttctactaaaaagaaaataaaataaataaataattaatgtgaaattaacaatgattaaagtttaggataattaattttaattgaatctattttacctagtttaacataatttaattcttaaagtctaattttcatgtgatagcggatttaacaaagaaatatatgtacatcctaggacatataaatctcaacctacatgcaaattttctattcttgtgataaatttaaacacataggagacattaagcataaaattcataaatgttacataaactatataggtactctcatccttatcgaaatctatgtctattttactgtatcataatcaatactcgcttctcaaattttgcattgaaatcataaaatatttaattggtattcaagcgattaaaagtaattaagtatgaataaaatagatgcacataa

SEQ ID NO: 315482 - DNA, 859 bp, Cannabis indica
gttttatttttattttgtaaaatatggccacataggataattttttagtgacttgtcattgccacgtgggcaaaattaggagctggacagacgacaccttaaaatgtaaacggaacagtactttggagggtttttccaccaaaatatgaggttggatggttttttgcaagtaaattgatagttgagggggttttgccgcaaattactctaattattatattaataggactcacaataggtaggtgacgtaaaaatatagtatgtttaaggaattaagtcaaaaatacactattttaaattatttttttattttaaaatttatttgttatgctctacatttatacaaaatttgttatgggttcaagttttttgggataggaatataaaatcaaatctatgatatgtttttagtgttaagtttatttttgaagtaatttcaagttgtttaatgcctttgacattcttaattttaactcatctcgactaaaactccctaagtgaaactcttataccaaacatactattattaaatattatttattacttaaaatatatttatttatttattattatactcatatttcaagtaataaatatgataacaacaagtaaacaaaaactcaaaaataaaatgggatttgtccaaaaaaaatataaatacaatatttaaagcacttcaaaaaatactattaacagttaaatattaaaggtattaccttacgaatattaaggatgagtcaaaatattaattgtagggctgaacattttgagcgggtttgacccgaacccgagcaacccgcccgaacccgaactggtgaacccaaaaaaaaaaaaataaaaaaagtttcgggcgggttgg

SEQ ID NO: 315483 - DNA, 607 bp, Cannabis indica
aaaaaaaaaaaaaaaattagagataaatgaattgatttattgtcaagataggcacaaaaagaggtcgaaagaaattgatgtcatattgtatggggtattatttatgcttttggttgatttgatagtgactcaaaattttcattatattcaatgtaatgccatcttcagaaaaatacatttggctacaacgaaaaggaccccaacaatttgataataagtgcatattataatgagagccaactttttcaattttcaagatttgtagagtttaaatgaaaattatttacaccttttcagaaaaaaaaaatatatacatatatatatatactacaaaaattttcaaaagatatttagatagcatttaataatatttttatttttaaattttttaatcacaaaaataagtaaattttttatttttttaaaaaaaatttatttttgaaaaataaaaatgtattctatgactatttcttttaaattttaaaaataaaaaataaaagtgtgttttgtaaattttatttttattttcatttgttgattttatttaagtaagaaacgaaggggactaaacaggaacaagggtgatccaccgaagaagatccttctc

SEQ ID NO: 315484 - DNA, 1725 bp, Cannabis indica
ttagttatagtaaatcgatttacacgccatatttttcgtaaagtttgggaataaaaaacttttatatcaaatttacgaatccagcctgtatatagacacacttaaatttaattatgtgagttttggttaagaatatagtatacattacctaattaaaaaaaatttaaataattaaaaaatacacatatatataatcatatccaaatgacacaccaatacagcaatagttaattttttttcttcttaaagatcaaaatctcaaatctcagttaaaaattaaaaaaaaaatagcattacctaattaaaaaaaaaataaaacaatacatgtattacacttaacatcacctaattaaacttaattaaaaaaactaattatacgtgcattgcacgtaacactaacctagtataaacaatagttatatatatgctcaagtgacattaacaaatctattatatgctcaagtgacattaacaaaaagtcggacagacgaaatagaacttgtaaaatgcaagtgaccaagagtcaaaagtcagctcaatcacttggggattacctatacccatacaagcattggtagaaaataagctacaacaaaagaaaaatcaaaattcaaagctaaaggaaaatatctacattaagataaagaagcagaataagtctgggcttaaaagctacccgaccagccgtttttcttaagcaacatgtaaatataaatccaagtctaaaagccgtttggttggccatattgtattagaaaaaggccagtaggctgaacaaagaaaaaaatttactccattggggtcacaaggacttgatcttgagaagtcgaccctcttagttttgagcagatgaagaactcttgtcggatttcttcatttcatcttcagccttcctcatttcacaataaccgaagaacttagcatgaatttcggtgttttgataaccaaaatccgcatttggactcgcctcccagaactcatagaagacctccatgacaattgtttcatagtccttgacctcctttttatatgactttcgcttagcagcaaaagtttcctctaaggaaattttctcctttagcaaagtttcatctttttgtttaagaacctctgtcaattctttgtccttggcctcctagtattgaaggagtgtgaagaatcctcccctttcatcggttaaatcctgcatccttttggattctatcttgaggtatgcttcgagcttcgcagtggacaacatgtcttctattttttacttttaagtcattaatagacttgttcgcaacaactcattttttatttacttcgcccagctgttggttcttcaactcagcctctttcttagcctcctccaaagccttcttcaagtcatctatggttgtattggctttgagagctgtagacttggctcaggaataagtataggccaattttaagttaacttggaaaaagaaacaaacatgttagattatcaggggcggcaaaatccgtgtaaagaactctagaataagagcttaccctggtaatctcttttagaactctactgaccaggagttctataggcatatctttcaccctagtaagctactcgttaacctcaaccattaagcaatcctggtagaggccgagcatttctttatccttctgtctctagctggatggtggtgttggaaatatttttccaggatctagatttactatcatgtatgtttcattaacatccta

SEQ ID NO: 315485 - DNA, 1298 bp, Cannabis indica
tatatatatataaaaatttatattatagcactaattaattaataataataagattcatcataatgtttcacatgcctccctcatcacagaagtcatcatttttgtctcaaactatctcattcaacttcacataataatgagtaaaaattatcatgctctatatatagttttaaattttattattattattattatcatgatacatatatatagttactactgcctatatatgtatgtattatttaattaataaatattttatagtataaaagtttcaaaattattgtctgtatatcgatcatgagatggtcttccaggaattctgcatgtgcatgcattatggttgatcacccaccaacatacatataaattaattaataaattatggtcaagagttcttttttaatatctatattattcatgatttttttaattataaaaaaaaacaatttcatggaaccaccacaaaaaaaataaattaatacgtactattgttcatcttcatttccttatcttgttctttctctgtcaaattaaattatcaattattttaattatcttaattaaaatgttatatgattttagtaaatttattttaattatgtaattgtatgttttattgtcaatgctattattattattttgtaatgacatgacggagccaaagtgaggatgagatttgtagcccaccttaattttatttttgttatgttttcatgtatttattatgtataaaaacaaaattatatatatatgattattgttaatcttttagatctgttcggttcgtcgtcatttgattatatattgaataatattgtctcacttcgatcaaatataaaaatattgagtcatataagaatatgagttacttcactcattacaaatgaatagttttgagatggaaccccatcatgattcttaacatggtatcagagcctttttcttagtaggctttcgatccacacctatcagatacttagccaaccacaagtaagtaaaaatatggtactcccagctgttaacaaaaataaacgagcaaataacactacttatgataaggtgatttaagattgatgagcaaaaaataatcatcatcttgagggaaaatattggacaattttgttccaaatggatcaaatgtaaaaatattgaaccatatataagaacatgaactactccactcattaccaatttattttgagatggaatcccataatcttccacatataattatatagaatttagttcatttaggtttaaatagaatatcatttttttttaaaaaaagtttctaa

SEQ ID NO: 315486 - DNA, 1048 bp, Cannabis indica
tttcgaaagtctcttggagaaaattggaacaccaaggtatttaaaaggcataacaccttttgaataccctgaagcttcgatcacccttagttcctcatacctatccatgccacaataatatatcgataacttagcttcattaggaaatagtcttgaggtcttagaaagagctttaaaccttggagcaaaatatatatcgatttaaagttaccatgacaaaacatgagtacatcgtcagaaaagcataagtgattaagagcaagacttttgcacctgtaatgaaatttgaaatcctctttttccccaattttcttcaaaattcgagataaatattccctcccaagcacaagcagtaagggagacatgtggtaaccttgtctcaagcctctttttgcttcaaaataaccatgcatggtaccattaagcatcaaggagaagcggggcttttgtgcagaaaatcaagaacaacattacacacttcctcacctactgtctctcaattatcttgaaaaaagtaacttacttaaccatctggacctggagcatttgtgccctaaatgtcaaaaactacttttttcacttcatcgtttgtgtatgttgctaaaaggaagtcagtttgggaagaaaatatggtcggaccctattccacaattacttgatcactttaattttttataatattttattcattaataataacaacaaatataaaattaaattaaaaaataattataaaaatttaaaatatctaaattactgcacaaaaataaatatttaaaaccactatataaagagcgaccataatacctaatttaatataagagagatatattacaaacatttttatgattttgtttattaatttagtgataatttagactcaagtcatcatttaaaatataattgtatagttgtatatatattttgaaatacatacatatatatagactagatagatgttacgtaccaagttacgtatgttaattttattttagtttttaattttttttaatatcataattttaaaattaataatatttaatgtagt

SEQ ID NO: 315487 - DNA, 646 bp, Cannabis indica
actttattttttacgttattactaatttttttttacattttttacggacctttttttttttttacattttttaaggattttgaatttttttttagaggtttacttactgttttttttcccaaaaaaaaaaaaaaatatatgttgctttcccgtagaatagtatgaattaaatacataaagttataaaaaaatcttacattaatggcagtagaataatatgactccttcatctctaactcttgatcatttttgttacagagtatgatcaagatttgaactttatttctccttcatgtaacaaaaactacgcaatcttccacactaactttagtattttcttgaattgtgtgggaaattactcattcactatagggctcaaaatattcaagaagaagaggaagataattcgaatatgattaagagctctgtatatttctatttatctcacaaagagagttaaaataatgttataaaaataagagctttaatattctatttatgtggtagcttttaggattaggttttgaattaaaatggaataaataaaaaaagataaaaattgctttatttaaactatcttggctaaaatctatatgggcctaatgggtttcaatttttctattttattgaaacttatctttctttt

SEQ ID NO: 315488 - DNA, 413 bp, Cannabis indica
atcatactctctaccaaaaaaaaaaaacccaataataaataactttgggcaagaggagaattttaacagcataaaaatgaaaaatttgtacttatgatgattgactccctaaaagaaaataaaatattttaattacaaataaacaaaatatatattaacactaaaaaggaaaaaataatcataataattaaataaataaacatggttacaaattttataatatattttcactataaataaaaattaatattgataaataataacaataattgttctatataaaaatgagaaaacttgacaaatattaataactagggctgaatattttgagcgggtttgatccgaacccgagcaacccgcccgaacccgaactggtgaatctgcaaaatttttttttaaaaaaagtttcggac

SEQ ID NO: 315489 - DNA, 1285 bp, Cannabis indica
tagttttattaacatatacctctaggtaaaatctagtttttgtatatttatatgcccctcaagtaattttaaaactagactttatgattacttgaaatatgcaattttattaaaataaagaactttttacaaagataaacttaatacaatagaatatgctattggtaatatggccttagatgttcgctactccaatagtttcttattagcgagccattgagccatgctaacttataaactcatgttccaacgacaacttcaatgatatacggaccttcccaattcgggttaaatactcatgttgttggatctcgtgtattgtcaagcacatatcttaacgccaaatcacctactttaaatctttttcaaactattttgttaaaatatattgtgatgcggtgttgataagcaacatttgtgacttgtgactcagtgcgtgcttttcttcgagtagatctaaggacatattgagaagttcttggttttgttttttatcatagaattcacgcttgtgtgttacgatgtccactttcactaacaacattgcttccaagccaaataccagtgaaaatggagtatgtaccattgctattttttttgttgttctgtgggcccagagcacatgtggtactcgtcaatccatcttcctttagttttgtctaacttcttttttacaatgtccttcaaggttttattaacaacctcaacttgtccattggactgtgatcttgatagttttaataattttattctttttatagaactcagtgaataaatctctatcaaactgaataccgttatcgaacactattttaatggaaattctgaacctgcaaataatgttcttaattacaaaatcaagaatttttttgcatgtgatggacaccaaaagtttgacttttgtccactttttaaagaagtcgattgcgactatagcatattttgcaccacctctccttgttggtaaggatccaatcgggtcaattccccatattgaagataggcatggtgaggtcatcattcttagagttcgtttggcacagcttttagaaaagttaaaagctgctttttgaaaaagctgtgataaaaatgtgtttgataatcagtcaaaaaatagtttttttaagaatttttggagatgctacagctaaaagataaagctgctccaacccaacttttaagaaaagctattttaattgaaagactataataaattttttgtactaaaaccatatttacttatttattatataataaaaaaagtaaaaaaaattaaaataaacta

SEQ ID NO: 315490 - DNA, 1502 bp, Cannabis indica
tttagaaagttcatattttagggtgttaaacaacatacttgtgagtagatctaagatcctggtaacataaattccaacagcaagtcagacgcaaaagtcgtttcggctttgaaaaactttggttggctaatgctgagagtagggacatcatttctcaatgttggatagattaatattctaataccctgatagacaatgcgttacacaatctcgactcttgtgctaccaatttgcaaaagtggcacattggaaaatatggtcgtataaagaaaactattactaaagcacagaccagagttagtgaattaaaccatgctttgaccagatctaccaacaccacggaggagctaaaagcctctaaatcaattcttgatgacttattggaataagaagagatgtattggcaacaacgctcacgtgttgattggatgaatttgggagatcgaaacataaagttctttgatgcaaagcctcagcacgacaatccaacaatagaattaagttcctcattaatgattcaggccataagtttaattcccgttcagacctggtaactgttattgaagactacttttagaatatttttcagtcttctaatacagatgatgaagcttggtcctctatccttgagacgataccagccatggtaactcttgaaatgaaccatgatcttaccaagccttttactaaagttgagattgaagaagcgctgaaaagcatgagtcttgataaaagctcagagatcgatggtatatcggcgatgttctaccaacgaaattgggatttagttgctaaagttgtcttggagttcttaatgaaggagctgatcctaccaaattaaaccgtacaatcatcactttgattccaaaaattaaaaagccacagaatatgaaagactgccgacccatcagcttttgcaacataatatccaaactcattaccaaggatctagttacaagatttaaggtagttcttccgcatgtcattttaaaaacacaaagcgcattctagcttaaccgtctaatgaccgataatattttagtggcttttgaacttgtccatgccattaaaacttgaactacgggtagaaagggaattgtttcacttaagttggacatgagtaaggcctttgatcgagtcaaatggcgcttcaataaagaagttatgagaaaatgggcttcgcggagcaatggatcaacctcattatgacctgtctctctaccaacaccttctcctttactgtaaatggagaagtcacaagttccttgaccccaactcgtggcttgtgccaaggatgtcccttgcctccatacctgtttctcatatgttaagaatgttggaaataattttaccaggatcttagatctactcacaagtatgttgattaacaccctaaatatgaacttctaaaatgattatgaaacaaacatatataaagtattagaaaccttacattgggtgcagcggaataatatgaacccttctgttcagatctctaaccc

SEQ ID NO: 315491 - DNA, 573 bp, Cannabis indica
tgaaatgtttgaaaagcaaatagggaggaacatggaagtctacatcgatgatatgttgatgaagtggataaatagtggagactacacaaaagacctcgtggagtgatttgaaatactaaaaaagaacaatatgaaactttacccaaagaagttttccttttgagtctcctcaagaaaatttctgggattcaaagtcaacgtgagaggcattaaggcaaatccagaaaaaattaaggccttgatggaaatgccatctctaacaaagttgaaggaagtacatgccttaacggggagaatggcagctcttaatagattcatctcgaaatcaactaataagtgcctaccattcttcaatgtgttgcgaagcaacaaaaaattcgaatatacagatgaatgcaaggaagcattcacaaacatgaagaagcatctatcaaccccttcagttttggctaaaccaattactggggaggttttacttatctacctagctatcttggaaaatgcgattagtgcagcattagtgcgagaagaggggaagcactagcaaccaggttactatgttagtaagaggtt

SEQ ID NO: 315492 - DNA, 1450 bp, Cannabis indica
aaaaaaaatggcaaaagtaagtacacatgtaaattttcaaaaaaaaaaatccattaggtatgccgcttacaaacaaggttgggcttcgactaaagcgggctaggcctgcgtctagagccccaaaattaattttttcctttgaaaaatataaatatttttaatatttttcaaaaatatcacatattttgttatgaggacccaataatattaggggtttttacactacatactaaaattttcaactttttttactctttttactgtgggacggatttctttttaaaaatactgtgtactgtgttaagtttttaattacggttgttttttagttgttccactgttattttaactgatctgctttgttattttacggttattttataaaaacacagtatttttatacaaaatttcgtgtaacaataaaattataaacttttgcctttccatatttttttaaaaatccataatattattttgtcttaaagccctatttttttttttttaaatcacttctatcgctgttgatcgtgaatttacgtaacattattaattgcatggccaatgcattataaatatatatattatataataattatatatggcattaattactttaattagaattaatcattcagattcatctatataagaaaattattaaaataaaaacttattcattaatttcattctaatcaaaataacacaccaactaattaataaaacaggtacactcaatacctagatgagatgatcagattacagctatatatataatatatatatgtataataacctgttcacatcatgaacatcaacacacttaatatattttattctcacgtacgtgctatatatatatatattatatatatataacttatttatcatatatatatttctaataattatatatggatcatccgtggcctaaaatttgattgtgtagtacttctccttcaacttatttaacggatactgcaaaattaaaaaaaacaatttaataattagattatatatatcacaacaaaattattatataagcactattattggaaaaacttcaaaaaaataacaagagtttattaattattgtatatagcctgacaaaaaaaaaattattgtataaaaccatatcccatgacccatcaatttaattaattatatatatagtttaattatattaattagtgcaaactatttaactctttttatgaaaacacaaataattagtataaattaactctttagttaacaaactactaatattattactaaatatgggtagttgagatatatatagagatggagaatatattactttacaatctcaaattgaaatataaaataaatatataatgttttttaataaataaatatatactgttttattacaaaaccttttcaattatgagataagaatattgtagtatataatatatttcttttatgt

SEQ ID NO: 315493 - DNA, 667 bp, Cannabis indica
ccaatttccatctctaattataaatggccggtctggtttaaccgttaactattttattacgaaaggcaactgaaccattatgccgtaaacggtccgaattaaccaaaccaccaaaagcggttttcccagttacgatctacagtggttcagatagtcgcggtccgaatttaaaccgcgattttccaatttatatgaacaaccctattgtaaattaggaaaaattcctagttttccttatttattcttatttctttgggaaacttaattgatttattttttccttataaatagtgaagtgattttattattcagcaatctgaattcaaaagagttcttatgctctaaaattgtaagcttttgagatagatgaagaaacgtaaatttttcttttctcacaagtaatataagaaaaatgtgagtagactattaccattatcacagggtagaacctctataaatttttgtgttcttatgcttaatttcattcaagaattaccatttatttttatctctttaattgacttaacatcgttagttaaaaacgagctcaacataaagaaaataaaattttaataaaatattctaaaagatagaataaagaagctcttctgagtgctctaaatgtttttttttctttggataaatactattttggaccatgtgtttt

SEQ ID NO: 315494 - DNA, 589 bp, Cannabis indica
gctctttcccagggcgatgtgtaatttcctcaagacgatttctatcattttgattattatcagccattgaatatagatagattgttgtttgtaaggagagaattttttgagttttatcactaaggctctcaatgaaagttccaaactgttaatgcagattttcgttaaccaaaattaaatagccttttagtaataaatattctacaaaaattaatgagtaataaaagaaattataactctatatatttttacgtgttttgtagttaaaatctacgtactccacaactccttattattaaaaatcttttttcaatacagagtacaacttcagaatttgaataataataattcactctcaattttgtcgtcccttttcccatggaatctgtcccaatttataagagtatagattggcagttattctttttgggatagatttaaatgtaactgttcatgaaacgtgaacaatacccacgtttcatttaaatcgcatgttagattatactaaataactacccatccgttctttagctttatcctttagatggttattgctgacgtggaatgttatatcttctctgatttgagt

SEQ ID NO: 315495 - DNA, 1806 bp, Cannabis indica
cctctactctgttggcccctacaaccttggccaatttcaatcctgctattaaggcttcatactcgacctcgttgttggaggccaggaacgtgaacggtagcctgaagttgtaacccgtcaggtgagattattactattttggcccctgacccattttcattggacgctccatcaacatacactttccatgtgggcacatccagagttggcatactggcgctggcctctgcctcgtttcattctacaataaagtctgccaatgcccggcccttaatcgatatgcgcaaaatgtactgtatgtcgagctggcttaactccatggcccacttgaggagccttccttaggtctcaggcttctgtaaaacttgtcgaagtgggtgattttgtcaataccttgatggagtgagcttagaagtaagacttgagcttccttgatgcaatcaagagacagaaagctagttttttgattaggggataccgagtttcagctcctatcatgcgtttgctgacataatgtactgggtgctgaacctttccttcctcccggactagagctgcgctgaatgcattctcaaaaacggctaaatataaatataagtcttctttgtgaatcggttttgacaatactggtggcttagccatgtattctttcaactttttgaatgcttcctcgcattattcggtccattcaaacttcagacatttgttcaaaatgttaaagaacgggatgcatttgttggttgagcgggagatgaagcgactcaaggcaacaaccttttcagttaagctttgcacgtccttgtgtcttttggggaaggcatacttaataaggcttgtattttttcagggtttgcctctatcccgcattgactcactatgaatccaagaaattttcctaacttaacaccaaaagtgcatttcttgggattaagtttcatcccatatctccagactacctcaaagcattctgtgaggtcgtcttcatggcccatgcatgttttggatttgaccagcatgtcatctatgtatacctccatgtttcgtcctaggagacctttgaacatctggttgaccatgtgctgataggttgcttcggcatttttcaatctgaagggcatgaccaggtaacagtatacccctttgtccactcttgatcgacgacattcattttgatttgattgtacccataataagcatccatataagataatagcttgaaactcgaggtggcatctaccatttaatcgattctgggcaatgggaaacaatcctttgggcaagctttgttaagatcggtgaagtatatgcaaacttgccacattccgtttagtttaggtaccagaactgggttggccaaccactctggatagtataagtcccagatgaaaatgttggataataatttgtccacctccatttctagggtgttagcctttaccgggtctagtggatgtctcttttgttgcaccagaggcatatgtaggttgacatttaggacatgggtgatcacgtgaagacttatcccgatcatgtccccatggcaccaagaaaatacgtctgtagatgcctttatggtgtttatcattttactccactccttcggttctaggcttttccctcgatgaataactttagatggatcgaggtcacataccctcacttccttaatactcctccatgggttctaacgctgattcaaaactaatatgagggtcctattcgtcctgttctgctacacatcggttcgacccctatactgttaagaccaaaaaatgcactgcagcgtatacattgtcttgcttcccc

SEQ ID NO: 315496 - DNA, 3227 bp, Cannabis indica
gactttgtatatcgatccacaatcacccaaatagagtcataatatcctattgttcttggcaaacccaccacaaaattcatggtgatgtcttcccacttccacttgggaatcttcaaaggttgaagcaaacccgccggtctctgatgttctaccttgatttactaacaagttaagcgtctcaacacgtactcaacaatgtcacccttcatacttggccaccagaatagggccttcacatcatgatatattttagttgtccctgggtgtaaagagtacgatgtagtatgagactcatcaagaatctcctacttgataattttgtcggccggtacacaaattctgttcttgtatcttaataacccatcatgtgaaagtgaaaagtctttcgctgattcgatttctaacttctccttgtacccctgcagctcagaatcactttgctgggccattctaattctttccaacaaattagacagcagggtgatgttagcaagctttccaactacaaattcaatgtcagctcttgtcatatcctcggccaactctgttgaaatcttctttaattgatagacttgccctggtccttttcaacttagagcatccccaaccacatttgcttttccagggtggtagagaatctcgcagtcataatccttgaccaattctaaccattgtcgttgcctcatatttaagtccttctgagtgaaaaagtatttaaggctattgtgatcggtgtagatttttcactttttgccatacaaataatggcgccaaactttcagtgcaaaaacaattgctgccagctcaatatcctgagtaggataccgctgctcacactctttcaactgtctagatgcataagcgatcactttcccagactgtatgagaaaacaacctaatctttatttagatgcattgaaataaatcacaaacctttaatcactgatcgataaagttagcgcaggagcggtaattaatctttgcttcagttcctggaaactattctcacacttatccgtccacacaaacttgtagttctttcgaatcaattctgttaagggcatagaaatcttagtaaagcccttaaaaaatcttctataataccttactaatcccaagaaacatctaacctcagttgaagacttaggttgaggccagtcccgtaccgcctcaatttttaccgggtccaccaagatgccatctttgctccccagataccctaagaaattcacctgaggtaaccagaatccacatttcttgaacatagcatacaacttatgctctctgacgtgttgcaacaccatccaaagatggctttcgtgtgtctcttttgtatctgaataaattaaaatatcatcaataaagatgataacaaaatcatctacaaagttcttaaacactcggttcaataaatccatgaaggttgctgggacatttattaattcaaaggacattactagaaattcatagtgtccataccgcgtatgaaatgttgtcttgggaatatccttatcccgaatcctcaattggtgatagccagatcgaagatcgatcttggagaagacggtctttccctgtaactggtcaaacaagtcatctatccttggcagaggatacttgttcttcactgtcaatttgtttaactctcggtaatcaatacacattcgtaaagctccgtccttctttttcacaaacaaaatcggtgcacctcaaggtgaggtactcggtctagtaaattttagatccaatatcccctgtagctgagctttcagctcttttagcttcgcaggtgccatcttataaggagctctcaatactggctccgccccttgtattaaatcaaattcaaaatcaatttcttgcttcggtggaaaccctggtaactcctctagaaaaacatccaaaaattctcgaaccattggtacatgttccggtcctgctggtggttcctttgtagtatccactacatttgctaggaaaatgattcacacctcacataacagatctcttgctttaagcgctgagattagaggaatccgagatcatgcactttacccacaaatacgaagagctcctcgccctcaggttgaaaagttaccatcttcttttacaatcaattgttgcgttgtatttcgcaagccaatccatatctaggataacattgaaatcttccagatttaactatatttgattaactgatagctctcttccttaaacaaatactggaagagacctaacccatctgctggagataactagttccccagtaggaaacaaggtaccgaaacctcttgaaagcataacactaggtcaactcaagtttccagataccctacttcaaatataagaatttgtcgcactggagtcaatcagaacagtcaataaggtaccaacaacagaaagttgacctatcacagtggaagggtcggcatcagcctcggcctgagtcagggcaaatacccaagcatgagcaggtgtatcatccttcttttgttctggttgcatcaactgcgactagtttttttatcaagtgacccactaccccacactgaaagcatgcccgagcttgacacttgccctggtggcaccttttacttcttggacattctagataagtccgccagttttcatttccaccacgacaaaaaccttagttactatggaatcttttgcttgggcctgtagttgatggttcattagaccttttctacgatcacaagggtcactactgttatagtgagatttctctcacctagaaactcgagaccagactcctatttaaaggacacgtgtattcagatttccaatgaaagctgaaatgtccgtgagagacttctcgaagtttagacctcgcccaggataaaaccagcgagatactgcgagtacgacctaagtcgaatcacgtaaccgtaattcgcattatgcagggtagatccaactcgcatgtgtcaggacatatgcgagtatcccctctatacttctgcaaaagcatagaggtcaactctctatggtgcgatctggtcccaacgacccaatagccttgataaaccgctataggctcacatgtctaggttctatcagctcgatatgcgaggtctacaagaggcgattgcttaaagactcggacagtccctaacgcgataataaccttgcgagctcaacaaacggaacatgaacagtcaactcgcagatgcggaagacgcatacgttgatggacttagtaactg

SEQ ID NO: 315497 - DNA, 1238 bp, Cannabis indica
ggtaaaataaatttccaacagtcgtgctagtgggtaacaactaaactcgctagcagctactgatctaatccagcagtttctcttgtattcgataccacaggtctttaagattctacctatgtagtctccaatggcttgaaccttcgactcgattagttctacctcaaaggtgatgttaggatcgtagggagtctttgatttatgtggtttggaagtcatgatttcaaattctaggtcacctggttcaaaagtaatcgtgactctgggtaaaaataaaggcctagccaaaggaatagatgataaaccgaggggttcaggccaagcagcatctcacaagaaatgacatttgccttctgtaatttcttgcaagaagcctctgtggtgactagcaatatcatcctggtgggtttttactaagttgtcccaagttttgcatcatttatctctaatttggacttggatttggaaatattaggtttatacaggatgacaagttcactggagcactctgtttctaaaatttctggacgaaaaacttctgaaccagattgggacattgttacaaaaagaaagcaatcccgattccaggaggaaattcatcaaactagaaacttgtaaatttgagaaacccaaaagtctacggtctgcctaaactctaaaatttatccagaaacaattcaaccttaaatcactaaaaccagataaggagataaaaactgcaaactaagaagttagtgatcaaacccaaaaatgtgcaataaaaagcatataagaaaatagagagagatgaatcacttactgtgtgaagacgagttttggtgcaatgaatggttccacaatcgacgatgtaacggacgacgtggtgatctttctgagttcttgaggtcgaaaagcaaatttgacaaaactcgcaagaagaatgtcaaagataaagatggcatgcaaggttgtgaagaaatctgggtgaagttttttgtagaaagatttccagagtttttgaaatggcaaagatgatgaaaaggtggttccctttttcattttataccattgggtggatctccgtcagattaaggagataattgattcgacgactggtagaaataaggaagaagtagaaaagatggttaattaatgctcatgatgtgcctcgaaaccataaaactgccaaaattagaggacaagcattcttttcaaaatggattatgacaaaaatatcctcggtaatcatttaaaaagca

SEQ ID NO: 315498 - DNA, 1076 bp, Cannabis indica
aaaaaaaaaaaaactcaacaaaatatataatttttttaaaaaatagtaaaaatataattaaaatatttatttattatatataaataaatatattaattttttaatatgtattggattgaattagtttttaattaaaattttaaattaacattcaataactaatcaaaaccaattaagccatttagctcatgatacacgaaaatattaaggataattactgttttggtagcaatttatgatgatttaagaatattaaatcatcatgctaacgtgcagctctgtgcacgatatggaaccctaagtcgcctctgtgctgccgctccaattgtcttctccagccaacccttgtctccggttctctatccttaatcagtggtattatcatcgttccctcgcccgttctcgacgtttccaggagggttattggtcccttgttctcagccccggacgagcctccgtcaagttcgatgacggcgtcgcttccttagccatggacggatctccattcccgacggagcctccctcggccaagccttgtttgggtctgaacgagtgctaggatctcttgctgggatgcgggattaggcgttggttttgaaaattggtacaattgggttagttgtttgtgacgattgggctcgctgggatctttgtgtttacgtcgagatcgttattgatatttttaatttgggatttatattttataacaagcagtaaactaacataaatgatagttataattagtttgttttgagttttggttatactgtttttagttttatttcatttattatttttattgttattagtttaatttaaattagtgttttatgggcttagaataattagttttatgtgttgaaactaattaggttttcccattcgtcttgtcttttgacatagttctatagtttctctcattggttttggtttattggtgttgaccgaggttttcggcaactaataaaatattatagagttagagagctgtaagaaaaatagagaatgatttttacgtggttggggcgttaatgagccttagtccacgagccttttttatttatggatgtatttaa

SEQ ID NO: 315499 - DNA, 1983 bp, Cannabis indica
agatcctggtaaaataattcccaacacttggaccccagccttagccctagatctggactccaacctcagtcgaacctcggagctcggctcagaattcaaaccctagtcgaacttgaacctcgggcctcgactcggactcagacctcgacctcgactctgcatctgcatgcggacgtaggccctagccccggacccaaacccaaacccgacccaagacctgaagttgacttggactcggactcgacccagacatgtatctgtaccctgacctagagcgggaccctgaacttgaagctcgaccttgaccatatttaaataaaaacaaaaataataaattttacaaaacacacttttttcttcttttctttaaattaaaaaaataaaaattttactaaacgccaccgttgttaactattaaagatttttttttcataaaattattttctgcatgaaaattaattttgagaatgttttttaattttttttttgacgcggtgatcaaaatcacacaagattaacaaatcagcaatccataatcggcaaaaatgtagacaataaagctataacgtcttagaacaacaccacatcacattgaagaaataccttcccattattaatagttgtctcgagagctagcaaaattgaaaaaatattacaaggccaaatcgaaaaatacagttatgttagaatgataatctttaaataaaaattaatatacaaaattcaaaattaatacacaacccatattactaactcaacattactaaaaactaaaaaatcaataaaatttctaagtataattagccaaaggtattaccctttggctagtaacaacatactagcaccctaatataaaactgctacaaatcaatatcaatcaaattatatttaaaattaaagttaccggtaaattctctgtaattgtaggtcctctacaaaataacctacaaaataacaaaaaataaaactctattaccacacaatataatgaaaaaaaaataatgtgaaagaacgatccatattaaatataaagacttaaaaaacttgaaatacttatcttttttttttgtttttttaataagtgaactgaatttattaaaacaaagaaagctaaatagttgtcacaagggggacaacctccctcaaaacaatcctcttacagcagcgtaaaattctggcacaacgagccaaaccgtccgcaacaaaattttcacctagaggaataaacacaacattacaatacacaaacttagtaaaagtgaaaaagtcgttgaagtagaaatcatgataaaaaagattacttctcttaccaattgaccataccaccaaactaccctaaacaaatagggacaaatcataataaatggtacaaaagccataaaagatacataagtcctaaaaagtatcaacaccatcaaaaaatggtgcaaaaacatgtgtggtcccaaatatactttaaacataaattaatactatttgaatagctagtaaaaagaaacaaataaaaaaatcacatataaatatatatatataaataaatataaataataaaaattattaaaaaaatactttatcaatttatataactgttgaaaattattttaccaggatcttagatctactcacaagtatgttgattaacacccttagtataaacttctaaaacaattattaaacacatataaagtatgagaaaccttacattgggtgtagcggaataatatgtctcattccgtttagatctctaacccttgtatcctttgtgtcgcagagtattattaagatctgaacctggatctctttctctccttcttttaatgctgaaaacaccttcttgttgaatgtctttcttcacgatcttcctcactatgattgaggtattacttgctgtgtgtgggcattactctatcactaagaggttcgaaattattcaaggaagaagaagagggtgaaagtggcggctaggtatagagagagaaggct

SEQ ID NO: 315500 - DNA, 1286 bp, Cannabis indica
ttcatgctaagctgtgtgacatttctaatgaatgcgcttggaaagatttactcgaacaagaaactggtgagaaaggttcttggagttcttccgaagagatttatgtccaaagtgacatctatcaaagaaagccgagatgaaatctggatgagttgattgggttgcttcaaattatgagttaactcttgagagatgggaaaaaggaaagaaaattaagagttctgagatggagaaaatcgaaatggtagttgcttttattcaaaggaagagaactctaaagaggttgatctttctgataaatttactggtttgaaacaaagtcatcgtgcctggttcggtaaattaagtcaggctgttaagaaatttttagtttgttagaaagtaagttagaccattctgtgctctattaaagatttactaatggtatcatcttgttagttttctatgtggatgacatcgctattaatgaaaattatactaaagccatctcatcactcaaatctttcattcatacctagtttcacaagaagaacttaggggtgctcaagtgttttttcgggagtagaagtcacccagagtaaataaggcaattattctatcttagaggaaatatatacttgacttgttaactgagacaagaaaattgagagaaaaaccttgtagtactctaatgaatccagatgtgcatcttaaaattgatggggaaacatttaaagattcgaagaaatattgtagattggttagaaagttgaaattatctaactgtaactcgtccagacattgcatcagttagtgttgttagtcaatttatgtcatctccaaaaattcatcattgggcagcattataacaagttttgtgttacttgaaaggaccaccaggacggggtattgtttacaaggatcatggacacatccagattgagtatttctctgatgcacattgggtaggttccaaggtagatagaagatccacttgaggctattgtgtctttgttgggggcaatctaatctattggaagcgtaagaagcaaaatattatgtctagatccagtctagaataagaatatagagctatggcacaatctgtgtgtgagatagtgtggatttatcagcttttgactgaagtcaggtttaagttccagcaaaattgtagtgtgataatcgagttttccttcgtattgcctcaaattttgtgttctatgagcaaactaagcatattgagattgattttcattttgatcgtgagaaaattcaataaagtctgatctccacaagatatgtgaaga

SEQ ID NO: 315501 - DNA, 1172 bp, Cannabis indica
aagaaaacacgatctgcagcatcggattcggatgctgacgcagcagacagcagatcaggccagaaacaggaaacttgctagaatcgggtccgatcctctattaaatcttgattcctgccaaaaacatattagatattctgattgtattaagatacaatcgaaatcaataagaaaaaggcaataatcaaagtttccttaaaaaaccaactttccattccaaacaaagaaaagtccagctgaaaagtgcatctttcctaacatagaaaagagcaactaaaaaccgaatatacaaggtaagaaatcgggtatgaatgcaaaataatcttaccataaaggaaaaaatattttgtcaactaacttgcccaaaaaagactttacatgctttattgatgaatgagtgaacatgagagtacaggttaagaacaaaagaactagttacaaatggtgtcttactcctctaccatagcttacatgggaatttcatattcagacacatatgagttccttttacatgtccttccatactccctcaactatatctaaataactaggaaacaaactctgtcctttgcctgttggattttgttaagttataattaagtcatataaacttatataaaacttcaaattttaaaattcagtataaatatgtattaatataatgggtaattattctattaaattttcacttttactcttataagaaaaataaatttgtattgttcaaattagtatatgataattcttaattaattaatttattatatattattatatagttgtaagtttttaaaatactatatcatcgtttgaataaattgaattggaattaaaaaaaaatgttgcaaatgataaatttataaaacaaatatcatatatatgatttcaaaatctttgtaatcactgaatttcacttgtagtcgcatcacagtctctaacttatcatcatcattattcttccaaataagtttattctgtacataaagcaaatcaaacaataagttaactactcacttttataaatgaagaaatataccaaaacaatgttcatcaaattaataatgtgaaaataaataaagttatatctaattagatttaaattcaaaaaaaataaaaaaaaataaaattcaaatgatatgttttgaacttttttaatttcttataatcattta

SEQ ID NO: 315502 - DNA, 1529 bp, Cannabis indica
gacaggcgtcatcatagtgaccaaatcagcagcacttaaaagagtactgtgtacaaaaaaacgagcatgaaaaagaaaatgcgacctcatcttagcaattaaatttgattcacatacagctcaaacaagaaagataacatgcttacaagcacatgtgcatcaaattagatgcattaagcatttacttaaaacttcggcaaggtcaagctcacctaccttaagagttgtatttaagttattccttgcattgctaaggagctttatctggtcatgattgtctattaaattctggcactcttgacacagactgatacaaataaattaattaagtcaaaaataaataacaattgaataatgctaaacatagaaaccctcagacatgtttaattgaatacatacttatcaatagaaacaaaattttcacgaagctgatttattgtcttctcagataaagctaatgattcaagcccagcttctgcttgctcaacctgttgtcaaaaaaggactatgttactaaatttataagcttgccattacttaaatcccgaagttttgtattcaaaatatcagagattatacattctgagtgagtttaagtttaaacactcacctgctctgcaaccatggtactaagttgagcgtcatttgcctgacaataagcacagtcaatacaattttttctttattagaatatgcataaaattgatcatttaaactatattcccatatgccatgactcatgaatattgatcaaaatcccaacaaaaaaataccccataaaatcgaaaattcaaaatagtgaagatatcatagagtacaacgtaaatagcttgaatgtcaataacagtaacatgagcactcttaacatattctcacaatatataaacacatatacacactataattcacacccaatccttgtacaaacaaacacacctaagttaataaccaattaagttccaaacaaacataataactattctctcgcgatcaaaaccacgagcaattacattgatcagtcaacaacaacggaaggcacataataccccaattccgaaaattctgagtcaaaatacctgttgacgagtaatgtagtcggccttgatggaagcgatggattgcagaagctcgggaagaggtaaaagcttggcgacctctcgtacggctgcttccttggcttcgacaccaagatcctcgaccatcatcttgttgttgctgttctacacatccatggaagagagaagagggagatgaatttgtgtgaattcttcgaagaatatgaaatcagaaaatcaaattcagaatgtttagagagagagagaaagagatctatcaaattctcatcttccagatttttttttggttcaattcaaagtgttgaatgttctacggcccaaatttagatccaaagtttgaaaaagaaagttgggcttgtcaaataattatgtaatttcctaatattggattattattagggagatttttggttatatacttaattataaaataattaacaaatataccattaa

SEQ ID NO: 315503 - DNA, 723 bp, Cannabis indica
atttttattaaaataaaataagtcatatttaatattaaattgtgctaatattaatattatatctcataagaatgttaagtaccgtagttgccctttaacattgaacacgaataatgtctaacactttctatatatgtcacattgtaatttttagcgataaagttattacattaagttatagagaattgctaaaaggtattattgatgtctaacaccatttgcagtgttatactgctattagttgaattaattatcgagttttatataacttaattaagaaaatagtttttaaagagtatcgctaactaatcatagggtgctacctataaaaattgttaagcatcactagtgctcaatactaatgctctaaattagataagatcttatacttaattacaccaataataatattaacatattaagatatactaaacacgattgatatcttttagcatttcactttctctttaataaattgttgatttggctttattaaggtgtggtggtacttagcataattataaatggtattctatataataaagtgttgttaggaattggacaccttaagctattcatcaccacatgataagtagtgattaataagttgttaacattttcatgttatttgttgcttatcctaatagtaaaggtagtagagtgttactttcacattttaatattaagtctcacatattttaaattgataattattataaaaaa

SEQ ID NO: 315504 - DNA, 750 bp, Cannabis indica
gaataccgaaaaaattacaaaattaccctttcgagaaagaggatattacagatattcccttttccaatggcctcctccaaaagttgagagtggttgtggagatacactgtgaaacccaattacggaacttctgggggaacccaaagcagtcaagagcacagtcaataaatttccaactgagtctatttcacatatgtataaagatattgaaaaattaatactcctacttatatttatttaaactctagttgaaaactaaaagcataatactatttgaatgaatcaacaagaactgatcacgatattgccaaaaaataaataaatcatatacacctaaaaaaatattaaacatataagtagggattgcgggtattgtattagtataagtagggattcgagtcataatttaatattgtgaaactgttattagcactaaagaaatgttacttttgccagagtatttttgcatcggcaaaagtaggtgatgcccttgattttgcccaaaatacgtggactaatataacgacgacacgtggagctgagaggcccgactcttagagaaattgactaaatctttggcaacaagagtgtcaatgagaagattactcccagagaagatgggagaaggctccacgtactcccggaggccagggccatgctaaggcatctccgggaggtactggactctatttgaacagtcacctcgcatttaatgccgcatgggaaaaacgtattggaactaccataaac

SEQ ID NO: 315505 - DNA, 1371 bp, Cannabis indica
aattctttcacatacattcctctccccggttgccattgtgccattttattttgcattgcttgaaagtcaatcgatctgtgagtgagaaaacgtcccaccaagcaccatctatcatctatctcaaaggcctcgtcatgttccccttcaaagagtaatccctcttcctcaacttcttcaatgttcagggctgcatattggtcttccaagttgggaacggtattcattcttacaagacaataaaacacaaaagctagacagtaggatagccaatagaaccagttaaaagaccaccaataccagaataaacctttgatcgaaacaaataaacaattaaacataaaccagagatacactcatacactcataccatagaaaacttcaaaacactcataccatgtcatacgacaagacgcaagaaaatatatttaaaatgtcaattatactcttaatgacaattgtttctatttatttatttaattaaattaataaatgttttatttaaaaaagggaaactaaaacttaagactttgactatataaaggaagagaaatactcataatgatataaccgaaatttattttttttttaatctaaaatactcataatgatcagtttttatttaatatttaattctaattattttcacataagtatgtaattgcaaaaaaaaaaaaaaaaaaaaacaaaaaaaaaaattaaattctacttaagtatttttctaaactatatgttttttttctagcttcaattattttttaacaattttccaataatattttataaacaattaaatatatatatataaaaaaaatcgttaagaattattaaaatttgaatatttactaataaatatttaaaacttaaagtagttttaattttatattttttaatagtttcaattatataattataatattcggtgttatatttgagttttattatattttaatttatttataattaattaatacatatttattactattattattaaatttttttaacgttttataatttcggactaatatagggtgtttgtacttacttgtaattttcgaacttttcgtgttatgacatgcattaagcttatatttgaaattttgatgcataaaacaagttaatatctaaactataaaaatcaatatttgtctcatttgaaacaaaaggtaaaaaaaataataaaaacaatggttcataatattgacatttataatattgtaattacttttaaaacgatatttagcattaaagccaataaaaaggaagaagatgataattataatatacaacacaaacaagttcctctttgagtagttgtaagagaaaagagagagagagagagatgggttttagtttttacaaggcaaaatt

SEQ ID NO: 315506 - DNA, 1494 bp, Cannabis indica
ttagatatttataccacaaattactctatgtatattatcaactataagagaattatgtggtgcatatccgtgcattgattggatcattgataatacttcagcgttttcatcattaatccctttcgagaagagttgtggtgggtttcgaatcattgacccaagtaaggaaggatgtcagtaaaaacaatcactaccactacactacactacacattttatttttacatgtgtatatcctaattatttaatataatattttatttatacattgggtaaagtcttaaatttttacaataaattaaaataaaaaaaaatggaatttaactattcatttcacacatgtataaaaaaggggcacgagtgtaacatattgtttgatattttttttccagcatattaagtaattttgaatttttttaaaaaaatttacatgatatcttagataattacaatgtacgttatcatataaaaaggataattgttattagacaccagtagtgactgactatcatcttttagagatatcacataaaaaatattcggcaccactcgtgctttttaacattaatctataaaaaaaacaaaaattaaaactacataaatgtcgaaaaatataaaagaatgcattagtagtagttctaaacaaaattcatgttgtattgtatttactagtagtcctaaataagattggtatgacattatataattatagaaaaagaaaaaaaaaattagataaagaactatctcaaaacatataagactcgtttagtacatcatgttgtattgcattgtataatatttacatttaatacaatattatatttagtattaacttatattaataggttgtataaaattatactatctttactaaaactcgacccaaattccagttccagacttacaccccagctttgcaacaaaccccgccttggacccagaccccaaactcgaccccgttttggacctcgaacctcagactcgacctagtcccgaaccttagatatggcatagctcggaccttggccccaagaccctctctaaatattagaatacaagctaatactgataatttgttgtatattaattaaataatatgatttatattttgttaaaatttgtagtcataagcatagcctagtgctcacacttctcatcacaaagagaatgtcctaaattcgaatctccttcacctaaaataaaaaataataaaaaaaaattcatattgtgttaagtttatagtcataacaattaatataatacaaatttttatttaaacatggtattttttaaagtaatttacgacataaatacttaaatttaactccaacttgataaaaatttaatttttgacagtaaaaataattaagttatgttttcgaaatttctatacgtacctgaccgttaagtatcaaatcaataattatatgacaatccttgattaatttatgatattaaatttttaatttttatttaaaaattaacttaaatata

SEQ ID NO: 315507 - DNA, 631 bp, Cannabis indica
gttttgagatggaaccccattcaccttatatcccgaattctaacaacgtcaattaccaagcgacacattagtcatttgaatctatccaacaaacttacatatattcagtaggcatatttgtttaagtttttgcgttagtctagaattgacaaagttgagcgtttgaatcggccagaactggcgcaaacaatacttgaaactctcatctccaattgtatcgatctgtaaacaatgactttggacttctgctaatctgtaattgatgcaaatgccccctatcgcgtcgattacagtttgatatatagtggtaggctaggaaaaaaaatttctacctacatttttcgtatccttatgagtttctaaaacaatcttttataatagatagcacaatttataataatgatcattttttttttaaaaaaaaaaggtaatgataacattttttatataaccaaaattgtgacaatttcaaatccgaaaacagtaaccgcaaaaatatatcctataatcactataacttaaattaagccacaataaagtggttgcagtgctagttggaataggagtttctatacgatttttttgttataatttaggttgcagcgctagttgcaataggagtttctacgta

SEQ ID NO: 315508 - DNA, 1303 bp, Cannabis indica
aatactaatcgtactgacgttagtcgaaaattaaggtaacatagtacctacattactttggtagtagtagttctattctcttactcttattagttagtggggtgggggggggttaaaccaataagttcagaaattgtccatgtctgtatattccttccaatataaaatgtaatcgtttagacatgtatgaatcttttcatacttcaatcctatagaatttaaagttctcttcacttcatatgtagattttgagaagtaattgtcaaataaaaatagctaatagttgagtaaaacatttattgctcactctattttctatatttatgttgtaaaactttacgattgtttattttttacaaccaccgaacaagggtttatttgcatcacttagaaaattattaatttttttaggatcatcaagaaattcctcttcatcttcatcaagcaagtctattggatgatcatccaaatcattaccctcaatattctctatctcctgcttccctaatggatatggatcatcagttaaatgttagctatgccaataccatactgtataacttctattgaaaaatcttaaaaacacatgatctgtaatgatcgtgatatttttttttgatccattacaaaaatttacgcatggaaaatgaacacttttgagatttctaggatcactactacaaattgtacttttggtctcaattttaaacttacacttatacttttattgtcaattaatagaactgaaacctatttacagtgaaaaaaagtatattgcattggtgtcggttttaaattgacactcgcaggtgtgaaatttatttttgcactatatcactcaatttagaaatgagaccacaataaaaaaaatttagatctcgccaaagctccaccatgagtggcagctttgtgcacccgtaaactttgcatgagactcaaaaccatggttgtaagtacataacacaatgagctcaaaaataatactattgatttacattacacaaatcttttcaataacaaaaaagaccatcacaaaaataaaatagacaaaacatacataatcaaaccaaaaaaatgtccaaaggaatcaaccatacaagaataatggcgtaaatcagaatctaaggaaaaataaacacaaaaaaaacccaaaaaataatgacaaagagatgatttgtgttgcgccgtgagtagcgagcaagagagagatgagtcgagccatgcctagtgatggctcaccggcgttgagccatgagcagcgaggaagcgagagacaagttaagcgagagagagagagagagag

SEQ ID NO: 315509 - DNA, 570 bp, Cannabis indica
ctttgtctggttccgccactgcgatgcatatttctattgtcatacagtcaataaagtgttcgtattgcaaaatgctacatttttataatatgattatatgaaaggtaacaaaccatgcaagtggtcatcttggaaggaagacacaataggtttggttgtggtttggatcaacaaaatgtcaaacaagtgggcaactttgtccaagaaaagtacaaggaactcggcattaaaaggagaactggaagctatcctccatgctcttctttaggctgaagagaactcttgtgccaaaattctagttctttttgatgcccaagttctcatctcagctttggcaaaaaaatcttgccttgccttgtggagacttcgttctttatctttacgtgtttgagattatgttagtatttttaatgtttgtcaatttgctttaattaatcgttactagcaataagtgctagagcgtctagccaggctgttggtattgtaatcggggagggactcctccggtggttcccatcttttcttctatataatgaactaaaacgttctatcaaaaaaaaaaaaaaaaac

SEQ ID NO: 315510 - DNA, 749 bp, Cannabis indica
tatagtttggggagacttttatagcgagctcctctaagttcgttttattccaatagaaaggggggattccactcaaccttacccatacaggcaatttgtcaaactttatttcggaaggggcaaaccatgaaggccacgacattataacaagaagcacaccacagattaaccaagggcgtcattgtagcacattccaagcatcctctttagtcgcagaagagaagtgaatgattccctcgttgtcctcacgccaactccatcccttaaaggatgcccaagctctcttcggagtgcttgcaataacattgcggctaagctttcctttgcaaataagcttccccagtaaaacttttccttggggatcctaattatccacttcgccagggtccaatctgcatgttagagcagtggtagagacctgaacaacatcctcgaataaatggctcaaactgttgtccgccatgaatcaacaaaaagtgatgaaaaaagaagaagacagtgtctagcaatttactgtaaactccaatcaagacttgcgctcaagcaatcttgcaattcctacgagtaggaagaactcctagagagtagcagtggtagcaaattccttgtttttccatatcaatctttattggtatcattagtaactacgttattttttttttacatatttcaaaaactatttaaaaaaaactaataaattacaagtaaaaaaaaaattcacataacattttaactaaatttatagacat

SEQ ID NO: 315511 - DNA, 623 bp, Cannabis indica
aaatgaaaagaaaagtttttggggcctgggatcatcataattttggcgagggaaaactcttttttgtttaaggagaaaatttattttaaattatcaagagttttgttataaaaatttaaataatttaagtgtaaaaaaaattgttaaaagatctttatataataataaattgtaaaaaattaattaataattatgcttaatttaatattaaaatataattaatattaattaaagttttaaaaggaaataaattaacgagttaatatcaggttacaagtcatttttcatttatttttatttaatttctaaattaatcacaaccatttaatagtgatttaatagcaaaaaaaaatgtatccatgatggttacaataaaaatgtaaccattgaaatctctatatatgaatctatactaatcgattagtagactagtaagtatgatcatgctacattaatcaagactaacaatgttagtggtcaattttgtaataaatatatatgtatatacggatatgattttgtctcgtgatgtactttcacagaatgtattccgtggtacattagataggtctcagggtacattaaatgagtgttagggtacgtttctactttttaaccctaat

SEQ ID NO: 315512 - DNA, 2276 bp, Cannabis indica
caataattgcggtttgaagaaactataaaccgtttggattagagatgactttttagattttaatatttaatgataaaataacttaacatagtgtattacacaaaaaaaataatacaggtaagtatataggtgtgtacgtatgtgagtatgtaaatatagtgctataaaaaaatttgaggtaatggtggtatcattgtgtagataacaaaattaataatagtaattaattctcgatcttaaatttgtttgtaaaactaggaggataactatgaaatacagttagtaatgtaatagtaattaattctcatcttaaatttgtttgtaaaactaggaggataactatgaactacagttagtaatgtgttttggtaacccataggtcaatgagtagcctatggccaaaatgatagttaccacatcgatgattgttccattggtgcaaaatgcgcccacaatatataagcacaagcacaaggaaacattattgattctaaaactaaaataaacattattgacggaatagggatggagatacattgttattataatattagtgcagaataaaaaaaaataattaataagcaaaatgtaacataattgaaaatattattcaaaatatcagtaataaattatttaactgaaataaaaaaaaataactttcatttctaaacatatcattcaacttctaaaggaaattgattaagatctatcatcaatttaatctttctacttgtagtagaatctaaattatttgaataatgaacctttttgtgtccaccgagcgcttgaccagaattgaaaactcttggacacaacgaacaatgaaaaacttttttcattttagactcctcctctactgttgtactattttcttcatcctcctcctctaccacatcttcatcctccccatatttatcttgatcattttcaaattcgtcgtccatgtgattatacttcttgatttttttatgatttgctttgtgtccaccaagagcttgataagaactaaattcctttctacatgtaccacatttgaatactgatttgattactgaattagatttagatgttgaaaccttctcttctcctctacaccatctctccttagagagggataccaataacattgcagcatcttgtaccgatagaatatagtcatcatggtcaccctttttggatctcaccttacccttcttcttgcccttataggacgagtcatcactctcagtctcactttccgaggatgcagaccgagaccgagacttagaccgagacttggacctagatgggcgaggaagagcaagttttaccatgtgagatctcatgtggccacccaaggctttgccattggagaaacatttgtaacagatctcacatactttcatattagtgttggtatagggtaacaagagcagtactactaatgctcttattcttataaatgtactaacaataagagaaaatgctaaaggaagcatgtgcatgcattccataaaagatagcaacaaaagcagaaggttatagtgtgaatatatatgtagtttactaatatatatataagcaagtcgttaaatggtgatattatcgatgatattctctattatttcctcatttcaaaagtttttaaataagaaaaaaatctgttttttttttatatatatatgaaaatctgagtaaaattctcaacagaattatttttttataaaaaaaaaaatattatcaaaaggaaaagaatcctcttgtgaagataagttttccatttgaatgtggagcttatctctttgaattcaataaaagtcacgctctactttgtcataaacaataaaaaaaaaactataacaaaaaaattgtgcatgtagatttgttgacatgtttataattaatcaaatttattttgtattttttagagaaaaaatttattgtagaaattaatatggttgaatattgcttacctaaaatggaagattctcaaataatgattaaccattttaagttttgctggaccaaaaatataattatatatattgtaataaatatatttatatatattataaagtttatataatttggtaccttgtattttagtcaaatatcagtttaaaccttacctatttaaaaactccattttttatcccatatttttttaaaaaaaattacaataatctaatatttgaaatatgatcataatataaaatgatgacggatgagttaaacgatgactttcatttcaaaaaaaaaaatcatcataatatcttttatttataataaaaattata

SEQ ID NO: 315513 - DNA, 3061 bp, Cannabis indica
tgatgcagtagaagggaaagctacagatgacgatggatttcaaaaagttagtaaaggtgggaagggaaagggcatagcaatatcgaccgagacacaattgtgaaattcttttgatgctctaacagataagcttgctggtgtgaataagaacattgtagaatcctctcatactcagacagaacatgccaaagaattatcaactgtagagaaaacaagaggaggggaagttcctcctcgggaaaatggaaaaattcgtgagttggaatgtccaagggatcagtagccaagaaaagtaaaaccaagttaagaacatgatcaatgctcataaggctggacctattggtcttctcgagacgagagttaaggcccagaaacttggggtcttatatgtgaatatgttttgaggatggtgtttcacatcgaataatgcatggcatgatgaaggaagaataatagtggcctggaacccttcttgattcaatgtaagcatcctcaattgcactagccaacttattcatctatatgtcacaactatagatggtaagaatcgattttatgctacatttgtctatgctttcaatgaagtggaagggagaaaggcactctggacagatttaaaactaatagctactcatgattcatggatgatcttgggagattttaatgagatattgaacaaggaagaacgaattggcaaaaaagtaaaatacaatgcagctaccgacttcatcgactgtgttagttgttgccaattagaagatataatatagggggagttttttttttttacatggaataatagaaggcaagaaaataaaagaatttggtctaagattgacagggtccttgcaaatcgacagtggttagactaatttcccaatgctgaggcagttttttcagtaaaaggtttattcgatcatacccctgcaattatttgtgttttctccgaaatgcttggtggcgaaaaacctttcaagtattttttgtatgtggtcctctcatccacgttatgcaaagatagtcaaaggagcgtggaatcatcaaatttttggtactaagatgtttcaagtcacctctaaacttaaaatgcttaaagcagctctcaaagacttgaatagaagggaatattctaacattcaataggtagtaggacaagcaaaagaagagctatttgagatacaaaagaagcttcaagcaaacccgttgcaacatgaactcattaatcaagagatggttgcaagacagggatatggatatttactcaaggggctgtcatccttcctgcaacagaaatcaaaaatcaactgtatcaaagatggagatgaaaattctgctatctttcatgccaacattagagagagaaggaagcaaaatagaattctgtccatagaagataaacagggaacaagagtagatgatccaacacaaattcttgaggtgtttctttcattttattatcaactccgtggtagtaaaatggaaaataggaggaaagacttagatggagtcatgaaacaaggccccaagttacaaagcaacaggcagattggttaatgaaagatttttcaaaggaggaagttaagaaggttttctttgagattccaggaattaaggccccaggaccggatggttactcgagctattttttccaagacaattgggatataattggtgatgatattagtgaagcagtgctgtcattcctacacactaggcagatgcttagagaaatcaacacaaatgtcttaacacttgtccctaaaagtagctgcccgaacacagttagcgacttcagacctattgcgtgctgcaatgtaatcgacaaggctgcaacaaagctgatttgttctcgcctgaaagccattcttcttgatttggttgcctagaatcaaggaggctttgtatccggaaggtttattgcacaatataatgatctgttaagacttgattaggcattatggaaggagatcatctaaagcggggtgtatgactaagcttgatttacaaaaggcttatgatatgctcgactgggatttcttggaagaaatattacaagcttttcagtttgctatgaaatttatcaagctggtaatgatttgtgtgcgcactcccaggttctcgatccaatattcaatggaactcttcatggattctttgaggggaaaagaggattacgccaaggtgatcctatgtctccattactttttatccttggaatggagtacttgtcaagaataatgatctaagttggggccaaagtagaatttaaataccatgatcgatgtaaggagctcaaactgaaccatctaatgtttgctgatgatgttattctattctgtcatggagacttcaaaagcattaatttcatgttacaaggcttgaaacttttttcatgctccttcggtttacaaccgaatccatccaagtctgccatctactgttgtggaatggaagaaaatgaaatacaacgggtcattgatagctctggattcagcaagaaagaggtaccctttaaatatttgggtattcttatatgtgctaaacgtatctttggtaaagaatgtatggtgctagctgaaaaaaatgacagcgagaataagatcatggagttaaaggaatttgtctttagcaggtagagttgtacttgtgaactttgtattgatcatggtgctaccaaagaagacaatcaaagacattgaaactataggtcgtgcctatctttggaaggggcaacatatgtcacttggctccaggccagttgcatgggaaaatgtctgtcaaccgaaggctgcagagggaataggcctcaaaagaatagcagaacatggtagcaatgacaaaatatgtttgggcaatagcaaacaaggaggacaatttgtggatcaaatggatacattgtgtctatataaagggggaagattggtagagttatcaagcttcacaacaagcaagttggtattggaaaaactgatatgtgttaaagatcaaatcagaaagaaattggatgtacagcagttcattagcacacaatacaagatctctaatggctacaatttacttt

SEQ ID NO: 315514 - DNA, 1052 bp, Cannabis indica
gttcagggggtaaaaatcctaattagtcttattaaagtacagtgaattagtcatttcaacaattgtacagcctcaaacaaaaaattacaaacatatctcctcttttaaagcttcagccacacaaaaacagaaaaatcaccaacgaaagcaaccatcgttcaacccatcaagacaactgaaaagaagcccaagcaagagaaataccaacattaattctgacaattttaccagagaaaaagacaggaatcaatcgaaacaaatgttgattcgtattgatgaaagaaacaaacaacctcacgcacacaacatttgatcgaccaactcagcaacccaacacaaccgaaacgaaacccagcaagaacgagaaccaccattaattcgaggtgacttcacatgagaagacgaccgtaatcaatcaaaacagggactgtttcgaattcataaaaaatagtgtagaaaaattactacgaaactaaaattcaaccagaaatccgatttaattcgcatacagctaatgtcatggcttcaattttcagatccataaaatgcaaatctcaaaaaagttgaactggagttcacaaacaatccaactcaagtataatctaaaaagaattgcatcaatactatagttaaatatttatctcggtgtatgttcgttgttttctaaatttctaatggtgaagttattcatgttaaatcacgaatacacgtagacagagttacgtacgtggaaacactcatctgatttttaatatttcataacagttgcataaatattttgctaataattgtttatccacatattactattaagttacaagtaattatcgatcagtgacaaaaaaaatattgacgaatagtttcttacagatacacattcacatttaacatttttagttgcaattaagttgcacgttagttgaataatgattttgctactacaatatcttagtattataaaaacaaggcccgaaattatcgaatacgtgacctgaacagataaaacatgattgttgtaatattcgttttgtattaaatatgtggaattatta

SEQ ID NO: 315515 - DNA, 1113 bp, Cannabis indica
aatgagggggagttagtttacactatactctttttcttttgatcaagttttcagcaagatttttaataaggcagttattatggacatccaagggggagtgttataaatattaataattatgtggatgtccaaatcttttatttattaccattaattgtaatcaacattactcttttcttagttttcctttttcttagtttcttaatatttgactcttgtatttgtataaataggggttcaccccattggaataaacaactgagaaattctcatttactttctctttctctcttcttcttctttcctctcatctattttatattattttataacaggtttgatatttttaaaattaatatttatagttaaatttgtttagtaaccattcatgggtaatacccattaaaaagtgttccattaatatttatatatgttttataatgaataataaaaaaaactatatataatttgagggaactcaaaattaattgtattgtatattttattaaagaaaaataatctactataattatacaaaaaataatacaatataaatgtacttttcttttaatcatacaaatacacttttatgtaaatatataaatatatttttataaaaaaattattatataattttatacttaaaaaactatggcttacttaaaaaaaatttacataaaataatatattaggattgaaatgtacatttttcactagtgatgaatttctttttacttgataaataatcactatcttaataattttgcaatatcataagtaaatacattgtgaaaaaaaaacaaatacaaaaaatacaaactaaataattatcatcaaataatttgaaataattaataatatctctaaaaacaaaacgaggtccggagaaaatacattaaccaactagtctttcataactttaaaaggtgtttaatctatctactagaaaaattatatttagcatcgcttctttatcaacactttaaaaaaaagtgttgggaaaatgctataaaatttattgagaaattctttaatagaccccctataatagacacatcaatacttcccctataatccaatttaaatggtgatggtagaaaacttcttaaaaaa

SEQ ID NO: 315516 - DNA, 1811 bp, Cannabis indica
tctgagatgatgccttgatgatgtgcatctggttagggtcgagatgatgccctaatgaagagtacgaccaaccttggggaaggtgagctgacattgtgccaccacctaagtgtaggttgaggtaatgaggcatgatggttttaccacctaggtgcctaaataaaatgttatattgttttttttttttgcaaaatcagagtataacaactaatgctttggctaatgccctccttttctctttgtttgtttatttttctattgagttcccctaattttatcaatcattttaagttttcactcttattgtcaatagttacttttcaaaaaaaaaaaaacttgtttaaacttgtgtaaaaatagatatatggaaatacctagataactctgtgtaaaaacttatatgtggaaatacctaaaataactttgtgtaaaaatgtttacattcttttgtgaaaggtagacaatgaaagtttctcatgaacaaagaaaaagaaaaaacataattttgtggggaaaaaaaggaactttgggaagttttagacaccaaaagttagcatcaaccattgttatgttcttaatctatatttatttttgaaaaattaggggaagaaaacataaaaagaaaaaattagcatggtctaaattttttgagcaatttacaataaaaaaattttgatacattttgtgtatacttttaaaattagcatggttatttttttagcaatttacaataaaaattaatacttttagtaatctatatttttgtgtatcttttaaaacttcctaaaaaaagcccctaccctaatactcatgttataggtttggattgtaacttgataaactttttcataaattctaaaaaatgaaaactggaaaagtgaaaatcttcaatttaggaaaacacaaaataataataataaaaagaaatcgtttgcataaattgtaatattaattattttttcacaatttataaaaaagaaagaattttaaaaaaaggttaaatcttttcaatttttccaaaaatttgggggaaaaaagaaaatagagaaagttgggttgccctaaaaataacagaggggttatattgtaattttccatgaaatttttaattttctaagaaccaaagatttttttttattgaaaaaaaatatgaagtgagaaaatcttaaattttccaaaattagaggaaaataaaaaataataaaaaagggaaaaacttttaggttaccctaaaaatagttagattgtaattttctcaataaaattttccatttttctaaaataagaaagatttaaaaataaaaataaaaagtgagaaaaaatttctgttttttaggaaaaaaaaaataaaataaaaaagggaaaattttaaggtttgccatagaaataaattgtaatttttcaataacattcttcattttttctaaaataaaaagatttaaaaagaaaaataaaggtaagaaaatcttcaattttaggcaaaaaataacgagaaaaataaaaaataaaataaaaaaaggaggttagattgtaattttctcaataaaattctttatttttctaaaataagaaagatttaaggtgatatttggttgagatgaataaaaacataggaatatgaatgagaataagaatagaaatgtgaatgaaatggaataaaatttaaaatgcataaaaatcattaaattttttctcatgttatattggaatggtctttccttccatttcaaatgtaatagtcattctaccaaaatggtagaaagagcattctaatggaatgacattccaatactttaaaatacaactaaatc

SEQ ID NO: 315517 - DNA, 1043 bp, Cannabis indica
gaatgcatttttatgtcacatatagaaatttcataattttgcatattttgtgcccgacaactttggaacgcggtgtatggctatagaatcacatcttagtacttttagtagcgggacaatagtttagacattgggaatgtcgaaaatagtcgggatcttagaattttccaaaaataccctttagtgtccttttttgccatttagtgtgggaggggcaaaatggtcattttgcccaattagctttttgtctttagtggattaatcttttatgtttaatctgattatttatgctttatctttggctgaaagtaaaataaaatataacctatctttatcctttattttcaaaaaaacgagaaagataggaattatgaaatgaaacactctctctcaccaaagctctctttctttttcgaagcaccctagaaccaacaagatttgggttttcttttcaaattcaattcagatttctagtaagaatttggcatttcaattcaaggtatgaacccgtcaagttttctttttttcttaagtttcaagataggtttcgtgcatgttttgaggtatttgttgctgttgttgctgctgatgtttaagttgtgtttttaaagtttaattataatgttttatattggattatacttgtttttgttgctgggatgttgaatgagcaagctttgagtttttgaactcaagcttggttcattaatggtgattttgaattctgagtgtgggtagttattttatcacttggaaaatgtttattggggtataatatgcaggtctgggaagtttggttgagtttggaaatgattttgttagggtatcaatttttgttggttttctaggtaaaatgggttacccaaatattgcagtagggaaaaactgattttcagcttgtcgtatagtgccagtttgatgtttctagttggttgattccctgctagtttgggatattaccatatgaagttgtagtagatagggttttggttttaaaccttagtcccgattgtgacttagcgagtcacttatgcgtgttatta

SEQ ID NO: 315518 - DNA, 1219 bp, Cannabis indica
tttttttcttaatcaatcttttagattacgaccagacttggacccaaatcatctgcctacggccctggtgctaaacccggcttttgacttgaatccgaatccgaccccggacctagacccgacttaaataaaatcaaaaaataaaaataaaaatgaattttacagaacacacttttgttttctgtttttaaaattgaaaaacaaaagttgttacagaacgcattttcgtttttcaaaaataaattttttaaaaacaaaaattttgctttcattttgtaattaaaaaattaaaaaataaaaatgttaccaaacgggacacatgttaatagttaaattctcaatagtatctaaatcttaattattagtgaaaattagtagtttatatagtagtaactagctacttagtggttgtagactatgtaaatgcatttgggtactcatatttgttgaatctaataacaatgtattcatttgaataattttcttctaatctaacgtattgatatttatggtatggtattaatgttgccaacaaatactaatttaggaaactaaattatatgttcaagaaattagaaaagttgattgttttttatttaatatatttagtcatatttctttgatttgggtaaattatttttataccaatatatatgttaatatttttttctaatggtataaatgtgtagaccctttccaaagaggaaggataaaaaaaaagaaaatttacacacatggacggtaatagtaatttatattacgtcaatcatgtagtacaatttaatatataatactactagtttgttatacactatggatttcaattattttactttttaatacatgcatggtagatattgatgccatcaagtctatccatccaccacatctagcagcttgcaaagaaatacatgatttgtaatggagatggaatattcttataactaattttaagaaagttgtattttagtttgatagttattttaatatatttattgatttaaaattagtaatttagataactctgaatataaattttaatttagtatttataaaaattataactctaagtaagaatctgaaaaaataaaaatttaactttcctaatctttagtataattttttttataaatattatgaaattactattaagtgtcaaatactaatatttaactaataatttcaatatatgtatatagagttacaaaatccaaattga

SEQ ID NO: 315519 - DNA, 725 bp, Cannabis indica
ttcatggaatgatgactgactttacaaattaacacgagtgttttttgtatgttttatcttcatccgcatgttttttgagaaaatttcttaggaggctactattttcaattgtgtagtcccatgcttatatagcctcttatagatcacgggattactgattatcacatgaccctttacatactaaaaggaggagatactaaaagtaatataaatttagtgtaatttggggattgatgctattttgaagagtgtatttgggagatttgtttgtctcaaagaaaattagttacctatcagatatcacattttcgattcaagcattccaattagccccaacttatatttgttttgatatttgagaaaatttttgagtcttttattgcgtacattgtagtttttataaaataatttgtaaatttttaaaaattctaaatattttatagtgctaaaaataaaaatgcagcaaaacattaaaattttatttttaataatgtaaaaataaaatggattaaaaaaattcatatattcaaaagtagtttgtttagaacgtgtattataaaattacactgctagtatcacaagttagaaaaaaaaatgacaatacccatattagtagcattataatttataagattataaaagagcgattttataaaaaaaatacaaaaataatcaaagaaaattataaaaatacagtagtaatgaaattttaaatattttttttt

SEQ ID NO: 315520 - DNA, 577 bp, Cannabis indica
atatatatatatatatcataagtttaattagtatttgatggaggttgttaatagagaaatggtaaaatgtattagtctttaatattgatttgttcttagtataattagtataattaagtattaaattttatataatttataatataataatttttataaaatattgttaatttcattataaaatgccggccactaattagacactactggtggcttagagtatttctaaaagagtgctaaaaaaatgttgtattgccatattttggcatacttaagaaaaatgattactctaatagtgttctaaaaagtgtactaaatttagtacatgctaaaagttgtgacaaatttaactcataataaatgttatttttttatttactataatattatttatcattatgattcttcattgacttttactaaattttacattttttttcattgaccatattacaattatttaaataataaaagaataaaaataatttttgtatcttcgcaataaattaatattaaatgatcattaatattagtgccgtttggtaatacttttgtttttaatttttttaatcacaaa

SEQ ID NO: 315521 - DNA, 2763 bp, Cannabis indica
agagctcggaacgatctttccaacaatataaagaacgtccaaaacggagtcccgagtcaaaagctatggccaaaacaaaattgagaaaatggatggctctctacggggttttggccgcggccactgggttcgaaaaaaccaaaaaaccagattttaaggtataaaaatgcccactttaccatttattcgaacctcaacaaaaccttacccaaaactcaaccaaaaccattcataaacacacattttaaatcaaaataaaccaaactaactttgataccaaagatacaaaaaaaaaggaaatatcatgcaatctcaccataatcaccaagttgaacatcaattatcaaagcatttaaattaataatatttgcctagaaatttcagaacttaaccctagaaattaaagcatcaaatcacactttaaccaatcaaaataatcaatatcatcataaaagttcctagcatgaatctactatcattaatctagtcaaaaataccaaaaattgagcatttctcaaccacatgcatttcatcaagtatgaacagcaaacacaactccaagaacattcaaatatcagaaattgacaatccaaacaaaggaggattaagagcttaccacaaacacacaagtcccaagccacgaattacaccaattcaagcttgatatcaagattgttgaaaataaaaagcaaatagaaagggggagtaaggggggtcggctagggctggaagcaaccaaaaaaatgggttctaatttcccaaaaattagtttttgttgaaaaagaataattggtcaaatgaccaaaataccctcaagaccaatatattacaaatatgaaaacaaggacaacagagtcatttaaaatcacacatataaaactcaatattttcaggttttcatacttatccaataatgccaaattttaaatctcgaaaaatgtattttgggtgccaaacccggttctgcccaaaatacccaattgtaactataccgcgccaacttgttagaaaatacctgcacaggacaaaacaagtatactatataataatttagtcccataagcttgcaattaaattaaatttacagttttacccttctcaggtcaaaattactaaaatgcccctggctcaccaacgaggtcttaacatgttatatatcatattaattcacatataataaattatataatattataattccacaataatacacatttaactagttagggtttgctaatccattttcttaatcttagggtattacaattaatcaaagtcttgataataattaaagccataaccattcaactattaacatttagccacataaggtgcttaccacttttttttttaccttagttcaaaactcaagcttatgggccgacctgagtggaaaacaagttgggcgatcctggtcctatgtcacgacaaccaaaactcaatgaataccttaaattgaaacctaaacagttacttcgcaactctcgggaccaaaaatgaaacctgcaaaaaaacccagaaattctccctgcagggcaaccggtcgactggttctggtgcaccagaaccaaccagtcgaccggttctggcagacctgaattccttgggttctctccttcaaattcgactcaaaactcctccaaacctaaccaaactttccagaacagtataatacaataaacataatatatcccaagcttcaaattacaatagttcaatctctaactcaaaatcacatgttcaagtgaaagaaactcaattcctttagcttcatataacattatacaacccaaacagccctgtaatgaagtaaaacacgcacaaacaaacttaatttaacttagaaatcatgctcagaacttatctaagcctacagccctgaaaactcatataaaactaataaaacctagcttaaaaatctaggaaatcgacaagaacaataggaggaaacttacctcaagattctaggttgacttggggttagaatcagcttgaaatcaagaagagcggctgatgaaaatttccccaaagctggctggttctagcttgctcgaaggagaaggagaagaagaccttttttggtaaacttgattcctaagttatctcctatatatattaggttgtttctttttcttttctttttctttttttgttaaataataatcagcccacacacaaaaaatagaaagggacaaaatacctatttaaagaatgactaatttacccctcatgcaaaatttaaactttaaaatagcctaggggcattatggtaattttactaatccgccaaactgacattctaaaattctaaactagtccagaatatcctcaaaataatccatccattaatttcatgacatttctgaccacatcgttaaatttccacagtcgccgggcccgaaaaatatttttatttcaaaaatggtatcctcaatacccacatatcccaatatagtcttcgtaattaataaattacgctatatataatcattcaataaattctcactaactaccctaagtaagatcataatcttccttcattaccaaaataattacatatttaataaaatatgtctaattaaataacattttattttccgagatattacaactaatggccccttaactctcacacaaggcccaaaggagaggaacttaacattaaatgaataactgttattaattgaatatgcccaacactaattgggcctaaataaagtatatcaatagtgatcattttatttagcaacctagtccatttta

SEQ ID NO: 315522 - DNA, 771 bp, Cannabis indica
ttttaaaacaataaaatagaaaaaaaatatttatattttaaaaattactattgtaatgtcgttatctattacagtcattaaaaattattgttttattattgtttaaaaaaataaaaacaaagtgtatgatatttctaaaaatatgaaagtattataaaattaaaactataacggttaaaactataattattattaactataaattttgaatattattatacaattttttataaatagcacttaaattaaatatttttttaatgaaaataatattttattaaataacaaacaaaaaattaattatacaactaaaaatatatattattaaaataaaaactataaatataattaagtatacatttatatagttcaaattcaacatgatacttttttattttattttttttattaattacaatattataaattaaatgaaattaaattaattttaaatgaattttctcaattatttattaaagaaagaaaatagatcatatatataccaactacaatacattatttgaacatttgttccaaataaaatagaatgctttatttttttttattacagagtatataatttttataatttataacttattataaaaaatatgtttttcagacttatttaaaattaatttaaattttatataagatttctttcttcctaattatatgaatttattataatataaataattttaatagaaatttcactgtaatattttcttataaaaattataatttttttagaatttttttatttttaca

SEQ ID NO: 315523 - DNA, 3194 bp, Cannabis indica
agtagggagctccgatcaacaatttctcaactatttattgtatgatctgcaacattcaaatgagaattttaagttaggtagtacagagcttactcagttccttttgagatttgtgtttcgaatgtttgatatatgtttgtaagcagatttgttctatgagattttgttgttgatcgattgacctttgttgatgtttgttttttgtttttttcaacctgaatatttgaataggtgtagttttttgtgaatttttcattgacttgttgttgaatttttgttttagaaagctccgttgagggaacaatggactgctctgattttttttcctggaaagagagtgttgaaggtgtcgaagatgatgacaccgtattttatgtaaattaatatatagttaccgtatatatgttctttttgccgtgtgtacgtatatttgttgtttttactacttttgtgtcatttgtgaaaaatttcccaaaatttaactctatgacccttaagtggaattcagccctatagtgtattttagcccaattatatattttagtccatctcattttaacctaaccctatgtgaatgcctatataaagaaagagaagagaattgaaaaagcttatgtttgatctagctcatctattccattcacatattttgacataccatacacaatggaatttgaattcactctcaagtattggttccaaaggtattttgagtattatctcacactatttaaggagatactcaagcctttgtggaaaactgtgatgaacacaattaaatgaggagaagatccaggttaaattcttggtaataatctatcttatcctaaattttatccacctgacgtggcatgtccacgtaagccaaagatagagcacaggtggagtgcaccaccgccaatagcaaaacagagcctccatgcaagatatagcaaatctgtcaagtagttctccaagggagtgaagcaagcccacaaggagttgtaccaacatccttggccgaccaagaggagcctataggccagccaagatatatgcacaagctggccggccaagaagtgacttccggacccaagaagtgacctcttcaaggttacaatgtacaaagttgtcctcaacttgcaaaaggctggcctcgacactcaaaggttggcctcctcttggtggagctatagtgacctaccaggtcctacagcccttgacatgccagaccttacaggccttgtcctgcaaggtcttggtaggactatgggtggccaggattgacctggcaagaccatggctgtcaagacctccctatacgcctatggacggcaaagattgacttggaaagactccatgtacaactctgcacatagacacaagatatgggatgcgaattgggccctaaaagcctaacagactggctaaagagtatctacaattaagggcattttggtcttttgtaaatatctaactaactattctatttacaagggatttaaattgtaaacctatggtttaagggttcctatataaaggtcttaacctctagctaaaaacccaagttccctaagttgcctctaagccacttagcctccaatagctctaagtctctctcgtctttctctctctctcttgtacaagcccattagggatctctctctcttcttttcatctctatcacacgccaactctaggttagctagcaccctcggttggccagcaccgtaggttgtacaacacttgagatctacctactgattcatactttgtaatcctaaagttgctataacgattcccacctagagtgatcaagatagtatttccctcagtagaaatataaccaaaaaggaagtaggtcattacccgctatcacaagggggccaaatctttgtgtttattgatttttcattctgtttgtgtaacacgtggcaagcatcagatctatacgacccaactattaattgatcattttgtaaggtcaacaatttggtgttttcattgagagtgtggatatcgtatttgatcaaacgccatggttaccacaagaaaaactcatgtcgcaccatcagcatcattaggtctccctcaagaccaaaaaattgtaggtccagatacttagtttccagtcataataggaatcccaatgaaaactgtagatgtggtgaatcctatcaccataaccggcgccatgagtcttgcctcctctagatagagctatagtgacctaccagttcgtgcagcccttaacctaccaggtcatatagcccttgacctaccaggtcctccagcccttgacctaccaggtcttgctgcccttgacctaccaggtcctgcagcccttgacctaccaggttttgcagcccttgacctaccaggtcctgcatcctttgacctaccaaaacctacagcccttgacctgcaagatcctgcaggccttgtcctgcaagatttatacacgcatcccaatggattcaagtggcaggcccatgcctccaagagtaggcccaccattggcgcctccgactgaaggaagagcccttgggggcaccccccaagaacaacaatcgagtttcacccccagtattatgcaggagagacgagaccatgaattggcgagcctcaccaaggcttgggacaagaccttgagttggccagactcgtggaagtagtaggccatgcaggcctaattaaagaaccactcactgatgactgcgatatatttgcttagtagagacgtgagtcccttgaggaaccatgcactgctgactacgatatattcgctcagtagagacgcaaatcccttgaagaaccatgcgctgctgattacgatgtactcactcagtagagacgtgaattcctaagattgatggatgaccaagagcgcatcctttggtatcaccaggcagatttagatcgtcgtaatagagaggtcggtgatctaataaggcggttcacctagagaaccaatagaagaggtgaggatctcatcaaatatccatttcaaggaagagttattgatatatcagggagggtctatcgatatgcttatcaacccagttcttcaggaactaggacagaacttaccttgccagagggaggacagacctttcctcaaatttcaaatggcaaaaactaccacattttggcaaccagtggcatggggggccggccagggatctcaggctcaataatagtgttgggttttatgc

SEQ ID NO: 315524 - DNA, 2813 bp, Cannabis indica
agagagaaagagagagagagaatagcagtggaaaaaataatcttattttctttgctttcagttgcttactttctgttgttattagtctcttatttattctactatatatcatatatgtggagttataaataaagccttttaagctcaaagcttgtctctcatggaggatcgattgcgagcatggttttgatttttgtcatgtagaaattgttgtatggatgttatatgattgttttgtgaagtttggaataatttagttcagttttggtggggttttgagaagttaaaacttcaggtttctcgttcctgtgaaaaatggcagaccattcttaaaaaaacggtctatcatttttcctaccaggaaaccccaaaaatggcttaccatttttagtggtctttcgaaccctaattttcatgttttctcgatgtttagagtattggtactctagtgacttatagggggacttatgttaatgaattgaagacttagaatgggctagggcaagtgattaaccgctctttttattattgtgacatagggcccaggatcattgaatattttccatacaagttagctaacatacctaaatcaaaatttgaggtaagaaaactacatatgtaccacatagcaggtcaagttacaacaattattgttataacccaattataatcatggtaatggaatgatgaatatcgttaaatggattgaagtcacaaaatcaagggaaacctttgttaggttttcctacttgtcgattgtctttatcttttattcgcctatacctacctatatgtgacaaatgaataaaaaataaaattgaggagtgtgtcttgggtattaaagaacgctccaaggaccaaacccaccgcgatgaccaccagaatttctcttctttgctctgtatcaattccaaaaaaccttcttgcaaacaagccattcgcttccggaccaggggatttgcccactgctcctccttagaccggtaatctcgcctctattgatttcattgggattggtaattccatcaaagcacctttgaccttccctagttttgaatctagtctcggtagcaatcctcttcgaggatatctttcatatcaagtggatagcttttgaatcaaaggcattttttcttttttgtgcacaatctcttcccgctatgcaccctctttcgtaggaatccatgtggtgtgggctttatgctttggatcattcctgcttcattctaataggatagaatcctcctcgtacattaactaacttctctttgactgaagcacttgaacttcactttccaacttgttgggagtaggggctttcactggaactgaaaatctattttctgttcaactcggcttccttaacttaaagatacctaagatatatgggttctaggttagggcatcgacttgacttattaggcaatgtgacatatatggatgacatattagggcatggacttgctttattaggcaatgagatatgtggataccggggagtagtattcgagttgttccagtgagaaaatcgtcataagtcatgactctaaactaaaaccgttgttaggtttcttacttgtcgacgatccttagttattaggtagcggtagtgacatatatagatgtcaggttagggaaatgacttgccttattagggaatgtgatacatggatgcaggttaggacatcgacttaccttattaagaaatgtgatatatggatgcaaggttagggcatcgacttgtcttattatgaaatatgatatatggatgccaggttagggcatcgacttaccttattaggcaatgagatatatgaatactggggaatgatattcgggtcgtctagtttgacaacaatagtaacatttgaatatcagttttgagtattttggttgttttattaaacaacggcaaagacatatgccaaatggggcattagaattgttttgttaggaaagtaatgagaattgtaaccttataaagtaacagctaaagttattatcattggactagtaattgtatacaactgtatattttatattgatattcattgtgtttgaatatttgtactaatttagatttaaatatatgagtattgtacgattgtctaattctgatgatgtgagtgtacttgcacatatttgtgtgatgaattatatgattgttgttattgcttttcttgctgaatcttagtaactcataggcgctttgtggtgcagttaagggcaagggaaaactaggatagccataagatgattgtcttcttcaaaaaatttacatatcaacttatcagagtggtatagtcgagttgtcaagagttgttttaggatataccatgcatattttgacttaattgtgtatatagtctacataattaaatgcaaatagctcagataatttttctgaacattgaagtcaaacacttttccatctagcaataaatttgttgacagactcatctggtctttgcttaatttcagctagatcattaacaataacttcctttattaggcttacaaattgagcaatgaaggctcttcgcatgtcatcccatgtgattatagatcttggtgataattgtgtataccaagtcaatttttcttcatttgtcccaagttagtgtgcacatgtgcaagcttgtggaaaaatactatcatttttggtgtcattatttttcctgtaaaatagcacatctaattacaaaagtgtatttttttttctcaacataattagaaatgaaaaagaaaatgtgtcccactgggcgtgccaaaaattatgttcaggaaaatttcacatttagaatattaaaaat

SEQ ID NO: 315525 - DNA, 988 bp, Cannabis indica
attcaattctttttacaataaaacagttcattcaatttctctttcgcaatatggtatcaaagcaggaaagtgatgctttcctctaatcctgagtcgtcttcttcctccatcatcactgtttcttcttctccggcgatagctgcgtccgcagtgaagatttattatcttcatcgacatttcagccgtcccctgttctgtgattatgcatttttttgcagataacccttttatttttcaagaatgtcgactgaagatcaagctgcgggaacgggagataacgattcgactccaacaatcgtagacaacagtcgcagttcaaccaatttgggagatcagagtctcctcatggcgcgaccaagaagtcatcttgatgatccctctgatgcatactacctccatcatggagataacccgggcaatgttcttgtgtctcaaccactcacgggccaagacaactatgtagcttggagcagggctatgcaacgcgccatatcagtcaagaataaactcggattcttggacagttctatccctaaaccttctctttctgatccttctctttataatgcttggattcgaaacaataacatagtaatttcttggattttaaattctgtttccaaagaaatttcttctattatcctgtacgatgagtcggctgctgcaatatggactgatattcaagtcaggttccattagaaaaacggtgcccatctgtacaatttgagaaaaaaccttgtgaatcttaaacaggaaaatcacactgtaggaatgtattttaccaaactgaaaaccatttgggagaagctctcccatttcagaccaacatgttcatgcaatggatgcacttgtggaggagtcaaaaagttgcaagaacactacaacatggaatatatcatgtctttccttatgggattatctgatatgtatgctcaggtttaggggtgttcatgttgggttttatgccctatataaaactctgtttcaa

SEQ ID NO: 315526 - DNA, 870 bp, Cannabis indica
taccacttccgttaactcataaaatatggacacgtggagggttcagatacattatatttatttttattttattttaaaacttaatatttttaatatcagaaactaaatgctacttatttcagaaaaaaaacttgttctcataacaattttcacatgatattgacacttcaattcgataatcatgttccatatactacactggttcactcagttatggtaatttagcattgcatttctcttattttttttttaaaaaaacaagtagtatttagtttttgatattaaggatattaaattttaaaataaaataaataaatgtaatgtattttggcccttcatgtgtccatatttataagttaataatagaagtgctagtaacggtgtaagagaattgtaacattagttatttttgcctccaaaaataaacattaggtatttaaatgtataaaatctgaaacactaagtatttatgccgcaatttacccaataaaaataattgtaaatacttgacaaaatagatttacatatatttaggagaactacatcttattagtagtatatattatttgttaaatatgtgattatcaaatatttttaggtgagattattacttttgttctggtatttttttttttttagttttgattagtcttaaagtgtggatgtatagagttaaaatgaattgtaaaacatattaccctttattttaatattgtatattttgttttttaaaaaaaatgaaataagctttcaagattgtaatagttggttagttgatggacaacaggtgaatattcctgtactaccccttgttggtcccgagggacggaggaggctagattagccgaaagatggttatcggttcaagga

SEQ ID NO: 315527 - DNA, 2902 bp, Cannabis indica
aacataaaatgttatttctgatctttattaataagtaaatctgattatattgaaacgggttttatttagggcacaaaacccaacagggacaacaatagggtaatgggagaaacttacttcaatctatttgaagaagtctttggccaacaatatctatttgaagaagaagctataaaccttgaagatggatgatacagagaatctcagaagcaatcttgatgaattcaatagaatcatccttgatctcagcaacatacgtgctaagattaaggatgaggattaagggattctattgttaacatttctaccaaaatgttatgaatattttgtggacaccatggtatatgggaaagaaaccttgacaatgtcagaggttaaagctactttgaattcaaaagaagccagaggaaagactggacagcaatggtgtgggaatgtttgcaagaaaaaaattagaatcaagagatactaagaatggagatcacaagtcaaacaacaaaaggtaaccattccaagggcagtaccaatggtcaaagaccaagattgagttctagcacaaattcaaaggtaggaaaataatgctattattctaagaaggatggtcattttagagatgagtagagctctcaaagtaaagtttggtaaagaaaagagggattttagagatgcaggttgtgttcttgatggatatgagtctgctaatgccctggttgcatcaagtcaagccactggtgatgagtgaattttggactcagattgttcttttcatatgactcctaacaaacatttttttgcagctttcaggaacaagatagtgactcggtcttgttaggtgataacaaatcctgcaagattgcaggaattagtttagtactaatcaaaatgcacaatgaatcagaaagaaccattagagatgtgaggtatgtccctgatctcaaaagaaatttgttatctattggtgctgtaacacttaaaggctgcaacatcaagattgatagttaacttagagttctgaaagactctacagttgtgatgaaaggaaatctcaaaaatggaattaactacgtagttggtagaacaataattggtaaggctgaaacagcagtaaaaaataaaggaatggatcagataaagctttggcatatgaggcttggacatgtcagtaagagaggtctacatgagcttgagaaacaaggcatacgtaaaggtaaacttggtaagaaagtagacttttgtgaaaactgtgtttatggtaaaagctacaggttgaaatttacgaaagttacgcacacaacaaaaagaaaaattagactaccttcattctcatctttggggtgcatccagaaaaaaaataattggtggagcaagctattttctaagtatagttgatgactatacaagaaaggtttaggttttcttacttagtagaaaaaatgactcatttaacacctttgtcaattggaaaactttgatagaaaaccagacaaacaagaaaattaaaatattgagaactgataatggcttggggttttgttctaatgagttcaacaagtactgtcaacaaactggaataagaaggcacaaaattgttatcaagacacctcaacagaactgaatagctgagagaatgaatagaaccttgattgaaagagtgagatgtatggagacagctactggttttggaaaatagttttagggagaagccttgaaaactgcttgctatctcatcaacaggtgtccctctacatcaatgaatttcaaacaccacaagaacagtggacaggccatgcgccaggagttgatcactttagagtttttgggtgcactgcatatgcacacattagacaagataagctagagccaagggctctaaaatattacttcattggatatctagagggggtaaaagggtacaagctatggtgtttagaagatggtttccaaaaccgaattataagcatggatgtgatttttaatgagaataaaatgcctatgaaagaaacaaacatagaaagaaagactcagaccaaagtcacagaaagtgtgcaggttaaacttgaagagactcaagatgatgacagacatggtgaaacagattaggaacaggttgaaagtgatgaaaaagatcgaagaggatctcaagggtatcaacttgtcagagacaaagaaaggagggtgatcaaacctctaaacagatttagttttatagattgtactgcatttgctcttgcttctgcaaaggaagtagaatgctcagttccaagcacctactatgaagctgtcaactacaagagtatgaccaaatggctttctgctattgatgaagaaatgaaatcactcaagaaaaataagatctgaaagactattacaaggccaacaagacagaaactaattgactgcaaatggattttcaaggaaaaggaaggactgtcaggtgaagagatcatgtacaaagcaaggttagtagtaaaagattttagtcaaagagaaggtatagatttcaatgacatattctctccaatggtaaaatagacctccattagaatcatgatggtaaaagtagcaaaattcgatctagaaatatatcaaatggatgtaaaaacagctttcttgtatggaaagcttgaagaagaaatctacatggctgaaccaaatggttataagaataacaagccaaaccaagtatgcattctcacgaagtctatatacgggcttaagcaagcaccttgataatggaatctaagattccatgaattcatgatagaaactgattactcaagaagcaactatgatccttctgtgtattataacaggacaccaaactggttactactgtaacgccctaaataattaggcacgctacccaaaatacttataaaaccctaatcccctaaccgggatt

SEQ ID NO: 315528 - DNA, 1044 bp, Cannabis indica
tcctcctctagagtatatgcacaaaaattagaactaaaatctttagatattctagctcttttaggtcttctaggttcaatttctataccctcttcatgctcattatccctaataataaacatgttactagatgatgcacccccactatttctcaatttaaatgaaaatatattttcataaaaatcagcatcattaaattccaaaataacatgcacatttaaatcctaaaatctatatgctatctaataaacgcacattcatatactctactaaccactttaactctcttttggatcaggaattctaacaaatatcaaataaccccaagttttaaagtatgagatattaggttgtttgttttttaaactttcgtagtgtgaaattttgctagatttaggaagtctattaagcacataagatacaatcaataaatatttccccagcaatgagaagcagtaccagaactcaataatatattctgttacatatcatcggtcatttgaaactttaggtagcggctcacgacatatttctttgttcttgcctcctcggtatcatatttttctataatgcttcccatatttccttgacatatttggtagaattataataatcatacaaatcaccaatacactattcaaaataaaaactttacacaaaaaatcattctctatcgtggagtactttttctaaacctgcgattcgtacttctcaacttcatccttcttttcggcaagaggtagagtctcaaacacaactggtttcaaaatagtcaccacaaacacaactttttcatagtcaaagaaaacatcttcagcaagacagacgatgcgtgcatgtgtgggtcaagttgttgtgtcctcacccattcacacaaaattggatactaggcactacaacatttttactcagtaccggcggaagtaataccggcggagccaaaccgccggtattaatgggattattaccggcggaaaaggcattccgccggtattacttttgaataattacaaattaattaaatatttatttaaatttagtatt

SEQ ID NO: 315529 - DNA, 2288 bp, Cannabis indica
aaataaataaaacatttagactgcgtggtcgttacacaatagatttcttggcagcgaggagatcggaatagagccatacagttggtaggagaaaatccacttagccacattatgggcaacaaagctacaagtcctactgatatgagaaaaattacaactaataaaagcaagagaagatttaatacaaaaagaaacatagttctcaagagcccaatgagacaccttcccattgagcgcattgatagctagcctcgaatcactctccataataatatacttataccctaaatccattgccatcgaaacagccaaacagcaggtcgcaacttctacacataacacatctgagaaatccaatcgagacgtgtcaactcgaatcaccttgcccaaatgattccttgctacaccagatacgcacatgctctccaagtccactctaacatcacaattcagttttatctaatcctgtggaggagggttccaaatttccctcaagatcggtgtcggagtagtcaaaagagaatcatgtaactctgcaaaagaagtacaaatattgtcaatacatttcatcacatctggggaattattgtgtaccagtttattgtgcgtcctccagatgttgtcaacaacaatcgatgcataaagaaatacattcttagcacgaattcccttatgtctaaggtccgaaataaatttaatcaaatcccaaacacgaatctcattatcgcacacagggtaaataccccaaggagaagcacgccataggtgttgcgccacctcgcatgagagaaataaatgttccatagattcctcccccaacccccagaaagggcagtttgagttctcaatctgaaaccttcttcctatgattgatctcacagggagcccattagaaaggatacaccaccaaagaactttatgacgctctaagattttactattccaaagcttattccaaagcgccggagcaacaacataatgaggtgctctatccaaggcctaggacaaataagccgatttacacgagaactgcccattgctttccaaagtctaaatccatttgtccttaccttgccccgagggcttaccaccttttaagataagtctcccgttcaaaaagactgttcagtttatggacatcccaatccccactagtcagtagaagatcagtcacgaataagtgttttgacaacacatcaccattcggtttcgagacgaaacctttgcaatggggtatccaaggatccttccaaacactagtatctctgccattggccaccaatttacaggccccttttctcaaaatagcatttgctttcacaacatttttccaaaaccagaaatcagagtctttatatctgcaactgagaaaattcttcccttttaagtactttgcctccaagatcttgcagcataaagattgacacccattcaaaattttccacctccacttggccaaaaaagagaggttcatttctttgttttccgaaaacctagaccacccatagacttaggaaggtagagtttatcccaagctttaagatggaggccatggtttcctttctcgaagccccaccaaaaatcccaaaccaagccatcaatcctgttaacaaggcgattagaaagttttgtgatttgcatagtatagataggcaaagacaaacccaccgacttaataagggtagcccgtcccgccttagacagagtttttactttccaaccctgaagtttagaagtgagattatcaagtatgaaattaaagtgagcatccttttgtcttgatctgaaaagggacagtcccaagtattttgtaacaccctcaggagaatcaatacccaaagcttccttgataccccttctcatgccattaggtgtgtttttgctgaagaaaattgaggttttgagtttattaacttgttggccagaccaggcacaaaacctctcaaggcaaccccattaattatttacttcattcatattagcccgaccaactaggataaggtcatcaacaaagaaaatatgggacagaatcggacttcccctacttagtctaatgcctttgatattgtaacgccccgatttcccgagacatcacactcgcgagtctgtttaaaatcatttataataaagataataaactaatttattgaaaataaccaaagcatgagatctcattattttaaaacaaaaacacttgattcgtttataaatttattaaacattaatttttacaataaaagtaatcgagccataatctttaaagaatatttttaaaccaaaacatcgtg

SEQ ID NO: 315530 - DNA, 1815 bp, Cannabis indica
attatcacttctcaaaatacgaaaaaacatattaaattgattttgaatctcaacataaaaagcacaaaatataaaaaacaatttagaacgattttttattaaatataaatgatttttacacgaaaattatctaacaaaatacctgagtccaggttaagacaaaataggataaggacccaaaacattagaatgaattaactcaaaaagaacactagcatgtttattggctcaaggactcaaactaacacgatgatatttgacaaactgacatgactcacaatctaataaagacaacttactaaattggggacaaatttttttgagcaaatgtagggatggatgactcaaacggtaatgagcctcaaaagcagaagtaacacctagacaaacaatagaggttggtggaagtgggtcaagaacatacaagccactagattcatgtcctttaccaataatcttcttcgtcataagatcttgaaacaaataatgattgagaaagaatgagaggcaacaatttagattacgagtgagttgactaacaaaaatcaaattaaaggacaaatcaggtaaatgtaaaactgatgacaaagtaagcataagtgtaggaacaacagtgccagatccaagaacagaagatggtgatccatcagctaaggtaacaataaaagttgtaccatgagaatgaaaagtgaaaaagagactggaattacctatcatatgatctgtggcaccagaattaatgacccattttaagaatttgaaaaaaagcatgcattaaagttacatgaatcagaaatcgcagtgacaggagatgcagatttaagtgtttcttgatactttgagaacttgacaaattcatcagtagaaataaagaccgatttgttagatgcatcactagtgcttgcaatattagtagtgttgttgatttttgaactgtaacttcctacacttaaacttagtgtaacctagtttcttacaatagttgcaaatgatgctctcaggaatttggtgttcgattatcaggtccttatgaattacttcctttgtatccacgtggagtagagttttattctggcgcaaaattgttacgactcaccaagacgctattaagaggagctaaagaggtagtttttgtgcgaggaaaacgagtaaacacaacttgtaaagaggagatattagaaccagagaaaatttgtgactttgcaaagttaaattcagatgagagtcctgcaagaaaactcacaatagctatctgttctcgttggcgctgttgaaacctcacattaggactaaatggcaatgttatattcgaaaaagggctacactttaaaagtcgacacgtgtccattagaatgaatatgaatcaattataagtgatatatttaatattatttatataaatgcatattaaacaactcgttattattaaataaaagttaaataaatagtattcaaaactcgttggcttatagtcaaaagtgagacaagaataacaactattgatttgagattaacgagatatatgcatgtctcggactatataaacaagaaggggatattcatccacccgagcaagatgaatgtatcaacatgaactgcctcgtattgcatagcgagaaggtcactcgtattatgaaaaccataaagagaatatatcgagatggaaatcttcccaacacttagtgtttttcttttcaagattaataagaaagataactcgaatctgagatgatataaacttctacgtcagtaataaccatctaaaggagaaaactaaagaacggttgggtagttatttaatattatcccacatgt

SEQ ID NO: 315531 - DNA, 1354 bp, Cannabis indica
cacatgggtaagtctagaactttatttcttagtggaagtatatatatattggagaaaataaatatcggggttgagcgggcttatggaatttgactattttacccctagttttgaaaatatcctagttttaagagaaagggcattttagtgaattgccaaggagaatgattttgtggctgccttgtatggtgatacctagctagagtatacttcagccaaggttaatgtaattaacctcttttctcattttaaaaaaataaagaattaagaaagaaaagtcaaaaaactcaagagctctcccttttccttccctctctcttccaaaccagcttggaaccaaggagttcgtgctgattcttggtgttttcagaaaggatttcatggaggatcaagctaaggtagccctagacactctttccttattgttttctcaaggttttagttagtttgaatatgtgttgttgttgttgttaaatagtggctgttagggttgggatattttgtaattcgttttctaagtttattttgagcttaaatgatgatcttgtagctgaattggtggtgttgtgttggatttatgcaagtttgggtttgaaaacctaaactttgatctttaatggcatgttttgatttagtcgggttttctatgatttattggctggaatatgttgtgtttaccttaattaggtactttggaaggtttggttacgtttggtggacttttgagcaagaaatgaaattttttgggtgaattggtgtaaactaggtaactggttttacacgtacctgtaaaaccggttaggcgagtgtctcattttctcaattctcatccattctgtgccttagttgggtgtttccccacttttgagttagattaatccattgagagcataacagaacctagggttgtgggttcgggtttcccggattagggttgtgatttacctggtttcattatgtgattagggcatccattttgcacaagacttttcgttcaggtccgccagcacacttgaatctggaaagaaggtaagaactttatataatgtgtgatatgaatatttgagtgtatatatgtgttaagtgtatatgcatgcttaaatgttaattgcactaccaacacttgtacaattatggcatagagtgcattggtatagtgaatattgtttgagagtatagtacaatgataccagcaccagtatgagaaagtacagggtatttgtagtatatcactcagtggtactcagggtacggaacaaactctaccaacactcgtacattaaggtccgtagtgtatgtggtatagtggttgtaccctagtatggaacgttcttactcatctgttgagccttgt

SEQ ID NO: 315532 - DNA, 2272 bp, Cannabis indica
tggtagtgatcgacggtagaatgttgattggcaacgacagaggaatagcagtaaaaaatctatggtttctagaatttttctcgaagatgttattggggcgaaatggcaaagtggtgaaggtaacccagtgaagaaaaaaggaaggcttttatagaccagaaagggtgcaaggcagctgtgatcgggcgccatcgtacggtgggaatggtaatcgattcacattctacgaatccaacggtggagacaaatggacgccagggcggttgaaaacgtttgagtacttagctgacactcggattaaataccccggtttctcaatggatgggaagcgaatcgtcgcctgcaaaaggaaatcaatattaatgacggccatcataaatgtagcccacgcgcttgaagaacgtgccaataaatcaattaaccaatcggaggcatcgaacaagcctcgttcatccttcgctaaacaaggcttaggggtaaatgttgcccttatcttttcccaaaatacgtggacctggataaggctgacacgtggatctgtaagaattaacacttagaagaaatcgactaagtcctaggcgaaagaggagtatctcaggaaggtgtctcccggaagagagcataagaagtattttttcccttcgggaggccagatgtatgctaaggcatttttgggaagaactgagatctcttgaacagtcccttcgcatttaatgctgcatgggggaagacgtattgaaatttccataaaggacatgacagatggcgtaacccccgttttttagctattacactataatcaataaggctagtgacgacttctttatgaggaatcacatcaatcaagaggggataaaagattatatccacctaactcctaagatacctacggtataggtcatgtatttcttattttgtatctattgggaatatgtgcccctatgaagctaacacagaaagacaagtgatccattccttgagatcaccccagaaaaacactataaataccccacaaacagactgaaagagggtcgaacattctgggcttaaaggaaccaaagagagaaaatatgagagaaatccaccaagaacattctctgtaataaatactctcattaataaccaagactcctggactaaggctcattaatgtcccaaccacgtaaaaatcccatgcattaaattttctacagctcttcttatatattacttaactggttgccgaaaacatcggtcaacagttatgtatgataaaatcgaattaaaatacacaaaataagtgaataacttcaatcaaattataattagtctagtgtcgtgtaagttcagtcaataataataatagtacacaccttacttcaattggaaagaaaacaccttttgttatattttctgaagacaaaagatatatagtggtagttcgattaatataatcaaattcatatttataattttctttttttggaaaaagttcacaacaatattgattttatgtaattcatatcgtagagtgttatacccgaaatttgactgtacttcagaaagtgacacgtgtcaatctcgtgaaatgtgaaccaacagatataataatgattatatcattaaatgcaaaatggaataactcattaaatatggaattaatagaatatattcataactcgctgactgtatagtcttaagcaagacacggatacacaaactatcaattcgtgtattgacgagaaaccatcttgcctcggaaggcataatcccgagggagctacaaacagtgcatagcaagacacctaactcgctacatgtaagaagatattgacgaggaaaatcggctgttgaaacacttagcgtataatataataattaagtataacaactggaaacatggaggacatgattgtatagtctgcaaggccttatggtcaaacaacagctcttaagtttgctcagaacactggtgctcatcccattgctggaatacacataggtcaagtcattcattcatctatgtacaaagcgagatgcctctagcgagatgctcctatcccacgtccatgtccactacttcaaagatgagaataacaaactgttatacgaatttttagctatacacgtgttaaaataggacgtggtcaaagtccacgtttcatggaaacagttatgtatttcaaattcaaatgtaaataattgcctacctatattcatataaataggggcagattatacagaaagagggacaaaaaatctttgagaggaaaaagatcactgattgtaaaac

SEQ ID NO: 315533 - DNA, 1157 bp, Cannabis indica
tagactggctcgggaatcaaacctagcaacatctaaacaagtaccgtttcgaccaaaaatgataacccaggaacctctagttcaaagaggaaagacgactctaagggtgagctaaagacaagaagaagcaaaagatgcacgacaagtatgtgccgatctacaccatttacatcgagcttaatgaaactcgagaaaacatttatcttgcgcatgagcccagggtggcatttcgtaaacctaagcccatgagtcatgcaagacataagagagatgcaaccaaattttgtaaataccataaagtcatcgagcatacgacagacaaatgccgtcaactgaaggatgagatagagagtctcatcgcgtgaggtcacttcaagcaatatatgaaaagatatggcaatggacataactagcccaatccgaccaataatctaggcaactaggggttacaacctcttcctcttgaaggagaggatatcctggttatctcgggagggccaaatattgcaggagtgagcaataatgctcaaaagaggtatgtgaagaagtaaaacatgagtagactgaagaacctccaattatattcttggaggaagatgaaaaagacgtgaggtattttcatatcgacccattggtaatcaccatctagctcgccaacaagaggataaaaagggtgctaatggaccacggaagttcagtgaacatcctttatagggaaacaatgaagaagatggggcttgaaaaagctaaattaagacctttcatggtaaatctttgcgactttatagatgatagtgtcatcagtcaagtaataatcgagctcccattaaatttgggcgaagcacctttatccattataataatacaagattttttagtggtcgacctaccgttagcttacaatatactgctgggtcgaccaacattaatcagactaggggcagttaggttggttaagcacttacccttcaagttttaaacaccaatgggtgtgtgattagtgcgaggtgatcaaatgctagctcacaaatgctatcgcatagagttacagcacagaaaagttggtcaccaactaatggcaatcttgactaaagaaggcgagaagaaggatgtgttgggttttgtgccctaagtaaaacccattacaatctgattag

SEQ ID NO: 315534 - DNA, 717 bp, Cannabis indica
taacattgcttggttgaaatgggatagggacctaaaccaaagaacgtcgaacaaatttatattcacaaagagaagactaatttttccaatgaattttattcctataaccgaaagaaccccaccaaaagttagccactagcgactcaatcttttgacaagtatctattggaattttaaaacaagacatgacaaaagaagggatagcctaaattacagctttcaacaaaacttccttaccttccttaaaagaacatttacaattccaagagttagaaaggattttaactttgttccataataaaattaaaagagtatttcttagatctaccaaaacgctgaggaaggcctaagtaattacttataaatgtttgttatccaatcctaaggtatctaaaaaggattgagacacataatcaagggtgttaagggaaaaaagggcaaaggacttattaaaattcacaagttgagctgaagccctattatagcaaagtaaaacttaatagtaacactagaataaaaatcaaccatagaaaactgtaaactaccatcgacaaatataaggttagaaatttcaatagcatacctagagattttaatacagttaagcaagccctcaactttcttaaatattaaggcatcaataagaccctcatacaaagcagcaagagatatggtgataaatggtcaccctgcctaattgttagaaattattttacc

SEQ ID NO: 315535 - DNA, 2524 bp, Cannabis indica
ttgcacggtgctagtgcaaagctgctggtgcagaagtagaaacaacctgtatatgttgctgatttgcacggtgctggtgcagaagtagtcgaagcagggtgctgatgttaagcagctcgataattctgaatccaaacagaggcaaaggtggctaaattctgagctattcgtgcttttaaaccatgaaccactttctttcgttccgtccaaatggcccacattgtacaaaaatttgttccatctccaattttgtgtatgttgttgaaagatgtaacaagtaatctccactacacatcgatgtacatgcgttccaattgaacataaagttttgatctctccaaacaaccttggcatatttacaactaaaaagagcatgtcccgttgattcccaagcttgtctacagatggagcaagtccaatcggtaatgatcttccttcgaacaagtgaagtagccactggtaaagcgtctcgaatgactcgccaagcgaagatcttgactttttgtgggatttgtagggaccaaaagaatttccaccatgactggggtgtcgaggagctagagccaaggtcttcatcttcaagggaggttgcaaaatgatagccactttgtactgtataaataccagagttatgatgatgccagataagtttatcattggggctgaagtaactcaaaggtatagtgacgatcttctcaacatcaatcggacaaaaaacctcttgcaacatgggaacatttcactgcctgtcctccgtaatgaaatttgctacaacattgtttgaagaaccaatgtatcttgttgggagaaaagtagtatgactagggatccaaggatcagaagcacattttacagaacgaccctcgccaatttttcatctcaatcctttgatcaaaagatcacgaccccatttaatgccttgccaagttaacgaaggtgagtgacccattcgtgcctctagaaaggtgttatgagggtagtacctgcttttgagtaattgtccaagcagggagtgtggattttcaacaaggcgccatgcttgcttagctaatagagcttgattgaaatggataaaagaccgaaatcccattccgccctcgccctttgtcttacatagcaaattctaagagcgccaatggattttggatccattctcatttataccccaccaaaaattagccatcatactctcaagtagtttgcaaaaataacccggtagccgaaagcaactcatagcataggttgggatagattgaacaacagccttgagaaggttttctctaccaccgactgaaaagatcttttcactccaagaatgcataagtttccatattcgttcctttatattgctgacgagttctttcttgtctcttcccgaataagatggtaaaccaagatatctttcatgacactcactgattggcatggagagatgtcgatggaagaacacttgagctgccaaagtagtatttggagaaaaagacaacacagatttatcaggatttagaacttgacctgaagcacgatgatatgtgtctaaaaccctcttgatggcaaggcatgagctttcattagcttgacaaaatagaagactatcatcggcaaagagtaagtgggaaatggatggggcacgccttgtgagtttgaagccatgtagattaccaatactctcttcatgttgtagcagcctagacaagcccacagcacaaatcaaaaagagatacggagataaggggaagccttggcgtaagcctcttgtaggaattaaattaccagtgacttcaccattaattagaaaggagaagctatttgtagtgaggcagcccatgataagcgtaatccaaccatcagcaaagcccattctatgcataacttcttcaatgaatctccattcaactctgtcaaaagccttgctcatgtccaactttatggatgcaatgccattatgtcctgatgttttattcttaattgcgtggaccaattcaaaggcaaccaaaatgttatccgtgatcaatcgattaggcaaaaaggcattttgcgtatcagatatgaccaaagggaggacttccttaaaccgagctacaagtatcttggtgaccattttggaaatgacgttgcaaaggcttattagtctgaagtccttcatgcattgaggtttcttgatttttggaatgagagtgatgattgtacggttgaaaattgtagggtcggccccattgttcaaaatactaagcacgacttgaataacaagtttaccaacaattgaccacttttgttgatagaacattgctgacatcccgtcaattcccagactcttatccgagcccatgttcttgagggttgtttcaacttcggtagcagtgaaaggaacaagaagtaaagcattatgtgcatctgaaaccaggttgatggggatgcattccaaggtagttgcaagagccgagttatcaatgtcaccagcttggaaaatatcagcaaagtaatcttgaataaccaaagaaatttctgcattggatcgcacttt

SEQ ID NO: 315536 - DNA, 3008 bp, Cannabis indica
ttgggttggattggatcgtgcggattggattggatcggatactttgtgaacacccctaaaaaaaaattcccactcccataataaaaagtgaattgtagttgataagtattacacgattgtgataaagactttgtagatgattataaaaatcaaatcacttgaattatatattaatatacgttttgacgttcctctcaaaaacaaactaattctagttaaatacagcttttagtttaactcatataattgtataatatttctttcatgattatttttataaataattcatgattgtgccaaaaaaaaaagtgaaatataacttcgtaacggccattaattgatggattatgaacttaattacagagtattgcaattaaatacatgtggtgttttgaaaataataacgaatgatattctattaaattaaatcatgtacgctcaacatttaattctgctaataacgataatataatgtaagtagttgagaattaattactacctttatacttaactaacggttaattaacaagttagttagactttgtttgacaattgtactttcagctataattgttattaactaatttttgtaaaaatttctataaataagagatcaaaaggccaattaattgattgaacattcttcagtcattttattcatctccttctcattctatctctctttttcttccttagctcaagaacctcaagttttacaaagttcttttatggtatcagagtcatatctaacaatagcaatccatcaattagattccactagtggaagttcaacctacaagaagagatccactagcagaagaaagatttgctcagcgaaattcaccaatcaaagctcaacttgttcttcctaacaccaatcttcttcctttgaatctcagattggattaaacaaactacacaatctggaggtctctttctcttgctgctactcttgcgtatgagctagatcaatatattcttagcctgaatccaccaccactgaatcgtaggacccaatccacataactttcctcttttgcatgcatctcgaggaaatatggaatataacaacctccttagaggagacatgcgagttcatgccaagaatgatgcaaatcttgcattgagtagtcaaaatgtgccacacatgacgatcatgacccatctctgcgaccacctcatgttccaagaaatataggggtcgatgtcgagaaaaaaggggagaaccctcattgagaaaggcgacaacctactcaagaggcgagttacccttcaaggtgacaagctaccaccacatattcccaactgggggcacacgaaaatcatcaacaaactttcctcaaatatagtgacagcaccgattcgttaaattgctccataagtatttatgatgacattcaatcttggtcctatcaagcacattccactaatcctcaatacctgggggaaagaccaagtgaaaatatatatatatgggcatctccaaagagaagatctccatttaaaatatccttatgttggtaaccgtaccaacatccctccttttcaaggagccaatcctcatgttggtaaccgcaccaacattcctccttttcaaggagccaatcctcatgttggtaaccgcaccaacattcctcctcatcaaggagccactccacatgttggtaatcattccaacaattctcctctccctacaagagttgattgtggtataccaaatggaaatcctcgcataacattacttaagaaataactccaaaaacttttaaataacaataaactgaagaagtatgaatttgatgaaaaaacaaagcccttttgtaccttatatcttggcattatcttaccctccagagtttgaaatgccaactacaaccaagtatgatgggaccactgaccctagggtccacataagtgacttcaatactctcatgcaagcacacgaagttgttagagatttaaaatgtgtgttattccctgctaccttatttggagacatcctcgtggttcaaaaagtttaaaagacactctattactctatagtgtcatgggaccaactctcagatgctttcaaaaaggagtttcgagccgtgagaacctgcaagcttgaatgttcctccttggccaacgtgagacaattgctaagagatagtttgaaggcctacatcaactgcttcaacattgaagttaccaaaactcatggcatcgacgatagtgcaagaatgatggcactaggggcaagtattgcctatggttccatattttggaacaaccttcaaggcaagagcgcgcgcaccaatgacgaattcatgaagcggacacaaaaatacatcaacattgaagaggtgaggatagcaaacaacctccctctctaatccttatagcccgctcaacccgcattagccctgccagaacttactaatgccactatggctgctaactcttttagacaacagcaaaagagaaggcatagatgacaaggaccaaagtcccaagaagagtaggagtgatggcccttatcaccctctgtatttagtctacactgagttgacagaaacccaagaggccatctatgtggcgaatgagcatcgagttccattatgagttcctaaacccatgaagcatgatagagccaagagagatgctcaagatattgtcaataccataaggacatcgaccacacaaccaatgggtgtcgaaacctcaaagatgaaattgagactctggtacttaatgagacacttacccattatgtacaacataattttcaaggagcacatgtcaactaactgaaactctaccaatagagcgagaaggcatttaacatttcttgagtttttctaccttatttttgttaagaatattctaccaggatctagattaactaacaagtatgttgattaacactctaaatatgaattctctaaaataataaaataaacacataagggttaagaaaccttacattagttaaagcggaatataatgactcctttcattcaagatct

SEQ ID NO: 315537 - DNA, 1690 bp, Cannabis indica
tatatatatatatagtctttattgcttttattgttgtgttatagatttgtatggcattctgaatattattttgaaaatagattaagcaaaagaaatatcaatacaaaaaggatgagcagtatgtctctgaattagtcaaacaagtcaaatctagttgaacttgaaggagtttttttttttctttctttctttctttccagaatatgtagatttacttttatgctcaggttaacccctaatccggtgtggtttcttttttctcgactcctaatcccatgtttggtcgtctttttctttgttactggacatggtgcgtctgatggtttaggttttatgttcctttttgttgttagcatacatatttctttcaagccttttctgagtttcattactttaatgcactagttttttcattctctatcctgatccccttagatccaaatcattttaagacttgttccttgtatgaatatcattgcttagtgaaatcctactgtctacctgtatacttaatttattagtcctatagcatcaagatgtaaactccggttatgatatctttttacaactgtcggattattgcactgcagtatattcaatactgaattggggatttctgcttgttgagcgcagatgggagaagaagtagaccctactctactcttgatgccaacatgtaattattttccttgctttggggtttgaggagaagaggaagggggttcagcttgtgatatatgaatgtgtttttatcgatatggtatgcttttatgctgtgggaaagagtgtatttactcatatggtgtaagagatcttagattcacaagttacttacctttcttaggacttagttaagtggtcagattgtcgttgattgtatatatgactaacttttatttcatgtttttctttttcctcgttgataatcagctttagcttattattatcagtactagctgatatagttagtactgactattaacacctcttagcacggttattttgttgtatattttttttaacctgatttttggtgtgatctaaaaatcaacttatccattacaatgtttggtttgttgtaatgggaattgtagtggaatcaacttatctattacaatgtttgttttgcttttaaaaatgatgtaataggattacattataatcataattacattatataagggaattcctattacattagaaaggtgtgtaatgaggattacattacaaaagactaaataaagtaaagctaaaatgactctaatacatttttttatataaatataaaaattataagaataattttgtcaatttatcattcattctaatattcatttcaataacaaaccaaacatgttaatcaattcccattacgattcttattctattacattactattaccattaccattactattacattccatcaaaccaaacatcacttaagattatctcgatgaaaaacacacagctaagagaatgtcctaaaaccacatgatagctttagaatagctagtatttacatacaaattgtgtatgtaaatactagctattattcaatggaacgatagctttagaattaaattgagtattattcaatagaatagctagtatttacatacgaatttagagacttaaaaaaaaagaaactagtaaagaaataggaaattaagggccagtttggcacaac

SEQ ID NO: 315538 - DNA, 944 bp, Cannabis indica
aaagagttttatttagggcataaaacccaacaccatgacccagtcaagggctggccagggaacttaagcctaggcattggctgacctgactttaaggtaccccctatggccactgaggtcttaaacaagaccctttatggcaggccaacgtgtgttacagatcaaagtgtacatttttcaacaactcaaacatgttcttcatgactcaaagagtgaagaattacaatgaaggtcaaaatcaaatcttttttgtcaggaaatcacacattatacatcctaaaactatcatgcggatcaaaataccaaaaagattaaaatataatgtgggagtcaaaaaatatttacagcgaaaaaggcttcaaataaccacggaaaaatcaaataaataagtgaatagccggatttgaaagcataccactactgaaaaccattgatgaagaagatggaaaacttgaatcgtcaaaatggctcaaaaatatcaggagatggagcactatgggcatcaacctctagggagaaggaagagctttcaagagttactacttgtcgagagattgaaatgtgggaagtgagaagtgattttcctcccataagcttatataactatcgtgggaccccttttcacttgccatgcaaagtgtaactaaaaaacatgtagaagggtaatgcaattaacttactcctaagaatgtgatcaaacatccaagaacaagtattccaaagactaattatgggatatttagttaaatatataaccttaaaaacttttttattagctaagtaaccttcatttttaaaaatttagctacactaaccttctcttttaatgaaacttttatatctcaataataccctttatcattttatatttatttttaatttaaaaataaaaaacctgtatcataaaaaaaaagctctctccacatggtgctttcatgctcttc

SEQ ID NO: 315539 - DNA, 629 bp, Cannabis indica
gagaaattgtttgatcccaaggcactacagttcacattggaaaagcatataagaatctcaaaataaccaattatgctgataaaaaaattagcttgtcaaatcgaataagtcagacataaaatatcttaaagttttggcctcacacaagttcatcttggtttttaaactaactacatcgttctctccctaaactttaccaaatcagtatcactgaaccatgaactttttcaagtataatgttttccagttgaacatagaactccacatagtaaatagaaattagttcaaataattttggtatcactgaaatttaaatgcaagcttcagcacattagcctcttttaaatcataaacaaagattacaccatagactaagttatcccctctaatgacactgttttgtttcatctattatataacaaaaaatttcttcacaaaccacagcattatcaaactcaaaacagtattgaactgataatttccaacagagacttggacttaaatatagaacagaatagttcaattcttacatcataaataaatccttgaggttcccaagctcctttggaattggcccactgaatgcattgtgggagacagacctgaaatttaaccaaaaacaaatatgt

SEQ ID NO: 315540 - DNA, 2012 bp, Cannabis indica
aatccatttcttaattccgggtattacacttgtaatattttgtaaaatatttttgggatcccgaaacatgtaattttagttgtaaagttaaagttatcacaagtgtttattttttttctttctattatcgtttaaagtttaaaattcccatgcttttctatatagtaatccgtttaagggattagggttcttaatcatcttggatagcgtgcctaatatttagggcgttacagtgctactacccaccccattgatgggcacactaaccagagaactcataataacaccatgcaataacgacgttcctccccaaaatgatccactaagggtgcatgataggtcaattcttatcggcccatacggccaacctcttatcaacccaagagagaagttggccggacacaggacgaccagagttgatcctgtagtacaagcacagttggatcaactcaagagccttgtacaagtcttgtccgacctggaacttgacagggctaaaggatcacctttctctacacgtattaacacgttgcccctatcaacaaagttcaagatgccaacttagaaaatgtacactaggaagaagatcctttggcccatatcaaatactttgagttccagatgaatctgcaaggggttataaatgatgttcgttgcaggatttttcctataaccttgtcttacaccgcatagcagtggtattttaagctgtccccagggagatttgattcttgggacgctttcatcgctaagttttacacacagtttttgtcctcttgatagataccttcccaattggaagacttagttgaaataagataaaggtcaggagaacctttgaaagattatatccaaaggttcatgaacgaggccacaaaggtcaaaggcttgacgaaagaatctactacgaggcttcaaactagcttataaatcttgagaagtcgatgtgagctttggtaaattgatctatattgatgagtatactaaaaatggagaatacatgtgagaagcagttacaagttgccatgaatttaataaaaaaagctgagacttcggatactaagaaagccaatgagagtagttctcaaaatcaaatatttttttagaatttggtcactcgtggcttcccactaatcgtgttctattttgcaagaaagttacacatgatcacaaccgttttatggcatgtttactaataagcaatgagaattaatggtaagagagtcattcccttatatttgtttatttaatttattaaatttagaaaatggagaacttgattaaataaggaaaaaaaaaaagagaacttctcccatcaattttttaagaaatgccattaatggtgtgtttactaaactgtaactcgaattcagaataatcaataagagaaatgaatcagtttaaaatagaaaataatcagaaacaatattttattatgttgttttgctaaactatctgaaaagaaaatcagaatcatattattttgtttacataactaggaaaggtaatcaaaatgctttaatttgataaaattgctattatttaaacatgtaattattgtttgtttataaatttaaaagggcacatttgtctttttttttaatttttaattaataaaataaaaataagttaggaaagagaaatgtattccctataaaaatgggggagaaccttttcctttattttctcatggaccccactactttctccctttccaaaatttagtaaacaattgtatgagaatcaataccataccatcaattcccattctctttaagtaaacatgccctaagggtaatggattatattttttaggaatattggcggctaaaccacctaaactttacggtttgtaacacttaaccacaaaaactgaaattttggcggcataactacctaaaccctggttccattttgctctgcacacttccgtccaaaaatcacagttaagtgccatggtggactgtccacatgtacacacttgtacacgtgacaagtttttagtggtccac

SEQ ID NO: 315541 - DNA, 1633 bp, Cannabis indica
ctcaaaactaattggtgatgaatggagtagcccatgttcttatatatgactcaatacttttacatttaatccatgtgggataatgttctccaatagagcaaaaatggactgtgcaaattctttgccaaatttgatgtccagtttagaaaaattatctggtttaacaagagatcatgttggtgatcctcacttgtacaaaagcttgattgaagctcttcagtatgcagtcatcacaacaccagaaataacatatgatgtcaacaaagtttcatagtttatgcataatcttcttacacctcatttcaaaacagtcatcaagaaaattccaaagtatctaaaaggtacacttgactatggcctgcacttaaggtcttgatccaaactggttctcacatggttctgtgatgttgattgggcatctgaccctgatgatagaagattaacttctggtttccgcatcaatctaggttctaatctagtttcatggagctctgtaagataaagagaaagagggaaagagagaaaacaaagctttgaacagagaaagaagaatttgttattgattgattagttttggattaaaagaggtttgatatttatacaattagagaataacaactaaccaacaactaatcttaactaaccacccaactgtcaagactcgcagtgcttaatagtattaacagatttaactaactcatctcccttaatagcccccttcaaactcagggaggtaagataaaccacactgagtttggatttgaattcgttgaacttgctgctgcttataggcttggtaaaaaaatcagcaatttgagcagaagcagggacatgtttaacctgaatgtgttgttgtagaactttgtctcgaacaaagtataaatcaattttaatgtgctttgttctggcgtgcaaaacagggttagcagccaacaaccgtgctttgattatcacgccatatagaaggagaggcagggattcgaatttgtagttcttgcaacaaatattggatccatacaacttttgtgacagcactggccagacttcgaaactctgcctctgtggatgatctggagattgtcacttgtttttgggatttccaagcaatgagattaccaccaaagtatacacagtagcctatagtcaattttcgatcatccaaatcagatgctcagtcagcatcacaaaatgcatctaaagcaaaatcttaagctggtttaatgtacaagccatgatcaagagtacaagcaatgtatctcaatattcttttaacagtagtccagtgagattgcaaaggagattgcatgtactggcatactttgttgacatagtatgagagttcaagtcttgtgatcgttgcatattgaagggcaccaactatggacctgtaaagagtagtgtcaggagcgggttcactgccatagtttgacaactttaagccactattcataggagttgattgagggtttacattctgcatgccagcttgggtgaggagatcttaaaggtatttggtttcggatagatggataccagcagcagtttgggtaacctgtatccctagaaaatagtcagccaagccaagatctttaagagcaaattaggtgctcagataagtgacaatagatataac

SEQ ID NO: 315542 - DNA, 1003 bp, Cannabis indica
atcaaggaagtagtgggagtgaacataaaatatgctggaatccttgaaggtttacaaggagacacttttgccaacatctgcttatccaacattcatcttagtataaccaccacctcagaaacatcttcctggaactgctctaacattcaaggatattccaacttagtatctccaaaaatttgtgagccgctccaggagagaatctaccctgagcatcacttagattgttatcgtctatcaaatcacttgtggagtccaattcgtcgaaaagggttgctcagtttctccattgataaattgatgacagagaatatgccatcttctgtgcattttccagtttaagttgaaatttttattcttgtgatctcttaacacaagcaaacatggcctagctgaagtacagtaggccgacataaagttgagtggagttgtgagtttttgttgctagttatagtactgagatatgattgtttcttgtaactttgtgtgcagtgacagataatttgagtgatatatcaaaattttggaaatagaaatgagtttaggcttctctttcttgatttttttaagctatagaaagattttggtggtttgtctttcaattgtaatgtaaaaaacagtctttcttcttcaatcattaatactatttgtacatcgatttcctgcatatcatgaacactatttgtacatctaaaatgcttcaatcatgagaatagcatttttattttgttcttcactttatgaccgtagaaggtttgaggaacaaaacaatgaatttactcattctagtttgtaaagtacgcatttatcaatcttaaaaagcaacaacatatatgtaatacagcatggaaatgttacatgcatgttttgactcgttaagatataaagaaagtattcacacaacgatacaagggactatttctcttaggctgagaatccatactgtaaagtctttttttggcaagttagttgacaaaataatttttccatttatggtaagatt

SEQ ID NO: 315543 - DNA, 921 bp, Cannabis indica
aaaactaatatttatgtggctcgccacgtaactctcatatagtatatttatatatatatatatatgattatgtgaataaattctatgattgataggatcatactgctaatgatgagattcatgatctaacgttggataaattccccacaaataaattaagagtatttttgccttaaaaggtttcacatgtactaactcatttataatgtttcttgcttaatatgtttgaaatatcaattagatgttgttggttgactttaattaataatgcttttattaaattaactaaataaaaaatctacaaacgagtgatgtttttttatatcaaaatattttgtatacatagtatcaactaagcatgaattatttttttttttctcttgaatgtatggattacatatttatttccataaaataaaaagagttatttttttttcttaaaaaaatgtttcaataaaaaattaatacatatatttatggaaagaaaagtatttttaaaaggtttatgataaataatagagcattgctatcaaatgctatggtacctaacaatagcatcaaaaggttgagtcttataattgattagaaatttttataataaattttaaaaataattgaaatctaatatcaaattgtaccagtaacaatctgatacctcataaaggtgttaggcacataagtgtctttaaacagttctctaaataataagttaataactattagattaaaatgttgaattcacaataatgataacttgtaatagtactaggtaccaccgatgtcttttaaacagttccttaatgtttattggaaaatttacaaaatttaactaaaaagttgttttttaaaacttttttattgggattagcatttttttttatttttattctttttcttttcttatttacatttttacgaggt

SEQ ID NO: 315544 - DNA, 2701 bp, Cannabis indica
tttctcgaaacagtgaggattttccattgacccaatgattattggagaaatgcatgctctttgggacactggagactccttagctgtttctagagatacgctgctagttggatatgcgcgatgtagtcgcatgttgtgattggtcagattccttgaaatgttgggtgtttcccagtaactccatggtcatgctcaagaacgcatgctccttgggtcactgggaaactcccagccattttttgaggcactctatcagtcgcacatgtgcgacttacaccttgggagagttggctggatttctcgaaatgatgggtgtgtctcaataccttaatactcatgtaatcgacatggtcattaggttattgagagacacccagccatttctttaggggccgagctaaccttctaaaatttttaagttgtgtttttcgtgcgggtgaggtcatttatattattctcgcactttcaccacactgaaaagatcttctatctttcagatgagtgacctgtcggatagccaaatgctcgactcaggaggtggtgcttttgctgacgagcaggataaagaagatagctttataccagcttcactctctgaagaagaaacccctatcgccaaaactgcgactttaggcccgttatcttccgaagacatagaaagaatggttcaggaactcgctaaaccaaggacaatccagattcgccatagcgaatccacggtgtctgcccgtgaacacctcgttcactcctggcatgcccccgacatcgaagtcgaggaaatgggggaagattgggagattcctgactgtgagtcaggagaagaggaagatgccgagggaagcgggacagattcagtggacaatacccagctgaacgaacccttctcatgcgaggatctagtcttgtgggttaccaaatctgacctcaatacatttacgaggttgactttgctgcgactcggtaccatgtgtccttgctctactcaaaggttgcatcttcccttcaccaatcctgtgataatccccacagaggatgtggttgtctctatacccattcttcgatgtggggtgtcgatacctttctatccatttattactactatcctcaagcgatatgatgtttctccttttcagttaaccccaaacagttattgcatagcccttgggttttatgcgatgtacatggagtatgcgcgaagggagccctcgatggaggacttcaactacttctatgatataaaaaacgtgggccacgacaatggcttctactgtttcagcaagtgggccacttctaaaattaatggggtagaaggcatggtttccaatatgggggattggaaattcagggtaggaataagtctggcggccacctctgccttggttcccatgaaatctcttactctaatttgagctgcctgatgtcgaaaaagtttctctcttttgatcaatattagaatcaccaccatccctaccataactagaagtaagaagggtggtggccccaccaacacttagagtccctcggggctcttgcaaaaactccactgcaccttcggctcgaagagtcttctcaaccatcttggcatatgtagtggtgtcattggtagtataaccaaattgtgtttgatcttggaattcaaacctgccaaatatttctctttcttattgaaatctatggatactatacctgaagccagcttagcaagttgatcaaacttagttgtatattcagtcactgatatgttctcttcctgaaccaagtcagtgaactcttttctcttagtactacgaattgccttgttgtaatatttggcattgaatagatcccaaaattcttcccatgtaattctattaatgtcccgagtgagggacaccatttccaccacacgaaggcatcctcctagactaaaatgtggcacaggttacccggtcattactggtgacacccataaaaatttaggattcttttaattactattagccactgctcgaccttcgtgacattaggacctcccagaaaggctagaggcatctatttgcggaattcctcatacagtggcgccatgcggttaccaacaataggttgttctactggcaccactagaactaaagcgggtggcactagttgaggaggcatagttggaggaccctattgtctcagcctctaaatctcttcatctttctaattaatttgggcttgcatttctgcaaacctttactcccaatcttgaggagcctgtggtagatgttcataacaacctccttgaaatctaccacgacctctaccgcgtccacggggatgtggaggagtttgacctcctcgaccgcctttggtctcaactatattgccttgccttcttgttttttattgggcgtttatacaataggatttagcctgaaaacccataagtcaggtaggtcagacagcgatcacatacaatcaaaatacaacatacatggaattttaggcaacacattattcaaccaacatattgttggaattattttaccagaatctagatttactaacaagtatgtttcattaacatcctaatatgaatttctaaaaataatgaaataaacacataagggtttaagaaaaccttacaattgggtgcaacgaattcagctttcgtatcatgagtcatcaactcaaatccctataactcagagatcaatttacgtggatacgacatacacac

SEQ ID NO: 315545 - DNA, 558 bp, Cannabis indica
tgaacatagaagaatagaagcaatttgatataatggaaactagaaagtaacattcatcaatgaaattaaaaatccatgtctcgagttttaaaataacccttaactaaaaaaaactacccgaaactagacattataatcaaaaattataataaatagtaagaatttaaggagaaaaaaagaactatgatcaagaacactcgaagtcgcaatcttcgtcttttccttgtttctctctgagtttcgctctcaattttgtagcttagaaattctaaaatccgtagcctaaaaagtcctatttataatgcttgaaaatatctcactaaaaaaagatatctctctgtagaaaaagataaaatttttgaaattgcccagaaatcacctcctccctgcagccccaagtagcctcgccacagccatgacgtcctgctgaaaaatttcgatcacgctatttgtattttggctataacttctttaatataacttagaattgacgattcaagatgtaaagcccgcttagttaatttggaaattaggagttgtttatgtttaattatgaaa

SEQ ID NO: 315546 - DNA, 503 bp, Cannabis indica
gccgccaaaaattcagtttttgtggttaagtgttacaaactgtaaagtttaggtggtttagccgccaatatccctacaaaatattattcaacgttcacagtttaataacaaccagttttgtgatcgtttgtcataaataggtttatccaacagtaatatttgacatttaatatataatattagaaaaaagaaaaaaaaaacaaaagcaacttattgttcacacaatatacaatattttattatcacttaattaattaaacgacagatacatttaatatataatatatatgggcaatatatacatatatatatataatcagtatcaacacgtacaattgcaatcaaaataaacagaaaaaacacagtacgtagctaggcccgcaacgtacttacttccttattgataaacgtacttacttccttgataagaaagtaaatatatctttggcatcataactaaaaatactatttttgtttttaaaaacagaaaattatttttaaaa

SEQ ID NO: 315547 - DNA, 1208 bp, Cannabis indica
cgaagtaagtactttaacgttacgtactagtagtactactctctctctctctctctctctctatatatatatatatatagagagagaaatattaaagggcactagtggtgcctaatacctttctacatgtcaatatcgctattggtccaactaagtatcaggtcccatataatttaatataatagcttttaaaaagtatatgcgacatatcgagaagatgctaggcaccactagtacctaatagcaattcttatataaaaacggttaaggacttttaaaagttactttttgactgctcgaaaaacatttttaacataagtcaactttagtagatttttccaaaaagagcttctaagaaagcaaagccccccctactatcattaattatttttatttttcaaattttagaattaatttaacttttgtttattgttgctatatatatatatatatacagacatggagaaattggagagaaggaaatgtttcaaatatagtagatccattaatgagaggtggatcaagatatgaaataatgagatgtattcacataggattattgtgtgttcaagaaaatatgacagatagaccaactatgaatgctattgttctcatgttaaatagtgactctctttctctctcagtgcccttagagccagctttctttatacataccaatggcaacatcgttggaccagaaatgtcgtttccatttgacttcagttcaagagaaattgaatcatcatcagatcaatcaaaacctaaccctaataatatatccattaatgaaatttcaattactgaactctaccctcgataatctaatgatattgttgttggtagaagcttagatttctacttatgaaaaatatcattggtgtgaggtgttgttcaatttctttattattttcatgttagtaagtgtatggttagtacacagatgttaatacaaatcaattgttaaagcgttgatatttcttatatttatttatatttataaaagatattacttattttgtttttctttattgtaatttaaagtgatttttttaagaaattacacaaagtataggaaaatttacatgatatactgacttttattattttttgtaaaaatactgcaagatagtattttttacgtacttttttactgtgtatttttataagttttatattgcagtatactgtatttattttttagttttttt

SEQ ID NO: 315548 - DNA, 1322 bp, Cannabis indica
ggtagcgaatttcgcaaaaaccgacgctgaaagggcttaaaaaccgcctctaaagggagttttgtagtagtgtttggttagattggagcccaacaagctccattgataagagcaagatgttagattattgccattggatattagctagtcatgatacgaatatagcaatcattgttatattaggctattagctttgacaagcttggataatagaacagattgctttttaaaattacaagaaaattgaacttatatggaaatattcaaacttcaaactttacttcttatcattagaatctttccctccttttctatgcttgtgcttgattttttgttcaataaatatttagcctttctaaattctgtaaagacatgttgtgaattctgatagggaagtgcatacctatcacaaggggtggtggcatttatcaagaacacatgaatgaaactcttgagaaattagatatactggagcatgggtaggtattcacttctattctcatatttcagagaaggtcatcactaatctcttactctttttatttaaaagtaagttgaccaagtgtaagctaggctcttattgatagtgattttcttacatgagtcctttcttgatcatagacatttagcttaggcttataatttaattatcaataatgtgtgcttattaaagttgcgaaccaccgcggcagtcacctgtcaaaggataattagactcacaactgataaacaatccactatcagtgagttcagagtaaagccatatactttcttgggcatttcttgatggcgatggcgacactctcttttggtaaattaacagctattagccaaccttgttcattgttttttttagttcttgggaagtaagttagctgctccttttcactgtttacattcattttgtaaccggcacttcaattttgcaaggatttcttgtctaaccggcacttaaactgttttgtttattattatgaggcaaggggccaataaccaattaagagctttgagctataacttaccatactattgtttccctaatgtggcattatgaatattaacttctctttttttctatttcctgctgctgcctaattgttttctgtgttactcactgcgacatagaaaagaataaggagaataatgttgggctgtgtgtgctttttactttattctgccagttgatgtagcataatgagagaatattcatcacaagttgttagcctaagagtccctaagagtcaacttgcgaaatgaatgaaataaaagagaagattttcccccagtttatttggcttttagccattgttaattacttgcga

SEQ ID NO: 315549 - DNA, 679 bp, Cannabis indica
taaacaactgctaatttccaaattaactaagcgggctttacatatatactcatttaagggctgatattttatttgtttttaaaattattaaactgacacaacttgaggctatattataggagcagtacacacttaaactataatcaccattctctctcttaatttttttgaaaaattaactcaattttgaatattactatttatatgctagtgtaattacttaatttaattatatattttggttgaaatgcctttcttgtagtaatactattttatttaaatagaggtttttttttattttaaaaaaggataataaaatagaaattttgtagttacatggcttatcatttaatttagtttacaagaaatttataataccaattactaatttttatttatttttaaaaatattagacatgagattataatttattttatttttttaaatatgtaatataatgtgttttaatttcatctaaacgattgtacaactatataaagtagaaattatgtattttatgggtattttttataatatctgcaaaaatactattttatggtactgttaaaaaaaatatgagaagaacatcattaaataattagtagtagttatttattgttcattaattgggtaaaataattaggtattttttataatatctgcaaaaatactatttta

SEQ ID NO: 315550 - DNA, 680 bp, Cannabis indica
aaaaaaaaaaaaagtcatagataacaatttcatcaaaataagcgaaaaaacagtagtagcctaatggtaaagtttagaattttaccttagattatttgcagagaagattgggagtattcaatggattaaataaaagaggaatgaagtaaaagtgtgtgattttcaaatgctctttttaattataatttatatgaatttggaaaccgacctctctcccgcccatttacatcaccactcactatcattctccaatcaaactttattgcagttatttagaaaaaatatgtttttagatattcccttattttagcaactaatttgacttaattgattcttttgtagttaatttatatactattgcaactagcactctaacttaaattgcaacaaaaaaatcgtatagaaaccctattgcaattagcgctaaaaaaaaattaaaaaaaatagtatatagaataatttcttattttttatgtatttatataaatagaaacagcataatctcaaaatgaaaacaacataatatcgaaatagaaataatttttataaaatggatatactataacctcaaaatagaaacagcataaccttaaaatgaaatcagcttatataataaaagttgattatattaaaaaataaaattgttgaaaattaagctcatggttctatttttaccattt

SEQ ID NO: 315551 - DNA, 992 bp, Cannabis indica
atataaattatgataatacacaaattcatttgagcaatataaatacacagattattaacaaatacaatacacaataattaatacaatctgtttataaaattaaactaaaataataatatttatttacaatatacaaattttttctatgagaaaaaaaaactaataatgataatgaaaaagataaaaaaaaaaaataacatagaagactacaaacccaaaaaaacctacaaagaaaagaataacaaaaaatcagaataattatcaaaacccaaaagttgtagaatcttcaatcgcccaccactccaaacaaccccaatcgccaactctaacagccacaatcatcttcaatctgaaaaaatagataaattgttccataggatagtgaagcaagaagaaaagaaaagggtttctttgagaaaaataaatagagtgaggttcttctctccggcgaggggttcgtggctaacgacatcggggagacaagggaaccgaagggtggagaccatgggcatttggggcggtggagcagtgggagtcgaagggagaacttcattcgtcatcatcgtgcgcaggcggtgggaggccgggaacgtcgcaggcagtgggaggccgggaacgtcacacgcagtgggaggccgggaacgtcgatctcatcgaaagcttttttttggtgtgtgtgaatctacagccgtaggaagaaagggaatgagagagagagtttgggttttctattgctgctagggtttggtgtctttacattctcaataaaaaagactttatattttactttatcaatgagagagagagagttctgttaaaaaattaggtattttttttttttgaaacaagtatttttgttcatttaggcgtgaaattagagaggcatgctgttctttttttttgttttaaaaaaggccatttattattatttattattaattaagtttgggaactattttaaaattattttaaaatgaactagcaagaacaac

SEQ ID NO: 315552 - DNA, 970 bp, Cannabis indica
caagtaaattctattttaccagaacaatactaactttttccagcacaaaaatgtgctggcaaaagtgatatttcttgtagtgtttattataattgaatattgatgagctaaatactaaaatatatgtgaattttatagttttaattactttcatatcttttttcaatataaacacaattatataaaaaatatttatgagtgttattattatcaaattattagacatttcaatgtgttatgttttcaagctaatctatttgtgcttatgtgtcgtgtcgtgccaaagtttatatttttttcgtgtcattttgtgcctgatgaatgttattttaccacgatctagatttactaacatctatgtttgattataatactataatctaacatcataaatatgaattcttgaaacaatgaaataaacacataaaagttgaagaaaactttacattgattgtagcaaaataatatgactcctcctgttaagatctctaatctaactcttgatcctttctgtcgcaaagtatgatcaagatctgaacttggattctccttcagttaatagaattctatacaatctttcacaatatcttgagtattgacttgaattgtgtaggcaattactcatatactataaagtttcgaaattttgaggaagaaaaggagaggaattcaaaaatcttaatagctctttttattttctatttgtcaaataaaaagaatcaaaaattaggttatgaaaataagatttgtaatgttctatttatagggtagcttttagagttagattttgaattgaaattgaataaaagtagataaaaatagctttattaaatccatcatggttgaaccctatgtgggttatagtagatttcaattttgccattttattgaaactcatctttcttttcacaaatgtcatcttttaattctaactttataaatgttagttctatctatttaataattataa

SEQ ID NO: 315553 - DNA, 660 bp, Cannabis indica
tttatttatttattttgaacagttagttaccctttatttgaaatgaagattttactttcctttttttaacatagataaaataaaaatctagggatggtattttctagtgttttcgactataattaatcctataaatatataataaccttcaaagtatcaaaccctaaaataaagacacattacttcaaattaaagttccaaagtccaaaatcatcaactatggccggtatgcaatattattttttcccaactgatttctactaccctcgaccaccaccaccatccccgccatcacaaccaacgccaccactcgtgacggtggatcatcccccatgtgatcaaaattccgagtcaaaagttatggtccataacaacaacaataggatgatgaagatcatgagtaatgttagtacaagtgagacgaacaagattttaaagagtactaatgtgccctattcatgtttcgagttatgtcgtcctcgattcgcctatagagaagagaagaattcttctcctccttctacgcttgctttgtgttatgctcttaatgtttataattctaaagcacacaacaaatactaagttatacctataattattaggttattattctataggccataattatttgtttatttttgttgttgttgttgttaattg

SEQ ID NO: 315554 - DNA, 792 bp, Cannabis indica
gttatgctcttaatgtttataattctaaagcacacaacaaatactaagttatacctataattattaggttattattctataggccataattatttgtttatttttgttgttgttgttgttaattaggccagttttgattcataatgagtttaataatttgtacttttttttggttttgttttggttactaatatcgttcataatgaattttgaatgttaatctatagttgtatttattgtaaaagaagatttaacaatcaatattcaattcataaaagaaggttgtgtgtgagaaaacaaaattcattattctttatggcaacacaatttaaattaagagttagcacaaatacaaatttattagagattgataaaattttaatatactattattttaaaaaatttatattaaaaatatttttttttatgactcattaaattttaggatcagcaaaattatagagaacaccaaattttatgtgtttttgacatccaattttaacatttttttttatatataatagtgtgcaatgtagttggtgtggacttgcgatgccactaagctttacaaatatggttaccaatttgtaactaaaaattagtaaccaactattgtcataattcaaagttaataaatgtagggttatttgcggcaaaaccccctaaagtaggtaggtttttgcaactaacccccaattctaaaattttggtggtaaaactacctaaaccactagtccgttagcagttagccctttccatccatttttgactattaagtgccaggttggaatg

SEQ ID NO: 315555 - DNA, 1226 bp, Cannabis indica
gataacacataagtaaaacaacaaacactgggttacctcttattcgagaagagatattaagagtgaaaattgaacaaaataaaaaatgaatggtcttaatatttacaatatctaactgaatcagatttacgtcctaagtgcaaacaaatagaccctaaaataccctagctgctgggagatgagaccctaagcacaagttcaccaattttcaccactgatcaaatttgtatttcaagtatttaattaaaacttgaactgtaaaaattcccacctgaaaaacacctctaataaagtttcttagtccatttatttttttatatgatataatatttttaaatggaagcatgcatatataatgttaagatatcaatttttattctaaatttagtatcgatgttgatacaatgataccttgtattggagacgtaatgtactgttaaacgaatcaaatgaatacaaatcaacatttggtaataacatctttcacacggctatgagaattgatatttgtttcacctcattttacacgttagagttgtttcaaaacatttaaactaactaatcaacctaatgggttttgttttttggtacaggaaaggagactcacacccacatatatgtcgttttgtgctcttgggatggtgcttcatcaataatatataggtttaactttctagctagccagcaattgaccttgccaatgaaatcttgtttggggtggtgacaaagagcggtcaaaataatcagctttcccattatttacagtttacaccatacacgtaatcctctacagtcaaactcaaagaaaaatcaactttacgaaatacagtttagaatcatatataccaagctaaatagagccatgactagtttaataattaaaccaatttagaaacgccgtattaagttgtattgtattatattgtattatattgaattggaatatatatatcatatttttatataatactatgttaaactttaatttatactaaaatattatatatttaggtgtccataaaagttaataccacatatagttttacataaaaaatattgtataaaatacaattcaatataataaaatacaatacatacgacctaatacggcgttccaaacgagcccttaatgtataggtgtagtgagggagtgggaccaaaaaatttgtaccttaggacgaaagttaaaaaattattaggagaattgaaaatgtaaaactttatat

SEQ ID NO: 315556 - DNA, 2359 bp, Cannabis indica
aggctaaaaatagcctaatagctccccagcctacagcgcctagtgcccagcgccttagcctacacgcctacatcgcccagctccccaagctccacgcaccagctccaagctcacttcttcacgcgcgtccagctgtgcgcctggctcccacgtgtccaatcttcttacacaaataaaagtaaggagaaaatatcaaggctaaggtcgtttaagccaggacatcacagacaagatagcgaatacaaaatgaatattgataaaggagacaaagttcattttatctgaggtacaaatagaagaggaagttttggtgcatctaaggatttctgagacaacatgctacatgaagtactaagttacctagtgtgaaagtgacctgacattctcaaacttagggatctgatgaagttcaaaattgtaaagaactcactataaatagggcttttaaggtcattgtagtttaagaaaaagattaatgaaacaagagttttttttagaaaagtttaatagtctaaagtttttctttgaaagttcttctattaagaacttagaatatcacttttagttctcaatatttcattgatgagttcttaccttcaataatttggcttcgtctgtgagaacgacaagcgctagctacattagttcctaaaccattcactacaatcttaaatatgtcgagaaattcccatcgttcttgagaaaatggggttcacttaggtaaaaactagttgaccaccatagtaagagaacgtcaacctccggttgccggagagggccagaggaagagtaaccaaagtatggaccaccatgtaaatacttaaaaagggcccgtagcactacgtgactcaataatgacatcagtggctagcctcattgatagaatattcaactattgagagggccatctctggtgcggtaccttccaccatttgcgccaccaaaccccgacactttaaggaataggcctcgaaaagaaaagcaagcgtacttggtgagttcaagctctcgggcttactgctacgaggaggaaataagggacctccactagaagaataagaggttagaaacttttgcggttggtatgaaaagagtgttaagtggcatactcaaaggcaaagcccaagcctcacacttttgtaacaaaagccaccgagtgggaagcaagatcttaactacatatgttgaaaaaggtgattctatgtcatccactaataacaccttaagcgatgagcacagaaagagcctattgcgagacaaaagctcaacgggccaattgagacaactagagccaacccaccatgaggggatttcgctgagggaagcacctcatagcctaaggaagagacttcacccaaatggtctcatgctaggggcaccttgcctatggctccccaccaagagcaaggtaagtggaaggccttattcatcagctttagtggtaagttacacaatgtttagataagaagagcaccctccacgggccctgtgcaaaccacacaaaagatccaagttccactcgctaactcccaagggaggatgagcagaagggtgaaggagttagaggcagaaatataagacctacatcaaaagatagctatcactacgaagggggacttgaatgatgacgaggattttgatgaagaatcccctctcacgatggagattcaaatgtaagcattcccaccaaactttaaggagccacatatgacaccatatgacggtctcacggacccaaagtatcatctcatcgcatttaatgagttgatgaagataaaaaaggtgtcgtgtaaggcaaggtgtcaatattttgggatcatagtaaaaggagttgcgtacaaatggttcagacggctaggaccgaggaagatcacatcttggaagcaactttcagataaattcctccaacaacatcaggctggatgcaataatattatgcatgtcacaagtgtcaccaatgtgaagcaagggagacaagaaaatttgtgaagctacatctagcgcttgaacaccaaagttaccaaagtaggaaaggtaactaaagatgaactcaagttttctatagtcactgaagtacaccttgggagtgaaatttcaccctgcaagagagcgttcctagcaatgataagtttacctttggtacattaaactaaattaaagaaggcactgaggttggtctccaaaaataacatttgtacttgggcgatcacatatttacctcatcaatgagatgttaagttttcaaaagccattatataatatttattttataaatgcttatatggacattaaatttagaataaataccattttggactctctgttttacaaaagttaccaattggaccctgtgttttgt

SEQ ID NO: 315557 - DNA, 1238 bp, Cannabis indica
aagaaaaaaaaaattggaaaatcaaggaaatttatgaaacattatttaaagtgttaaaacaaagagctaagaggacatcaacaagttttaaagataccataacttctattagaaaatgataaactgtctgatagtagaccaaaaataggatcttgcatatgcagattgcagaaatgaagaaattaacaaaatattaatgacttgaactatatacaagaaaacctcttccacttgtgtatttgtaaaaatggaagtttagtaagagaggagctgtcaacagtaaattcatcactaaggacagtaataactctctctacatagctatcaaatcccttgtgatctcaatgaatcccaccaccctacccgtcagcatttcaataaatggaaataagaatggaagaagaaaatttatttcagttaaaattttctcaaaactagtcaattaaatgacaaatgacttttaattcacaaccttaatataaataatacaatgaatttgtactttaggcatttttctttagcaatgcggcaatgccagcagaacctaaagtcacatgttcaaataactaccagatgccttctctaagattttgatgtaggtgcttagaagttcgaatactggaaacgacggtttagaaagattaaggtatgtaaatagaaatccgcttgtgttctagggacacttcatttaagctttggaatacagtaggtggacaaataacaggcagacccactactctctctgtacaaaactagagctattactcatccaaaagagttgattgtgatctctaagtatatgactacgaggcaggcaaaattgcaagcctaagcaaaataatagaacaaagtactcaattatctgatctgaattatcaaagttagtttccctaaactcaatatctgacttagtttgacacaagggaaacttcatatacattgtgatagtgcacagtgtaaactgagaacctcgtcctttaataaaatctccagtgctgaatatagaaaagatataagggataatacggtagtcaatatgaaaagataacaacaaacaaggaaaagggaaaaaaaatgtggccgttgaaattacctgtactagtgggattgctgccaaacgtgcagcaacattatcagatgttttctcacactccctccaaagcaaattgtgagcaggcatgtctccatatcttgttacaacagaaaaaaaggcacatcagctgaagaaacaggaaatt

SEQ ID NO: 315558 - DNA, 775 bp, Cannabis indica
aattgcaatacctattgtattagctcccatatatatatggagatatatatatggcaatgctacgcatactacacatgtatcctcatatatactaattaatgaagttttctacgggtatgtttggtatgcaagactaaactagattagataagttaattagtctagtccaatgtttgggcatgctgcaagtcaggataactaatctaactaattctatgtattttagattatttatcctatccaacaacgtgagataaataatcacatataggtagaatttttttattaattttaaattttaattttgtaaatatatttaaaatttaatttagaatttaaataaaagagttattgtaattttatttatagatttcttgtcaaaaacttatttagtaaaattattttaaaatgtataattttgaattatcatacataatttttttaaatttaaatgattaattaaaaaataattaattaaattgattctaggagaaacaatgtaatactagaattatgctttttaaattactagaaactttatataaagattttacaaaactaatatttgtattaaattataaattaggttaaattattatttaccataaataattttccattatttaagtattttaattttactatttttcaattttaattatttattaaattaaaatataataaattatttattataaatttatgtatattatcatatctatatttaattatatataataggttacttacaaaaatatatttttttttacaaaaa

SEQ ID NO: 315559 - DNA, 827 bp, Cannabis indica
ttataaatatttataattatttttaaactaatattacgtggaccactaaaaatttgccacgtatacaagtgtgtacacgtggacagtccaccgtggcacttaactgtgatttttggacggaggtgtgcagagcaaaacggaaccagagtttaggtagtttagccgccaaaaattcagtttttgtggttaagtgttacaaactgtaaagttcaggtggtttagccgccaatatccctaaataaaaaatagtttaacagggtcatttctctacaagttttgaaatgaggatatttactaacataatcctataatttggaggcctttgctacaattttctttaaaactacatgttttataactcaaatagaattcttttgcaatgactcgaacagagctctttgtcatgttaaatccctaagttttttttttctaatcttccaatcaatctccctctacatctataagactcattctctttattatctattttgggataaggaaaattgtcttctacaattttatttctatcaaggctttggtgttggggcttgtaaagagtatatgattgaaaagttctgcatttttgtttccttcaaagccttagtgttggagattctaaaaaatatttaacaagaatttttacttttttatttccttgaaggcgttggtgtagatgattttaaggagtattttaggggcttattattataaggtaatttcagcaatttttttttctgtttctttagttgtatttgttgggaattattttaccgggatcatgtatgttatttaacattctaaatatgaatttctaaaataatggaatt

SEQ ID NO: 315560 - DNA, 6188 bp, Cannabis indica
aaatatatttttttagaaaaataataagatatagtgacactttatgtgtattgctgttaccatctcagtctgacaaagtctgactttataggcctatagtgacacgcataaagtgagtgtaaaagggttcagtgacacgtatgaagtgtcactaaaaattgcctttccagttaccgtcattagtgatgcgcgttgaagtgtcactaaagagttttagagttactcaatgtgggtcactaaaacccatttttctagtagtgttcgaactaattttgtatgtaaactcaacaagtgtttgtatggcttgaagcaagcttcaggaccatggattgagaaattttaaagtgctttacttgaataaggatttcatcgttctacaatacaccactccttgttcataggacattctaaagaaaattttatcattcttcttgtctatgttgatgatgtgatacttgcgagcaacaacatagcagaattgaagcctatcaatgttcaattgaacaacaggttcaagcttaaagtcttgggaaaattaaagtacttccttggccacaaagggatttttatatctcaaaagccacatgtcctatagttgttagaagatcttggacacttggggtgtaaatcagtcaacactttaatagaagctaatctcaagcgtagttaagataaagtgtaatatccttgaagcctaattatgaatattcatggtttagtatatattatgggattcattaggatgatgatcttgctaatctaatttagtgtaaattatgaatttttccataagtgggtaaataagtttaatttattagttacatagatttatttagaatatgtgggcataatgtgagtaattggtggaataaaaatattttcaggttttgcaaccttagagactcaattagaggctaaaaatatcacgacgggtttagtaagtggtttaaatgggattattgtggttatttcattttagaactacggggtactttggaatactcgggattgaccaaataccctaaggtgagagatttcttagtagctaagaaatagcaaaataacctattataaactaattttactattattactattattactcgtattattataaatatatttattattattattataatctaattatatatatacattaagtttaaaaaagaaaacataaaacctaaccctctcctttctccttctctctcgagcaagaaaccaagacaaaccaacctaattttttatttccttgtctgatttcagctcctttatccctagtagcagccaaggaagtgatctaatcttgaagagggtaacttgaggtaaggtttaccccttttatttgaaaaatctataggttttaaggggtgacttttgttcttttaatactgggagtttcctgagccttggtttttctttctagagtgttttaggactagttgtaatgctcattcgataggtttgttggttgtggggtgaaagagaatcaagtttgagtttcgcggtcaaagcttgagcttttaatggcatttttcatgttaaggtgtgattttaatttttgttacgtagagaatgttatattgatgccatagaaatgttctgtgaagtttggaaacaatgggttaggtttggagcaagttttggggcattgaaagcttgaaatttttgagtccttactattatgaactggaattatggattgtacaggttgcaccaaccgaaattcagattggtagtaaccaaaaaatgccaatttttcgtatttcagtcataactttttgctcaggtgcctgttttagacgttctatatattgtttcgaagcttgtaaagagctctacagtgtgaagcataatttaaaccaaaatatgtattttattataggatgtttttgctacgaggtttagtagaaaaccttagattgttttatgtgggtattaagtagtattttggaatagacacttatcaatttactgtactgtgacatagggctgggattgtgagctgtttctccacttggattagccaatatgcatgaatcaaaattaaaggtaggaaaagtatatttgtattacatagcatgttatgttaggatacaattattatcgatgtgaatcgattgatattgagattaaaataatgttattaccgctatatgatgaaaatattatcttattagacaatgataaaaattttatcttattagataatgataaaaatattattttattaggcgatgataaaaatattaccttattaggaaattatgaaaattttcttattagacaatgataaaaatattatcttattaggaattgatattttgatatcgaagggttaagtggaagatgataaatctttgtggattattgattctaaagccactaatcatattgattctttgatgcagatacttgattcgtcaagggagctggctaatgtaaaggtgaccataccggttgggaacggatcacaagtatcagtcaagggagctggctaatgtagcttttcctcaacaaaataagaggaaaaatattttgatgaagatgtaacgtatttatggcatctacatttgagctacatcgacctaaatagaataaactagttaacaaaagatgttcatttgaaagaactaaaagttagaactcttctcgtatgcaaatctttttttagaaaaaagatggctaaaagacctttttttctgcgaaaggcaatagagtcaagcaacaacttgagctaattcacattaatgtatgtagaacaattaatacttatgcttcaggtggttatgaatacttcgcgacttttattgacaattattctagatacatttatacttaactaatagccaagacgtctaaaacttctgaaagttcaaagacttcaaagccatggctgaaaaccaattaggtaaatcattaaagatacttcgattagattgtgatggcgagtatttgaattctaaattcaaagaaatttttctagaaaaatggatcttatcccaacttacaacacttggaatacctcagaagaacggtgttttagagtgaagaaactattccttgttagacatggtcagatcaataatgtgttacccgacactgccactaagcttctagggataagcacttctaggggctacttacaatttaaatgcagatccctctaagagcataagcaatactttgaatggaattacggaatgagactaaacccagtttgaaatattttcgtattggggttgtcctgctcatgttcttaaatccaagactaggaaagttgctcccaaaattaaagtgtgtatgtttgtgggatattcaaaggaacctcgaggtgcattattctatagtcatcaagacaaaaaagtatttatctgaacaaatacaacttttcttgaacatgactatatgaaaggtcacaaatcatgcagtcaagtggttctcgaggaactttgaaacgaactgatttttgagccatcaattgaatgatcaacaatggtcactactattccttaaaaggaaactccagtatactgtcatagtaggagggttgtgagacaacttatcctctatgaacacgaagcacatgttcttatctctgacatagacaaggatgatttattaacttagaaagaagcaatggaagaccatgactcaaacaaatggaacaatttcatagattaagaaatggtttccatgtgcacttacaatgtctgggaatatgaagctccacctgaggacattacacccactgggtgtaaattgattttcaagaagaagagaaatgcttgtcgtcaaaggctacacacagtaagaaggcattgattatgatgaaaccttatctcctgtggcaatgcttaaatccatttgcattctcctttccatagttgccacttatgattatgagatatgacaaatggacgtcaagactgcctttgtaaatggcggtcttgacaaaatcatttatatggaaaagccacaaggatatgtgccactaggggaagatcaaaaggtatgcaagtttcttaaatcaatttatggattgaaataagcctctagatcttagaatatcaccttcatcaaaactattaaagagtatgattttgaacaaaataaagacggagcatgtgcatacaaatacattaaaggtaatctattggtattcctagttctttatgttgatgacattctactcattggaaacaatatagaaaggttatcaaatgtaaataagttgttagccaaaaaattccaaatgagggatttgagaaacccaagctatgttctaagcattaaaatctatagagatagaaagcacagaacgttagtacttttcaagcaacttatattaataaggcgcttgaaaaattgtcaatggagaattccaagaaagaataattccatgtctacatgcgaactatcctttcttggaattaatctatgcaaggattaatgtccaaagactcctcaagagatggagtacatgagaaagtacccttatgcattagcagttgggagcttaatgtatgcaatgttgtgtacaagacctgatatatattatgatgtagggatagttgttactaatctatctaatccacatttggaacattgggtagctgtaaagaacattctcaagtatcttcagagagcgagagatctcatgcatgtatattctagttgagagttaaaacctactagatatactgattgtgatttttaatcaaataaagatagtcaaaaattgatatatgggtaagtatcactcttggtggtggagctatagtctagagaagaattaagcaaacaagtattgcatgtttaacaatggaagctgaatatatatagcaacttgagaaatagctaaggaaatagttttattgaagaaattctacactaatctggaagtagttccagaagtagaaaaactattggtgctctactgtgacaacagtggatcagtggccaactccaaggaactaagaagccacaagagaggaaaatacattgagagaaagtaccatctactaagaaatatagtagatagaggtgatgagacagtcttaaagattgtgtcaaaacataacctggaagatccattcacaaagatactaccaacaaaatttttaatgggtcatataactaatatgggattaagaaatatgcctaatttaattttagggaaagtgggagattgtagggtttataccatgaaaattctgttaagacagttctggttataaataagagttgaaatatttttatatatacttatttgttaaattattaatatttaatatggaataatttatacataaatattaaaaaatttcttattcataaatgaagttgtgacttgcaattatatggagaattaagattacttagccataaataaaatactcagcaacatattaaagtttgggaactttgaatcagcagttgctagtatggttcactgatgcttgttattcggtgcaaataatctcgattcagtttactgatgtagcatgacatataagtgaaggtattgtatataatacagattatatatgacaaggatcgatatgaataaagttatctttaccaaactggttgtttactataaacacccacttcatatcataacgatgatcaatagtagaccggcttaaatcctaagtaatcatgaactcctattcatgttattagtttctttgattcactcgttaaagtttctcaaagtagataattccttcaacttctgctttgggaatctagtaatgtggatgactgggaacatgatctataattatgaaatcttgactttcctaagggtcgaatgttggttctctttatgtgttaattttggaacttaaaagttgtgtgcaaatttagattgaaaattatacttttactagtgatttaacgatactaaaggataaagaagtagttagaagggtagaatggtaatttgaccaaacgaattacgaaccaacattaggagggctaatcactggaattgattatgtcaatggacactactgtaaaactctgtaaatagaatactataattactaagagtttgattccatatttataatggagtaatcatggaactaatggttgggttttatgccctaaataaaactcatttcaacataatcagatttacttattaatatagatcagaaataacatttaatgtt

SEQ ID NO: 315561 - DNA, 1996 bp, Cannabis indica
aatcgagctcaagcactgcaagactgaagagcaggtagcagacatattcacaaaggcactaccaagaggcaagttcgagctactacgagacatgattggagttacagaaatgtgtaccaaggaggagtattagaaattactacacatttctacaatactcaattaagtctagaattttctacatatttgtagaaaacttactctaaacttttagataattgtagaataatttagaattttctagacatgtgaaaaatacaatagaacataagcatttctagaaaactttggtctagaggtttctagttatgtatgcttaagaaatatgtagaaatatatggataaaatccttgaactagaaagatctagagaaaataattctagcctcaaatgcttgaaggctagcaactataaatacccttcaagggttccaaattgtaacaaccaacaccaaaaaactaacattcaaactatcaataaagtttactactttctcatacaacgttctcttctaagccaaactaatttcatatactaaatcaacaactactcatcaacatcactacttcactacattaccacaataaaccattaacgataaatccacatattctaaacaaaaccaatacaaatttattctcaaacaatcacatattagtactcaatgtcatcttatatataatacaaacactattttatattattaggtgtacaattaaagttccacattcattaaaagtaaagaatatcataaatatataaatatataatctataacagtttagtttcaaataaataatttgatcttataaatattattgaaattctaatatccatatgggactatctgattagatcggaaaagccatagttagttaacttaccataaaattgtgaagttatactccaatagaggacattagctccacgcgcgccattgttagccaataattgttgaattggggtaacattatacaaatatcgaaccatatggctctgtccataggtgagtgcccattgaagtggtaaacaactatgctcctcaagaccacatgcaatactaactaacctattgttctttctaaccaaacactcagcgattttggtgattccactccttgtggccgatgcaagagcagtccatttttgattatcttcaatttctaaatcattttctaccatttgtgacactaaatattctacaacatccacatttccattgttggctgcaatatgcaaagccgtctcctttgaaatcggatgttgtgctctcactatttctggcatttctctaaccaaatcctgcacaacctttaaattcccttctcttgcagcttcaaaccaattttcatgagccgatgatgatgatgccgccatcatatatttatcttcaatcaaatacttcatttagcacaattataaatcaaaaaatctcttaaaatttcaacatttgatcatttttttttataaaattttcaggcaaggcaagaacattttatgaaaatgttttcatgaaatttatgggtttttttgggaaacttacaaaaacattagaatttgggttaacttttacaaaaatactgtcacacgaaaatgttttaaaaaatactatgtttttataaaacaccagtagaacacaaaacagaacaactcaaaacaacagtagaacaactataaaacaccagtagaacactagtaaaaacttaacacagtatactgcagtatgaaacttataaaaaaatacagtaaaaatgtaaaaaataaccgtctggcagtattttgtaaaaaaaatgacaaagttagtagacgatgtaaatttcctttttttagtagaaaagagccttatgtttgcttgcagatctggattaacacaggttaggcctagaacttagaggaaattacatctataccctttttatattgtcctcttttatttttaccctcttttttaaagtctattatttttacctctttttttaaatattgtatcaatttt

SEQ ID NO: 315562 - DNA, 1717 bp, Cannabis indica
ttccctcaatgtgagacatttctttatattacttccctaagttgagttgtaatcttgggctcattaaattgtgtattactgactattcctattcaataaaaatttatcattcattctttgtctaatttcaattaagttcaagttttgattttgggattggttttagttttgtttatgcattcttgaatattgttattgttgtaacaatctgttttgagggtgagaattcaccacatcaacattagttctagaccagaacacttgtgaagttgtttcaagaatagtcttggcaggaagcatttcgagctcccgagacaagagtggagtagttgcgaggcttgccgaagatgttcacattgacagtgttctgaaaattattagacctcccatcacttgcttggctgttgggatgaaaaaggttgtcaccacacataaaacaaagttcatatgagtataatgtacaatctaggaatatttgaataatgtacttttatgattatcacatattggataaccaaatatgacaacagacataaacataacaaaattgagataccgaaattcatgcatgtattgttgttgattatactaattaattaattgtttttgtcaattgcaattaacaatatatattaaacaagttttgttttaaaagaaaaataataaatagtaaacaaatcatagagaataagatattactcaagataatataatgggaacaagacaatatatagaagagtttttcatgtgtgtaaaatgaaaaagtgtaacaaataacttagtactaataattaaatactaaagtgtgagattatctttagccataagtcaaaagttaaaagtgtagcagtggatatatttagtattactttacaaaaagaaagattcccatgaattatggctttgatcaataatgatatatattttaattacaattaatcaattgttttgcttttttactattatacataacatcagtaaaattgtgatatggtgtgttcataattgaaatcgagaaatctttccttatgtctcttttcttttgaattgtgaatccaaatagttacaaacaataagtatcgtacattataaactggtaacaataagtacagttacaaaccttccattttcttaaataaaataaaactgaagaccatccatcacttctgattttgatagaaaataattatatcttaaagactaatcatagtgatataaaaagccacgtaaataccatttttatttaagttttagtagttttttaatacattttagtaactaattttaaattattattcgaacgatttgttttataaaactaaatttggtgagtgtaccattgttgtgtatataaacttatatgcacaattaaatagtaaattaatcttaatatattcatactcatatagtaattgtccttaatgatgaaataatttataataagtcataacaacatatgactttaatatttattctttgtttcgggaaagttaaaagcattaatatgtgttttgcaaaatttaaaagaaatataatataacgaaaatgaatgaaaaagtgtcatcttgaaattgaagaatataattattaattaaagtgttaatatagaaaagcttatgaaaaataaaactaagcataattaaacattatcttaatcttccatcaactcaacaatttgtatggtggattaattgtactttgggctcatacgttattt

SEQ ID NO: 315563 - DNA, 819 bp, Cannabis indica
acattccgtgaaagtacaatcacagaacaaaatcatatccctatatatgtatgttactaataagaaatgcataatttttgttttaacagtcacaccaaataacttttattaagagcaactccagagagccttcaaatttaaggttgcagtgggtaatcttctccaacgtagcagcatctttacatcatatatgcagtctttgctgcagtgcactgcatgtatgcagtaacactgtagcaactgcattttttttttaattattattattaatatttaatagcttatttttgtttatatatattgtttaatattaaaatatattatattttattaatataataaataaaatatattttttggtgtaaattttagtgttgtggttggagtgaaaatactttttgacactaaatttaatgtgtcattagagatgctctaagagtccatttttttcccaccctatctagctactaggagcctcttatttggtttaaaaaacaaattaataaaaatttaaaccaatagaaaactaattaaattaataatataaatttatataatatgtattaagtaacattgtcttcatgaccatgaataacataatggaaatgggacagagagggtttgaattattggaaccccatgagctcagctatatatatatttctatagttatatgattgaaatttcgaaatggtgctattctatacaggttggtccatgtgagcgatggttgatctgtttttaataataatgtatatcacatgagacgaattgaattgttggaaaagcaaattataattaacataaaataaaataaaa

SEQ ID NO: 315564 - DNA, 1020 bp, Cannabis indica
tttattttaaaaaatataacgtatgtatttatattttatgcaatagatataattctcttttacatttagtttctaagttagttattttttttcttgtataagttaaaaatttataattttgtgtgtttaaactttctatgttattcctatctcataatttttattttacattaaatatatatctctaattgtatagttttttttttttttattttttattttcctacaatcatttctttttcaaaaaaataaaaataaaaaaattaagatgtggagtgttgaatttgtgacctcttaacttttaaaaaaatcttcaccactacaccaaacaaccttacttaatattatacgatcagaaaaatatttgtataaaggcctaaaaaaatttatttaaccctaagctccaaatagcttaagaccggtcctaatattttcatctgatgtgaccgccccacctaatctacacctagcttcgcccttatctcacataactccacttccatttcttaatgtaaaatttttagtatcatctttctattttagtagaattttttcttttctttctaaaaatattacctacaaaaaaaataataaataaaataatgaacttattttttaattaacgtatatatattatatatatatataattatttttgtaatttcatacataatttcattattttaacaaatttgtacttatttttattagtattagtattattattattatcattatatatatatattttaattggattgtaataaaacttgatatgtaagattgtttatttaatataatatattttgtgtcaaaaactttaatatatattattagtaaattataataataattattaaatattaaaattacaaattcatttttaagtttacttggtttttgattttctaatcacttaaaagtaatttagtttgttactatatgtatcatctaaaagggcagggccggcactgaaacaaagtgggccataaggaaaaaaaaaaattggacccttatgtt

SEQ ID NO: 315565 - DNA, 2004 bp, Cannabis indica
gaagaagagcaggacgttaagagtcgagggctaccgcgaggtacacggtaactcataatcgattaatgcgaggggaagagaacgcttgttacaacaatgaccaaaaggcaaaatacggtctacgggtggaacgagattagccagtcgtcatggccaattggacctacgagaacgcttgaactggaaaaaatcctgatcttcatcaacaacttggtccaaagaaaagagattcaatccatttgcgaataaacgagttggagaacaagttcaggaggcatcaagtcaaggaaccaggaaaacaattgggatgcgagtctgttgaagaattcgagtcggaggcttccggatcaaaagaaaagatgactctaaaaatttgtccaaagataagaaacagaagaaatacgacaaatatgtacccatttatactgactataccgagcttaatgaaactcgggaaagtatcaacctcgcacttgaaccggaagtcgttttagcgaaccaaaacctatgaaacacgcgagacgtgaaagggacccaaccagacgatgtgaataccatagagatattgggcataccacgaaagaatcgtcgtcagttgaaagatgagatagaaacaatatgtaaaggggcaagacaatgcccatgatcaactcgatccacccaagcaaccagggatcataaccttcctctgtaggaggaatggattcatcagttatctcgagagggaacatgttgcaagaagaaaaggggcagttagttcggtaaagtaattatgtaaaagtattgctaagtaagcaaatatcggctcgcaatggctgccgtatagagttgctacaaaggaaagctggtcgtcaaccagtagcagttaagacaaacaactaaaaccaggattaattcacctagaacttggggatatgacaggaattgaccctggatattaaaacaattgtcggaatatgttagggattgaccctgaacatcagaacttgttttatcaaaaccagttgcttctagaagattgataaaataagcaattgaattggggaagttcttatgagattaatgattgtaaatcgcatcgctgatgtaatattttgaacttcagttgtgaataaagtaatcatttcttttaacaagtaattataaggcataatcctttaaaattacttgaggggcatatatgtatgatcaaccggaatttatctggaaatacataatataatgcaaacccaccacttcaaaaataaaaaatttactgaaaactttttaaaggttctcgaccaaacctttttgacgaaagagggatcaaactgttataactacctaaccaaacctttttgacgagagaggggtcgaattgttataacttctggatcgaacatttctgacaagaaagggatcaaacaactataatttttgatttaaaacctatctgacaagaaaggaaaatcaaaagttataaatgagatataactcataacccgcgcataaagctgaatactaaaggctcgcgctaaaagaaagtattaaacgagacatcaaagtgtctctaaaaaagtactcctaacacgtgggtagaagacctaactactcatgtaagcaataaaaatatatacaaaatggcaggatcactaaaagtatattcaagattacttgaaatagattactgctgataatcgggaggcagattcaatgactgctcgcaaatcaaagtgcagggcagatgataaatcgctcgtgcgtaaagtaggctattacctactcaacgtcagaaagaaatacgaacaatggaaacccctaagaagctttatgaatgatcaaaatataattttttaaattgtgaatgaaacacaagcacacaactacatattcaagttcaaacttaaaagtaagaggcattaaaaagcaaagttggccatccaactttgtaaatttgtctttacaaaaaatgccacaaggggcaaaccattgtctcggccaaaaggccatttttaaaaacaaaaa

SEQ ID NO: 315566 - DNA, 1121 bp, Cannabis indica
tttttgtagtgatgacgctaatctaacctactttaaaaatctaaataaaaaaataaatctatattatacatatagtggactaataataaattatgagaatatgtattttagagttaatatttatgtgtttaatcttaatacactagattttgggtaagttaaaattgttaaatagactctcgtgttgcatctatacctatatatcgtgaccacataagctaatttttttaaaaatgagcaaaatgtaactgaatggagatatttgtaataatttgtatagtttgatacaatatttgctatgatgtaaattttgtatcatcataaataaacttttttttgttacttttatgtcgtttttattaatatatttcgctagagcattaaataatggactatttctactcttttattattattatttattattttacatgataaaataataataaataaagttattattattttatattttgagaaagataaattctattttttttttatgtccaatataaaataatttttttaattttataaaattatttttattttaaagtttatgttgtttttatttcgtaggttataatgtttttattttgtaagttatgtttttctatttaaaaatgatgttatttcatttttctaaatgaataaaaattaattataaaagtataaataaaaaggcatctttttatgttaaatatagtataatttttagggtcattattagatatcacccgtttctaataaagagcctctttttacttttttagtaaaatggaaagaaatcttgtccaagaaaaagaaaagcatatgaacaaatcagtataaatttttatagagtaaattgcggcaaaaccccctcaactatcaatttacttgcaaaaaaccatccaacctcatattttggtgggaaaaccctccaaagtactgtttcgtttacatttttaaggtgtcgtctattcagcctcgttaagtcttaattttgcccacgtggcaatgacaggtcaataaaaaattatcctacgtggccatattttacaaaataaaaattaaaataaaaagaaaaaatttaagagtaatttgcggcaaaactccctcaactatcaatttacttgcaa

SEQ ID NO: 315567 - DNA, 835 bp, Cannabis indica
ttcatatttaggatgttaattcaacatacttgttagtaaatctagatcctggtaaaatattcccaacaggagctaccgaggtgaacaacaattctaaaaggatggttggaatcgaatgcaaactcctcctcttggaggatgagggcctcctagatcatatagcatttgggagctaccaaggtggctaacacgtctcccaagacgaagcactatagatgactgctccagcacagacgacaaaatgaacctacccccaaaacgaggatatctttgagatttgtccttacttttttgacatcgtgcttacctatggacgctgattgacggttaatccttgtggtgtcccatcaaccgtatagaagacaggccttgtctcactaaacgcctactttggagcttaccctttctacacatgaaatgcatcatttcctacacctacgaacaaggccatttagagcctagaggtaaaggaaagacaaacatgaactctgatactgtaaacataatatgttctctagtaataacaacactatttatcaataaaagtggctcataaactaaggttaattaacacatgaatcacgtaaaactactcttctttacttgcgattaattttcctaaaacaagattaagaagttgacaaaaatctcggccaacaatattcaataggaattttttttaagtcaataaacataggtaataaatatttatataaagaattcaatgttaaaactaaaagaaaagaaatattaaggccccgttcggtaaccattttaaaaatggttttttgttttttttaatcaaaaattttaaaaacaaacaaaaatcatgttc

SEQ ID NO: 315568 - DNA, 700 bp, Cannabis indica
gggtgaatataatccaatctcacatctgagatgtgttgaatttagggcaatctactcctctttctaggcatagttgttttagcaaagggacactcttttgattgtttcccatagacaaagttcatttacaatctagaagaacaattgacactcttgacaaataccaaatgaccatagtttgagaataattaacttctataattctcaatctcaagatgctacaagtttgtatgggatttaagtgcatcaagtacatcttattcttgttactaacaatgagcctcgacagcattactgacacaacttttcataaccatgaagtataaatatggtagctcctctatttcagtaaaagataagtccaaatatcttaatatgtccctatcatcattaaaattgccacttttacttgagatatgagttgagaaggatgttatataactactggcaagattatgatttatgatgatgtatatatagctcttaaatggttagtcttaatactcccacatgggatacaagctgcaatagcagcacataaatgacttataaaggtctaggcctttgaccatgcaaatcatacctttctcggccttttggctaagatcaagtgtagtatctgttcttatcagtttaatatctgatatgtgagccaatggctcacacgatattaaattaattttttaaggggaagagtcca

SEQ ID NO: 315569 - DNA, 1255 bp, Cannabis indica
aaaattagtaaatgtaaaagttgaatcttgaccgttgattaagggttgggtcctgtgatctggcggaccatttttcattttgggtttgcagttacagaatttatgtgatagagacgtcgttcacaagttacgaagacaaattgtggattgtgaatgaagttaggatttagaccaaattcatttccttcattcttttgctgatctcactctaatccttggtcttatcattaaaaaaaaaaaaagtaatttacaaacaaaatgggaatgggaatttatcccatccaaaaaataatgtacatctaaaattaaatttgtaaaacatgataaatttaaagatgtagcatttaaagcattggatactcctaaagtatcaatttcaatatgtgttattgagagttgtagatgcgtgacccaattaaaactataaaaaaggaccttaaccttcatctcatccgatctgaaacattcttatacaacttttgaaagagctgcaatgaccttgccatatgattgcacctacaccaagtttttttactttacaattgacgacagcatcaaagttaaacttcaggccattgagatttggtaatttccaagaaacaccttttggcatgtcacttctgagtataaaagttgttgcagttgttgttgttgcagcaggctccagttgaaatttcttagccttaagaaaattattgagatatgtttttgcgtaaacaacaattgaggaagttttcctacccaccactccaccatgcaaaactctatttcgatcactctagatagcccacataaatgtaaaagattaattccaaattcagcttgtttatgtagagaggaaaggtgcaccaagtaatcatcattaaacatacgttgtgcttgtccataatcaatagaaaatttggagtgtttccatactaccttagcatgtttacaatcaaatagagcatgcccaatcgattcccaaactgctttgcacaacaaacaagcagttgaatcaataattcttttcttataaagagttgcagccacaggaaacacatgttgaacaactttcaagcaaaaattatgatctttggaggcaaattcaaattccataaatactttttaccaattacacggagagttagaagtagaaggaacatgttgttcctctaatgatgtcgcgaagtgaaaatcatatttgactgtgtatacaccaaatgaagtgtaatgccatatgagtcaagaaactcagaggaatcgtcatgattca

SEQ ID NO: 315570 - DNA, 924 bp, Cannabis indica
ttatttatttatttattttcaagggaaattatgcatttgttttttttaattttttttttttaaatctgttgtaaaaatttatcattaaactatacaaatcgttacaaatatcaccttttatttacaatttatttacttttttttttaaaacaatttacttatgtgactataaaatacaagtataattgttatacaaaaacttatttaataacattaagatacctaaaatttactttattagcactaaacatacaaatagtaactataagaatggtagtacatattctcacaatttattattagattactatttatgtatttacttttaaaaaattctataatgcacctctttaaaagggatacaccaatacacctctatctattttagtattcgaaataattttttagtcatattttttctcatagtcatgtaaattatagatatttaagatatcttgcaaaattttaagaaattcaaaaaagtttaatgcgtcaaaaattgtgtccaaacagtgtgttgcacacatgactattttattttatacacgtgtaaaatagactgtttcaacattattttttatattataaattatttcgattttcttaaaattttaaaaaatatcttaaataactataacgtacatgaatataaaaaaaaaaaaaaaattagactaaaaaatttttctgaatgccaaaacccaaaacaagtagaggatgcataagtacattccttttaaggaagtgcattgtagaatcaccatttacttttttgttagatttcttgaacttgactagattaatgttatgatagtgttatatcaattgcttaaataaatgatcataatacaactgtaggtggatttttccaacgatttttataatttagcaaaaatttttacaataaaaaaaaattaagggaaaaaa

SEQ ID NO: 315571 - DNA, 574 bp, Cannabis indica
ctaaaatagtacctaatggagaagatttagaatgaacaagaagagttgatctctttaagaaaaaaccatttagaagttatacaaacctttgttagttcttgttcgggaacattcttattaccttctcgatcttctaccacatattcctgacagaaaattaccactacatattactaattgtcctatacaagtcaagtttcagcaagtagaagttatacaaacctttgttagttcttgtttagcaagaacatggtaatggcgttcgctgatcctttgtccacatattatggctataaagaaaccgtagagcaaacccaccaaaacaattgctaaaactgccatcaatcaagacataaggtagattacagttacatatactgcatatgtgtcaaactaaatcatgaattagttctacaaatttcacgggcgcatcaaatccatctcattgaattcataataatatgttttgtgaataagcagggatatgttctcgaagatcataaacacctgagttacacatacatatcaatacatgtaaataagtaagtgaaagagagagacagacagagagtga

SEQ ID NO: 315572 - DNA, 903 bp, Cannabis indica
cattgaattttctgacaactatatagctagtattaatttagtttcttcaaattaagaattatatatagtaattaatttctattttgttgagaaaattatcacgttattttaaaaaaaaaaaagtggtgacccaaattgatatatatgctctaatatgtacatacactcgtgcaatgcaaaattaaagaaagaagaaaaataaaaaagtaagtggaagacaaagctaaatggttctctctattccaccgcccaaacagacaaaatctatgatatatttatgttaaaatacaataaatatatttatattattgttaatcataagtcaaattatatatattaatttgttttaggaaatgtatgtatgtaaattgaaattgaagagacgtcaaattaaatacgtgctttccaagccttacaatttgcaaattaattaaagttttctcttaataataaacacagaagattaggttttaattataagttaattatgtattatcttttcattaatttaatcttcttccatatattgtatcatgggatgtcattttgtgatctaaattaatattttaagatcaaattaatatatataatgcttcatccactatacattattttctccaggaagaattcatcacttattactctatatattcacacttaattaatacataagtatatatataatattttcattttttttggggagtattgttgatgattttgacaaaattaaatgattctgttatagaatgaagaagaagtcattgtcacaaacctctctatatttattgattatataacttgcctacatttcatgtgacttagctagctagggttggctatatataattagctagctccttctctcttatatatatatatatataatctatatatatatat

SEQ ID NO: 315573 - DNA, 3185 bp, Cannabis indica
tcaaatgatctcaatcttgagatggttaggttctagttcagttgcattatttgtgttcttaaatctgttcgttaaagtcaaaaaaatggttcttctcatgacatataggttaaggacatggtagttcaattgagtgggagcgctaatcatagatacaaaatctatagcttctattcggatatagaagtcaaacgatagtttccttcgagcttggcttaacagagataaatggttgattactcatttcagttattatattatttcattgaaatatcatttataggtagctaagtgtttgaaggataaaatacattgaagagtgtaacggtaaattaatccctatttaatcatctatagaggatcattcattattgggataataacaaattgataatctcatagcgtatctatatcatgaaacatatagagtgttatatataattgagagcgtaattccaaatctatagtggtgcaaggaggaattagtaagcagcaccattgccgacaaggcaaacctggtgccagtacagttcctaaaggaatcaagcattactatctttgaagaagtcaacatgctggatgacagtccagcatggatgacacctattgcagcttaccttcaaactggagccttgcttgaaagcaagaatgaggcaaaaatatgagaagaaaggttgctaggtatctaatcctacacggagtaatgtatagatagagtttctcaatgtcgctctgaaggtgtgtcaccaaggctgaggttgagcgactaatgatagaagtgcatgaagacttctatgacaatcatgccagggggcaaatcctatccaaaagatactttggcggggtacttttagccaacaatgatcaaggattcgatggactacgtcaaaaaatttgacaagtgccaaagattctcgaaaatccctagagctccacccaatgagctcacgatgatgcagtctccttagcccttcatagtatgggggataaaccttattgatctactcccaaagggaaaagcaggggtgcagttttccgtagttgttgtagactactttaccaagttggcaaaagctgaacccctagcaacaataacctccaagaaagtccttaactttactgtcaaagtcatcatatgttgattcgaacatccacagaagattgtgtcaaacaatagaaagtagttcgacagtgacatgttcactgatttctacaacaaacatggcatatcaaaagcttctttgccctgggccatcctcaagtaaatgggcaagtagaagctgtcaacaagaccctcaaggacaccttgaagaagcgccttgaagacgcaaaaggaaattggcctaaattgctcccagaggtcctatggtcacacaggactaccaagaagacggttaccgagcaaactccatttgctctagctgatggcaatgaggaaatgtttcttgtagagtcggtgccaccgtctcacaggaggacaacctacgaacaggatacaaacaacatcctgctagcaaaattccttattaaaatagaagaaagaagagatcaagccaacctaaagttgtaggcctactagcaagaggttgcaaggcacttcaacaaacaagttaatgaaaggaaattcttcataggagacctggtacttcaaagagtgttcctgaacaccaaagatccagcattaggagtgttcgaacccaattgggaaggcccgtattaagttacggagataactagtaagggagcctacaggatgagaaggtacaatgagaacatggagctagttctcctaccaagatactggaatggagagcacatttgcaaatactaccagtaactagcttaaagaatgctactttgtagtagtagtagttctatcaactcatcattagagtaaaaagagctaatacccaggacctttatgcgtggcctcccatcattattcaacgatggcccctgctttgcatgtcaagcaggggtagccatttaatatctaataacagaatttttattatgcaggcttgtagattcaatttatgtaagttgcatagcaacaaagaacaataatgaataaaaaacaatgtttatgctcaaatatgttctgtataaaccacttgctaacaagattaatttcttaaagttattctttttttcaattccagatgcgtacaacaagtagcaccctaagaaaatttccaagcaaggtccataaaacttggtgaattgcaagtgactagagaccgtaagtctgcatgctcacttgggggaacccacatcgtacaatgcatcgaactaacacagagaacttatagagagaaattttaacgcttagtataagctactaaaactgcctctatgtcaggtgcagacatacgttagcttagcataaaaaaagtaaatccagatacttacatgttaaggcaataagaagatagccaggattaaagatcacctagtcagtcacacatccataataaaaagctttagggctaaacaatagtaatgttcaaaaacagagtgcctaaaggccaaaagtacgaatatgaaagccctaaggttgaaagtaagtagtgttcaaaagtaaaatgccaatatgccacacaaattatgaaataaaatgatatactaataaaatcataaagctgaaatactaataaattgaagctacatatgtgcaggtgcaagtggagctaaattagaagctacatagcccagatcgtcaaagtgtgggttagccatagcctctataggctagtcggccaactgatcagaaccctggctagccacctcctcagtaggtgagctggccatggcctcatcgaacagccttgatgatgatccctctggctggacaaaagtctagtctgcctccatcctgctctcatacagtgctctcccttgggccaatgtgctctcaaggaaagaagcatctcccatgtaagaaagatcaactctggggtggccaaccttgaacttgtagatgagcttcgaagacaagccaatgtactcgtcctttatggcttgctggccatcaagggcagcctttagctgttggatattattttaccaggatcttagatctactcacaagaatgttgtttaacaccctaaatatgaactttataaaacgataaaataaacacatataaagtaaagaaaaccttacattgatgcagcggaattaa

SEQ ID NO: 315574 - DNA, 510 bp, Cannabis indica
aatctcgaacaaaaggctataaaccaaatactgggttttggagttagaagctaattttcatctgggctatcttcattttcagagaaaaacattctgaacgcctcatttcattgcaagatcattattttttccatctgggtaattacaaaaaatgggagagcctactcggattggtcgaacattggatgattcaaaagccgtagagctaacagggaaaatcatggttgtagcgattatagtattcttcgttgtggttgtgttcgtaatttttctccatctctacgccaagtggttctggtggcgcattgaggaagatacggcgtcgtccggtcaacagagcagcactcggcgcaggcgccgacgcttcgtctttgctcctggccaagacccaaacatcgtcactctacgaagtggactcgacacatctgttctccagtccattcccgtactggtgtttcagccagaggacttcaaagatggtctcgaatgcgcggtttgcctctccgacct

SEQ ID NO: 315575 - DNA, 981 bp, Cannabis indica
aaaaaattattaaaattaatctaaaaacaatttcaatagttcatgtgatttctttaacgaccttaaaaatttagagaatataatttaacacataaaacaaaaaattctaattagcctcaattttatatatattgttttattattctccacatgacataattttatttttatccctatacaatttatattttttattattgtcttaacatatgtttatttttatctcattaatacttaacaaataaataaaaaaaaaaaaaattggccccacttagaattatgattaccctgccgagcactggataaggaatccacatctaaccgttgaaactcaaatgacggtcaagaattacaggggggatcaagtgttggaaaacgaagtacagaccgaagcaaagtgtaaatttcaacaactttaagatttaagagggtcccaatggaatggagcaattgagaatcaagataatgactaaacaaaaagatgtttcttcaaggatctagtggaagaggagcttagccagaagcaattgttgatgatgatgcagctcagctcatctctgtagatagagagtgttttgagctactacattattctgaagctttgataacttgtaaaaatggtgcaagctcttctacaagctattccacttttttattccccctctatctccacctccaggttccatacagctacaatataattatatacctagatatattatttttgtaattacttaaatagctagctttcttttgtggtattcgtgcttgaatctggtgcccagagttgacactcgttgtcctgctaataatgcaggagagggcttgggaagatgatgctgaagtgctcaattgagcatccttccggatctagtaagctagtgaccaaacatgtcttatctagttttgcagcttcgataatcttcctctcccaaattgatcaggttgcttgagtttctttatcttctaatattatggatt

SEQ ID NO: 315576 - DNA, 920 bp, Cannabis indica
gatcggattattattaatttattttgataaaaaatcagttcagagtcctatttgtactattttgaaaaatacagcgtccattttgtcatataacaaaacagagagtccaattagtaacttttacaaaacacagggtccaaaataatatttactcgtctatttattattattattattattattattattattattattaaattatagcatttttaatgtggtgtgtcgtacttttcgagatagtctattcatgcttatatgccgtgtcattcatgcttatcgtgttgtgtcatgcttaggcatatattttcgtgtcgtgtcgtgtcaatgtgtagcatcgtgtcatgtcatactcaagcccatatttttcatgtctagtcatgctcgtcccacttaagctccgtattgattttgtcctatgtcaaaaaattcaacctatatttacagtactacataataaatgattggtttagtttattttgctatataattcagtgtctaatttgtgtgtacagttctatgtatcattaattttatttataataaaaaaaaatgtacaaatagtatgttattaggcactattgacattcgcgtcataaaagtggtgtctcgtaaatttatagttttttataaggttattagtgtacaaatattatatttaaaaaaattagaaaaattcttaattatgaaagctatacaattctaaaatatttttacaaaaatttaatattcagatcattaaattattgaatgtaataaaatagggtattaatacttgaaaattgtatttttgcatatgctaaaaaatttctttaacagcactaaagagaaatgggactgtaaagacttgcagtaacagaacagaaataacggtgtaaaaataaaaaatttgacacaagagaattatatgtgatatcagt

SEQ ID NO: 315577 - DNA, 1220 bp, Cannabis indica
tggaagactgttactaggccaactggatagaagctaattggttgcaaatggattttcaaggaaaagaaggattgtcaggtgaagagatcaggtacaaggcaagattagtagcaaaggattttagccaaaggtaaggtatagatttcaatgacatattttctccagtggtaaaacagacttcaataagaatcatgatggcaaaagtagcaaaatttgacttagaaatggaccagatggatgttaagacaaccttcttgaatggaaagcttgaagaataaatctacatggctaaccagatggctacaagagtagcaaaccaaatcaagcttgcctccttaataagtctctatatgggcttaagcaagctcctagacaatggaatttaagattccatgaattcatgacaaaaacaggttacacaaggagaagttatgatccttgtgggctactgctatatgttgatgacattctcatcattggcaaggaaagactagagattgacaaactaaaacagcagctcagtgcatctagcagtatatctatgtcacaaagaaattatgtccaaaagatattagacaagttttgtatgagtgaatctaaaccagtcactacacctctagcacctcacttcaaactttctcaatcccagaccccaagacagaagaagacaaggctcaaatggacacaattccatatgcctcatgtgtgggaagtttgatgtactgtatggtctgcacaagaccagaccttgcctatggtctaagcatggtgagtaggttcattttagatcctagaaatggacattggactgctttttagtggattctaagatacctaaagggcacaatgaatttgggacttgtctacaacaacaacaacaaaagaactactgaggttgagggatttgtagactctgattatgcagggagcattgacattagaagatccatcacagggtatgctttcactgtcctaattggatgtgtgagttggaaatcgaatcttcaaaaggtggtagctttatcctcaatagaagttgagtatatggctgcaacagaagcaatcaaagaggcaatttggctaaggggtttcacatcagaattgggtttcaatacaaaaaacattgtagtgcattgtgacaaccaaagtgcactacatttaatgaagaaccccatgttccatgaaaggtctaatcacatagacattaagcttcactttat

SEQ ID NO: 315578 - DNA, 1083 bp, Cannabis indica
attttactatttaaaaaaattgaaatgaaaagataaaaaacttggtattatctgtggtgcaccccttaaaaaaacgatgggtgcaccccctgttgacgaaatttaattggctctcaagttgtcttttgtaattcttaccatgggatattgagctgcactatggttattcctattgatttcatgcaatttttcagggagaaaaaaaatgcgtgtgtaattcctattgatctcatacaatttctatccttataaacccgaaaaggtatgcggacattcataaaaataaatttatagaagcaatactaaccttctgtacaaagactcattttcatggattttaaaatcattctaaaaagttcttcaaccttcgagaaatcgcctctgaaaaatggaaattcaaaactttaaagaatttttgaagtttgaaattctcaaagaaaaagagaatgagaaattgggaatgtgatgaaaatgaagtggatcaatttgtatttaaggatgttaaatacagacattccttattcgttgggatacatacacgtggtagaaaaataccaaaggtctttcaatctaataatccctaacgatcacgcttacacatacttgaaggattttgatgacatggcatcttgggaaaataaaataattattacaactatctttttgaaattctcgacaagacaatcaaaggtatcttgtgacaataacttgctcgcttctctttaatagtgtccctatatgacacagttattaattgcaaaactaggggcatgtgctatagtgtgaattttttgcttagaaactccagagcagtctcttataaaattgacacgtggatccaattctcgaggaaaaaataacatgttaattaatgactcttaaagaattagcctcactttatttgaacttgcaagatgatgcaatcttgacagggtctagtcgcacactatgctctgcatgttagtttctatatcactcataaaatatgcaacaacaagattcaattccatagataaacatattacatataattataagtgtataactatagatctaaagatacctttgttgattcaaagagaa

SEQ ID NO: 315579 - DNA, 1143 bp, Cannabis indica
ctcatagtcacaggcctgggatccagggttggacccagggttggagttcaagggttcatggtcaggtttgaagccaggtctaggaggttggagtttgggggttggggtctggattctgggttctatggtttgaggtcttggccaggtttgtgttgggggcttggtctgaggtttgagtctggtcgtggcccaaggttgggtctccaggttattcgaattcagggttcgaggggtctagggtttgatgtaggtttcagtcctagtctgaggctgggcttgggattcgaggccgagatcgggcccaagttcagggtccgcagtctgggtctgagttttggagtcgggttccaaggctggagcctaggcctagtttggatttgggattttgggctagtctcgaagttaggaccaggtgtgggtctgagttcgagtctaggatctagagcacgggttgggtccgggtcaaggtgtggagtattaaagtattttttctttgtttgtttaggaaaaaaatttaaaaatagtttttaaaaaatattaaccaaacgcatattgtgtgttaaaaactaaaaatattgatttagttctccattctaagaatacaatttttaatataaaaaacagacaccaatgccataacctaatttttttttaaacaatgtcaaagttctacttgcatacgaaagaatttgagataggagggaaaaaaaccacataattgggttggatagagacattgaattttatttaacaaaaataatatgctaatatccttacacactattgatgtatcatttatctctatttcgacatttaagagaattttttagtgtaatttttttttcatagttttttaaaatattttgcaaatttttttagaaagttgaaaatgtttaacttgttaaaaataaggtttaaatagtttgttgcactcgtgactattttattttatacgtgtgtaaaatgaattgtttaaactctaatttcggcgtattaaatattaaaaaattatttcaaatgtcaaaacagataagtatgcattaggggtgttcatcaaaccgttcaaactgcccgcaccgcactacaaccgcaaaaaaaaaaaaaatacagtttgaaattctttgcggtgcagtcgcagtttga

SEQ ID NO: 315580 - DNA, 1294 bp, Cannabis indica
agatggaagtgtaaaaaccaaaacgaaatagaggtttggagaattttaccaccaaaaaattaatttgtgtgcttaagtgtcacaaattgtatagcttaagtatttttaccgccaatattcctaagttttattatagagtactatctatgcaattaatttttcctcaactcataaattacaataatttagtcctaaatcaatcttatatggagaagtgatttgcagaatgttagaatctgggattgtatgtaaggtgatgttatctcaaaattaattgacaatgataggagtaactcatgcatcttatacgtggtgtattctttcctattagtaatgactctctaacatcctctctcaagatggtagctatttgcaaaattttatggctcactatccccgagtcacaagtgattctttttggctcgtcttttcggaccgattcttgaatttagatcatatacatgttagagttttatttggctctggtaccaagttagaattcaaaatagtatggtagggtgcatggagttctatctcaaaactaattggcaatgagagaagaaactcatgcatcttatatatggtgttatatttccacacattaatagcacgtgactctctaatagaaattaaaatacaactgaatgagcgaattcgtaattattatatagtcagagtagatttttttatttatttttcttaaaaaaaaagtaatttgaaaggcacaaccttataaatttataattcaaaaggtaaaaatcagggtcggccggaatgtaagtgcttatttaattattttactctacttagaaccaagtaaaattgtcataaaaatttaaatattgattataaaattacgattacaaagtcttaaattttaaggatattggtgacaaaactacttaaactatgcgatttgtgacacttaatctcataaatcaattttttagtggtaaaaccctccaaacctccattctgcttttctttttacacttccatcgaaaatatttttttaagtgcaaactgaactgctcacatggacttcagcatgcacatgaaaaaaatttagtggtccacacaaaattaattatttatatattataaaaattaataataaatcatactattcttttctttgttttactttctgatccttttatattattttattttattttcttaccttttgtttttatttttcacacacacgagaaccaaccttaacaccaatctgcgacaagtcccaagctcagcaccctctgttaggttatttttagtattaattttagattaa

SEQ ID NO: 315581 - DNA, 759 bp, Cannabis indica
tggtaaaataatttcctacatagtcttcaattttatccttcaatatgaatagtaggtcgcgttccttttatagggtcttgaggcttggtgtcattagagcgacaaggataacctggtggagtagttctattggttctctcagtggttcgtggttgctccacatcaggtggagggcccattggatggtgcgctcgagcttgagtcctttcagactctttcccaaggttttcttccctctggggagcctcaacaccttttgtttgcttagtacttgcacggttacgaggtgttgtagaagttttacctgcattaagggtttccccttgagtactagttcccacatggccagttggacaacgggaaatctctcataccaaattgaaaagacccctacggggggtagtctcgcaactaaagcaataagcttctctgatttattgagacaggttagctctttgttgctcctgcttaactcattagctttcgatgttgtgcgaattctctacgaaccagttctggaactgttcgtgttcttgttgagagagtctcgaagttgttgtgaattagccacaatttgtctaagctattcaacctgaggatcggcctccttggggtcttctagtttcacacgtggttccccaggtggaatctaatcgttggttttaataccaggagcagttagtgccttggggatgagctatagagttggtttcgaggcctccacctagcatctgagatgcaggtgtagtcccatcacca

SEQ ID NO: 315582 - DNA, 861 bp, Cannabis indica
ttttattaaaatttgagttgattggatagttcattattgtgttagcccatattgttattgattaatagtttacgagacttccaattgtatatgatcttaggacctatattttatttttcaattggaaataaaaattctagttggggaagatgtcattcaaaataatgatcaacaaatagagactactccaaaagtatctcctctaaggagatctcagagacaaaaaaagtcaacaaggtatgatgataattttgtttacttagagaatgagaatatgatattagtcattttgtggatcttcttacttatggtgaagcacttaattaatagtccatattttttaaatggatagaagctattgatgatgagatagagtccatggacaagaatgatttatgtgagttagtccttttaccgaatggtttaaaacaaataggttgtaagttgattttaagaactaaaaaagattaagggacagattgaaaggtataaaacacgtttagtcacaaaagactttactcaaagggaagatattaattacactaaaactttctcgcatgtttccactaaagattcattcaaacttattattgctttagttgcatattttaatatatgattgcatcaaatggatgttaaaactacttttctgaataggaaattatttgagcaagtttatatgtttcaacctgaaggcttcgagaaaaatagaaatgataatttggtttataaattgaaacgatgcatttatggtctaaaacaggcatctcatcagagcgctactaaagtttgataaggttgtgacaccgcttagtttcattgagaataattttgactagtgtatttatatgaagattagtg

SEQ ID NO: 315583 - DNA, 1254 bp, Cannabis indica
ggatttattcagtttgcacacatgatgagggtgaatctcacttttgaattctgcaggttgggccatatagacacattcttgaagatctccattcaagaatgcattattgatgtcgatttgttgtattgggcaattgtttgtaacaacaaaagaaaaaataatgcgtatggtacacgactttatgacagagtcaaatgtctcaaaataatcaagacctggtgtttgctgaaaccctttggcaacaagccaggatttaaacctgtcaactgatccatcttggttatattttatgcgatgtacccatttgttgtccattactgtcataccaggttgatacaagccttgcttaagatggccccgaagaagagcttggcatgtaatcttgtccttgatcacacatgtatcgaaatcaaacaataaaattatgttattatttgtggtaattttagagatgctcaatagattcttggtaatatgaggagcacgtaagacatcatttaacaaaattttcttattaggattagttgcatcaaaagtagattggcctatatgagaaattgagatttaagagccattacctactgctattttggctttgcctttgtaatcattggtggtggtgaagttctgagcatcagaggccatgtcgtgtgtggctccactgtccacataccaaccattatcttcagcaggtgtattggtgttagagaaaagggtttgtgggttgtggcatgaattttgagaatttgaggaggagccttgattgtctgtgtcatatctatgatagcatttgtaagcaaggtcaccaatcttgccacagatttggcaaactggacgagaaccacgtctatggccatttgagggaccacgtcctcttgtttgagagccgcaaccttaggaatttccacgaccattagattgacctctaccggtgttgctctgattgcatccagagggatttttattgaactgagcatagtttacttgagcagaatccaagatctgaggagctgttttttaaattcgcatttcctggttttgaagcatacactacacttcttgtagagtcagagcatcagctcttgtagtaagtaaaaccaccactgtttcatattcatgtcctacacctccaagaatgtacatggaaagttcttgatcagataatttgtgacctgcagcagtaagagaatcgacaagattctttatcttcaagatgtactcatcgattctcatggatgttgggttttatgccct

SEQ ID NO: 315584 - DNA, 655 bp, Cannabis indica
cttaagaaaggttcaattaagttcagtacttctgtctctgttctacggtttatatttttaatgagaattcagtacaatatactgtaattatgttatgtggccgtaattgaaagaatattttatcattgttttttctaatatttgtttgaaaataaaaaaacgtttcggctatgtcaataaatttttattttgtaatgcaaagcttcgttctggtgaggacttaataggttagggacacaattctaaaatattggtaagaaaataaattattacgttggagatatagccacattttatatagaatagattataataaatgtatattggagaaagtttttgggttagatattttagttaattaattaattaatttaataatatttataaatttaataaaaaaattaaataatgagagaattaaggacgaaatagatagatgtatttgaagtgattttaaagcaccatgtcactgcaaggaatagatagatgtatttgaaatgattttaaaacatcatgtcaccgcttcatacttctcctttatatctattagtatgtctatataacaaaattcttggtttatgagaaattcatggttgactttttatttatattaaaaataaaatgatttattattaaaaataaaaaggtttatgag

SEQ ID NO: 315585 - DNA, 916 bp, Cannabis indica
ttttgtcaactaacttgtcaaaaaaggactttacatgaaatgtgtacaataagattatcaagatattagaatccacaaaatgcaagttcaatagtatttatagtgaatgcaagatgagagtaataactattacccattgagattggcgagacaataagtccatctcgggacaaatagagtatataataaaagttgttcaagacaagggaaccaagaacttatagctcattgacccacatacttgagaataagagcttgcaactaattgatccacatatttgtacgtggagagaataactatattcattcatctagctctttatatattgaagtagccaccttgctaataccatcattataaaagaagactgtgaggagcgtttgtatctatacttagtatttttcctacaaagacagtaaagaaggaccactcacacttaacgaagaacaaccagcatagtcagcataatagctcaaggataatgacaaaagggcggtttggtgattattaaatatattccctgtgcatgaaaatgaaacgcagggaatgttcacgtttcatgaacagttacaaatgattgaatccaaggaaataactgtcaccttatacacctataaataaggacagaatccggagtgaaaaggatggccaatatgagagagaaaaagtaagaaattattattgattagattattgtattatgtattctaattattattcctaataatatggactcgtggagtatgtaaattttaattacaaaaccacgtaaaaaaatctcgtgttcatttattattataattaattatgtggtgcatttattacaaaaaatggctaatatatttgattaacgaaaatctatgataacaattagtataaacatgattcatttaaacctcaaaactctacattaat

SEQ ID NO: 315586 - DNA, 505 bp, Cannabis indica
cccatcatcaccttcatctcttcctttcttctcaacccaacccaaatcatgaacttccaaactttgactctctctttctcatttttttcaagtggcgttggagctcattgttggcatcatggagcacagaaccatctccgctgcccttgccctctctctctccctctctcgaaaatggagttttcaaaagtgagattcattatttttttctcattccctgactcacatgcccaactccagatccgatctctctctttctcgttcaagttctctctttctctctaattttttttgcaggtagtggtggtggtccggtgggatggtggtggttcgatgtgcttttcgtggtacaatgggttgctgtggtggtggtatttattactgttattgttgttgttagattgttgtggcagtccgaagggttgtggttagggttgtacatcggtcggtttgggcagtttattctatatattttctaaccgaatctaaagttcaggttgctaaa

SEQ ID NO: 315587 - DNA, 589 bp, Cannabis indica
cagattatcttcatgtagtggctggagaccacagttgctttttaatctttctacgcgcacaaaggtaggtgagtcacacatttggccaaggaatcggcgtgaggtgcacttgcatttttgaaagatttgagctcccttttttttcaaagtttggtattttcataaatccctttgctctcaaaattgaagatttggtcggtcatgtatttgatagtttagaattggctgcagaattcattactttatattctaacacagttggatttgattaagaaaagggcatcacaggcgaaactcagatggcgcaactcaaaactatacaccaggttcgtggttcgcaatgggttaactgtggggtctccgttggtttgccgtggggtcgtcatgggattgccgtgtggtcgccgtggagtcgccgtccgattgcctaggctggctgcagagaaatattctaatagaaagagtgtgggtttgttgcaaagatcaattaacagtattgtaatagagagagaaaattaagagtctcttttctaaatattaatattttttgttttttaaaataaatattacattcaggggtgatatgagt

SEQ ID NO: 315588 - DNA, 545 bp, Cannabis indica
tttttaagtttatgttttcaaaaaataatttaaaaaaaaaataaaaatatatatccgggttttgggtgggttggagtgtaacctgatttttgtgggttttggattaatgaaactcgaatctagtcggtgatgaaccaggtgtaacccaaacctagtttactaaaattaaaacctattttttttgagttttagactgggtgcgtttcaggtgttaatgtgcactcctattttttaatatataattttaaaataataataaaaaaatcttttacttttacattatatagattggatttattctattggttcagagaaataaaagtttagttgtcatgaggctttgggtaaccctatgagagtctttcacacgtccattgtgaccattagtgttttggtatcttaggtctttattttggttttgaaggtttgatttttatggcaactagaagtagtatagttgatgagctagcaacaaagaagtaatcttgcaatggaggcaagggatgttaggctatttttagcctatgttttggatccaatttatg

SEQ ID NO: 315589 - DNA, 1103 bp, Cannabis indica
aaaaaaaaaaaaaaattgtggcttgtgtaattatccgaaaagaaaatggatattctccaacttctcttgttttgatttagcccaatgtgagaagcccaggcccatttataatccaaaactgacttctcttcgttttggctttcttcagaccttacctcactaacaacggtacatcagaaatattatcactaactgatcggagatcggagatcagagatcggagaggaggaatttcatttcactccttggcctgatatacaataaattcactcacaacaggtactgtaattaatgctttgtctggttgtttgttttgagttttctctatacaaaccattctacaggtatatgatttagctatattatccaattctctctcttcttttttaatactagttaggtttgtcaaataagttcataatgtttagttctaagatttagtaattgtgttaataaattataattacgtaaggggcctaagggccagggccaacttttataattttctgattttggtttaacaaagaaatttctgttatcttcattcatgtgaatctcatttatatggtatatgttcctacaaatatatatatatatatatattttatttcagtactgtgtttaagtttgggatgattctatatcttgaagtgtttggtaacattgggaaacttctcttctaataaaatctaatttatagtttttcaaggcaatttgaattgtaattattttaactacatgtgttgttgattggagagataatgcttcattggatagtttatagcctgtttagagaagttgtgaacaattattggtttatttagagaagttttgaaccaaaatgggcaatgcttcattgaatagctaatagcttgttttgagaagttgtcaacaattattggtttttattcatttgcatctcttcagcatttttgttagtatttgacatgtttctgttaatactaatagaagttttaaaaatattatgataaaccataagaaattctgttagatatgaattttttttttgataatttgttagatatgaatttattatatacttttatatatattatatgattaaaagtggacaattaatcaat

SEQ ID NO: 315590 - DNA, 723 bp, Cannabis indica
accttcttgtagtgccatggaaagccaagagtcctatggcaacaacagcgccgaagaagacaacttcaataaatagccatgtcaccaccttcttctgaaataatattaaaaaaattccaataatccattattagtacatgtataataatacacatggcatgtatattgtatatatacataaatatgtttgataatacttacacgtccttgattagtagcataaatgaaaaaaatggtgaggtaaatgagttcaagaacaaggccaactgagttgatagtgacgacaagaaggctgtcagggtgaataaagggcatcccatagaacacccataacgcacaattaagcactgttgctagataaggatctggcttgaattcctccaccgccttattcttgatgattcgccaaaacgttgggctgcatatacatattatccccacatatatatcacatataattaattcatttttatatatttagtaaaagacaattataagtaaatcccgtgatgtaacaatacatatattatacgataataaacaatatatattctctttttttattattatttgtagtcatgtaaaatgaatgacaggccaagtggtgtgtgagtttgaggaaattgatattcccaaaaatgtaaaaaaaaaaaaagcatctttgaacgtaaaaatgtaaatattttataaaaaattgtgctttatgtaattattccttaaaaa

SEQ ID NO: 315591 - DNA, 652 bp, Cannabis indica
agctctaaaaatatttagttgccgaaaaactgggtaaacagagaatattgtcaatatgaccaattctagaactaaacttatcaactgagtgtttccagcttttaatagaattaatacagttagtctgtttggtgattagcttatctaaatggttggtaatattacaagccttagaccaagagcaactaaccgtatcaaagaaagaaggcttagtgagttagtagttttaaaaaataaccctcttttagatctattaattatactatcatcattaagaacaagcttaagaactctatgatctgagccataaaacctatatgatgatgagtgacatttggaaaggaatcaaactagtttttggtagcaaggccccaattaagacgctcaagagaggatccatgcttccaagtaaagtgattatccacaaactggaccgattgtaattcagatttagaaacaaactcttagaagtgagaaatatcataagctgccccggctaatagcctctgcaacatgggcagttgcacagggccccaaaataataggggcctatttatttttatttttttgagaatataaaaagatattaattaatattaaaaataggaaaggttattttggtagttgcccataacataacgttaatgttaat

SEQ ID NO: 315592 - DNA, 1439 bp, Cannabis indica
aatcatagaattaaaacaaaaaaaattatttataaaaaaaaaaataataattcaaattaaagaaatatattcttttcgaaaaagtaaattggtcaaatttaataggaaagataaaataaaaaccataaaattatatgaaatccaaaattattgatacaatacttcaaattaaacatatatatcacataaaaaaaatttaaagatgcaactatttctttagatgaaaaaaaaaagtgacaaaagataaaaaccctaacttatatgaaaccaagataagtgatgtacaatatattatttgtcaaaggccttcattgtgatagactatacccaaacttggcaggagagaaaaatccatatacagtgacatacaattcattcaatcaattatttgttgaaggctttccttgtgatagactatgccaagacttggtgggagagagaaatctgtaaatggagagaatttattgcaaatatgacttcgattgtagaattcaacattcacctgcaaataattatataattatttgtgagtgtgcgagaaaattattcaatatatgttatataagaaaaggaaagtatggtaacaatcatgaagagggaaaataaaaaaggtgaggctgtgagagattcaaagaaaggacataataacgatcttagctaaataaaagttcaaattgtataacattaggttggagaatatggttattggacttgatttttagatgtgttgtaattagacatattctaaatttttatgatttgcaaattgtttgaaaaattgaaaacttaatctgcatatttttctggactgttctggggcactgagtgccaaatatatttttgtgcaaatatttatgcaggttatgatttttgggtttattcaaaatacagctgttatgctgccgaattttctaaaaataaaaaggaatatgttcttttgttatgcttattatttgcctgctttggttatactgatgagagccatgttgatcatgttcggtgcatattgttgtttcacgacctagtctctgtgtcatcataggtagatcaggtgtgcactcacctgtaggtgaaagacctagaatctgtacagggagtgaattaaatctgagccccggtattatggtggatatcagatgcgactacccagttttggatgtcgttttctatgattggtattgagagctaggggtctagtggacggtgtgatatgcatttgacgtttgatttgtgattatttgtggtctctctattttatttgtacatattgatactgttgatgagatattttattttacaaagctaaccatgcaggaattttattaaaccaagggtcctttgatattagttgttttcctactgggctttataagctcaccccctattttctcccattccaggaactcagtttgatgctagtggatgaggatggtaccgtt

SEQ ID NO: 315593 - DNA, 911 bp, Cannabis indica
ttattcatttactcaatatttcattaattaacacaagtaagattataattatactctaaagtccatataatcacataataaataaaattatctaattaaatattattatattttgtgggatattacatttccacagtaggatagagtctatcttcgcaagatcaacagtgataccatcttatgaaattacatggcccaaaaatttaaattcagtcatctagaagtcacacttctctatcttagcatatgatcgatgatccctcaaggtctgtaatactattgccaagtgtttgacatgatcctcacgcgtcttaaatacaccaatatatcatcaatgaataccgccacatacttatccaagaacagtctaaagactctattcataagattcataaatgacgcatgtgcattcattaacccaaatgacatcaccaaaaatacaaagtgtccataacatgtcctgaaagtagtcttagggatatcttctttcctaatgctcaattgatgatagtctaacctcaagtcaatctttgaaaagaactttgatccaccgagttggttaaataattcaccaatcctcgacagagcatacttatttttttattgtcatttgattcaactgtctataattgacacaaaatcgcaaagttccatcaactttcttggcaaacaagactggagctccccatggggaagtactatgtctaatgtaacccttatccatcaactccccttattattttttcaatttagccaactttgctagtgccatgcaatatggggcaacagaaattggttgagctcaaggcatcaaattaatacaaaacatgatctccctgtcaagtggtaacactgataaatcttttggaaacacattcaaaaaaccactaaccattaatatccaagggaac

SEQ ID NO: 315594 - DNA, 889 bp, Cannabis indica
gggtaaaattgggttttagaaaaacttatcccattttacaaatgttacatactattagtttagaataataatttttaggtttattaagcatgatatttcaaaattactaggaagagtactctccgaaaaactacaatcagaccaataacaagagccacgagccaaacaatgggcagccttgttagcagatcgcttaacatgagaaacaattacattaaataaagaagacaataaaactttgcagtcttttacaacaattccaaacattgaaggcatatcaacttgacttatttttaaaggaaatatatttagttgacttattttatcttagagagaagggaatgaaacaaaaatgagttgagttgacacgacaacacaaaatgacaacaattttctcctcccaattagtatgttaatctttcttcaacaaataaatatttttcttttattttttctttattatcttaaaaaatcaaaaaagaaatgtcttcttattttattacacagttttattttcgaattattttttttaataagacaaccataaaatatttttatctcatacaaattcatgtacgagtttacttcaaacattaataactataccatataaaattaccgattcattattttataatagtaaatttataattcaaaaagttgtaaaaactaattataaaacaatagctttaacgaagtaatatgttatttttatttgaataccactaattattcaaattatttgaatattttaaaatttatttacaaatgaaatatatgaatatattataatgattatatatattttgtttggctaatttgtaatttccccccccccgaactatgacacttgctaaatcgtgccccctgaactatttttgacgttaaa

SEQ ID NO: 315595 - DNA, 1007 bp, Cannabis indica
aaatgaaataacatcatgctttagatcaacttgaagctctacggcactcctctaatttcttaatcaattatgtcaccttcgattgtctatgccaacccaaatgacaactttcacaaaccaaattgtgcgcaggcaccaagtacatttttaatatatcattttaatatgcatacacaattaaccaaataataacaaatatatattttaatcctagagtattttatgtgtgtgtagaactataagtctgcgaattaatctacatcgcaaaactctatttgagtgtctatgtgggtaggctggtcatgtctcgggaagtcatgatctcgattattattattattattattattattattattattattattattattattattattattattattattatgtactttaatgtattttctaaaaacatcattataatgatctcgtaaaaaattatatttgaaatattgttttggaaaaatatttggtgcacacccttaaaaagccatttggatgcaccctctaatattaattttattggcccaaatttaattgttgatgtttcttattgtagaccagtcactactacaaaaaactcctttagaggcggtttttaagcccttttagcgtcggttttctcgaaattcgctcccgacgttgatcagggcgacgctaaagggtttttaggaaccaacaccatatgtacccctatggcttcggttattggctaggaaccgacgctataggggtacatatggcgtcggttcctagccaatcaccgacgacatatgtggcgtagcaaccgacgccaaaagtaaccgaatttatgttttttcaaatctaattatataatttattttaattatatatttattaatttatatattattttatttaatttaaattacatatttattttttaaaatgtaaattaaatattatttaaatttggacctaataaccgcaatctaacgaccacttccgtaaaaaatcccggcactatacacatacaa

SEQ ID NO: 315596 - DNA, 594 bp, Cannabis indica
attacggtaaatttatcatattccaagatgatatagagaaatgaaaatcaagcaagggaggccctctatatataatgggcacatcctcaaaaaacgtgaaaaggataaggctcgcacttcaacaaggcaagagcccaatttattcaactgacaagaacacttaaaagaattcttgtaagctggggggcaagtgttaactccaaaaattggcgctcacaaatattggggattatttgaaacactataaagattgaccccatgatgttgcctaaataggggacgatagtagagaaggtagcaggttaatggtgtgggagtggctcaagtgcgagcctaaagagagtgaggggctcacatgcgagcctatagagagtgaggggctcacatgcgagcccgtgagtatgtgtgtgtgtgtgtgcgaatggctcgcatgcaagcttgttgtgagttaggggcttgtatgctgttggtattatatttatccaggatcttagatctatttgcaagtatgttgatttaacaacctaatattgaacttctaaaacgatgaactaaacacataaaagttaagaataacttacagtgattgcagcg

SEQ ID NO: 315597 - DNA, 725 bp, Cannabis indica
aattgtaattaacactcctcttaataatattagaataattagtatttttattttttaaaagtgccaacattattatttatcaagaattttgttgtttctaagaaatttgtcatttttcaagtctttgtcgttttcgaggattattgtcgtttttaagatttttagtgttcaaaaagttcttttttcaagaaaattttccaaatttacacactagctctcttatatttatacatagttaagacaaagatcacttatattgtgttgtttactcaatatgtcaaaaagttctctaaatactaatcttgagtttgagtttagttaaacaaaaaaaaaagcttgagtttgagtttgagacaaattttataccaaataaaacaaagttattccaagcctcattaatatcttcactttgtggctttataagatttcttatacaataatgatgtttcaaaaccaattctaactattattattattattctccaccattttggggcctagttatgagagttcctactttgtataacaagaatataatttcgatttgaagtattgttaaaaaataatatatttatttttttacttataagtagtagtaaaattaggagtaatattttattccaccctctaaaaagaagtatcgatgcacatgtactcttagtattcaggaaaatttattagtctaattttttttagagtaagactccctcaactatcaatttact

SEQ ID NO: 315598 - DNA, 1039 bp, Cannabis indica
aagttttcatccaaacaaaagccctaaaatcaaatatactagttctgatactaattgttattgttatcatagattataagcattaaacacacacaataatcaaatcatgaatgctcataatcttttaccaagatccatattttatttagagcattcaaaaataatataaacacatacctcccatttgtgcatccatttgagctatccaaacttaaccaagaaaatctgaatatggaataaaatagagacaatttgtggagcaacctttgttcccttttatgataccattaactatccttaacacttaatatatgtatatacccttctaaccctaaggggttattttgtttataggactaatcaagtgtaattaatggtgtactataacttaatgaaccaattatagttatatatgggtgttctcatgtgcgacataataaataattattaaccatcccattatggttgttgacaaatattaggcacagttaatgattatgtttatggtattaagtttatgattatattagtccacaataataattctaatataatttactttgaatgaatgataaactcaaaaacaccataaattatcttaaaaatacatgtgtaacatattttttttacatttgttttatttttgtttcattcaaatatttagggtatttcagtctttctaaaacaaaatttgactaaatttgtgttcaggggaccaatttttactatttaacaaatagcggatcatttttataatttcttaaaatagaagattcaaattggaatttagctaaaacagaagggatcgtttttgtattattattatctctgttttaaagatgaatgtttgtatataatgttgattcaattgatatttgtcttatttttaagtttttaccattaatttagattataatgcttttaaggtttttattttttttaaagggttattgttttaattattatacttttattttcttataagtctaattatttgaacactaacaataagggaaatttgattttctatacttagaaa

SEQ ID NO: 315599 - DNA, 993 bp, Cannabis indica
ttttttggattaattttaatttaagaactaaaatgtaagattattttctaaaataaaataaaataagagttagaataaaaaaaaatcactaaattggtatagatttaaaatttaacaccattaatgatgtagaatttagtatacatcaatttcgtacataatataatgtgtcatttatgtaataattctacaacaatttagtaaaataatataacattaaagatgctcttaacataataaaaagacaatagaaaagagtcattattggagggaaaacgattaactataattagtagctcattatgctgtctatactcacaactagggacatacaacatttaatctaattcaatcaaattgaaccgatctaatataatctaattacaaaaaattaaataactaattacaattgaattggattgaatgttaaaagttaaattctaattgaatttgataggttatgagatgccaatctcaataccaaggtgcacctccctcaaatctcaacacagggacttcaagctgacatcgatattaatcgagcaggtttgtacttttggttcaaggcttcggcgcttggattgcattccaattgtggtactgtcgatttcttgttttaaaaccttcatcttcaacacataagttcttctttaacttcgaattgatgttggaattgtgagataaccaatcatattgttttagggtctgtggtaaattctagggcataacccatcgtgtaatttctaaacttacccaattttcttaatgtctttcaaaaatttaatcacagaattgatggaaaagggagtcatccacgaggttggaattgatagaaaagggagagggagctgtgacagctgcgagtgaaggagacaaagtgagagaaggatatgcagaaagggatttttttctaggttaggattgattttgatttatgttaggaattttgaatcaattttttaaatataaatacagcaattttgttaggatgga

SEQ ID NO: 315600 - DNA, 2926 bp, Cannabis indica
tagtgtggaagactgtgaagaatccagattcaagagaatgacattcgtgctcagatcttggtgatactctgcgacagacagaatacaagggttagagatctgagcgggaggagacattaatattctgctgcacccaatgtaaggttttctgaaactttatatgtgtttaatttcattgttttagaaattcaaatttaggatgttaaataacatacatcgtagcaaatctatatcctggtaatatataatccaacagctcaacctacggaacatgataatgatggtcctatgatcccacaagatacgtaccaattgtcgagttggagaatcatcgtctcagatgccacctagaagaggcaaactgacaaaatgctgagttagaatgggaggcagccacgaccagggaaacacaagagaacaatgcgcaaaatcaacctgatcctggagtgagaagaccacgaggcagacctcgtggctcacaaactaggaggtaggagacggctcaagagaatcctcaaaacgcttaggaagaataacttggggaaactaagggtccccctaagaatgaacaaccaaatgatcaacgagagccttctcacagaaatgagaacagaaggcgaccaaataccagggaacaggaaatccctcgtgggaataagggaaatcttgggactcaaactgggacacatgggtcacaaacgtccttctcaaaccaacagggaaggggcacgtacaaaccccagtaggaggcatgcaacgacccatacccaagggaggaggacgggacgtgaagaggcgggtgttaccttgggatgcacgagaactcatagtcaatcaatgcgaggaggagaaagtactcatgtcaataatgatcgagaaattacatgcataagtaaaaataaaagttactcaaggacgaggtccatgagtaggacgaggtccactagcaactataaccaacaacgaccggatcttcacagtcacttgaaccagaaaaaacttaatcttctccaataactcaatcaaaagcaagaggatcctatctaatggcgaatagatgagttagaggataaattcaggaggtatcaagttggggaacaaggaaagcagtctggatatgactcggatgaggaacttgagccattccatccaaacatcatgaatactccattccctcagggattcaaaaaccctcacgtctcgtcatatgatgggaacatagattcggtcacgcatttgaataatttcaataccatcatgcgagccagcaatgttactcatcattcgatcacctcttacgaacagttgtctaaggacttcaaaaaacagttccaggccataggggacaggcgacccgaagcgtcctcgctcaccaacataaagcaacagtcgggtgagacgcttaagacctacttacgtcattttagtatagctgctgcgaggtcgaggaacctggaggatagtacccagcttactactcttcacgcagggatcactactgatctctccactattggaggcaaactaagggatgacctatagggtcgcccagtaaaaaatattactgagttcaatgaaagagctcaagtatttttttgaaaagaggaagctagaaaagtgataaagttgttaaagattggcttgggagacaaacctagcactgtctcaacaagtcttgtctcgaccaaggctgataatccatgagcctctagttcaaagaggaaggataactctaaggagtcagccaaggacaagaaaaagcaatagaagcacgacaagtacgcgccaacttacaccatttacactgagcttaatgaaactcgaaaaaacatttatctcacacatgagcatagggttgcatttcgtaaacctaagcccattaggcacgcgagacataagagagacgcaaccaaattttgtaagtaccacaaagacattgtgcatatgatagacgagtgtcgtcagctaaaggatgagatagagagtctcaccgcgcgaggccacttcaagtaatatgtgaaaagacatggcaatggacataactagcccaatccgcccaataacccagaaaaccagggattacaaccttcacctcttgaaggagaggatatcgtggttatctcgggagggccacatattactggagagagcaacaatgcccaaaggaggtatgtgaaggaagtgaagaacacgcagtctgcctttgctccagaaccttccaagaaagtgaagactgaagaacctcggatcatattcttgaaggaagatgaaaacgagtaagatatcctcacattgacccactggtaattaccatccagcttgccaataagaggacaaaaagggtgctagtggacaacggaagttcagtgaacatcctctatagggatatcctgaagaaaatgggacttgaaaaagccaagttaataccttgcatggtaaatttttgttgatttacaagcgacattgtttccagttaaggaataatcgaactcccattaacattgggcaaagcacctttatccaccaggataatgctagaatttttggttgtcgacttgccatcagcttacaacatactgttgggtcgaccagcattaattggactaggggcagttagttcaattaagcacatatccctaaagtttcagacactaaagggtgtgggagtagtgcgaggtgatcaaatgttggctcgcaaatgctatcgtatagagctgcagcacaaaaaggctggtcaccaactaattgcagtcttgattgaagaaggcaagaaaaaggatgaacatcttgatcctcagactcaagatgaaagaaatatattgaaatcaattaaggagctggaagaggttgttctagatccaggaaatcccataaagtgtgtatacattgggaagaacctggaggaacaattgaaatagcagctaat

SEQ ID NO: 315601 - DNA, 1125 bp, Cannabis indica
ttgcacagcttacccggtatttccccttacggatcacgggactactgactgtcacataagtctattattttagatagggattctaagttcacctctaagttttggaaaagtctttaatgaggcatgggtacaaagctaaaattcagtacaactttccatgctcagatagatagccagtctgagagaacaatttagatactcgaagatatgttacaagcatgtgtaatgaattttgaaggctcatggcataagtatctaccactgatagatttttcatacaataatagttatcaaagtacgataaggatggctccctttgagatgtcgtatggcaggaaatatagatctccaatttattgggatgaaatcgaagaaagaaaacacctaggtttggaattagttcatcggaccaatgaggcaatagagaagaacaaggccaaaatgcttgcttctcagagcaggcaataaagctatgcagattcaaagcgcgaaaacatggaatttcaggtaggagatcatgccttcctacaggcatccctaatgaaaggggttaaacgttttaggaagaaatggcaagtgtgccctagattcactgggctttttgagattctcgaaaaggttagattggtagagtatcgtctagtcttgcctctagcattataagcagtatgtaacgtatttcatgtcttcatgttaagaaaatacgtaaaaggtctaataccacaaccccgcctaaactcaccacttgagcttacataacatatttctctataacaaaaggttctatatttacccatgtgactaaaataacacttcgttgtattttccatcgccaccgagctagaattataaaaataatacattttgcatttaacatgaactttcacatataattatcaataataataattattaatttttaaagccctcaataatccatatctaaattatgtagtcattacaacaatagattcagaattgtactcttaattatatagaacgctctatatgtaccaagatatagatacgctatgaattatctattgttataattcaaatagtcaaagatcctctatagatgatctacaacgagtatagggataaatttaccattctaccattcaa

SEQ ID NO: 315602 - DNA, 4080 bp, Cannabis indica
aatcagacataattcattacatgaaaatataactcatggagcaggatcgacaataataggtttactaagtcgcttacaataatcaggaaaaaaatcttaacaacaacctcaactaagggtctaataactcaccaaccataaagcatcaaaaaagtataaagtaaaataggtttctaaactaaatgagagtccgcctatcaatgacaattagtcaatgatctttcaacaaaattagaaaataacaactttattattcacatatgacaaaaaaaaaataatcaaatgaccaactatgatgaggcatccaaaaccacatgtttagcataatttttttttgaacaaaaacaaaattactttgataaaagacgcatgtttggcacaactttttaaaaaatagatgttgtttttagaaaaagttttgttataaaggtatttgataaacagttcaaattagcttattgaagaatttttgaagaatatacaactaaaaaattaaagttggttcaacctaatttttaagaaaaattattttgattaaaagactctataacaaatttatttatactggtatgcatttacttatgattttttggcagctaaaccctttcaactctcatttcacttgcactcaaccttttaagctctaattttggtgagaaaacctatcaaactactattctatcatttttaaggtgtcgtcccacaaaatttccgttagtttgtcattttacatacgcggctagtaacacataaccattacggtctaatgtggctgccaatatggattgtacatgtatacacaaatgtacatattgatgcaaaaatctagacacagaaatttggccacacccgctcgctagattggcgagaatgtattataagtaagtataaataagatagacacaacgatttatagtagttcactccctgtatcgcaacagtaatggacttatgtctacttcaagttttatttctcacgagatgaattacagaaaatagctaagtcttggcactctaatttctagagagagaaactagagagagatgctctgaccttatgtgtacttttttgaacttgaaaaatgagctagtggagctctccttttataggaaaggaggccatattaaaataataataaaatatgaaaaaataaatttaggctatatttgagtgtagatgacgatctaatagtgaaattaactttggaggtcaatcatcaatttttaaagcttgaattgcatacgtgtgaccgacttcgggtaagttgcagcttaaattcgtatctctcttgagggtaaaatttggagtcgataacttcataattaaaattcaagtgtgagacatgagttgatagagcattgaaatagatttgaatcgcaagctgaatcgaatcaattggatcaatattgagtaaattatgatcgttttactgaaggatgggctgctcccatagcctaggttaacatgtgacgtcaacctggacattagggcaaggaaaaatagtgtctaggatgtactttttgaagtctaagtgatattatgacatcacttaactagtttctacattcttgtaaagttagtcaccatttctcaaagatgttgttatcctgtgaaaacgggagacttgaaacaattcagtttccaagtaagtcactttgtcataaaagtgaaatataaagttgtgaatttgaatttatgatttcatagctctcggtcattataaaaaactagacaaacggttgagacgaaattagaatcgaataagcaaaacccagtgcacctggccatttgttaacctgggtgatgggtgctctttttcagagattctggtatgttgttttgatacttccaaggttcttaaaatcaagggcaaggtctcccacccaattttttaccattttcgagagaattctcgtagcagaatttgcatttggatgattgaaaccaacacaccaagttgattgtcaatctagacgcggggctcagttttgatgcccatgtaattgttattttctcctcaattttacttgtatcttccttatttctgatgacgaaaaaaatgccagaacactattttggaaaaaggattggaaacagcccaagttatgtcaacctgggcgctaggcctagtattaggtgtcaacttgggtgttgggtccaattttcggcccttagatagttccatttgctcccttgaaatacttgaatcgtaatcattgatgaaaatagagaatattcccaaaagacttttcggaaaaattctttgaaatttttctaggttgacaaaatgtcaacttgggcgctaggcccgcactaagtgtcaacttgggcactaggccagcactaggtgtcaacctgggcactggtcccttgttttggccaccaagttggtctgttttttcttcaaaaatacttatgtcctcgtttttgatgaaacaaagaagatgcattggatggattttgtcattttgtacagagaactaagaccacatagctatgaataaaacagttagcaacatattaaatttataaaatcttcaatcagtggttgctagtacggttcactaatgcccattctttggtgcaagtaatcttggttcagattactgatgtagtgagacatctaagtgaaggtattgtatataatatagattatatattgacatgtgtctttgttataatctggaagagctttgttgttcttggtttttgtttgtgttaatgggcttgggttatctctaaatgggttgtgggttattttttttttcaattcaagaggagttttcccatttgagtgttcacatgtctggtcaggtccagggggagcatcttgatgttttattatttttccagcagagacctcttcccagggatagtttccatggtgggagtgtttcattatgctcaatggggggagatattggttttttgtgatagcctagcatctttgatttttgttagtttcttttttatattgttgattgcattgaccataattttccaaatggaagattgtaagtgccatgttttttatggaaaattatgttggttgttggtttgtctgttggcagtttagctgcatcctttctagctttattagttgtgcatttaagactgtgttagatgcatctgttaaatttgttttcatttatcttttgctaggtcaggttttagttcgttgcatttattgtttagctttttgccaacgtggctgagttagtttatttgttgtttaggttggttattcaaaaatgttaggtataaaaagttgatctagcttttttctaatttcttcttcatctttgatagaatcatttagagattcttgctttgctagggcaaaatccttttatgtgtattctgtgtgttttcagcttgtaattcattagataaaggcttgaagaaggaatgttgatctacaatgtctaaagaaagttcaaactgatctgctgaagaaagcttgttggaagcaaagggatcttgtcttctcagatataaggggacttagatctttattcttaattgtaattaagtttattagttacttttgtatgaaatcatttcagtttacattgtttgatttgtgaatcataattggaaatgtattttggatgatttcatagtgaatgttattttacccggttcttgaggacccaagaaatattcagtttgaatgagtttctattgtcaggggaaacttgtaatttatgtgttcattcatttacattaacagtgtttatatttgtgttaaaaatctaaaattaattaattagctatcagataatcttaaactttcagagtaaaagaaaaaaggaggacaaatagaagaagccaatactaaataatagataaatgttcacgtaaaaaagaaaaagctagcgtgtatgtatgcctaggacaaatagaaaaaataactcctgtatttacttcagtgagcgtattaaaatatagtaaatatattttggactgtagtttgtaaagttatcaattgaactctctattttattaaatgaaaagataaactctgtatttttaaaattgtacaataaaaccttgaattaatttttgttcaaaataaa

SEQ ID NO: 315603 - DNA, 935 bp, Cannabis indica
ccccttacacatacaagcctctcataattcacgagggatggtgattgtgaacattctttatttgtaactcgctatgtgatcgttagggttcgttgttccatcatacatctttatcgattggaagaacttttttggcatatccacaagagctatagcatccactaatggggagttggcgaagctacttggtaagctccttttgataggtacggggacttctgggattctgtgaatcatagcctccatgccttcaagcttccttggaaccattttttaatcatctcctcaagtgttattgtgacggcttgacctgcagatggaacaataggagcattagatatcaaaacacttggagggattgggccggaggtcctgagttgtccttcttgagcacatggcatgggaatgcttctgtctggaaccgatgtgacctaggcatcggtcatagtttcgtcacctaccaaagggggtccatgtatttgagtagatacccctgttatcgatccatctactccagtagtcgttgtagttgatcgttggtgtatttttttctttgttggcattcttgtgaccgctggacgttggcctaagtttgtagtcaaagtggaatcaagggattgaatggatggaattggaacacaaaaccttgattgagactccgtcgtgttacgttgatcagactttagtatctccacctttgatttcagcagagcattttcttcttggaatgctttattctcctcttgtaccattctgaggctttcattggtttcccccatttgagacataagagtagctatctaggattgaacttcgatatctccttctaaattttccatggtattggatacgtgtcccttgctcctgattcagtttgtcaaggacccacagtgggtgctaaattgtaaagggaaaaatctacaatgatcggaatg

SEQ ID NO: 315604 - DNA, 1624 bp, Cannabis indica
ggatccatccaataccaagaaaaaacagtaaaactttaatgttaattttcatatatacatatagatttgacgtataacaatataaaatctaattaatcatccaaactaaatgaaaatactaattagttcgattgaatgttggatgtattagatttttagacaccccatccaccatccgatccgatccaattggatatttaaaaataacatccaacctgatccgatcacaattggatatccaatgtttggcggtcggttataattggatcggtcggttctcattggattggatcgatttatgcacacccataaataaatcattgataatagtactgctacaccatacctgtcataaaaagtgtataccccattatttagctgtaaattcatgtcaaacaacaattttttttaacaacaatttaaatccaagtgttttggaagaaagaagtatatcatcatttagttcgtcgctctagaaccttctagcgggctgcatcccgttccttctgttttctcctgttttctcaaatttctggatctaatcctgtgtatctcatcttagtgatgtcgttttactgcttcaatccagcgttttctctcttttctttatctttgctttggtttgactttctgtttctctgtttgatcatttattgctcttcacatcaactaatcttcatttattgctctggagtttagatatcttttagatctcttttcaggggagtttatttgtcttttgtttccttctttggtttattttttgtttccatttaatgcatgccgtcgttttgagcagcccaaggatggaggcgatcattgctcctaccggctatggcgatactatagggatactgaaaggactggtacgacatcttcaggcaaccttcctctgcaagtctccactcttcaggtatttctctaagtttctctatttaaggttttggtatctgttgcgttctcttctcatccaactctttgtccctagttttcttcctgtagctattccttcttctgttttcttgagcctttcaatggattccctagctcttaacatttctgaagttttaaaccttaccgaccgtgaagctgttgttcatgatgttgatgatgatactgggggggttagtcaaactagcagaactttttgccttgtgtttagaatcctttcccctagaaccatcaagcttgagtggtttgaagtggcaatgagaaatgcatggattacccgaggccctttaactttctctgaatatgggtcgggtatgttcatggtggagtttcattatgagggggacatgcgaagagtacttgagggtcagccatggcactttgaccactgtttggtcacttgtgctaatcccacaggtctggacactcttttgcctaaccagcttaggtactcccctttttggatacaagtccactcgattccttttggccagaaatccctgaaacttgccaagttgattggagatgaagtgggggacttcctagaggttgacaagcttactcttttcaaagtctctgagctttttcttcgagtccgtgttctcatcaatatctctaagcccatcactggtggaattatggttgattttaagagtatccaccgtgagaaatg

SEQ ID NO: 315605 - DNA, 1029 bp, Cannabis indica
attttcaattcacccccttcttgaaaacatatacttgggctaacatataagacgttgagacaatcttaagaaaactttcaaggggcttcttcaactaacaagacttttgaaagagcatcatcaacaatgaaattcatgaacatttgattatacttctctccacaagtatcaagttaataaattttcttaattcaatttcatattaagaatgaagattaagaaagcaaatgtaaacatgaacatgtatatatagtggaaattaatggcattacttaatcaaaaagattaatccattatcttctacaaattatggaagttaaagacatgaatgaagttaatgtgaggtcaatataaattattggtcttgattacaataaggaccaattacagtaagcaaattaagaaacatacaaatatggctagctgattgagtctgtattacccgagtcaatcaaagtttccatgcaatctctttagtgaaacctaacctaggattaatacatggattggatgtgatatacatacaaaaacaacaaaagaaaaggaaaacataaacataataagcattgattgaatgagttattcaaatttgtataaggtattaaggttgtatcagtttcagattaataatatgcaaaagaaagaattaactactgaaatgcaccattcatatgattcatagtattctatatatttgattaatcataaccactgctctaaaccgtcgagaatagcaaattttcccgacggtgtaaaatagtcatttaattttactagacgacggtacccaaaaaaagcgttttaagaaccgtgtggaattcccctttttatagtagtcatttaagttgattcagcaaaatttcaaggggggcttcttcaattaataacattttcgaaagaacataccaaaaagctgtaacaacaaaataataatgaaacaaagtagaacagagaaaagagtaatacctatattttgttgtcattgaaatatatatttgggatgtgagcaataattggccagtcctcccc

SEQ ID NO: 315606 - DNA, 1639 bp, Cannabis indica
ttaaaaataataattttaatttataaaattttgaaatcaaattatatattttttattgatttaactctttttcaataaattaaaataaaattatataccatatatattattatttggagctcaattgttttagataatatatgaatataatttttaatcttagagttgcatattgtgttttactaatgtatagtcttctaataatttcaaacgatacttttcaaaagtatcaaatatgtatatgataactttttaaaaaactttaaaatatatatatagtaactaataatttatttatttttaatggacttataagtactaataatatcgatttcaaatatatataaagttttaactaaaaaatctttattcgatctatatgccattaaaaaaagtatatatttgcttaatttaggatatgaaaatgattttaaaaatctgaaaattaaaaacaattctatctagaaaaatcattatctatgcaaggtcaaaaaaaattaacaaattattttatgatacataccaatatatataaaaaaaaaataaaaaaaaaataattttttttatcaattattataaaactgatatttaaaaggttaaacattatcatgctatttgaatgttatttaaactttaattaattaaagagaataataatttaaatagtatataaatcaaatccaaattgttatttgaaatttaaatttaaatttaaataaatatttaaaaaaaaaatcatgttatatatcataaaactcaaatttaaatttcttagattttttttaattaaatcatcccacaattatcgataataaattgtttttatgatacatatatgttaaaatatcaaccgtttagttcgttatatttatcacttaatttagtattatttttattaagaaataaaaacttgtttattctaaataatccgtatgataattaactctatataaacataactaataccacacaagttttcatcgaaattctcattcataataagaaaaaaaaaagtgagtatagagattttttaacatggctaggttttcgatttttctcttttctcttatggtggctttgagtttctgtaatgcacaacctcttaacagtgtcaacaaaactcacacgagttgcgaagaattacaacaattacaaccgtgctctgctaacatattctcttttttcattcgaaagcaacctattaactctacatgttgcgaatctattctcagcatcgccgataaatgttcaggtgatccaatgcctatttggtttctcaaaagccaaaaatattgcactattgtaaatactattaaatcgacaccaccagtttcttcaatggctccgaagcaaaagtcaacaccgttgaacgctacatttcctgttgttgatggtctcaagcaaaattgtgtacatgaactacatcgcttaacaccttgtattggtgatataaaggcacatatttggacaaatagtacaatcaactctacatgttgcgctacaattctcgacgtgggcaaccagtgtcattgggattcacgaccactatggtttgcgcaaagcaaagacttctgcaaaaatcactagtgatgagacatctctattagtttgagcttgtttagtttagtttttttttctt

SEQ ID NO: 315607 - DNA, 1607 bp, Cannabis indica
actcttatgtgtttatttcattgttttagaattcatattaggatgttaatataacatacttggtagtaaatctagatcttcgtaaaatatttccaacaattccaaagactaccttttgtactaggtatggtcattaaaaattactggttacggatttgatgtatagggtattcaaagattttcttgatataagttttatgcaattaatgatgatatccttgtgtactctcaatctaaaggggagcatgagaaacatctacgaatagttttacagcgactacaggatcataagcattatgccaaatttaagaagtgtgcattttggttatcccaggtgtcctttctagggcacattgttagtaaagatcggatcatggttgatctagcttagattagggattggccaagaccgaatatagtaactaaagtcaaaagttttctaggattagctgggtatgatagttgatttgcaaaatggtttttcaagatttcagtgcccttaacagagttaatttcttgtgcttcttgtcagttgcaggagtatgagtggtggtacccaagtcatgacttggaacttaccgtagttgtttttgctttgaagatttagcgacattttctccatggagaaaagtgtgaaatctatactaatcacaagggcctcaaatatttccttactcacaaagatttcaatatgagacagagacggtggttggaattagctaaagactacgattgtgaaattctctatcatcatgggaaggccaatgtagtggcaaatgccctaaggaggaagggccccaggcaagttcttagcacgactatgatttccccgcaattagcagtagatatgatcaaatcaagtattgagtttcttgttggcagacttaacattttaacactacaattagactgtttaaaaagaattagaaatcctcagttcatggatccagaattggtgaagaatcgagaagaagtcttagctagccaagctaaacacttctaaatatcaactaaggggatatttctttataaatcctgagtttgcgttccaactaatattgaactcaggaatgaaattcttcataaagctcataccactccctattcactacatcttggtatcactaagatgtaccaagatttaaaaccctattatttgtgttaggtatgaagaaggatgtggtataatatgggactaggtgcttgacttgtcagtagattaaggttgagcattgatgacttgcagcgttgttccagccttttacacatcccaagtgaaagtggaaggatgttaccatagattttatggttggattacctagaaccacaggtatcttcgattccatatgggtagttatggatcagtttactaggtcagcacactttctaccagtgaaaataacgtattcagtagatcagtatgtaaagctctttgtaaaagaaatagtatgacttcaaggagctctaaagtccattgttttggatagggctctgaaattcacatctaagttttaggtaagtctccaacaagccatgggtacaaaaataaagttaagtacagctttccatcctcacacagatggtcaatccgagaggacaattcagat

SEQ ID NO: 315608 - DNA, 776 bp, Cannabis indica
actcctgtttatggtagggatggtggtgactccaccactgagcagaaaagaaaagttgttccagcttctggtggctcggggcaaagcaagcggttccgtgggaaccaaggcagaggaggacgccagggttactcttatcctgagtgtccaaggtgcaagaaacatcatccgggagagtgtaaccggaagacatgactagaataagtccccgtgttatttgtcatgcattgaacatagaccctaaggcggatccagacagacagaagcagagacctctagatccaatatggtcagaagcagtaaaaacaaaagtaaataagttagttgactgctatgactcaggacacttaactccacaaatgttttcatacttgtcaggtgtcaaacaatgatgttcatgttactagagttagtttttaggtaaacactttctaaaagtattggactgatggactcctcacctatttttcgtattaaataaagatatttatagttttctttttaataatggtgtaatatttatttagaatcaccgatgttgcttataattttaaaaataaatttcaaaaaattatttaacatattgaagtactaaaaatatcaactatagccatcaattttaaaaacattaaaccgttaaattttaattcaatactaataacaaaaagaaaatatatctaaatgttattgttactactatcaatttattataatttttaaaatatgtacagttggaattccgtattttaatattcccagtttgattatttaattaa

SEQ ID NO: 315609 - DNA, 517 bp, Cannabis indica
taaaaaaaaaaaaacttaatgttgtttggctaacattttctttttctgatatataatgtttggctagcatttttgaaaaattatttttagatttttttacataaaaaattaatattctatataccacgacattaacctagccccacacggaccttccctagactcgcccgacatcagactcgagcccaaactcagactgggactcaggaccttgaactgaccctaggacccaaacctggactggggtccaagttcgcgttgagatttagatccaggtctgggtttgggtctgagttctatgtctgagtttaggtcctggtcctaaggttgggtacaagttcgagtctaagtccaatgctggatttggattcgggtccatgtatatgtccgagtcctaggtttaggttcaagtcctaaatttgggtccgggtatatgagaggaaatgtaaaaaagaatatgttagacaaaaatataaaatagtttttgaaaatagaaaataataatttgatttttttt

SEQ ID NO: 315610 - DNA, 702 bp, Cannabis indica
actatttttattttctaattttttatcttttcttaatttttatttaaccaaatagaagtagaagtttaattttaacttacttaactacaattcttgtgggaacgacctcactttactacttctaataatacgtgcacaaccatcctcgaataaaggatgggatgcttttatttttgtaattggtggtaattggcttttgagagttattaaccatgaccaattcacattcgtgaatattttccaaatcaattcactggcatgtcgggatgctttttgaaaatcgtaagagcaccatttccaaacttgggattatacaccatataaagtattgttcataccatattgatgaaattttgattgaagaagtctttgccccctgccaactctttgtgtatattttattattggtatttttgctcttaagattataactataatggatcagagctcacttacagaactatatacaaactacccagaattcctgaaacatgttgaaattaaaaacgacccaaggtgtttgcaaaaatccacgctactaaaattgaacttctcagaatgaagattgatgaatatatatgacaacaatacaaatctataaatagatataaatctttgtaactgtgtgtgaatcagataagatttttttgagtggaaattatgatagtataaggttgagagagagagtctaaataagagaga

SEQ ID NO: 315611 - DNA, 678 bp, Cannabis indica
aacgccacctaaatttatggtctatttttttttttttcaaaaaaatacagaatctgaattgccatttaataaaacagaataagacccaattaacaacttttataatacacaaaatctaaaatggtttttttttgttaaaaaaagataaaatcaacattaataactataaatttggtgaagtgttaagaagtaaattaatatagtgaaagttattctccaatcccacacatgattgaaaaatttggaacacgtaattttctttgctaagtccaatcccaccttcaaatgagatgaaacactttcaacttgggccatgtgatattgagttgttatgtgagtgagactattcatctatgtgatcattgacgtagtagcccatatgttgatattataccaagtttacttaagcgtaaattgcggcataactctcgataacattatttcgctagcaattaattcttaaattccaaattttgagagtaaaactcctataaattcaagttctcttagcacttagcccattttatccatttttgattgttaactattaagttggatgtccatgtatacataagatattatccacgtgaacacaatatacacatgacactatactattggcacacataaataaacatttaaaactaaataaaaataaaataaattaatttaaaaaaa

SEQ ID NO: 315612 - DNA, 1415 bp, Cannabis indica
aaatattgttattttttttcaaaaatactgtgtatatattgtgttaagttttccactgttgtttttagttgttctgttttgttgttttacggttcttttataaaaagacattcatgtgaccgtaaaattgtaaacttttattcaaaattcagtatttttgtaaaaactttaaataattttaaggtccgtgttcaaatcatagtaacctcaaccctaaattttgttaaatataagtcgatacgtaattacactaattgatttggatgttaatgttgatattatagtggcaatgtgatctatctattcatataatcaaagttttataatgttttttctttttaaatttcttgttgcagaggagtccctcaaattgaagttacttttgaggttgatgtgaatgggattttacatgttaaagctgaggacaaagcagcaaagaagattgaatccataaccattacagatgagaaaggtcgtttaagccaagaagatatagaaaggatggtgaaggaggctgaagaatttgctgaagaagataagatgatgaaagaaaagattgactccaggaacaaacttgagacctacgtttacaacatgaaaaacactgttaatgacaatgacaagcttggtggtaagattagttcagaggataaggaaaagattgagaatactctgaaagaggctcttgaatggttggatgagaatcaaagtgctgagaaggaagaatatgatgtgaagttgaaagaggttgaagaggtgtgtaatcctgttataagacaggtttatgagaacactagtgggaattcaatgaagaagaagaagaagaagactcctataatgacgagttatagttagattattttagtatcaaaaatgtcaatctcattcttagattattttagtattttttatttttataaacaattttttttcttttataaattaatcataaatttagtatagtaaaaaatatttatcaattggtttaattcaacaattattaagtgtttattccaaaaaaaaaatacaattatataatttctgccatttgttatttagcagtattgtaaatacggatcagattttttgatattgcacaaactggcacgagcacgtttagtaatgaaaaaatgtaggctatgctacaaattgacatgacacaaacaaaaaaaaaatgtgcttaagcacaacaagatacgagaagcacgaaagtcacatcactaagcacgaatagccaaaaaacgcaccacgcgacaagccgaaaaacaaagtttaataataataataataataataataataataataataataataatagatatgtatttattgattataataaattaaaataataataaaatttaaatataatattgaatattatagtttcataatttaaactattaaaacat

SEQ ID NO: 315613 - DNA, 1321 bp, Cannabis indica
tttctataagtataattattgtttttaaaataaaattaattaaaatatatttttatgtgtctaaatatggagggttgggctatgtgtcttgggctaatttttgtaaacccaagaatgagggaggtttaggttttaggaaattgattcaatggaggctaccaagtccctttggaggctagttggtattggaaaagaatagttcaaaccaagaaaaggataaaacaagtcttttcccaaaaagtctttagcaattattagttttccatagctaatatgtacgccaagatgcctcatggaagtgctcttagatggcgttatgatggcatttgggatagatttttcactcctaaacacaggttcgttggctagccttgaagagctatttgtctatctcggacaaactttgtcgatttaatcatatcaacttttccttgtgtttgttgtgtggaagtggagtggagagccattctcacctcttttttgattgtatttacaacagtttagtggttcatcaagtttggctttggattggtatttctagttggtaaaaagagccccatgatgtcctaaagtgattcgaaaggcaaaagttaatttctagaggtaaaagaaaaggttcttttgagtgtcattacaaccacaatttattcatttgacatgctagaaacaaggtgctttgagagtaaaaacttcttactattaagatcacttttaattgtattgctaatagtgtttgtgtcagagtgaactctttgaaagttaagaacttgagtaaaataaatagtgagtgggtggaagctttaacaaaagctttgtaagtagctttattttgtaagtgttgttgttgagttcaattaacttttttgaattttcaaaaacaaaaattgattcaatggaatcaagtggccttagggaaatatatttgggcggtggctcagaagcaagataatctttgggtaaaataagcacacaatgtctatatacaaagcaataattggtggatgtatgaattcacaagtcaaggaagttggtattagcaataaattttcaaagtgaaagagaagatgaagagaatcatgacagaatatcagttgcaacaatgttgatacactatctgattcagttatgatgtactgaataacatgggggagaaagtcagctagtttggataggtatggggtcgatataatgtacccaaatatcgagtcattctttggttggctatgttggaccgattgcaaactagagaaagactttgttataccgaaattaaaaacaatgaaattggaacacttcactctatttttacataatttcataa

SEQ ID NO: 315614 - DNA, 1353 bp, Cannabis indica
atggtacggagttacaagtgactcaaaaacttgttggctacacagatagtgactggccagggtccatagacaacatgaagagcacgtcaggatatgccttcacacttggatcaggaatattttcatgggcatcaaagaagcaagcaactgttgcgcaatcatcagcagaagcagagtacattgcagcagcaatgactacaagccaagttatatggctcaaaagaatacttgaagacatgagagaattacaagaagaagctgcaaagatatattgcaatagcaaatcagctatagcaatggggaaaaatctaatatttcatagtagaactaagcatataagcatcaagtaccatttcatcagggacgcagaagcaaacaaagaaatcgagctcaagcactgcaagagtgaagagcaggcagcagacatattcacaaaggcactaccaagaggcaggttcgagctactacgagacacgattggagttaccgaaatgtgtaccaaggaggagtgttaaaatgtgctacacatttctagaatatttgtatcttaaaatattctagtgaaaactttagaaacctagcaaaataaataaactagaaaagcctagaatatttagaaaactataagtaaccaatcaagaagattgtagaagaatgtaaatcaattagaaaagtctagaaaaattataaattatgtagaactagaataatctagatgaaattaaatgtaggggtaaacaactataaataccccatcaagcttccaaattgtaaccaagcttgagtaagccaaatcaagtcttttactactaacttactaccttgtttcctctcttactacacacataaaaattaaacacataactcttccttgtcccaccaatcatccaacttatcaacttatcaacatcatcatactacactacctaatatctatcctatacaactctaactctaaaccaatacaaatttattctcaaaccatcagatacaaactaatctttggatgtggaatgtagaatgcaaatgaatttttagtgaggtgatttaagaggatcataagcaagtactgcaccataaacaaggttgaaaaaacgtcctttgggatttgggagagtaaagagtggtgaaatattttctttgatggtaatggaattataaatataatccattaacatgagagagagatgtccaaaaaataaaataataaaactttaatataaaatccataaattatgatttttcgacattatacattatgtactctattttgccaagaaaacataatgtctacaaactactactactaataaaaaaaatgggcttttttatttttacacttcaaaagagttt

SEQ ID NO: 315615 - DNA, 1707 bp, Cannabis indica
ccaatgttgcaaattttaaagctatccttaagctgagagtcaccttcacaattccctttctttaggcgtgtggtggtccagtgtgtgagtcctcacccatgcgcgtaaaattagatttcccttagggccatacccatatctcaaacctaccatgttgagaatcatggggttccatcttaaaaccaattggcaatgagtggagtagcccatgttcttatatatgactcaattctctaccatttattctatgtgggacaatgtccttaacaggcttctactcttcccttgtcacgtaaatcgcgtatcctgaaccaaaaaaaaagaagaaaacgaaacagagctctggagacaacaattgaacctccattaccgccgttttccaagctgcgccagtcgagtctccgttgcaagcatccttatgttgtcagagcttagctctccgacccgtccccaaatcatcgcaatgtgagttgatttaatagtagtatacaataggaaaatctccttatatttagtagtagttgattttaaaaaaaaatgataatagtagtaggacgatattttcgttattgccacgacccataaattgtttctcaaaggctggttatgattctctcaaagaaaaaagaaaaagaaaaaggagcttggttatgattaactccaacaatattaaacgtgaatgaggggatagaatatgtgatagataataatgttgtacaactcaagtatactccatctaatttttctatagtcaatttgatttttcatttgcatggtaggcctttttgattagaaatgtcgataaatgtataatttttctaatttttacacccactaaaagtattacattatttcttgtatccacaactctgaattcaatcaaatatgctccaacgtatcaattggtgtgaagactttatagaaaagaaatatataaatcttatatagtgatataaggttaaataaccaacctccattttcttatataactcttacttcgggcagcatatcttaactcataaaattcattaaccatgaaacttaagagccccaccacttgtgttttttggcttgcgcctttttcattcttgtatttgatggtgtcatttgatgtggtgatgggcaatgcattaggaaacgaaactgatagatttgctctactcaagttcaaagaatcagtctttagtgacccttttggagtgttgagatcttggaatgattccactcacttctgcaactggaatggagtcacatgcagtcacaggcatcaaagaataacaaagttggcattacgagaccacaacttgagaggtaccatatcaccttacattaaaaacctcacatttttgaggtctatcaaccttagaaacaatagcttctttggtgaaatcccacaccaagtttgccatttatatagattgcaaaatttaagtctcgctagaaacatgttagaaggtgacttatctgcattgaaccttagttattgctcgaaactaagactgatatctctaaaacgaaacaaatttactgggctcattccctcagaacttggttctttgaccaagctttcatctcttagtctctctacaaacaaactcgtaggacaaattccaccatccctggcaaatatttcttcacttgaagtgttttctgtagggggcaatactctgataggtactgttccagaagagtttggcaagttaaaaa

SEQ ID NO: 315616 - DNA, 764 bp, Cannabis indica
gattaatttgtatcattatatgattttttatttagtagaatgaataaacatgctacaatcgagatattttttaagagaaaaaaaaatgaagctttaacttctaacatgtcatcaattccacctcttgatatattgcatgaaaattttaaaaattgctttagaaaatctttaaagctgacattaaagaaggatttgatatgaatttgttagagcgtaatcctggaatacagcaaccaatatgggactatccacctcagaagcatgatgaagttcgtagaacttatattaaatttggttcatattatattatatatcctagctatcgaaattcataggaagcacattcacatagttttaagtaatcttagtttaagttatttctatcatggctagaatgttctgatcctaaagtaaatcctgtattttttcttctactctttctattttcatgcataaagatggaccatatggatttgatgcatttattattaatgaatttcgatcatggaaaatggtgagaggaaaaaaaattatgcacttgtagcacatattgcaaaagatattaattctcctcatagagatgctgagaatgaagttgatgatcttatcaaccaaccaacacatgttgtaagaaaattttaaaacttcacatcacagaaattacagaaatatacttcgtttgaaaacttcaattgaaggaatttgatggcttacatgtcaagcataccattttagaggtcataatgaatctaagacattaatta

SEQ ID NO: 315617 - DNA, 1092 bp, Cannabis indica
gctattatgtcttttgcctatgcttttatcggatttggattaggttttgctaccgtcataggtgagttttcgagtaatactgtaaattttttaaaaaaatactgtgtaagttttatattatgtactgcgttaagttttaacagttatttcacggtttagtttttagttgttccactgttaatttaattgttatgttttattgttttacggttattttataaaacgacaatattttaattaaaaaaaaaaactccatataacagtaaaattgtaaactcttgctcaaaatctaattatttttttaaaaactcgtttattcaattactaaaaccctatctcttttctttattattattgtcattttgcaaaatagcattcttgatatcaaaagatgtatttttttttttggccatacgtagttttggacttgctcaactaaatttggtaatatttttttggtagaaaatggacaaattcatggaaccctaacaggagtaccggcttcaaacaccgcgaacaaactatttctagtctttcaagcgctcggggacattgcttttgcctatccatacgcgcttatccttctcgagattcaagacaccttaaaggctcctccagcagagaacaaaactatgaagaaaggttcaatgattgcaatctttgtgacaacatttttctacctaggttgtggttgcttcggctatgcagcctttggtaatgaaacacccggaaacctcttaactggattcggattctatgaaccttattggctcatagacttcgctaatgcttgcattgttttgcatttggttggaggatatcaggtaataatctaacacatttttccaaactttaataattatttttttttcttgtaataaataagaaacataacaaaatatagcgggaaaagagatttttacaccacatactgacatttttaatttttttaattttttgacttgtgagacagaatttttttaaaaaaataattgtgtacttaagtttttacgttgtttcacggtattttttaattgttccactgttgttttaattgtttcagtttttatttagttttattaaaaaagtaca

SEQ ID NO: 315618 - DNA, 1365 bp, Cannabis indica
attaagaagaacctcaaaacaaagttggagaaacttaaaggtatgggtggatgaactgccaaatgtactctgggcatataggaatacgccttgttccaccacgggcgaaactcctttctccttgcatacgggtgtgaagttgtacttctcattgagttgaagctcaactcattttgtgtgaagaatttcaatgaggatgccaatgaaaaagtaatggcagaaaacctagatctcttggaggaaaggagggatgcagcccagatgagattaacaacgtatcaataaagggcggcatgatactataattcgagagtctgcatgcatgccttcaagaccggagacttggtgctagggaaggtcctcctaaatactagggatcaaggggcaggtgtaatatcccaataagtctaatggtaagtaattaggatttataattatattatgggttaagcaggtaataagtgggattataatcttactaatctagttcaacataaattttaaatttgatataagtgagtaaataagtgtaatttattaattacggagatttattagcatgtgtgaatgtgatatgagttatatgtagcataaaaatattttcaaatttggcgatcttggagactcgatcgggggccaaaaatgtcataacgagtttaattattagttttgatgagaatattgtcataacttgatagtgtaagtattggagtaattaggagtatgtgaatttaacttagtgccttagaagtataaattttttaatggctaaaaaataataaaataattattattaataaagttttattattattattattgtccttattttctttattttaaaagaatctgattatatatatttataaattttatgagttaataaacctaaaatgaaaagaagtaaccctttcctcttttcacctttttctctcgagcaaaactaaatcaccacacaccattcccttttaatttttcttctttccaaactcagcttctcaagctcttgatacccaaggtgtgatcatagtgggaagggagtaagctcaaggtagtgtttctagtttttctcccttagttttcatgaaaagtttaggattttggaagtggaattttggttctgtgactgcagtgagttgggtaaggttttggttgagtttctgggtgtaattagaagtgttttgaatgctcttttaatttccttattgtagttttgaggtaggaactaagtgtgagcttttaaagctcaaagcttgagctttaatgacacttttcatttaaggacatggttttaatttttgttaagttaggattgttatatgaatgatatatatgtgtgtgtgtgtgtgtgtgtgtgtgtgtgtg

SEQ ID NO: 315619 - DNA, 721 bp, Cannabis indica
tttctttttccttttttttttaataaataaaatttagtggttttttcttttatgcagctaggaataatgagagttgaagttattatggacaaaaagagttgtaattgtatcctttttgggttttaatttatatcatttaaacttgttttttaattttcattctaaatgatcttatgttacttcattgtccaattcctgatattaagatttgtaaatatggtttttgattaaatatttttgtagagtggtgattctttcttcttccttcttcttcttttaaaatttctttattttcttttattattattttaattgaattatagtgttatttttcttttttgcagccaggaatagtgtttaatataattgaattttgtttttaaatttaaattttattgatttatttatttatttttggctgttgcagaagagttcgacatcatagaaattgattgaagatgaggaatgaagctatcatcatcatcatttacctttatatttatttattatgtaaatagtttatatatagatatatattatgtatattcatataaactacccaataaagttttgttaaaacaatttatcaatgaatatgaaatatatatttgtgtatattattttgataactctaatgcattaaccattttactttgggaaatttgaatttcacatttaaaataccttataatttttcctctaaatgcgtagttattaaaat

SEQ ID NO: 315620 - DNA, 936 bp, Cannabis indica
attgaagcacaattataaatagtacatcaaatatagcacaaacttattttttatgtcaattttaacacaaattttaaatcttccattaaaaatgatgttagtgacaaaaatattaactaataacaatgcactcctcagcaagaaaaactctatcttaactctccctaactatataggattatataaattataatcagaacctttcattgcttgcctaaggaatattttttatcaaactcagctttgatcaacgttagaatggatgctaattaaaggaagtttcttagacaaatcactttagagatagaaaaagaaaaaagctttacaaattccaaaggttatgtgatagtctagattaagctgtcatatgaattttttacaacgaaaaaaaggccacagaagtagttagtctaccaatcttagaaagtcaaaacttgggtaaaggaagaagactctaaaaaggcacaaatgacctctttaattaagttttctacttttttttttatagttagaagtataaaataggtataaattttgttttatttttgaaaattaatttgaagatcattattaaaaagagatctttttgtgagtaaattaaaaatcatgtaaattattttaattttttagcttctcaaaagtctttttgggaaaaactactaatcctaacttcttccaaatggattttttttttatccaaacacttgtagaaagacttttttaattctttagaagctaagacagtttgacagttagtagtcctgtgatccgtaaagagaaatactgagtaaactgtgcaatcccacatcgcttggggatggtcaagtgtgatgattgtgagattgtgtaagtatgagactacatagttgaagatgacttaaatggatatattggtctacctatatcaataagatgtatcttgtttttcagtagccc

SEQ ID NO: 315621 - DNA, 572 bp, Cannabis indica
ggataattttgtattgttaatgttattttgttattattgtattgttatatttgtttattaattattttttcatgtttaaaatttttgaaaatgtccgattacaaccgttatgctgtccaaatttcgctaaataagaacaaattttaataaaattcataaaattcattaaaatatatatatatatgtagtaattaatttaactaattatttactacacatattcaaacaaataatttaataaaattttgttttttaagaaatttctaaatggatagaaattagatgagtgcgaataaattatcaacgaagtatagtgaatgtgttgaccatttcttggacttttgtcagaagtatgccaaaaattctaaattggttctttgtccttattttaaatgtagtagcatggaacgtatgaacattactagaataatggaacatttatttagaaacagaatagacaagagttaaagtaagcactcaagtatatcaatgtaattcttaattgtaataaaaataaaagatgtcacactaatcacaatatatatatatactagtagtagagggcacgtgcg

SEQ ID NO: 315622 - DNA, 974 bp, Cannabis indica
atattttattagatatgtattctttattagttgctgtttttgcagtgtcatttcgcgatcagcgaatggtgttgctcatacactgacaatctctgttactagtttatgagattgtgtttggacaaatacttgtccttgatttttaagtttttcggtaataacaaatttttcttaataaattcttcatttaattcaaaaaaaaaaaaatatctatctatacttcatgctcaattttctgtaaaatgccaaatagatgtatacatagtagtttaagttgatccacttcatttatttgattttttatataaaaaaattgtttaattatttaaaaattaaatcaaaataatttaaaatgattatgcattgaaaaaaataaaataaatgagtatgaacactcaacaaaatcccagaaaaatgagtatgaacactcaacaaaatcccagaaaaatgagtatgaattatagaaaaattcacatacgattatcgtggcaaattactcaattcataattacattttctagattttaaataatcattgatttcatcgcactatttaccagttagaacacggatttaataaataatcatgcatgaagtaccacatccgcgtttttccaagcataaaatagaagaatgagtacaattaaaatatatgaatttacaatgaagacttggttgctttgtttgctgagaaagttgagaaaatatataccgtgctatatgattttttaactacattatagattttttcggttaaattctctcaactattacttcacttgtacctaattttttaaactcaaatttagtggtaaaatcttctaaattacagaaccattaacaaatttaaggtatcatccatatatttctcagttaactgctaacttagattgcttatgtataacacgtttatattgatacacataatattattatttaaaaattatatataaaaaattataacatttttattt

SEQ ID NO: 315623 - DNA, 1178 bp, Cannabis indica
gttgttgttttcatttattaggatttcaactttcgttttttttttttcacttattcttttttgttaatttttgtaggaaattttacagtcatattagcagaagctgttgcattaatggttgcgctggattggtctctcactcttggtcttcctcttcatgtggtggagtcagattgcttagccttggtttcggctctcccaaagctttttccctttgtaatgaacttggttctttattggatgatattgctagtttgctttccagttttcctgaggcatccctaattcatgttcgtcgtacagccaacaaggctgctcatgaattagctgtgcatgcacttagggtggatggtgaattggcttggattgaggattttccctcttttcttattgatgtattaagctctgattgttgttaataagagtttaatttcaaaaaaaaaagtttgagtttttatttttactaaacatttttcttaaaaaaattgggatttaatcaggaccctacacgtgtatactttttgacacctaacgacatgatagtgatggaaaggagtaaaacacatatttagtatttaattctttgaaaaaaaaatgtaatcatatttaaaaaatataaaattaaaaatatatgatatttattccataattttttttaataatatatatatacactgtttgcactgccaaatgataaaatgtgctctatataattcgtctgttctaagccatgcgatccaataaagatgatgatgtgattgacgcttctgatcaaccataatgctagatactctctttttttttttttatttttaattcttaatttcattaatatacatagagatatacgttgataatgaagctaactatataagatacctaaaacaatcaaatcatgacccccacctaaattggctacgtacgtacatgatcgagatcaagacaataagatgatagtaataagtttactattacctatatattggtatattggtagtattactattaaataccttaaagtactcaacagcttatcgatatgacaatgttataaataatttataattacttagtatttattaaattaaatcactatgtcatttctttgaagtacttggcatgttcattagcatatttcttggcaagtacatgtgtatatatagggtgcacttttaatg

SEQ ID NO: 315624 - DNA, 1099 bp, Cannabis indica
cccagcaccagtccaaaaaaccagatccaggagtcaccaccgtcccgataccaacccgattccaacacagtttgacaacacggcaagtcaccaaacagtgcaaaacactctcctcttcttccatatagatgggacaaagtaaattaacatctactctcttagttttgagttgaaccaacgtaggaagacactgtgtacacgcacgccataacaaattactaacctttgaaggaagtttcagcttccatagtttactccagaacgcatcaatctcttcatcaaaccagttacttttttaattctgcaggaaattataggctgactttacagaatacacacctgaattttcgaaagaccaaaacagttggtcatatgcagcagtattggacagagggataccacggatgagggactgatcccttgcctcaaacaggtcagcaatgatctccaaatcccaacctgacccatgaattgttgaaatttagtgcaactaaaaacaatattgtatagcttggtcttattttttgaaagctgatgttagttgatattggagaaattttaatgatatttccaaagcagtaatggcaaagttcaaggctagtaagctttattagagtcttcttcattatgaacatgtgacttacactaaacctaaacactggttcattctgtgacaagcagtgaatgtccatttgttaattagagacaagttgatgactttcaatatccattcagattaaattttatgtcctttttgtgagcaagttcttgagagtcattctcatttattctttgggtgcaatttttctcaaaaagttgtgcagggtgttcatggttggccgcttgggtgtactttgtctcttcagttttaaagttggctaacttagattgtgataaaaaatagttgtttcctttctaatgttatttttgctgtagttgttgctacatattataatttgtgaaatttgattttctatacttaaacattttcaaaatttcgtttttgaaccaatacattttacattatgaaaaatatgactcttttttcaaaactccaaaaataccccctctatctactttgtctctctctctctctctc

SEQ ID NO: 315625 - DNA, 2562 bp, Cannabis indica
aatttaaaacttttcaccacaataattataacctttgaaaattttataatattaaaattgttccatattaataaatcttaaagaaatttaaattattgtttagaaaaaagtattcaaattattaaattaatttaaaagcttaaataaaataaaaaaaataaaaaaatcattcatttttaaatgattgaactcatgtcattgtacttgatgtaagataactttaccacttatggcaagtttaatgggagagttgttggttgcttgtcaggtttggacttagggttagaatgaggtagaggagagagaataaaaattttagtgagttaatattagaccgtaactactgtttatctacggagcccaacaatttttatttttttaataaaagaaaagtattgattggttactttttttacgtgggtcccccaatagcaatttatgctgcttccgttgatgatggacttacaccatgattattttgttagctatattatttattgtaagattaaataacttgaatactttatacttttctcgctacaattattattgagtggaaaataaatttaattcaaaattaatatataaattcaaaattaaaaaattattaattaaaatttaaaaatattcatcaagtaaataagtaagaaaaataattaattaaaaattataaatagtcattaggtaaattaatatatgagttttgttaacaaaaaaataattttttttttgtggtgcacacactccttgggtccgacgcatgagacaaacccctgacatggtagggccccgtgtcaaaatttgaaattaagtataaataggaaaagaaaaataattgtaccacagaaaaaactgtctattgaactatttaccttgttaaaatatatatactagtaaagcatatatcaatccttcaatataagtatccaacaagtttctctatcaggttgttgtctcctaccgaccagacgacaacttgcccttagggtgagattaaatttagataagatcaacggtaattgagatcattcaaatcttttctagtgccaaactttttacatatttattatggttttttattttattttattgttcactattatactttatataatataatcatcattaaatataacaacaatgaaaaatgtaagacttctcaccatgataatttaaatttttagtataggaattgttacctatattattattttttgaaaaaaatcaaattattaatttaaaagttaaaataaaataaaataaataaaataaatcatgttcttataagagtatagcaattcgatcgtttaatacatttaaatcacctcataattatttaaatttgtcaaatactatcaaatttagatgaaactattcaattttttttagtgcaaattttttcatccattaattatgtattttgttttgacaaaatttattattcaattttatataattataacttttcattttttttattattgtatgtattattttattgtcactattataatatatgtaataaagtcgtcaatatatatagggtaaatactattttgggccttgtgttttgcaaaagttaccaattggaccctctattttgttaaatggcaaaatggaccctatattttccaaaatggtaaaaataagaccatgaactcaattttcaataattttatttttttaatacaaccaacttaaaaaaaattactagcaagaacagatataaaaaatgtaactagatttatcataatatctccagatcgaattattattaagttttattttgtataaaaaatacaattcaggtggtcctatttgtacaattttaaaaaatacaagatctatttgtcatttaataaaatagagggtctaattggtaatttttgtaaaacactgtctaaaatattaactataatgtagtttccaagagttaatttaagccatttaattaaattaatggctataaatcattatacttatcaataagtaaaatgtacaatacctattgtattagcccctgaatatatggttagctattttctaacatgaggttgtatgttttaactattcatgctactgcaaaccaaaaaagttatttatcattacttttagaaaaaaatatagcataagttcttaaaatttttagtctgatgtagataagttttcaatcttaaaaaatgatagttatagtctctatgatctcatttttcgtaagcccgttaatttttctgtttatagctccatttattattcttaaagttgccataaatttattggttcacaatatatttaaattaataaaatatataattattcctaaaaaaatcaaattaaaatttaataaataactaatttcaaattaaaaaacaaaaaccataatcttcatcttcttcttcttcttcttcctcctcttctccttcttgatggttgtcttcatggttattttcagcattgtatcatcatcaatggtcaagatcagctcaaaaatatttttccatacttgttgtatattttattattattttagtaggaccttattccctataaaaggagagcttc

SEQ ID NO: 315626 - DNA, 1672 bp, Cannabis indica
gtgaataatatatatagtgattatatttttgtaacataagagacgatacatatcagatagtgtaatgaatatagagttgtaatattaaagtgaaagatcaatcaatacaagcacaaaaagagaaagctaagcttgcaaaagatggaagacttagaaacaaagctcttatttacagtgcacgagtcttacaacaattgaaggaaacaacagaaaagggaaatgtaactaactaataacagaaaagtagttacaagaatgagctaactaacagtaggtaaaagactagctttatcatccccgttaaacgaaagagtgtggaacatacattgagtttgcttttgagataagcaaatctgtctttgctcagcggtttggtgagaatgtcagtgatttgatcgatagagggaacatatctcacttcaatttccttagcaagtatctagtcccgaacaaaatggaggtctatttcgatatgtttagaatgtgcatgaaaaataggattggctgcaagagaggcagcttcctggttgtcaacccaaataattggtggtactggtagagacacatttagctcagagaacagtgagcataaccatcgaacttcaacaacagtattggctaaagacttgaattcactctctgtactgcttctagcaacaaccggttgcttcttggttgaccatgaaataaggttcccaccaaagagcacaacataacctccagtagactttcgatcatcaaggcaacttgcccagtcagcatccgaatatgcctgcaaacacatttgcaaacttggcctgatatgtaacccttcatgtattgtcccctttaaatatctgaataacctcttgcaagcttcccagtgaaccgtagtaggagcatggatgaattggctgagtttgttgatatgaaggcaacatcaggcctagttagtgtaagatattataaggctcccaaagtacttctatatagtgtgtgatatgagaatggttcaccaactttaagagacaaagtatgtgctaatgtagttgggcttggacttggtttaagcacttccaaatttagtttggttaggagatctaaattatacttggattgtgaaagatatagaccagtgtgatttctgaatacctcaactccaagaaaataatgaaggctgccaagatcttttagagacaagtcaatattcaatgaggagattaactcagtgataagctttttgttgggaccagtcacaagaatgtcatcaacatagaccaataaaatgattagagaacctctttaccatgaataaacagagaagggtcagactttgatgacttaaagcccctattgaagagtgtaacctttaatttgtcattccaagctcgaagagcttgcttcaagccatagatggctttgtgtaacttgcatacatgatgaggatgtatagggtcttcaaatctaggcggttgtgtcgcgaacactttctcctcaagcgttccatttaaaaaggcatttgagacatcaagttgcttgatatcccaattataagagactactaaggttaagattattctaactatagcaagtcgaacaacagggctaaatgtctcttggaaattaataccaggtgtttggtgatagcccttggccactaatcttgatatgtccatgttgggttttgtgccct

SEQ ID NO: 315627 - DNA, 889 bp, Cannabis indica
ggagcttcaacgacaccattgatacgattctgtgtgtcctctctttcttctttctccgaaatggcaactggagggtgcccttatcgcgaagcggagatattagagattatatattgagcttagagctagggttttgagcgactgagtcagccactgagtccacgaacgattttgccgtgttagaatgttgggttagtatagctgtggcccataatattgtgggctttttccttcgccaacttttaaagcccaatttagatttgaagagggaaacttacaaaaatactagaattttggttaacttttacaaaaataatatcacacagacaagttttcaaaaatacggtatttttataaaatacaagtaaaacacaaaacagaacaactcaaaacaacagtagaacaactaaaaaatatcagtagaataccagtgaaaatttaacacagtataatgcagcatgaaacttataaaaaatcagtaaaaaagtaaaaaaatattgcttggtagtatttttgaaaaaaataacaaaagttagtttaccatctaaatttccctttgaaaaacttcattaataagggggaaagcatacctcttttaaaaaaaagggaaaagcatacagaaatttacaccccatactgttttttttcatttttttttactgcgacacggtaatgtttactttaatactttttttttttgtaagaaatactatttttttatttgttattgtaactgtcatatatgtgttaacttgagcatctattaaacaaattttattattttttaagtttaataaatacatgatgtgactttatattgtcgcttttttttcttttaaataaaattgtattatattttagagatcatataaatttatgatttgacttt

SEQ ID NO: 315628 - DNA, 976 bp, Cannabis indica
tcagggaattaaacttttgaacatataatcatgattatattccactgcgctgacaacactataatcatgaacaaatacatatgttctggacttaatagaatttatacattaaatataaacatgaaataaatcatgtgaaccatgcaacataaaatgatttctgatctttattaattagtaaatttgattatattaaaatgggttttatttagggcacaaaagccaacaggttctgccatagaagagctgctgctgcagtaagaagggagaagaaggagcatcggctgaagctttcattgagaagaaaagggagtggctgctagggttttcaaaggggaaaaggttttgttggctgctagggtttcagctgctagggtttcagccaaataagaaggctttatactaccaaaaatatcagtgtttagaggaaaataccttgtgatccgcacaagggggaaaggtgaagtttgaccttagttttgtgatttttgggtgttggtgtaggggcatttttggaatggttaatttcctacatgaagcaaatttgacatcgacgaattaaaaaaaaaaacaaagttgaaaattccaaaatatgagattgaaatacaaccattaaaactcaaatatatacataatataatgagaatttatctcatatttattaaaaaaatatacataaattcagatatgagattcaaacgaaataaaataaaattccatacatctataatttgtaaacataaaaattaaaaatgaaatcagatctggacgttgattagtggtatgctagatttgaggaatacactacacacctaaaaaaaatcaaatagggcgatgatgggtggagggctgagcttcgagcagatgactaggcggagggcgagagggcgtaggggaggttagtcttacacacacacacacacagacgagagagagagagagagagagagagagagagagagagagagagagagag

SEQ ID NO: 315629 - DNA, 1003 bp, Cannabis indica
tagattaaatctagactaataaaaagagagacaatacctattgtagcctatcaggggattatcgctatcttttagtataattacgatcatccaatctaagaattttgctgaagaattcacacagtaatcttccacagcactggaacctaaagaaaaaatgtcttataatgcctaaatctaccaacaataacaatcacacaggcaaaaaatcctaatttcattcaaagaagaacatgcagatgcaatgtatagggataaatccaaaaaacgcaatcaaaaaatgagaaagttaatcgatacaaacctaatagtgaaaatgaaggtgctaagctgatcgttgctggatttggttggggaagttgagtacacctttcgagaagacaagatgcaaaggcaatcaacaaatcgatttttgtattgaaattcagagtcgcagtttcctctagcgtgaagctctcaatcactgggggtggatggtttggaaactctcgaaccctaatccttagcaatagttgaatacaaagatcgacaacacattccagatttatttaagttgcttggctctgagttcagttctaatcctcgaagaatgcagagaaaacttgaagttttgaaaggtcaaaaattaaaaattagggaaaagtggcaacaagaaatcatagagagtatttattctcaaagtggcaatccacgtgagaaggaatggacgatccacgatcgtgtctccagaaacacaaattccatctaacgattggggattccaaaagccaaagcctgtcacacgattaatgctcccttaatatatgtacatatggtgatcttggggatatggtatggtgataatcaaaaacttttattctgcaacgtacttgatttagtaccataaaaccaacatggccaacccgttcaacctaattgttacataggcaagtatcagtgttatatttctagctcgcattctatgcaccacttttatttttgagtgttgttattaggcaccaat

SEQ ID NO: 315630 - DNA, 1098 bp, Cannabis indica
tcctccttccacaaaagtaataaacccccactcaaatcaactctatccactgcccagtaattctgcccaaagtttaaggttgaacataaattctgagcctgtactcttgtaacttactttcagctaaaaaaataagactcgggtcatgatcccgaatgtgggactgcagagctcgcaatgtccaaggattcccaattccttgaacattccaacttagcattttcattgctctcggcggtcttgctgagcaagactcgccgcttcgtcattggaaaattgagatgataaatcagtacaatgagaaatactcacctcagtggtagtgaccacattgtttgtgccattgagaacccccgaaccgaacacaaactgctgccccatttcattcgaatccactttacccacggaaacaggcaccccaccatcattcgcagtaaagaccactgctctgcctttgccttgatttcttgcccgattcttaatcgaaaccttcttccgattgccatgaatacttgacttgccaaccttttctccctcaccatgattattattcactcccccagagaaagagctgacccccagatcattgataatttgtttaccctttagaagtgcccgtcgatccctttcctcttcagtctcgccatccttccctccattctttctctttttagcttcactctcagctccctctgtaatcccatcagaagtcgatcccccctgctgcttgtcaaacacatcagaagcagccctattctcctttgggttattatctttgataaagtggcccagagtattgggctcagtaacattaaaattcccagcccggcccaatgttttgggcacattaacattaaacatcccagcctggcccacttggtctaatgtaccaaaatgacaatttttctctccattgccacctggcacagtattagttacttcaccatctcccacgattgatgactccccgataaaagctatcccactactcttggcagttacatagttgtggatcatcggagcctccactcgatcctcagttgccgtctccggcgccaccataaagtgtcatatggaatcatctgttggaaattattt

SEQ ID NO: 315631 - DNA, 563 bp, Cannabis indica
aaaaaaaaaaaaaaagtaattctcttaataataataattaatgacttacaagaatatagagtgagctagaaatgaaaagcatggaagagtgagaaatattttttctagttttgagaaatcttagagcaagtggaagaatggctatgaaaccccaaaacaagttaacaatggctgcactatgtctgaaattgaatttccaagcttctgtcaagtatgtcatcaccataaacaatccataatctgctactgtgtcagaccaccctaacactgtgtacaccaccaccaccatcatcattaatattaattaattaatacaattcaaaataattcattaattatatataactatatatgtatatcttaccagttattcttacaggagatcccatgatgttgttctttcccagcaaaatcccaaattggatgcatatatgaatctcatgcctttatttataagagaaatgattgtaggcccgctttgagaatatatgggcctaacactgttaaaattcggataagttgaggaatacttctttttatattcattaattaaaaatatcttc

SEQ ID NO: 315632 - DNA, 2051 bp, Cannabis indica
atttgcgaaatgtgcgggtaaaagttaccagcgcagtaatgaactgtgctagtaaaagtgacttttcttgtagtggtattttatcaaaagaaaacgtataatatatataagatatagctcaaattaattaattataaccatatatatatgtgtgagttatgattaatcaatgtacgtatatagagagatatacacacaccatacatatatatatatatgttcatagtatatatattatgattcatgcatcatataatatggatagagatatggacaagacaagtttatatatatatatataatgtagtgatgatgtagtgggaaggggcctggtttttcttcttctcttaaatttgtagctttgcatatgcaattgatcagaggattattaaaatgtgggaataatatctaactctaacctctgaattgtttttgtcttctttccttttttcttttgatgaaattaatgtaatgttagatattcatctaaacatttagcttaatcaattccctattctattcaaaaaaacaattatgagtacaactacaaacaatcacttttaagtagtgtgcctctaatttattatgaaattaaatcaacaataatatgaaggtcaataataaataatatttaaggaaacttgtactaaggaaaattaatatgcatatatacatatatctactgtttgtgtgtcctttgtatgattatatatatatatatataaatatatatattagtgttgtatatatgtattatgtgtggactattggtggttggtttggttggtcttcaaagactgactgtgaagagagtcagtctactgtttattacatatatattattactgttcaggtagaattttctgagacctcataattcatatatatacatatttatatatatgtatgtatacatacatatatatatatatatgatgataccctgggtcaaactactgtcctatataatatatattagtttaaataatcaataatatatgctatgctcaatttgattgtattatataattacagtgaatctctctctgtatatatatatatatataagaaaatgaattaatcaaagtatataaataatattaacaaaaatttaacaaagtccctcatagaaaagaacatgttctctctctcaacagaaattagttaaatatataaataaataaaaaaaataatcatatatataatactataataataataataagggaaaagggttcaaaattaattaatatttattatatattattaacaaaggattatactttacatactatagatctaatcatcaattaataaataaaaactctaaattaattaatcaaatatttaatatatatttatataattaattacctgtagattgttgtatctgttaaaggatttagagcaaagagggcaatgaaactgagttgggccaacaagaatttgagatggggtaggaatccagtactcctcacctctaccctgttcctcacttccttctaaatcttccttttcattatccaaaaccctagaaatattattatcattattattagggcttgggattaatcccacgtgtaaagccacagtcacactagtattatctttctcacaatcttcaatatcatcatcatcatcatcatcctcatcatcataatcatcactattatgattatgattattggttggtaataataagctttgtggacttaatttgtctattaaaggaagtgcttctcttaaaggaggagattttgatgaagaagaaaaagaagatgaagaagaagaagaagaagatggtgttgttgatgatgatgaagatgagtaatagtagtaatgattattattattattagggttagggttagggttagggttatggatgggaatgaagttaatccatcctctttcattattgaataaagtatttttggagaagtgatgagggtttgtcatggccacacacacaaagaaatcaaagggactctctctatagcttttgattgaataatatatatatatagtactatacttatatatatatatat

SEQ ID NO: 315633 - DNA, 1974 bp, Cannabis indica
ggtgctctactgtgcaggaaagggtaaagttgtttctgatcaaccatgagtataggagttggacgaagaatgtacatgttcaggccacactacaccaagcgggttggggtctaccagtgatgtaatttttgaaactctgttttgtcgcttaagtcggccaatggaaaaggacttgtaataatgttttgtaaatatttttgggatcccgacttttgtaacttttagtttgtaaagtttaaattactacaagtttattttcattatttgttattaaaatttaaactctgcgctaattttattagtaatcccgtttaaggaattagggtttcttaagtatcttgagtagcgtgcctaattatttagggcgttacaatgcatttcctatgtaacaaattaaactatctcccactactatttattttcaagtcgcgaatcctatagcctttactactccttagcctttattttatttaatgattaaatacaataataacatacctaaatctctgaatatcaccgtgccactcattatatatgtatattagacaatgaaaatccaacttaaatattgttcataatcattcatgaagtcaatagtcacccgttctcaccacttagttaccgtgcccacaatcatttatgaaagtctaatttattaaaattacataattttcatagcttaaagtaatactattcaaataacatattctaaaaattcactatcttcacatctagttaacataaataataataataataataataatagtatatatatatatataacatagtagaaaataataacaaaagaaattggttattacagatttttagttctttctttgtttgttatgaaaagtgtgggactgcaggaatgatcaattatattgacagaaaatttccaagccccaaatagttcttcactggacaatgacctacatacaacaatactagtttcctaccgaggctcccacatcttccttggaaaatctggctactcgttctcgcccctaatgggatccgccaccaactggtcatttgaaattgaatattgatgtagcccaggatatcataacttgtaaaatgggactaagctttatagtccaagactataacggtgttattcttgctgctgcatcctttcattggactggcgttttttctcctattttgatagaagagctctctctcttcaacagtctcttaaatggtgtcatgagaattctcttcgcattgattttaatgaaactgattgtaaagttttggtagacagccttaaacaatctaccattaccaacatccatttacaaggttttgttacagatattaatagcttgttatcttctttccctcaagctactctttgctatgtggctcgagaagccaacacacccgctcactacctgacaaagtatgcttcgggctaaataagctatatgaccataagaacatttcaatttacttgcttctatctttgacttttaactatatatcaatggatacacatgttttcttaaaaaaaaaaagaaatataaagaatatttataaaattagatgagaaagagaaaaaagtaaatataacaattcttcaaattaagatcacctgtgaaaaattggtgtcccataatatattaaaccaatctaagtgtaccaacttaactaactatctttcttaaaaactattaactatgtaaacagttttttataaaatactcaaattaattgacgtgtcatatttaaattggtttaatacactagtataccatcttttaacagaagatcttaattcatattagatagtggttggtcaggagtcttatggggtcgacttgacaaagacttgtgtttttattttattttgttatgtcttattgtcattcatgggatgaatgcgtgcacgcactctcataggttacgggtgttcataaaatagccgatccaatctaatccttacgatccaatccaatccaatcc

SEQ ID NO: 315634 - DNA, 1129 bp, Cannabis indica
tatgtctttgagtttgaattttttatctaaaaattgtttgaaatgggtgattgccatgtcattgttgctagctatgattatgtcatcgacatatattagtatagctagaaatattgtgtttgtgtttttgataaagagggaattgttagagagagatcgggtgaagccttcatttgtgagtgtggtgctgagtttttaataccactgtcttgaggcttgtttaagtctcgttgagcttgcatactgagttgggaggtgcattgtatactgggggtaatttcatgtacacttcttcatggagatcaccatgaataaatgcattattgatatcaagttggtgtatgttccaattattcatggctgcaagggctggcaatatcttgagtttattaaacttggctactggtgcataaatttgcaagtaatcactcccttgtttttgagtgaagcctttggctacaaggtgagccttgaatggcttaacctccccttattcattgtatttgaccttgtatacccacttgcatcaaacggctttatggccaggaggtaattttgttactgtccaagttttgtttgttttttcaagggccttagtttcagtgtccatagccaggagccaatgcttgaattgtgaggcttcactataggattcaggcttgatttgggagtaagctgctaacacagtagccctgaattgggggctgggtttagcataggaaatgaatttctcaattggaaggcaatgaaataggtatggcaaacataatcctttaggtgggaaggtttggtcatttggcggccagtttttgatgtttgtattggggccttggaatgaatggctggtgtgggaatgacaccattgttgtcttgatgagacttactagatgcatctgctgtagcaatgacactagtattatttttgtgagactcagtagaagcatttggtgtgtgaatggcactagtagctttaaagggtgatttaatatctgtagtgttgggtcttatgccctaaataaaactcatttcaatataatcagatttacttattaatatagatcataaataacatttaatgtagcatggttcacatgatttatttcatgattatgtacataatgtatgaatt

SEQ ID NO: 315635 - DNA, 846 bp, Cannabis indica
tacataaataatcactagaaacaagtaaaattgaaatgaaattagacaaaagtcctaaatctaacaatctcaatagttacaaggggtaaatttttaacaagttaaaaaaatttcgaaagcataattggtacatgtcaaagttcgggagaaaaaaatactaattaacctttaatctttgatttctttagcttttgagaaaattgaatctctcttagtaacctttgggactaagtaaatgcccttttaatagatggagagtaaaagaaaaacatacatttctcaaagcaataaatatttgtttttgtaaataaaggagacagcttcaacattgtattgtgtatgaaaagggaaagagtgttggaaaagtaattgttaatattatcttattttataaaaatgctaactctaatgcttaatttgtcaatgcagtaatttgttaatgaatcattctcttaattgtgctattaaactaatattgaagcaacaagaaaagaaaaacttgcggatcttctaacacataatcacaccttattgagcttttacacccaataagcccaagataaagttgtaattcaaatattaattagggttatttacaaaatatcttagagcatggatatgtaatatgtaagtaagtggtgaaaagctaaatatagttcatttgataaaaagtgtactccggtgtgccaaaaggtgatgtaaatttggcacacaataaattttgtgctaaatttggtacaatatttgctatgatgtaaaatttacaccacaataaatgcactactttttcatttacatttatgatatttttattattttattagtatatttaactatcatattaaa

SEQ ID NO: 315636 - DNA, 1927 bp, Cannabis indica
aacataaaactaattaaaaaaattgttaacaaacgatattaaataccataaaaaaaaactctaaatgtgaaaaaatatcataaaatggtgctaaacttataagtatcatattttttgataactttattataaaatctcatattttatgtaattttcactttcatgaatttataccaagttatatatgcggctacgccataggtacactatatgatacatttcattattagagtttttattgttttattttaatgaccacatatatgtatatatatttaaaaattaaaaataaaaaaaaaattccaataactcttattattactactatatattggatttccttgacatgattgagcagagaagctagaaatattgaaacagaaaacaaaaagagaaagaagctgaaagaagatgaagcaattcattaatggccaataatacacaacatgttttatatacaccattacaatcagacaatgcttaacagaaacagttaggaaattagttagaaaaggacagttggacaaactaaaaccaactaactcctaactgactcttaacaaactcaagccaaccgaattcactctaacatgccccttcaaacttacaatttgaacaactgttaattgtaagtttgttttgaaaaagagcaaaacgagagcttgaaatagctttggttaaaccatctgcaacttgatcgaatgcaggaacacgtttgacttcaagttgcttttgttgcaccttctctcgaacaaaatagagatccaattcgatgtgtttggtcctggcatgtaaaactagatttaatgtgagaatgatagtgctgagattatcacaccagaccactggaggcttaggaaggtgaatatgcaattctaaaaaacagagaatgaagccaagcaatttcagcagcagtgattgcaaggcttctgtactcggcttcagtactagagcgtgaaacagtgtgttgtttcttgcattgccaggtaattagattgcctcccaaataaagcataaagccagaagtggatctcctatcgtctggatttgctgcccagtcagcattacagaatccagtgagttcaaaacttgtaggcctggtgagatgcaaaccatagtccagagtgcctccaatataccttaagattctcttgacagcaacccagtgaacttgcaagggattgtgcataaactggcatactttgttaacattgtatgctatttttggtctggtgatagtgagaaactggagggcaccaaccacagatctgtaaagctgagggtcttcaactaaatcactgccataagcagagagcttgagaccacttgtcataggtgtggaaaaggatttagcaccctgcatcttggccttgcacagtagatccttagcatatttagtttgacataaatgcataccctctggtgtgtgagaaacttcaattccaaggaagtaattcagttggcctaggtctttaagagagaattgttcattgaggacagtgatgatgtgagaaatttgtgcttggttgctgcatgtgattatgatatcatctacatacacaagaataagtgttgtagatgagtttgtgaggtgaatgaacaatgaatgatcaaccttggatgaagtaaagccaagtgacagtaaggactgttgcagtttctcaaaccaagccctatgagcctgttttagcccatataaagttttgtgaagcctgcaaactaaatgtggtgtagatttgtcttcaaacccaggtggttgaatcatgtaaactccctcttgcaaatcaccattgaggaaggcattgtccacatcgagttgctttactgttcaattgtgagcaagggccaatgtgagaacaactctgatagtaactagcttcacaatagggctaaaagtctctgtgaagtcaaaaccaggttgttggtg

SEQ ID NO: 315637 - DNA, 1743 bp, Cannabis indica
agatgaaaatggagaagatgatgtatatatgtatatgtatatctatatatatatatatgtatgagttttaagtagagaggactattttccaatcattacttaactcgtttacattacatggacaaacacgtctttaccaagttttgttactctacttcgcatggcacgggataggaaattggtggagagtgttttttataaccattttcgttaagaattttaattcccatctacctcacccttcttattggagaaagagctttaaaaatttacatatataaaatattaaattacataaaaattaatgtattaaatattatttattattcaatatattaattattatacaaaaattaacttaaaaaattattaaaaaatgacactaagagtttgtttggtacgccgtattatatcttattgtactgtatattattatattaaattatatttcatgcaatatttttatgtaaaattatatgtggtattgaatttaatgggctcctaactatataatattttagtataaattaaaatttaacttaatattatataaaaatataatatataatcacattcaatataatataatacaatacgacctaatacaacgtaccaaacgagtctaatatactaaaataaacgaggtatcatccctatccccacactgtgttagacaaaaaaataatccttgtaaaaataaaccaccatctacaagaatatatataaatttagtaagaacatacctcacactaaaaaattaatttggaaaataataagaagttatagctaaattatgacaaataattctcattagcaaaacacgacaaataaccaaaaagaaatttcactcaaacagttaagcaaatgtcttcaattattaacaactaatctaaaaaaaagttcattatcaactaactacaaatgattttaaccaccactacacaattcgtctttaacacttctctaattttaatccaactcaaaatctccctggtatttgtaatttcacattctcatcataacaaatggtttaaacttcaataaatttattcttagctgctatactaattcccaaactaataagtcgtgtgaaagtattggagaagaaggcttttttttacatgatctaaattacattaagatattctccataaaactttaataatcatattggaatttattcaaattattataacttattatttagtctaaaagcatatttagtcaaactttcgagtacagaataagttttagttaggatagatatggttgtaggtgattatttttggtatgttagtacatcccagctgtcatgacaattactttccattacgtatccaaaggccaaacgtgctctttttggtacagcctttctttttattctttacaccacgcgccccttacccacgtaacggtagatttcggaggccacccaacattacaaggtcgtgaatgaaaagaactttgtccgcgcgtggtgctggcttctcattaggacacgtgtttatacttcttttctcacaatgcttaatgctactctcttttccatgcaaaaattcacatttgtttttttatttatattggcagtgaaaccattcgaattttcctgctgtaacatttaatcataaaaatcgaaattttagtggcaaaactatcacaaccctcttttgttagctatttaccttttccgtccaaaactatgttaagtaccatggtggacatgccacagtatacacaaatgta

SEQ ID NO: 315638 - DNA, 860 bp, Cannabis indica
gtgcttctgaccaagtgccggtaatgctagtcacaattccaggatttacacaagtagggttaacccctaattttcatattcataaaatacatacatggcatagaaaataaagataatcacatagagctcggaacgagctttccaacagtatatagaactcccaaaacagagttcggatcacaaagttatgcattttcaaagtcaacacatgaatctgcctagaaagtcgagggcgggctgcgacatgcaaaaagccatgtcgtggcacctgtgaccaattcccaggttccacttaaaggggcgggccgcaacatgtaaaagtcatgccgcggcacctgggttccaaacccaaaaaccagcaagcttaacttcaaatttcagcagaaaaatacatccaaatcataccaaattcacatacaactcaaagttattccccttaaattagcaagctcaaacataaggcattataatacatataatcatgcatcaaagcccactatataccctgaaaaatcagattatgcaacaatcaaagcaaggcttaaaacttgatcataactcaaccaattccatattcaaaagctagaatttccaaactagcttcaaacttaacttttccaacaacaaacactaaataacaacttaaattcaaatatgagaaataccctaaaatctcatctagagctcaacaaacaacatccaagatttagacatgcaatcaaagctaaaacttatcaaaatcaaagataattcttcccacatgcattcaaggaaacacaagccatatactccattaatttcagcaaggaaattcaaattaaaaactgtaattactatctcaaagtaaagcaagagcaatc

SEQ ID NO: 315639 - DNA, 1447 bp, Cannabis indica
acaacacaggcatactatataataatatagttctattaggcacgtaattaaattaatttcatcattttacccttctcgggtcataattaccaaaatgcccctggctcaccaatggggtctttaatatattaaaattcatataaaatcacatatattgaactatataataatataattcctcaattatacataattatctagttagggttttgctaatccatttcttaattccgggtattacacaaatccaaacccagatttggactccagacccggaacccagacccgggaccaaacccggccccagtctcagacccgggccaatattcgagtctggtttcgaggttcgggtcaggaattggggtttgggtcctagtctgggttaggtcggggtttgaggttggggtcaaggtccaagttcgattcgggttaaatttgggttcagggtccgtgttcgggtttgggtccaagtctgggtgggggctaggttcgggtctagggtcgtatccgtgtctagggcccgaagttcgagttcgggtctaggtctgggtttgggtctaggtctaagtcagggttcggggttcgggtctgagttcgggtgtgggtctagggtccagaatccagggtcgggttcctggtcctggtctggggtctgggttcgggttttgggttcggggtccgatgccaagtttgggtcggggcctgcaattgggtgctgcctgcttagcaggaataaaagaaagagagagtttgtgaaaaagagagaaataaatgagagaaaagagagatgactaaatttagtttacggttttaatttttaatttcttagtcactaatttatattttatttttataggaaaatcaaataaaattatatttttaaatagtacaggcggtatgggtgtcactcgaacttgaaaattcaccgaaagccttgagtaaatacaaagtaaaaattatgaaaagaaaaaaaatttagattgaaaaaatattgataaatagcaagtgtatcaaagcaatgtactataagtttttatattgttaaaagatccgattgaaagttaagaaaaattagaaaggaaagacaaatccatgttatagagacaataacataggggcaaattctcattccaactatcaaatgttttaactaaaacatgcttagctacaaaaaagagcgaggaggttaggatctctaccctcgaaacaaacatcaactgatagctcaaaactatacaaaggtacaaaatatgatcacatatgccatcaacatctacaacctattactttcctcttgatagagttcacaacattcaaacagtcctaggctatatacctgagcattcctcaaattcaaagcagccgctagttgtaagccattcttaataggtgtgagtttagcagctagggggaatttgtgatccaaagtataaatgtttgccatcag

SEQ ID NO: 315640 - DNA, 738 bp, Cannabis indica
ctaatctcaataattcagaaggcatttttaagttcttaaaatttgaattaaaaaatattattagttttattaaaaaaaaaaaaaaaaaaccttaggtggaagactagaaggatggaattgatagcgatgacaaagttggattagagcacgtgagcaaaggagataaggcttagaagatgccatgtgtaatgtatacacaacacaacactagtctcattctcaatcttaagaaaaaaactactattatttcataacaaaataaattataaaaattcaacaatacactcttatccatatatttttatttatttttattatcataaatatcttacaaaattttaaaatattaacacgttaaaaatagaatttcaacaatgtgttgtatatataattattttattttatacgcatataaaatagattgtttgaacattactttctatattttaaattattccacgtttttcaaaactttataaaatatcttaaataactataacgtacttagaaaaaaaaaatatacaaagtgtatcaatgcatccctttataaaagcaccataaatatatataatacactgagaactctccagatttgatagtcatgctactaacacgtgctttgagccaattgattcctcaatgaaccaagactaaaatcttttaccatgaatgaataaaatcttttttttttttgaataaaaatcataagatctatcaattaataaattcgttcaaaac

SEQ ID NO: 315641 - DNA, 1191 bp, Cannabis indica
ttgggcgaattcaggagcaacaaggtcaaagaccccaacactgaaaattggtacacattggccgaaatgtcccaaataggggagacagtggaagtatcttttttggactagtggcactttcgctcacaacggatcacaaacgactttttttttggaccggtggcactttgggctcacgacggatcacaagtggccccgataccatgttagaattttggataaagtaaatggggttccatctcaaaagcaattggctattggaggagtagcccattcatcttatatatcacaatttatttccgcacattaacaatgtgagactaactctaataacctagccattttcactgacgatttacacatcgacaatggtacttttaacgacataattaataaagtgttggcaaatactcaggtcactactttttgctacttattacagaagtctttttaaatttactgtcactagttttagttttggagtcgtccccaagttctagaatgagctcgggattatcttttatgatataaagttttattgtctagctttctgggagctgctatatctcccttgtcagttgcaacgttagtgatgcgactcatgaattaactaaacatacccttaggatcgactgtaagatttcttagatggaagatacttctccacgttctcactgagaaagcttacctttctaacctttaatggtttattttgagcataaaagaaatgggatataatatttatactctcaatagaaacttaacatataagtatacttatcacattcttttctagttttattactcttcttgtgtcgatattgatatattttttcttttctagatttgttggtgggacaaaaatactttagaatttttttttttatattaaagttttattgtctaattttctaaaggtatctatttcttattgtctaattttctaaaggtatctctttcttattgtctagttttctaaaggtatctttttatagacagtaattttttttttggatgaaatgaatcttttttcactttacttcttaacattcttttctccaacttataacagttgcccttacaatatatataataggtaataatgcctcttttattaatcaattgactaaatttgcctctaattttatatttatttgaaacatacctctttttatatgtattgtacccaaa

SEQ ID NO: 315642 - DNA, 521 bp, Cannabis indica
aaaataaaataaataattcaaaagagaaagtaaccaaataatgaaaagtatagtacactaacaatatgttatttataaccaatcacaaataatagaagttcatatatatattttaatataaattgagtccacaaaaaatcataatcataatcatatatatcattcatacctaagtttcagagattgatctgcatgaatttacacatatatttaaatatatagtttgttgattaataatgataaggtatttatgcgcacaaaatcaaattgttcattaaaacatttcacatgatcacataacatataataatgcatgattttggtccataaataaatgaagatgacatataatagacaaaaataaaataaaatacacctccttgtatttagtaacattttcactatattattattgttcactataaaaaaactgttactttagtgataactttttagtcacaacatagtttttttgtgactaaatgtgacttttagtcacaacaaaatattacttgtgacta

SEQ ID NO: 315643 - DNA, 3491 bp, Cannabis indica
acaaggtgagcgtcggtgttgggatttgtctgaccatggtgggaacctatggacagtgcgagtatcttggctagagagtctcggtacatgaatgcactcatggatgcttgcgagcatgactcggcgggagttgttgtgagacgggagtgtgcccgaggcacacggtcgcgcaaaaaatgagcccattgttactcggatggttggaaggctgaccttggcttagagaagtcaaggtgccgcacgggtgttccgctgcctgaaaaggtgagcccgtgacacacagcttgcacagggttaaagtcggccatgcctgtaggtaaggacacaatgatccaagtatgattcttctcgagggcttctatctctgtgtccattgcatcatcccaaacagggatgccatgagcttggctaaaaaactttggctcaaaatggctagaaatggctagaacaacaggtcgaaatgtcagagataacctgtggtatccaacaacctgagataaaggatgagtggtgacaaaagaaacctgagaagaatttgtcagattataagatgccaagtagcagtgatactcattgacataagaaggttttgaaaattttctccctgatttggtgtgaggggaaataacagtaggcacatcagtaggtatattagaattatgtatatcagatgagggaggtaaaacaaaatcagatgagaggaagaagtacctgctgtatgtggctcatcgatttctgcaacatgaggagatgcagaaaaaagaagattcatgtgtaggtggaatacctccagtgttaacaaaaggaaaaatgtgttcataaaaatatacatcccgagaaatgaatgtcacatttttgtttaagtcaagcaatttatatgctttcatgcctggaggatacccaagaaaaatatatgggacagacctaggtgaaaacttagacctagattgactcaaagtggatgcatatgcaagacatccaaaagcttttaagtgttcatatgcaggggctttagagtgaagaatagcaaagggggatttgttttggagattgggagtaggtgttctattgattagatatgttgcagtagcaacacaatctccccaatacattaaaggtatgtaagactgaattagtaaagccctagcaacattgagtaaatattggtgctttctctctacaacagagttctgttgaggtttctgcacacatgaatgataatgcataatcccaagttcgttgaacaagtctttgaagtgcaactcttttgcattatcaaaccccattcccttaatagttttatgaaactggttttggacaagcttaatgaactgaggtatagcatcttgggcatcagacttttgcttgatgagtttgatccacgtgtatttggaacagtcatcaacaatagtgatgaaatacctatatccttcaactgtcatggtgttataaggaccccgaaaggcccaatctatagtgccaaacagtctcattagaaattttagaatcacaaatagatgcagaaacagaagcaaacactttattactgctttgattacaaatcaagtagtacaagttgccaaactttctacttatcccaatcactttggtcttcaaagtgtcttggatgacacaattttcatgagaaaataggaaagtgcagttagttgtggctattaaagaattgacagacaacaaattacacttgaaagtaggcatatataggacattctcaagaataagatcaggacttaaggccattgttccgatgcaagaaatctcagtatgcaatccattaggcaatacaacagtttttaaattggaattaacataggtatttttgtataaagaaagattaggacacacatgatgtgtggctcctgtgtcaataatccaatttgcattatgaacaaaaaattccttaccagagtgagaaaccacaagttgatcttcagcagcattaagagtgttgttctcagtagctttctaagcaagaatggccataagtttctggcattggacactggatagactagatatgaggtctctctccattggtgattcctctggtttttcattagttcttgaaaaatttccactagcagattttcctatggttcctttagcatcactattgggaaatcttccataatatttatgaccaggaggatatccattcagtttgtagcacctctcgatagaatgaccattcataccacaatgagtacaattgtacttggatttgaaaggttggacagctccaacaaattgtccattgttactcgatccagctttatcaacatcagaagaggtacctccaccagtcaaacctcgttttctctcttcttgaacaacagcagcatatgctttgttcacactcggaagaggatcacgcatcaaaatctgagacctaacaaagttgtaggaatcatttaatccaactaaaaattcaagtaatcgatcctcttcttgatactcttggatcactttcattgtaacacatgtacaaatatgttgcggtctatactctctaatttgatcccacaaagctttcaatcaagtatagtatgtggtaacactgttagatccttgagtaaggctctgcatcgtcttctttgcctcaaagatccgaggagcattcttctcattgaagcgttgatgcagctctgtccagacctctgctgcattatcgtgatacataatactatcgacaatttcatctgaaatcgcatgtaagatccaatagatgacagtgctattgcatctacaccagctgtcatagtcttcgtgatcatcgtcaggttgtggcaactttccattaacgaacttcactttatttctagcaaccaaggcaatcgacatcgatcttctacaggtgctgtaattctcactgcctttgagaatttttggaacaagcacaacacctgattatcaccattcgaaaggaaataaggattcgagagatcgttcgcatttgtcgatcgtgaattttctccaaaaacagagagcatattcgaatcatgagatgtgcttgagctccaccacgtgcttgagctcgagccatgaacaagaaccaaaacaaaaagaagaagaaagaagaagcagagctcacgaggctggctctgataccatattagctcagaagagcaagaacagaaatggaaaagagagagagaaaacaagaaggatcaaaataccagaattgtattgaatgaattgtttagttacatcataacgatatcagctacttatacctgtagccaataccagaacacaactaacaaacaaagaaaccaaacaacaaaataactaatggcatgtttggtttagtgtaatgagaattgtaatggaatcattattaccattacattgtttgatttcatttttaaacctttgtaatggctttacattgtaatggtcattacactatgtattgtcatccccattacatcataaaaccaatgtaatgatgattacattgttaaaaaaaa

SEQ ID NO: 315644 - DNA, 631 bp, Cannabis indica
aggtgagtttgattcaccacaacatgctttcaaaaaaaattatacatacacatgaaaacaacacgaggaagttaaaatgaagctcaattgtgtgtttttggttaaatgaagcttaattgtgtattttttgattttttttttttttttgagaaaaatggattattccattaaaagaaaaaaattcaatgaaatccaacgatcattataaatataaattaggcatgagatcattacaagtattaactcatttacaatggaatgtatatttttcgtttcttatagctaaaaggaaaatatatactttttttataataataataataataataaacttgtgtgtatttgtcccacattactcatgtgtgagtaatttgtagtatttatattacaattagtagctaccaaactttaactcgcttttgataattgtataaatattatatttggtgtggttttataaaaaaaaaaaaaagaataattggataaatattatctttagtgtggttttatatagaaataaataaatttgaacttatatttctattatattaaaaaggctaattagtaattttttccttgaaactttgacatataccaaatcatgcctcctgaatttttttggccgttaaaa

SEQ ID NO: 315645 - DNA, 1493 bp, Cannabis indica
acttgttgccatcttactgagatcatgagttgaaatatatcaaaaaatttaagaatcgaaattaattcaaataaaatttttatatatatatatgtcattatatgattaatagtggatccatgcatatatttctattgtagagtgtgggagcaactctaacttgtggctaaaaaacaaggccgaatacattgaccttaattagtgtacaatgaaaacaacaagtaaatacattttcacaaaatatatattgaaaatgtcaatgtgcacaaactattgaaaatgtcaatgtgcacttatgtatatttataggataaaattatattaagacctagtaaaagtttcttatcggtaggaattttttttttaccattaattttagatcttgtggttaattggttattatgatataagtgtatacttttactataagactacttgtatataattaaaattttatacatattataataatattgctcaatataaataatgatcaaattgtatttttttatttaaaaagtcattaattcaatgtaaactgggatcataatggataacttttaaagttgtcaaagaaaagatgataaaatcttatgcgaatgagagacaaaataaaaaataattttttaaaatgatgagtatattttaataactataagtgtttttcctattaaagatactcttttaattaatttatatatgaatctctatacttaatgactaatataatacctaagaaaatgttagagatcattatgcctagtgtagtaatataattcaatctcgaagctgatcttatttcaaaggtggaagactttatatattaattgtagaattttattattgggaaaccggaaatgattagggtgggaaagctagaaaagtccttaagtgagcccttatttatttttggtggcagagtcagtcacatttttttagtggaagcaaaaaaaaattaagtactaataataaaacaaattataattttaattgaaaaatatatatataatttttagtctcataacagtaaaaatacgtaagaaattaatataaattttacgaaaataaaaataaaaaatataaattttataggaataaaaatattaatttttgaaaaataaaatatatataaaatattcaaaaatatgtatataaaaatgttaaaaattaaaaattgaggagtggcaaatgaatgaccccacattgactattatatacgaattttacacattttacagagttttttaagaaattttgaacaaatttttacaatattgaaaataactatatatatataaattattgaaaaaaataattcgaaattaatgagatgcgaaattggccacgtacaacgcctgtgtgatcagaattgtgtccttatttttatatatatatttatacatatactaggtgaatgtacgtgccgagccacgtattgttagtttcatttaatattttggtctttttaaaattttgaatgtattttattttta

SEQ ID NO: 315646 - DNA, 1761 bp, Cannabis indica
cgaaaacaacaaaggttacacaataacaaactagttacactattcaagacatataatctaacaacttccaaataaagtcacataatgtcacatggtgtacatctttcccagtaatgatgatgtgtgtatgagaacgtaaaaaaaaacattgtacagaaataaaagaacaaattatatgaatgaaatgatgagaaaaaattaagcttttagtacaaaaacaaaaacccaaacgttgaatattgtcctttaattactaacgtgataagctccatgaaaatgtaaacatctttagtgtaaagctcagctgataaacttattgtaacaacatgatggagatcttgggttaataagtttgactcttttttaccaatagagaatttttgacacctaaactcttctatatgacgcttagtttctctccataatgaaaattaacataaaaatcataacaaccaagtttaagagaaacttaaattaaataattttatcataattataccgaaattttagcaacataacgactataattgaacatattccccaaaaaaataaagctattaataataacaaaaaaattcaaaacaagataaaacaagcgatgacgactttgtattgcaccattgttggcagtctagtttatctcactattactcttccaaacattgcatatggtgttcatattgttagtttgttgcttctcctacttctactcactgggctatatattgttcttcgcattctacgatatcttcggagtaccatctttcagaacctactactgccttccacctcctctttagaattgcaagcttactgggatggagatcatggttatgatcccacaaactgaaaattttgtcactggtttctatatctttttgggagattcccttatttcttggaagagcaagaagtagtctgtaatttctcagtcttctacaaaaactgagtaccgtgccatggcatctactactcaagagactcttggctgagatggttacatgcagatatgggtgtcattcacacttgtcctactcctatttattgtgacaatcaaagtgcaattcagatcgctcacaacttagttttttataaacgcaccaagcatattgagattgatttctattttactcgtcaccatctgaagttggacaccattgctttgccttttgatcattcttcattgcagcttgctgactgttttactaagttgcatacgatttatcattttcgttttcttttaggtaaactctcgatgcttcttgcaataccatcgtgagtttgagggagggtggttacataactatttaggatcaatttagtcttttatgttagttgcctatataaagatttcttattatttggactctttcacttttgactttgcaattgaatgaaaccctaatttctctacatctctaatattttttattggttattcttcttttctcaaataattatcaaaatgcaagtttatatatagtcgtatatttataggagaaataacactagaagctagatagatataaaaatgttattagatgcccagacaaaaattataacacattaaaaaaacactaaactaaatctaaaattctctcatcccatgtgattcgtgtgacctacctaacttcgcctcatggttggcgacgcatcaatgtacgactgaacccatctcctcatcccttgttgtccatccctcatccactcttaatccactaccactacaagaaaaatatcttttagctaccaaattttatt

SEQ ID NO: 315647 - DNA, 1100 bp, Cannabis indica
ttttttattatttgtattggactacttttaaaatgggcttaattagaataagagtaggctcatgaatcattattaagatattgagtgagggcttttgtgaattggactttaataaattgaacaaagtgaattaatatatatatatatatatctacatataaaaaatttgatgtatatatatttgagtgagggctttagcacacacatgggctaaagtccctccgtccctgcgttccaccacataatatcacaaatatgcatattacataataatgaaaataaatgagaataataatgaaaattattaaagtaggtaatgcatatattaatatacgtacgtaaaagaaaccatagttgtggcaggcagtagaaagataatctagggctttggcttgtatatttggatcgctggagaagagaacagagtagtcaatggtcggaatttcatcagcattaatattattattagtagtataacaaatactgttgggtgtaaaacattgggaagaaagagaatcatcaattggtacagaagtacccatttttagaatttagagatagatctagagagagagagagagctaaggtaaggtatactttttgcatgcatggatgggatatagcctctttttcccgttaatttatagaggccggctagtggcccggaacaccttaattaatattatttcactaattcatacgtacgtatcatgaataataatataaagtcgtaaatttatattataaaatggctacgtatttaaagaagacagaaaagaggtaggtgttgtgggacctacgtgacacattttaattaatgtattaagtaatctcagtttttttaactaaaatataaagaggcaatagtgtgcctattttaaaatgggtcaattgcgcgtggttaatatatagtttcactttacttatattatatttcaaaattcaaattttaagagtaaaattcttaaatttgtgttccgttaataatttaacatttttatttattttaagtgttaaatatactatattgaactgtctacataaacacagtgtatatattgtacaattttattaattcacgtaaaaaattatttaaaaaa

SEQ ID NO: 315648 - DNA, 849 bp, Cannabis indica
aaaagattacaatctaatgtgggaattggaaaacattgaaaccaaagaaaagcttcatgcgaacattgaaagcaagaatagaaagcttacctagtacaagaaacctttggcgaagatagtgggaagcttggatcgtccaaatggcacaagaatctcacgagatggagcaatgtgggattttggcctatatagagaaggaggagccttcaaaagttactttttctagtgatagaatgaaatgtgaaaagtgaagagaggtttccctccattaggcttatatagcttctgtgggaccacctctttacttaccattcaatgttcaattataaagcatgtagaagtacaatgcagttaacttactataacaaatgagatcagacagttaagagcagttatttaaagacgaaatatgcagcaaaatttactcagttaaggctacatcagtcccgactaagttggaaagtccttatatgcacagacatccgcttagggacttgggggcaaatattttcccgatttttaccaacctaacatcgcatgtctatgtggccaatatcaacgccacgttgaagtacaacttgccaacaagaaggtcaagtcatctactcaacacttcaaccaacggggagtcccgacactcaaatgggacatcgaacgataaaccagccaccttaaagaggctagccgaccacccctgctcggccctatggccagcataggccgggcagcttctcgacagcacaaggccagccagcatgcatcctgtagatgcatggccagccaaacatttgttggaaattattttaccaggatctagatttactaccaagtatgttttattaacatcct

SEQ ID NO: 315649 - DNA, 935 bp, Cannabis indica
tgagggacactaactcccaccacacgagcgtgtcttcctggaactgaaatgtagcacaggttactcggtaattttcaacaactcccatgtagttcaagattctttcaataatagtgagccactgctcggcgttcataacatccggacctcctagaaaaactggaggtgcgtgcttgcgaaatctctcatacaatggctccatatagttgccagcaacaggttaatctgctggcaccgtaggaactaaagcgacatgaacttgtggtggaggcactgcaggaggaccctgctacctcaacctcagaatttattcgtcttgctggcgaatacgatcttgcatttccgcaaatctttgctcccagtctggaggagcttgaggtggggcaactgtcaagacacaaggagatcggtttcagggtattgcattttccttggtaaatccctcatctcatggaaatcaaagaaacaacaagttgtatctcgatcttctgttgaagctgaatactgagcaatggaaaatgcaacatctgaactgacttggatccttgccattcccaaagattttggtgtccccatttccaccacgcctaatatgtactctgacaacatggctgccatccacataagtgagaatcctctctaccatgaatggacaaaacatgttgaaatcgactcacttcattcgagaaaaggcaagcaaggttctctccaactgatgcatgtctcctctcacaacaatctagttgacatattcacaaaggctcttctcccttcccatttcaacaacattgtatccaaggtgggtgtcgttaacatttacaatccatcttgagggggcctattagagttagttagtactgttaagtttgttatttagttgttaggagtaaatgtcagttagttaaggtagttaggttctcatcctaactaactca

SEQ ID NO: 315650 - DNA, 931 bp, Cannabis indica
atatttttgtcaattaaatatgccaaaaatagaattaacatattaattattacaatgctttatttattaccattagctagacatacatatttccaattttcctgagacgaacagccaataaggttgctcatgaattaactgtgcatgcacttaaggtggatggtgaattggtgagaattttccttcttttttcattaatgtattaaactctaattgttgttaataaaactttaatttcaaaaaaaaaagaaagaattgaaaaaaaatcactatattagtttcaatataattaaacctcaatttaaaaagaaaaaaaaatagtataactcaccacttataaatccaacaaattacatattagtatgcatatatatgaatgaattgactaaccaagcaatatctatagttttaattttggaagaaatgaattgactaatccttttgtaaactatacactatatttttaacaatgatatctcttctaatgactttatgatcagaaaaaataatatttgtcgctctccaaaattcatatactgtggccataagagcaactaaatacaatggctttaaggcttgagagtagtttggatgggtatgccaataatcaaacttaagtaagtcaaatcatgtagaactagaataatctagaaaaaattaaatgtaggggtaaccaactataaataccacatcaagcttctaaattgtaaccaagtttaagtaagtcaaatcaagttttttactactaacttactaccttgtcccctctcttactacacacataaaaattaaacacataactcttccttgtctcaccaatcatccaacttatcaacttatcaacatcatcatactacactacctaatatccatcctaggggtgttcataaaaactgaaaaaccgaaaccgaccagaccgtaaccgaatttt

SEQ ID NO: 315651 - DNA, 1765 bp, Cannabis indica
ccatgttccatggattacaatacatgatcaatgatcatcagttcatcaccatattataactcactatcctcttattcataattggaacattatataatatatattatccaattatttaaaggggacttatgaagtccctcactttcatttgaggtttcacacacctcatataagataagaattttaggggtagtaatgtaaatggatatttttattgagatgtatcaatattatcatcaaatgtttttccttttgaggcatttgtattttttttcctactaacactatattattattttttttcttttttctttttttgaataaaaaaaatcctatgtcataacataaaatgtgaattagagtagtgctaacaataagttatggataattaaataaaattaaaaattatttctatatttaggatgtaattttttttaatttttttaaaaaaagtaaaaataaatgttgctagtagcacttgcacaattcataaattaaaataaatttaatattataaaaatagttaaaaaatattaaaaaaaattaagagttattagtggctaaatttttttttttttttactattttgtaaaagttaaccttaattttttcttaaaaaaaatacaaatacctcacaatctacatttgcattagtaaatttaaagtgtcgctcgttagttattattgttaaacgctaataaaaattgttcacatgtacacaacatatatgaactaatactactataaaaatagtatgtctttagttttttatagaagagacaggtcttcaaaatcctaaactctaataggtaagacattaattaatcacctataaaaaataaaaaattcttagattaaaaaaagaaatataactaaattattatttatgacctaaatagatagtgcctaaaagctttctaaacgatgtagaacttttagtttgtacctataaattatttttcaagtaaaataaaaaaatgtgtcatagaacaaaatatataaataccacatagatttctcttatacaatactttacaataaatatatcataatatatatattaaaaaattaccaattaaatacaatgtaagttggttgccctttttttcacaaattttacccttcaattcattttagcaataggatattatagtttgactttaaaaattaatttaataattgtaattgtgttgagggatgtcacacctcataaggaatgtgatggattaaataattagccattatttaatccctcattcactttttgagggattaaacacctctagtatttggtggctattgatttagtattacctttttgtgttgactaaatgtatgggttgagatttttacaagtagtagtaggagtaatcaatttggcgaaaatttgctaccagcaatgttatatgttcccttgtactttttattttattttatttatttatttatttatttatttaatgtatatatttggtaaagtagttgtttgtgaatgttcatttttgctcaaaaaataaaaattatgtttttgagtagcgcacattggtgagtgtagtaagtaaaatagcgcattgttaataagaattggatctactctataaaggagtgtaatttacaacatatatttattttcatatgaattattatttcacactattgtatgtggctgtgtgtacgaagttaaatttctattcgatataaaatgtgtctatataatagaatttttggtttatgaaaaattagataatatagctgctcttcgcgc

SEQ ID NO: 315652 - DNA, 1338 bp, Cannabis indica
aaattaaggctcccaaaactacctaaactgattcccaaaatggtaaccattttttagaatcctttctgggaaaatggtttatcatttctagaaaaactatgaattgtttttctgcagatgtccccaagaactttgaatctcactcaattctactataaatttcacaccaaactccagaacacctaattaaaccataacagacataatccaagcaataataacaagcaaaactcttagaatcaaaaattaccacagttgagtcaagttggagttcttaaactcaaaattgatcaaccactcaaccagccctcaaaatcctttcaaataagcttcaaacaagtcaatactaacccagaaaacaatctccaaacactaagggttcagacagaaccattccctcaaaattgcatgctcaaactcaaagaaaaaccatcaaaacccaaatggaaaagttctagggttttaactcatattggaatcacttttacatcttgaattctagctgagttcactgatattgatgaagaaattgttcagttcttaatggtttcttaaggttgaagagatgagagagaaatgaagagattcatttttttgtttttttattaattgaataattgtttatctaggtttatcttacattaaaattagactattattataattaattctacaataatacatcaaaacaacattattttaattatgcaaaattactattttgcccctttctccatgcttaagtaatcttaagacttagggataaagtggtcaaacactacaacctcgtttaatcttgacactccaaatgtcaaatatatataccccactaaataaaggattttaaatcttacccatataactctaatggctaatttgtcccattatcatggttattgagaaaatcacaaaaatcataaatttcacatataacatatacaacactcctaaagtttaataaaatctctaaaatcgagaaattataaccctaatgccatttattaaaaatagagcccatacaataactaatcacatataatcataagttatacttgattagttctaattgcccttctaaatcataacttagtatgcggtcattacacttacctccttgtcaaaatgattttgtcatcgaaatctaacttgaacaactttagatattgagtcctcatgtctgactgtaactcccaggtggcttcgtccaccttactatagttttaacaaatatctatgataagtatgaatttccattgatattaagaaaaacaaatccgatatttcattaaaaagaaaaagaaaagtgtttgccaactctcccataattccattgtggaa

SEQ ID NO: 315653 - DNA, 3082 bp, Cannabis indica
aaagggttttatttagggcacaaaaccaaacacttttggcgtcggttcttaggggtacatatggtgtcggttcctaataaataaccgacgccatatgtacctctatggcgtcagttattttataccctatagcatcacctgaattagtgtcggtagcaaattttgtccaaactgacgttgaaaggccttaaaaatcgtccttaaaaggtgtttttgtagtagtgccccctcaagttacacttaagcacctaagtgttagcttgtcccttaattagctgaattgagtaattcgtagaggtttagtgagggtctaccttttgataatgtgtgtccacatatcgaacctcaagcttgcttgctaagactttgtctcgaacaaaatagagatatatttctatgtgtttagtacaagcatgatagaccaaagcaagtgaccctgcaccaagattgtcacgccataatatgggactttgaggaagagttactcatatctcaattagaagagattggatccatagtggcaagggctagagcacgatacttagactatgtgcttgatcgagctacaacactttgcttgtttgagcaccaactgatgagattttgaccaagagatacacagtagcctaaggtcaactttctgtcaccatagtggaattgttcctactagatgtcttagtacttatttgcatgctcgccggtgagtagtagtaggggattttagaaattaacttatcttgtttacaacaaaggagatgtcaggcctagtcattgtaagatattggaaggctccaaccatgcttctctattgttgagcatcttcaagaggttggctagggttaatggacaattttgatgtggcacacatgcaacatatttgtcctgtgaagcaaatttctaatgtacttttgttgagtgagataatagttgttgccacgtctaaatgcctcaaatttgaggacaaaagttgttaagacaaaattttgtcaagatactatttgttgagacaaaagtcatctgaataaaagacacattttttatcctaaataagacaaggtaggcgccaaccctagtgtagggtgtccttattagttttgtctttttggttattaattaattaattaaattagataaatatttgaatttaaaaagtggttaaagatgtctcaaagtagttgagatattctttcaagaggttgagagattccctcataaatatcagtaaccaaattcggttataggtatttatttaaataattaaatatgattgaattaatagagatttaactactataaatagaagtctaatttgataaattagaagaagatgcttctacactatatataatatcctagaaattatgattaatttaatttgggtatattttattaaatatgtgattaaatgaataattgagcggaatttattaattacgaaaattttatcagtttatgtgggtattgtaaacaccattttcaaaataaaatatttttgaatttgatggttgtggaaacttgacggattggttagaaatgtcatagtgataaaagttaagatatatttaaaatataccaaactagtttagaatgttgagtagtcggattagtcgaggtagttagagaatgataaaagtacatttaggaatataactctactcaacactcgaaacataagcaagagatttcaaaactccgtaaaaatttcaaatttaagcaagagatataaatctactctgaattaaaaaaaaaaaaacttaaacaagaaattttaaacctggaaaaagtctcaaaatcgagctagagacatgactctactcgactaccacatttgatatgagatatgtttcggctcacattctgaggagaagccacgtgctttaaaaactccacacatataagtcaatggacattggtcatgcccatacatacctattcacaacaactaaggatattggttgtacccatccacacatctccaaaagagaagtaacattcatgcactccacaaataaatattttttgcgcaagcctttggaaaattgcaaaagcattgattgaaaggcttacaagaaaatcttttcaggggtaaattttataccaaaattttggaaaaaataaaataaaattgttactcttgcacaagggcccacaagccaactgtaccttaaagaaactcaagtcaatcttgtgactttgacgagaacttgcaaaagccaaataagttaagatatcttatttgagggccctgtcgggacccacacccaagtgtgcctaaccttgggtttatgagcccacacaaggattttcatcctagagaccccaattcgataaggaaaccaacaaggacttaacttatttaggcataacaatgctagaatttcaacataaagttaagattgcacaaggaggccacaccacaatgcatggtcgacctgtgccatctttttgcataaaaagatggcataggtttctactctcaaataaccaaaggaaacttgtatagatgtggtaccctaacataaaggagcataaaacaattgaatgaaaccatttttaattcatcatcaagcctagccaacatgtgccatctttgcgcatgaacaagttgtaaaggtcgattggaccaaatgagaaggagattctttgccaaaaatactttttcatcatcaacacatcaaaaccaaatgaggaaggcccccaagtggcgtagaaaccacctagctgacctgtgccatctttgggcacaagaaagtagcacaagtcaaccacaccaaatgggaaatagtttctttcaggggcggagccaggccctaattactagtggggccaactattaatttttatttaaaaggatttatctgttttgacataaaaaaaaaaagtcttttagtccatttttcttttcataatctcatactttgtatttttttcgtactacttgtaatttttaaaaatttttgtatagtttacgataccgaaaaataaaatttaaataattactaccacacaaattagaaaaatagtcacgtgtgttacaaaattttttaactttattttcggcactataaataattcagagttt

SEQ ID NO: 315654 - DNA, 1316 bp, Cannabis indica
gagatcatggctttgaaccaagcttcgaaagggttattacttctcctatttactgcttctctattattagcaatgggtcaggccaagaccatcgtggttggaggcaccgaaggttggcgtttcggctttaactacacagattgggctatccaaaccactccattctacatcgaggacaaactcggttggtttcataattttgttttttcgatatattgcaattgatttattataactaagtagttaatacattattctacaagtacatatatatatatatatatatatttatatattaacatttttgttgtttacgtttgcagtgttcaagtacaatcctccaagtgagagtaataactcaatggcttacggtgtatacgaactgcaaaacatggggagctacttgagttgcaacttcagtagtgctgagctaatagcgaactcgacgcagggagggggcgacggctttgaggtttcgctgagcgaatggaagccttattactttgctagttacggggatgacggcagccactgcaacgatggccacatgaagttctctgccgtcccgtggcctcacaataataattaacctttactagtacctattctatgctatgctgctaccatctataatttatttttatgtaatttttaatcaataatattgcgtgtgtgaaataattacatgagaaaaatagagggggtttccttatcctttttgtttttctgggttttatgtatttttgaaggtttattaattatgatgacaattgggagagaatcttaatatatagaatattgctgatctgtattgacaattatttcccttcgtatggttttataacaaagagatgtttaaatagcagggacaaactctcccactaaaaaatcagctaaaaaaaccaaatacgcccttgcaattgtatggacaattttatttactgaccgcttaacataagataaaacaacattgtgtaaagaagataaaataactttgcaatcctgaataattaaagcatatggagaagccatgcttatattactttgaatcgcatgaattatattagcatagtcggtttccacctccactttgctttgtccccttgttttgatccaactaagtgtctccttgaaccaacctcagccatatatttggtcttacctggcccttccagctgcaacattttgcctcaattaacttcccattttaatcgagacccaaagtatccatagctaaatcttccctcaattgcaaatatggcaacatcaacatcaaccttgatcacttcctcatattttaccaggatcttatttac

SEQ ID NO: 315655 - DNA, 521 bp, Cannabis indica
tggtaaaatattcccaacacaattatgtaatgaaatgaaataactcatgtgtaaatattggtggtggtcagtctcttcaagtaaggatattcactagatttcttgggagaagttagtggttcacaagataatggtggactgggtcttcgcagcttaagagattttaatcttgatatgctcggcaaacaaggttgacagttgttagtccataataattgtcttgtcagtcgaatttttgaagattattattcatgtggttcttttctctctgctacattgggtcataatccaagttttgtttgatattctatcatggagtctcaaagtttgttaatggaaggatatcattggagtattgtcaatggtgcttatgtttatgttttaaatcaaccttggttattgagtaagaggaatctttttattgttttgactcatccaagtttggtgaaacgctaaggtggctcagcttatggtctcgggctctcaagtttggaatgttgactttgttaggttttatgccc

SEQ ID NO: 315656 - DNA, 583 bp, Cannabis indica
taacaaaatgcaactaaacaataaatttataattcaaataatgtagaaatggaattttatatattctaaatattatagtacctcatatgacttacatttattttgtttcctttttaataatattgccagctcaattctttattatgtgtaatattgccaagtgtcttatattgtatccatatacagaaatagtcttatattattgctattatattcaactaaattataacatgtgtgcaattgcattaaggagtagatagacaataggacagatatatcatatcttatttcaaaatattaatcaatggtggttgtagctgtaattattgaatatataattgtcatctccatgtttttcacatgtagtcagggggtggaaccagaaaattttcttaattgggggaagtgagatttgacttattttcttttttaaataatgagatatacatgaaatatatttacacatatatttaaagggtgaaatatactgtttcaaccctaatttttttaaatttataagatatcttatacacttacaaataaaatatacactacacatgataatagcctttatgaaggtact

SEQ ID NO: 315657 - DNA, 1799 bp, Cannabis indica
attccaactgatgatgctcatggctctaggcaggtacgctgagcgtcacccgcctcttcaactgtctcttcttcaagggacttggctaaattgcgtgtgcgtttgagcattcttctaaattcagcagcgttcagaaaattgggtcgttgaggtttgaacttcctaacccttgaggagcttggagcagggttagcagaggaaccaacagcaaaacgaagtggttgagatgggtgcaggtccgctaaaatggtagaaaaagcttgggagaccggcaccacatgatgagaagccccagtggtggccactagagtctcggctgaagtggaaatagccctaggaagcggtgcagcaagttgttcagcaattgtaatgggtggaaatggtatttgattaggtggaacggtgctatttggtgagatggcaggggcaatagtttgtgaagcaatggttgaggcaatggtggttgtagcagcaactactggttgggataaggccatatagtggtagttggaggggagtggttaagattaaggtggggtgaagagtgagtggtgtgtaagcccataagtgtagtttgtggctggctgagatgttgtactccataagctgaagtgggttcattgaaaggggcttcgaatatgatggaggcttggtgaaaccggtaacgaggaggcggagccaaggaagcgggattggctatatgaggtcgcagccgagtgcgggagcaggcaatgtagaagggattggatgtaattcgaatttcggctcctaaggactgatcatagtgaagcaaaggaggagctgatgaagagtcacatttagcaacaaattcatggcaatgattcacaatatggctaagtcttccacagtaatgacagaaattaggtaagttttcgaagtggaatttgagccaaaccggggaagccatgccatgaaaatggaagcccgtaccacgcgggagaggctgagttacatccatttctattcggactcggagataaggaccccaagtctctttgagggatgctgtatccacttcgataaaccgccccaggacttcaccaagcctttgagcaagagcacgcgaccgttttaagaagggaataccagaaacctgaatccagaatggggtggtagtgagagtttcagcagtcaccacagaacctgcttccaagggagtcatgacaatgagtttgtaatcaaagtgccaaggttggccaatgagtacacgacggctatccccaaagcaaccaaattcaacagtaaagaagttgggttctttttcaagaacgttgatggaaaatcgttcgggccacatttgcttgagctgattcttaaaagcttcggagttaaaatggcgagtggtcaatagcttgacggctaaaaaggcagaaggctcttcaagtccatcatcctcaggatggtcaggtgtttcagtgaaagagtgaatttgtgtttcaagtgcagtgaggttaagggtggcagtgaaggtgttggacaagtcgtccattgtcaaaatagggcagggaatttgaaagtaaacaaaagaggaaaagctagtattgagacagagatataaaaggaaaggttgcagagaaggacaggatgcagagagcatcaaggaaagaacggatatatagatgcttgagcaatcgagaagagtctctggcaagagcatatcagcaaaaattaacttctccatgtcaggggaacaatcgattattcatgtaagtatgacagtggtgttgggttttatgccctaaataaaactctatttcaatgtaatctattttattcaa

SEQ ID NO: 315658 - DNA, 1566 bp, Cannabis indica
attattaggagttggtatttgcaaaagcttgtaagacatggttactacttacgtctcgtactatgacagcatctcaacagaaactatatattcatattttcatgtagagactcattcaaaattccatctacctcacgaagcacggtgcgtgcgtaagccttgtctatgccacaacctaatccaaaaagaaatactaaaaggcactctgtcaatatcgctattagtccaattatatatcgagtcgcgtatagtttaatataataatttttaaagagtatcgctagccaaccgcaacgcgacatgtctagaagatgctaggcactactaatacttaataacaatgctctaatcgaaatgcatttttcttaattgaacacacatctcaatcctaattttgtctcacactctgaacggagactaaatcctaaaaattaatgccattttaacttctaatctattaaccagatattagaatgctatatttggtgtaattaagtctatcaacaaaattctaatccattaaactgagattgaaattcaatctaaatatcttccttttgatggactttgtcactagttaacaatagatttttagtacatccttaaaaaagattaaaaagttggctcataatgtgagcatggttatagggtactctattgtatgacactactttggtatgtttggtgtattttttatgttttatttatttttatttgttttttgaaaatccacaaaattttcattaacaaaaaagataatgatgctcacatagtactttcattgagagcaaagaaacacattgttttaaatctttataggatgcgagatggttgtaacaacacggaggggaaatcaaactgaaattatggatccaatggctataaatttactactaaaaaatttggaattcccgacagttttacaccttcgggtaaagaattctcgacggtctataaaactgtcgcctatacgagcatcgcaaatacttggtagaataggcgatggtggaaaaatgtcggtataaaagaatttccgacggcttaaaactgtcggctatagtcgatactataggccgacgattttgaactgtcgctatagtggattgccccaaaaaaaaatatcgtcttcatcctcctcaaaactacttctgcatatgtcgcagccgctccaaaacctttacaagctttatcctcctccaccgttgttgtgcttgtcttcatcctccccgaaattttttttttacaagttttggattgcttttcacttgacgatcctcaaaactttcttcgatttgcaaccttcagatttattttgaacacacaataattaagatcaacaaaccaaatggtggctaatagagatttaaacaacaaataaaagaatattgtgcttacttttgtgctgccacaagagcgcggaggagagcgacatagcgagagagagagtgtggaggagagggacggcgtgactcatggtcacaaaggagaaagagtcaagaaataaaataaaatttacaaatgactttgaaaaaatgagatatatattttttttttgggggggggggg

SEQ ID NO: 315659 - DNA, 1364 bp, Cannabis indica
tattgaatgttgtattgcttcgtagtgtcgatgatttttctaaccttcttttccatggaaagaagaggctatttataggagcactaatgaaccttaaaatataaatggtcccaggggagtaaaatagtactctagctgaacatcaagcgtaagcagtataattgggtagtataagtagtggcgtttggtctcacgtcgtactaatacttgcagatggtatctccattacttgttctcagacttgctaaagatgtagtgactcacttgatgtgtcattgtttcgtacatcctctttgtaccaagcaccttgtacttagcttgtatttggtacatacaatgccaaatgagtggcctcggtcttgtgaagcttttcccatacaattctatgttataacattatttgagtggagagaggagctcctaggcacaataaggggttaggtaaggtttaccttttagatgagtgatgggacgaggcgatgccttgcatgatgtgtgatgcgagggagtattggctcctcgagctttctcaaactcttttataacatgttattcctttgatgagggagtagtggctcactgagtcctctcaacctcttcccacagtacgatatcccttgggtaaggaagtattaattccttgagccttcacaacctctttaggatattagactttttagtgagggagtgttagttctttgagctatctcaacatcttttatgatatgtacaatctttttattgggggattgcttgccccttcaagtcagtgctatctacttgagccccctcaaactcttatataagttgttactattttgtaagggattttttcacctcacggctttctcaacttcttttcttttatgttgcctttgatggagatgcatccctctcatctttaggcatagtgttagttttataagtgtcgctatagaacccttttaggttagacgacttgatcgttctagacttttgtttgtgatatggagaagggtattggaggatgtgcctcgcgattgtcccatcttgagatgttttgtcaagatgtcttcgttccctctctactccttatatctacttcttttttctttcttttttttttttaaggctatcttatcatgacctcttgtttactctcattgttctacaaggggtaactaatcattatatcacaaagagtctttctctttgtatataaataaggttaattagtattttttcccccgaactttgacatgtactaaatcgtgctccctgaacttttttggtcgttagaaattctccccgaactattgagattgttaaatttaaggatttttgtttaatttcattcaattttactgtttcagtgattgtttatg

SEQ ID NO: 315660 - DNA, 753 bp, Cannabis indica
ttataaattatataactttatttactttaaatttttactaaaaaagtaatagcatcaatgtcattgacatgagtacaaattcttaaaatcacatatatttctctcaaatagaataatactctcatattttaccaacaaattaagctatccactttaggtccttaacaaatattttctaaaatttaattattagagatatatactagctcttacgtattttaaagtactgtccaatactatactgatgtgacgtgttataagtaattaataattttttatattatttattaaatcaaaatacataaaatttaatattgaattgtagtaattgtgagatatcccatactatttttcctaaattaatataagatagaggttccacaatgcacatgaataaagatgtatatatatatgtatatatatatatatatatttagggaaattctagaatgcaccccttaaaatggatacattgatgaccttttatttattttagcactcgaaataattttttagttaaattttttctcatcgtcatgtacgttatagttatttaagacatcttgcaagatattaagaaatttggaaaagtttaacacgccgaaaactacgttcaaacagtgtattgcacgcgtgactattttattttatatacgtataaaatagattgtttgaacattgttttctatattgtaaattatttagaatttctctaaattttggtagattatcttaaatagttataacgtacat

SEQ ID NO: 315661 - DNA, 2217 bp, Cannabis indica
atcaactatagattagtaaaaccaaatgaagatcatctcaagcttctgattttttctcaagggttttgagaaagagagaaatgggttcttttgtgcttttttccttttacttgatttttgtaaaaataaatgagataatcataggttttatttaatttactacaaccataaaattagattactaacccaacctaggtccactaaaagacaaaaccaatatagggcaaaaagaccaaaatgcccttgtccacaccaaaaatcataaaaatcacttaggggtattttctcaattctaaaatcttgactattcctaacattcctaatgtctaactatattaccctgctatacgaaaaatactaagatgtgattctaatagccaaacaccgcgttcctatgttgtcgagcacaaaacatgcaaaattatgaaattccatatataacatataaaatgcattctgaattcaaataaatctccgtaaactgataattcataactaatatgcaagtttcataattaaaccttaattttctagctaatttccaaattaaagttaagcggtctttacatatttagtaaacaataataataattaactattaatatattcttaacgctaaaaatgaccaactctatatcgtctgataagcaatagtagtaaacataaaaaataataactaaagagacaacaccataatttatagtagtttacttcccatattgtgttgataatagaattatgtctacttcaaacttttattatcgcaaaagtgaattgtctaatgaggctttctctctctagctttctctcaactctttgagctgttgctatggcgaagacgagggcgacgaagcagggcaagccaaggactccggtgaagaagaagaaaaagcgagggcctgattcctcttcagaagtgaagaaaaccaagtctatggatgaggttttagggatagaaccgatcatcttttcggaagatgaagaaactggcgacgaggaacagggtattggacatgattctgagattcaaagagggcaagaggaatcacgaagggacagtataaggctggacttcgcacaactggtggaattgaaacaatatcgggaggcacagcaactctcagcagctgcagttgcaagaggtacgaatgtaattccccctgtactgagatctggtagtataattcgaaatttagagccatgttttactggttccacctcaaagcaaaaagtgaaaattactagtgaagatatacaagaagaagttgagttttggaccccatctattgtatgctatgtgcttggggccaatcccccaatgtccattttagatggttttgttagaagggtgtggaaggacaaagttgacaaggtaggaatgatttcctatggtgttttcttggtcagattcaattccattgcagaccgtgatgagattttgtctggtggatacattttcttcaacaatcggccagtgatcatgaaggcgtgggatccaaacaagaatttcagaagaaaatcactcggtacctatatgggttcaattgcagtgattagaattgaaatactggggtgagcaagtcttgttcagaattataaggcaaattggtgaaccagttatgctcgattctcttactaaagcaaaggagaaactgaactatccgagaatccttattgaagtctctttaaatcaacatttccctgagcagattgagtttgaagatgaatatggagatgacatttcaatttttgtgaaatatgaatggaaacctacagtgtgtacccattgcaaaggtgttggtcatgtagctattaattgcaggaagaaagaaggaaacaaaactgagtgggtggtcaaaaaacctgctgtggagactcgggcaaaaccaaccagtgatgaggatgggtttgtactaccaaagaaaatatggaaggagaagctacctgaagcaaaagaaccagaggttatagcagtggctaatacttttggcgggctgcaacatgttactgatcaagaggaagatgatggggaaattgaaggagagaacaatgttttgcttggaaaagaaagaggcaaagagatcattgggaacacaggaggagggggagaaaccgtcctcttccccaatggataaaaattgctagttggaatgttcgaggagtcaacaaccacaaaagcaacaaatggtgaaataattattcattctcaaaaaagtt

SEQ ID NO: 315662 - DNA, 1158 bp, Cannabis indica
cttgctgcagagaacctcttcgtgttttgacatgcttgtagcagctgcttaatgtttattgttggtgtgtttcattgcagaaacttttttttatctcttatagacacttcctactatagtcgcactcaaaaaacaggtgctctatggattcatcttcttttccacacaataaacattttgaatccatgttatgaatgtattttttgattctctctttcatgttcagtctttcccaaagcaccagccaaagaatgaacctatgtttaggaataatgagtctatcccaaactagattacaccaaggcaatttctcatattcagagaataacaattggtacccttgttggatcttatatttctgcatcacaaaaccattcatgtgtaccttttgcttaatcttattcttgacagcaactatttgtttccatgtctaccttttaaaattaatttagactatagtattttttaacttgaaatataaatatgtatttttatattttttaaatctaattttttgaatgagaaactaagaataataagtataaaaaaaaagtgaagagcggtttggacgggttaacccgaccaaaccaacgaaattactgggttggttgaattttttctaatttttaattggggggattacaattgaatgtttgcaacccgatatttatatgggttgataaaaatatactataatccgactaaaccgatgaatgtacacccctacaaaagatagcatcaaaattttaactcacaataaataacactttttttaattactattgttatatccgtattttcgtgatcgtgacacgtggattttaatcaagaaaggctaagaaattattagccgaccaacttcctcaattgatgttttgggaggataaaagccgtaactcacggaaagggtctccgtgactaggagtcccctaaccatcagtaacacaaaagggatccgtgagctgaagtcttcccagtcccgggaaccaaagccatctgctcccgtcaagagtatgggatttacccagaaggatcaaggcatttcgaagatgtgccaaaccgagctacacctttagcccgcggaagctctactgtaacaccctaactagcataggcgtgttaccgtgatttttaacgtactgtgcagctcgttactaa

SEQ ID NO: 315663 - DNA, 573 bp, Cannabis indica
tgaatattattttgagttttagactaaaaaaacactatttttatgttttttttcaaatcatggaatccaaaaactctctaattattctcttaattttttattttgagattctcaactaatcacatattcaattttttaaaactcaaaaacattaaatcacacagtaaactggtgcgatattttctctcttgtgattttttttctctctctagtacgttgaagaacttgctacgataacccagaagcttctgcgaccaacgacgacaactcacaagcgagtcgagacccttccgttcgtttcacgtcggctggcgtcgccgatcaacgacagccaccgtctgagcatgtttgtttctgttagttttttgtttcacttattaattccccttttattagtttaattccatttagtgtttttatcgggttagaattataaggagtactttctttatttgattttatatgctgtgatcgtgtttatgtggtgcagctaattaagttttccattagtcctgtcttttgacatagttctttagtctttccatttttttggttcgattcttgttggttctt

SEQ ID NO: 315664 - DNA, 726 bp, Cannabis indica
aaatatcgaaatatcgcaaaaaattggtaaaccagaagaaaaaaatgcagaaaacgagagaggccatgagagaagatgacggcgaggccttgcgactgaagttctgggtctgtgtgttcgacggtaggggttctaggtcggggttaatgccggagaaagagagagagacatggatgtttggtttttatttgtttaggggtaaaattggatacaaaaatagtgtgagtatattttgcatgatgcaaaatatgctagcatatttttagtggataaattaattttaagcatataatatcaaatttcccattgaaaatgttgcttcagactgtcaagtgctcatctccaagattctcaagacgcatagggatctttcgacccgcctttctaattataaagtctggaaaattatctcttctttatcacacttttttggtgtaacaatctgtttcgtccctagaagcttaaatgtttcagctcacagccttgctcaacaagtattaagaattgatgaagaggtgctttgaaataattgtgtttcaaattctcattaaatctttgcaacctcattttaccctgtttattctcttgtatctttcaaataaaataataaaaaaaaaaaaccacaaaagacgttgttcaaaaataaaacacacaaggaaatataagtaaatatatatatatatatgggtatgctcttaatgggtattacccatgtatgtgtatttt

SEQ ID NO: 315665 - DNA, 585 bp, Cannabis indica
tatatacatttgttttatttttaatttatttattactaatttatataaatcctaactctataatatgcaatttttatttaccaataccatgaatctctattattgctctctataatatgtgactataactctttaattttgccaacaccagcaatttctattattgttttttttgttagttaatatcaccattataatcatatatgcataatatattatttttcttttgcattactctattttttttttcatgcatattacattattttttagtactccattatttttttatttctttttattttttcttctcctttagttacagcttaattacattttcttattctaaagaaacttatagttttacttttccagggttaaacatgttatgaaggtttttttatttgatttctttaaaataattttttctaggtccatccataaaggcaaacacagggatacgaatccacctttccgtgacaagattccacgttatctatcttcacaatgttgagtgaatttaatttgtacctttttattttacgcactagttttaatctaaatgaattgctttgcttgtaagag

SEQ ID NO: 315666 - DNA, 644 bp, Cannabis indica
ttagacagatatcgcataaatgtgcacaataatcgcaggcaatcgcacaacataaattaaaaaacatcaaatttaatcgcataaaatcgcatagaaatcgcacacaaatctcacagacaattcgtgaataaaatatgttcaaaaatcgcatacaaatcgcacagtaatcgcacagaaacttcgtaaataaaattagaatgaaaatcgcatgaaatcgcattaactcgcacaaaattaaaaacctacaataaatttattcagttaagaaatcacttacagcatcgtcgagccactctccctgcaccatcaacttgacgaaccaggatcgattggctgggccagtgtgaacctccctaggacgaccgttgtccctcacgtacgtgatccacttctggaaaaattttaaaagccgcgggtctgccggtttcacagtgtccacttcaactggcccaggtcgttgttccttcttcctctctgtgtagtccttcaagaaaaccggcttcctttttctcctaaccctggtgaactccacaccaggaggtggcccgtttagctcttgcacatcctgagattctgtatcaccaacagcaatcacaatggcgtttgtaggagtacaaggagccacatctacattgggttcccaa

SEQ ID NO: 315667 - DNA, 1441 bp, Cannabis indica
aaagagaacacgagaactaactctctttctctctaacactcttgagcttctcactctaacatgaggagaattcttgctctactgaatagtactctttctcttcttcacctcgtgttcttacttcttcatgttcatgacggtatttataggtccatgagatgaaaaacttgagtcggtggttgtaactgaatttagttaagtttgttacgcgtgaacaaacttctttaactgagatctccacgtcaacacttacaaagatactcttcggatgtggaacacacttcctagacaaagcgaggtgtcttccttgaaggatgagaagaggattccataaagcttatgtctgggaatagattgccttccaggactccctttcctggaggacgactagcttcccagaagcctccatccaataccagctagccttccgggactcactttcctggaggacgactagcttccatgaagtttccataaagagtaaacaaaccttcttaaaacttttttccagatagaaaccaggttccaggaatcttaagttcgagagattgtaagtataatgactttgcttatggtggagttcaaaactaaaaatttccgccttgcactccatcataagcagcttggtatagtagtcttctctatcttttccttcccgagggtcatggctcaaacttgtaatggttcacctccattacctaaacctagaagattcaaacaatgtttaaatttggctaaatttagaattttatcccctacgtcaacaaaatttctcttctgtaggaactttcttaaattggacctcttcttgtgtcactttgtccctgatgaaatgatacttaactcccatatgtttagttctattatgagacaaagggttcttgcataagtggatacaactttggctatcaacataaacggtgggaatttccttgagtagatgcatttctttcatttggcattttatcgaaagagcttatgttatttcctccatgataacaacatactctgcctctgttatggataaagcaacaacatgttgaagttaaacgctccagctaatacaattcccaccaataagaaagaaataagcagaagtagactttctgtgatctttatcaccaacaaagactaaatcactgaagccttaactaatgtactgctcgtttgtttagtgaacttcaatccaagttcaattgttcctttcaagtatctcaacacccacttcatagctttttaacgttctgcccttggttggacatgtacttgcttagaagactcattggaaaagctaagtctagtccggtacaaaccattagatacatctgagattcaacaacaactgagtaagggacattactcatctcttcaattttagcttgggttttgggacactgttctttgatcaattgatatttattgatcataggttgttttgtaa

SEQ ID NO: 315668 - DNA, 1191 bp, Cannabis indica
tctttccttttgtttgttctttgtgttcttcaatggctaacaggtttaacagtggtacttaaaaattgtataaaattttatgataaagatgtgctacgtacataatttgaatcaagttttggatggtgagattccacatgagccaccattcattttgtatttggcatcattctaaaattcattataatgtgctgtggggatttatgaaataatgcaaatataattacattaaaaagttcttaattgttttattttcttattgcataatgttgttgtaactgaagaaataaaatagtttgcataagattttcttctctttcatttcattttcatctttttcattttattccgcagtggtctctcatttcaagttgaaacacagactaagaaaagactctcaaatatcaaacaacctcttaatgaattgttacttccctcttgcatgcgaggtacattttttatttttatttttctatcacacattttttaggttgtcattttttatatatataaaattagtatatgttgtttatttggttgtgttttctttcattttgtaggtataacgttcctaatccctccaaagttaaattaatactgtcatcctcagcaatgtttatgattttgtttctatttctcagtgcaactccaatgcagttgctattgaaaggtggttgtcagaaaatgggaccaaatatttaaaaaatattgacttttcatccttaaatataaggaaggtagcaccgctgctcacttttttttttcaattgttaatttattaatgttctaattaaaaaataaaaaatacacccgctaacgtagctagcgttggagcgcctcatattgacaatgaatttgtttttctttttcttttgttgacttttaattgtggaaattgatgagattaattacttataaggtgtttgaagaacattaagctagctagtaacgatggtctcactcaacaaacttgtgttcttgtcttcttatttatccatcattggattctatatggacgtcttatgctgggaaaatacaaattacacgtttgaaaaaagtttggattatgacattaccactactgggattgtataggtgtgttctattttgttacaatttattaaagatctcaactgtggaatcttttactcgagcgggtgctctttgtataatacatcattatttttatga

SEQ ID NO: 315669 - DNA, 799 bp, Cannabis indica
ataaataaaagacacaaatggaagtaacatataataatatatagtcgtggaacgcgtttttaggtgtctcttatttttgtaaggtggtcacgagtacttgaattattattattacggccacatgattgtaacatctcttgggcttaattcgccaaattccacctaattaagcctttataattatatttacatacaaacttaacaaatgtacaccatttggacccttaataatagagtggtctgaacagtacttattgtcttttttactttttcacacgattgtgtgatctatattatacaaaaagtccatgcaatataaaactttgccatcattaaaatatggtagggttaggttaataccgtcataatcttgtaccttataacctaactggttaatgtaaacattaaaaaaagtcaacaaatgaaggaggagtagtctgcaccacgcaaagagaggttttgttactgtttctcacactttattctttcctatatatgtatgttgaatatattacaatttattgccaccatttttagttttctttccaaggccaccagttcacaacctttctcttactatttgttttctttcttgaaatcaaatgagcttgattcatgcctcaacacaggcttattataatgccactttttgtccttttcgtatgttaattcgaaaatatttaggttagtaatttttctccctaaactttgacatgtagtaaattgtgtccctgaacttttttggcagttaaaaattccccccgaagtattgagattgttaaatttaaggacttttgtc

SEQ ID NO: 315670 - DNA, 1170 bp, Cannabis indica
tttacccttggagttaattttgccttagaaatatttattttatctttaatcgtgctacaaaattaacgaatcagtagtgacaaataataatccaatattttttaatcatcaaaacaaggagacttaaaagtttgagttaataatctcctcgttttttatgataccaaatatgtaattattttgaaaaggaaaaggaaataaaattgaacaaatggattagatcccccttaatgtgtacaagggttaaaaaattaccttttagttttatcctacattattttgtaaacgccccttaagtttatacttatattcaaaaaccattagatgtctaaaaattaagtttggttgcccaaaaaaaaaatcacttatagaatttattccccttctaattcatcgaaatgggtggcaaatgaattcacatataaatgaaagaaattaaccaaagcataccattcatcataaaccataaaagttcaaacatataccatccaagcataaaaaaaaatacaaaagcataacaaactaacacataaaattcaaaagacactaagcctttgcaaattaaactagcaaaaaacataaacatgagataagatgctaaaaaatgcaagagatctaatttggtggaggtccaaagcaatccatatatgctctccattgtgccgtctcttcttgaacattagcaatccatgtaccatgtcactcctcatggtgttaatgtcattgtggaggttaatatattgagagtttatgtcatctctcaaaatttgaaattgagtactaaccaaagtttgaagataaggaaatgcctctaggatgttgaagtgaggagcttgtgtcattagaggtgctgaggttgtacttcttctacatcttcctcctcttcttattcttcctcactagcactagaaagtacttgagctccttcacgagcgtggggtcttgtttggtgtaaatcaatcttccttcatcctcatcaaatttgtaagacataccctactggggattattttaccaggatctagatttactaccatgtatgctgtttaacatcctaaacatgaatttctaaaacaatggaatttaaacacacataaagttcaagaaaccttacattgattgcagcggaattaaatgactccttctgtaacaccctaactaccttaggcg

SEQ ID NO: 315671 - DNA, 842 bp, Cannabis indica
acacacacacacaaaacataatcaaattagacaaaacaacatcacaatttcctcttctttcttacaacattttcttcttcatatcaatattattattaattatgggaaatgcctcaacctcatgtgctccctcattactaacaaatattagtaacaacaacaacaacaacaacaacaacaacaacaacaacaacaacaacaacaacaataacactaatggggtagtaatcaaagtgttatctttatcaaatggaagaatggagttttacacaaaacccattaaagtatctgagctaatgaatcaaaatccaggtatgtttgtatgtgattcaaccacacttgaattgggtcaaagaattcatggcctaaatgagcaccaaatattagttcttggaaaaaagccccaaagaaaacaacatcatcaacaaagccaaaaactctatttgcttctcccaatggaccttctttactctgttcttactattgaagaaatcaattatttcaattctttgttaattggtactaatttcatcatcaacaacaacaacaacaacactaacaataataatagtaataataatgttattaattttggtaacatttttccttctcttggtgagttttgtatgtttcttcctcaaaataatgttaataataataattgtggtgagtctattgagaatgatgataataagagatatcaattcaacaagcaaagatcatggagaccagctttagataccattgttgaaactacatcatcttctagatgaaattatttttttttaattattaattgtaatttttcttttttttaattttgggttgtaattatatttagt

SEQ ID NO: 315672 - DNA, 780 bp, Cannabis indica
ataataaaggtaattaaaaaattaccaaaaaaatactaaaaatcataccgtatattttgccaccactctacgtcaaaaggaacaaataataaatgtaattaattaatatatatgtaattaaataatataataaagataacaaaaatgaagaaaaatctgataataaagttgattaaaattaccaaaaaaaaaaatgctaaaaaaccttcctgtagatcgccaccaccctcgtcaacggaacaaaggagctcctccaccatctttcttctagactcaataaaccgaaggctttgaatcctcagtcaccaaagcgattagtaaacattagtattcattttgaattaatccaaaaagtaggagtcgcaaaattataatgattaaaaatcagaacaaaaagcaggaacacatctttattagaatagagcttgatatgatttcttcggacaaatggataatgtatagttcaataaaaattaaaaaacactaaaaattaccttaacagatgaggattctgatcgggtcattgattatgccacgtggtaactttctgatcatgcacttgatctcactgttaagtcattattagaaacacgttgggaaattgtgttgacaatattaaagtaatgagattctaagctccacaaataaaagaagctttaaattactttgtacaaagcaatgaagatgccaaaataaaaagtgatgctgagactttagcaacatataatttttaaaattttgagttcttagtgagcatggttatttggtatgatttgttgt

SEQ ID NO: 315673 - DNA, 644 bp, Cannabis indica
aaagtgtaacggaaggtatttatgccgccaaaattacaatttaagtattaaattacaactgaaagataaacttaagtacttatgccgcaaattactcttattattattttaaaataatgaatacatcattgaataaaaatagaatgtttgacaacttaaaacctaataaactaagcatctaaagagaaagtgtttaatcacataggttgtttattcattcgaagaccatgcactgctaatttttatgcagctacattagctgctcgaaggtttatatttcttagttacgtagtgtgggatatgtaaaccaaattagttactacagttaatgtaaatcattagaaaactacaagctactattgcagttaatctttctttgtaaatcattgattaattgttataaggtttccaaattcataatttaaatgtatccatgtattgataagttcatccttcacctataataataatatacagtaagtctaacaatagaaagattcttagtttcgttgtgggatatgtgcaatttatattaggacaaaatttgggaaattggaaaaacaaaggtgctttgctttataactttttcttcttcaactcaatcttttttgtggttttgtcaaaatgtatatatatatatatat

SEQ ID NO: 315674 - DNA, 1770 bp, Cannabis indica
ggtaaaataatttccaataccttggccagctagaccccatggtggccacccttggtcggctaaatcttgaacaagacctccttggttggccaagtggtggacaggattcgagcatgtgttttttcaagaactcaactacgttctttttgttcttcgttttcttcatgactcaaaaaccaagaatcataacgaatatcgaaatcagatctttttcgtctagaaatcacacattactaatcctaaaactataccatgcggatcaaaatactaaagggatttaaatctaatgtggaaatcaaaagacattcaaagtgaagaacaaggttcatgcattcatggaaataaactaaatcaagcgaatagcaagaagagaaagcttacccacgactagaaaccgttgatgaaggagatgggaagcttggatcgtagaaacaaagcaaatatcttgggagaatgaaactatgtgggtttggccctctagagagaaggaggagcttcttcaaaagttactttctattgagagagtgaaaagtgaaaaagtgaagaagagtttcctattctgtgggaccactccttcacttgccacatatactcaactcagagatatgtaaaagcagttagttagtttactgaaactaatgagatcagacattcaagagtagacatttcaaaggctaaaaatgcagcaacatttacttagttaagtctacatcagttccgaatcaggtggtaagtccctatccgcacagacgtccacacagggacttggggggtaaatattatcccaattttttcccacatgacatggctgcttatgtggacaatattagcaccacatagcagtacaactcaccaataaaaaaattaaattagcaccctagccaacggggatcccaacactcaaacgagacgacaagtgacagaacaaccacctcaagggggctggccagccacccctggtcggccagcataaggctggtcgacctatttcctctaggtgcccagttggctaggattggacctagcaggattttggtgcacaaccttacacgtggactacaagttggactgcaaattgggccttaattaacaacccaataaagttgatgaaaaagacgtatgtttaagggacattttagtcttttgtatttaatcaatttaacatgtaaatatctacttattttatttataaattagagttgaatctcttttatataaagagccttaatttaaccctaaaacccttagtctcatcctaggtagctaaacctcattctagtctgataataactcactccactctctctctctctcatgcccactatatatagcatctctccacacttgagattttctatttttgattcctactttgtaaccttaagagaactatattagatcccacatatagtgatctaaatagtgttatctctcgatatcaatacaattaaaagggaaataggtcattacctgctaactaaggaggccaaacctttataaaatctgtgtgttcatttacttttgagttctaattatgtaacaggtggcaatcatcgatttaatacgacctcgctatcgattggccaatttctgagttcaacagtaataatctatatatctatatgaaggagaagtatgatccagtgacgtggcggtctcaaatcactctaaaactattattctctcatctccttaattctctcaattttaatattttattaaaacataaatcaataaattaatattttactattattttaataaatcaat

SEQ ID NO: 315675 - DNA, 1279 bp, Cannabis indica
tttatttctagtgtttaaagctttctagttgttgttcttggtgttcttaatgttgctatttgttcttccatgcatgatgatgagatttaagggagattttggtgattgtagtgtgtttgtgttattaggttcatgtataatgcatcttgattgttttgagagattttagggttgatatatgatgtttaatttctaggaaatactatgaatttctgggctaagctttgaagcttgtgtaattttgtgcaactatggtatttgtgatgcatacttaattttgtttgatttgggttttgattttgagcttagtgtggtgctcaattgtgaaccaatgtttaattggtttgattttgatttaaggcttgatttatatatggttttgaataagttttggtatgaaattgggttacaattgagtgtgtgttaaattggaaaaattgggattttgtgtggaaatagggactgtcgtcgcgaccattgtttggctcgccgcggacacggtttggcttgccgcagcgagttgtggtcgtcgtggtgagggctttggtcgctgcagcgacgcgagggccctgttttcatggtttttgttttctcgtttttaccataacttttgacccaaaactccattttgggcattctttatattgttagaaagctcgttttaggctctatatgttgatctataaatgggattcaaaatatgtaaatgtgtgaaaatgaatttgagattaaccttatttgtaaaattccgagattgcgtgactaggattaccgacgcttgctcaggaacacccgaggatttgaaatctccacatacttggattaccaggtaagacagtaaactagcacatagagattagcgttgtggtgcccatgtatgttattttgtgtatgttatgtgagaaaccgagattagggttatcaccctaaacttagcggttgtgtgatctagggttattactctagaatttaaatgattatgaatacaattttatattgtatatgttaatataagtattgtgcgattaaaacataattaggttagactcggtaatcagaactgagataaaggccttattataaatagacatgtgtgcgtaacacgtgagtctatgctatataaacattaatagacgtgtgagtgtaacacatgagtctatgctatatagacattaattatagtgacattattatatatagagtaatgtaatataaagtgcggtggcacaatatatacgcagtggcgtactgtatgaagtgtaattattattatgattat

SEQ ID NO: 315676 - DNA, 732 bp, Cannabis indica
tacaccatgagatgtagccttaaaataagaaacgaactcagtctctatagtataagtagtggtcaatgtttgtttgttactcctccatgacacagcttcaccaacaaacataaacatgtaactagatattaatttatgtgcatcagtacaaacagtgaaatctaaatttaagtagccaacgacttttagattatcagttcgtttgaacacgagtttgtaatcattagcatcctgaaggtacctcataaccttctttgcaactttccactggtctattctcgggctactctaaaatcttcctaacactttgacataataagcaatgtcaggtcttgtgcacacctgagcatataataggcttccaacaacagatgtataaggaatgttcttcatttgttctctttcaaaatcattctacactggctcaaatttaatttatcacccttcacaattggagcaacgctcggtgaacaatctttcatatgaaatctttctaaaactctgttgatgtaggcttcttgagataaacctaagatacctcggtatctatctctatgaatcttaatgcctatgacataggatgcttcacccatgtctttcatctcaaagttctttgaaagaaattgtttcacttcacgtagcaaccctttatcattggatgcaagaagaatatcgtccacatataaaacaagaaaacagattttactcccactttccttcaggtatatgcat

SEQ ID NO: 315677 - DNA, 744 bp, Cannabis indica
tttgatattttcttttcttgctcagaaaatatttttatttagtgtgccttctttagtttatcgaatgctttaatgaatttatgtcaagcacatataagaggggtacgtagttgcaattgggccagattaattaataagttttatagaaaattgataatcaataatcacagcacgtggcacatcaggatatgatgttatattatgtcgatcctgtaaattttttgagctcattaaaaattaataatgttggaactattcacaataatattataaaataatagtgattttgttagattttaattattactatatatattgacacatctgcctgatctgtggaccaaggaagcttgatgtgtggtatgccatggctaaaaattaagtagccgtagtcatgagatggacaaattggactgcaccgatcgacactgagaagagaagagaaactgcctaaattggactacacctcctgcatgcatgtaactgtaaaattaatgccatttttttcatctaatttattttactattatttatttatttatttcaaaagttaagtaaaagcattatttatattgttaaagaaaataggtattttcacttacattttaaaatctcattaagtttcttattttgtcacattttacaaatatattccattatttctatattttagtgatatatttttttaaagagaattactccattattttttaattttttttttaaatttacggtttgagttta

SEQ ID NO: 315678 - DNA, 656 bp, Cannabis indica
tttttcaaaaacaaaattttttactttcattttgtgattaaaacattacaaaacaagtattaccaaacgacaccttagtattgccaattaattaattacaaatatgtactatatactaaacatgtatacactaattcgtagttccatttcttcctaattctttttttatacctaatttttctggtttgtacttttttttcttttaattataataatatttctttttagaagggaataataataattaattaatataatttattttttgaaaggaaagaataattatgtaaatatggtttttacgttgtcaatacaataatttactgcatgggcatggcattgccatgagaagccgttttcattacagctgcacattaaaattagattcccaaaacattttttgtttgtcaaaccaaaaacctctacatatatactcatgtattataactattattattattattaaaatttctttttgaattatataggacacgattttgtaccgtgatatatttttacggaatgtattttgtggtacggtctcaggatatattagataggttttagggtacaataccattttttaaccttaattacctataaatcaatcccagccctcagatcaaataactcctccatctaacggctgtcgtaca

SEQ ID NO: 315679 - DNA, 669 bp, Cannabis indica
tctcctagagaaagaagagatcttttggcaacaaagatcaagagtccaatggttaaagacaagtgaccaaaacacaaagtattttcatcgtcatgctaatactagatttcaaaataatcttattcgaggtaattacaattgatgtttacttagactttatgatatgtaattcttttacttcaaaggaatctaattaattatctgagatatttataggaagaaatctaataatttgataatctgctaatttaataaagtgttggttttaatccctgaaatatttatttatacactatgactaatgatgtgcaggttgatattcatactttaattgtatttatccactatcagctcatatatacatatagaaacaatttctaacttaaacctcgtgcttccaggattattaaaatctgattaagtatgacttcttatttgttactctattattatgataccttaatatttgccctgataatggatctcgatgttttctatcaaattttcacatacttaataataagtttggctccactataatccgactgtattactattttgcatttataaattctcaatgcactcaatataatttttcgattcacgtggaatcagtacatatctattctatataaaatgtggctatataacagaattcttgatttatga

SEQ ID NO: 315680 - DNA, 2054 bp, Cannabis indica
aaaagtaaatttttttatagtgacggtagagtaaatggtcgctcagaaatagaaaaatctgtagagaattagagcaaccgatttcaacccaagaaaaaaacataaagagccgagatcctataattgaaatgtagacaagaagcaataacttggtctacataaagggtcggggatacttggtcaacataagtcgtctgtaggcaaagcacataatttttctggcaaaatattttacgccgacgactttctcggccagcataagttttagcaccggcattaagttgtcggatgagagtgtctcatgaagttctgtcagcaaatcaatcaccgacaaaactttgtcgccattttttttccgcgaaagctttgccggcacaacttactttgcccgcaaaacgttgcaaaaaatttattttatttttctggcgatgtaaatttcgacaataaaaggttttttctaatatttttaaatacataataaaattaaaactaaattaaaactaaaaccaattttttaaaataataatatatgaatataattcgaattatattataaaattaaaatttatattataattacaaaaataaataaactgtctaaaactaaataaagtattgttagtttattaaaattaaaaatatttacactgaaaattgtaaactaaaaataaaactacaagttaacaatatcgttatcgtcaacgtcgtcctgagtgggaggggcagcctgtgaagaagacccaacaccaagaggctaaaatggtagattagagccattaggggcaaattgaagacgggaacgaagcctgccagatgcctaaactactcttgaaacgtgttcaggaattgatgctgagtctacatcattttttgctgccactcaatccatgcttcctgctcttccacccttcgcttcagggcctcatattctttttgggtgacagtaggttggtcggagggacctgccctcttggcgccgccctaagtctcggcaactgtcccctcaagtggcgtgaccgctcacccagcacctgtgtcataacaggcatggggtggggtcgacattgtactgcaggaggcattggttggtgctgattgagtttcaggaatctcaaccattttggcctataaaaaaaatttgaacaaactgttagagttgaatagaaattaaatatagaacgagtttcttaaagatataaaattacttacacgcagttgttgtgtgtgttcatcgcgccatttgttgttcttgtagtggaacatttgaaaagtgtctacggcactgggaagatccccccccccggaataacccaattttatagataataaaaattaaaaatatattaattcaaaaaattattaatttttaggcaataataattataacatcatacaccgctgacatgtggccgactatggtcttagacctctatccaccttgaatcttcatttgggctcaatttttcatattttgctcggctcttgcctataatttaaagtaaatttattgttagcaaaataagagaaaaaaaaaacataagttaatggagatttaattttacaatattctcctagtcccttcttcctcttcatatttctcaatattcttcttccatgccttttccgtgtctgatctgtagtcacgtagctctttcgacattgatttaagaccctaatccacgaacatatataagattgtcagttgggaactcaaacttgatcttaaaaaaaaataaacattaaagtcatatataatttattttttgtataatagttttgtttgatctattacaataaaaaatttaaaagttacccctagtctgtcccagatatgtagtccgatttatctctctctacctccctatttctttttaatatggaactgctataagtacgatttactataatacactatacttttagtgtgtgtgattttgattcgaatcacatatgtggatagacttgcagtaaaaatagtgttgtatatatagttcgattatgcatgattgggccgatatgtaataaacatcttttattaacgtgtcgtttaccat

SEQ ID NO: 315681 - DNA, 1147 bp, Cannabis indica
ttttttagtttcttttattcgattggtacatagagtaagtagatgatatttcttatcttatatagatactttcttcgtccaacaaataattgttatgccccttggtctattttttatgcttgaattttatttattattatttgggcataagttttaagagattgattttgggtggacaggtttcggtggattgtgctatagtgataagtccaaggaagcagtctcttacttacaagcagtgtggattcgatggagtgaatgtgtagattttttttttttggtcacaaagtctcatttttcttcttctttctcttaacaagtagagagaaaaaagaaaaaaaaagaaaaaagaaaaatgtaaagtcctttcacatgggtggaaatggattagcacgcagtttaaaaagaaagctagcgaagagaatgaacaaagaagaggttccaatttttaggattatttatttgaagaaagaaaaaatggttccaagattttgcaaaattaaatttaaaattaattgcttcggcaagttgctaactgcttgtaaagtgtaaaaaggaaaaaactcatgcgttggttggttggtggtattagagagattccacttccctttggggtctatatgcttcctctatgttattatttatttattgggttgatgatatgtgcttataaattacaatttataattgcatacaattatatttaagaataaaaatgtcacatttatgaggtagcttattcaatgactcatttgcagctaaaaggcattatggttcctaaaactacttagaggtgacatcttgttaataattagcgatatttataaaatttaataaattaaattatacggggcatttttttgataagtagtgaattttattgaaagaaaattacatcaaactagtgaccacaaagagggtcacttcccttagcacactcgtacaattagctgaggttactctagcccatgaagctaacgaatcaacaacattgttttcagctctaggaatatgagtaggcccagccctgggtataggcgggctaggcctgtgcctagggcccacctatcccaagggtccaaaaaaaaatttcccttttaaaattaacaatttttttttaattgattttcaaaaatactatattttt

SEQ ID NO: 315682 - DNA, 1395 bp, Cannabis indica
ttctttttaagtaaaacaattaaatttcacatgatataattacacgtggtttttttttcattcctgcaaaatataccagtagtttagctaaaccgtgagcaaaggaatagaggaaaaaactctcaatttaaaatgttatattatagtcaaaaataagttatttttaaaaagttgaatcttttttaaaatgaaatacaagaggctaatagtatggtgtaacaaaagttatcacttattaatgttcattcaatccaatctgtactattttatttatagtgcatccgatttacattaaatgtaaatttcatattttaaatctaatttaatccacacaatagctcaaatctaatctaatccaatccacaaaagtgcgaattgaattagttactttataatattagattatttaatatttatgaaaaactaccaacgaaataaaataaattattgttattttatgtcttcaacaataaattaaaataaataaaataacaataacaaattcaaaagaagaaaaaaaattatttgtataaaaaaatatttttaaaaaaattatatataagaatgaaatatacatttgacctattattttgaaatataattgtatcatatgtattagacttttaaattacttttttctttacattaaaatattaattatgtatatataattttttaatttttttaaattaatatgtgtggattgaattagatcggttacttttacatgtcaatcagcatccaattcatacaagtgcaaattttaaatttttcaatccaatccaatccgcacaagtgcagatatccgcactttcctaattgaattggattaggttatacaaattaaattagattaactattttatcaacactcctattacctctattattattttaaattgatacttttagatttattattattttcagatatgaatgttaaattaaaaatataaagtttgctaaaaatataaagttaaacatttggagagagaataatattttgattattaatttattattatttttattagagagaaagaatgatattaattagttagagtgagaattgagtaataattaatgaagtttttgcaccaaagaacctaattttgcacttatttacggatttggcctcgctttaaataatacggttttataccctttttttttcaaattttttatgccacgtataccgtttgcactgttatattttttgtccatatctgatacgtgtaatacacgtttatatggtatagctagatatgcctttttcagttagtcccaatcagtcacgatcatttccttctttttctttaattttctctctctcattgttcagtttcaaaaggtgtttggcttaaccagtcaggatctaagacggtttattttctc

SEQ ID NO: 315683 - DNA, 933 bp, Cannabis indica
aacaaaaaacgtgcatgggcattacaatagacaacaaaacaacaactctttagcaactataaaactactatactgaaacatttagataatgagacatatttttttcattggttatttcgtattttttatatgaaactttctattttctataacttttttaaacaaattgttaggacaaaatggatattatgatcattaatgtagaaatgacaaaaacgtcacaattaaatcattaacaattgcttgtttcattaaaagcaagttgcaattaagatatttttatgatgtttttttgggatataaagtatatatcgactaaacaaaaaaatttaattataaataaacacaagtactatataaaatcacttgctagaaataacaattcgtcaaagattgtctacaaaatttgattttaaaaaggaaaataacaaaacaattcgtctgttagcgaaaataacaaatacataactaaatcaaattcttctttaaactctttggaggagccccattaacactatcaataaaatctatttctttcatgcaagcatacttgacgaacaccacaagcagcttatcgtggtgtttctcaacattaaatacggaaggaatagttttcatgtcaatgaagtattcaacaaacgataccacaaaacaaccgctgtccttgaaaaacaacataaaaacaacatcagaactattccataaaggaaaacaccaaatatataacaaaacaacactaaaaaactttaaataacttacttcagtgattgttaaagtaaaccatcaaccttaaccacatcaaaaggctctaaagaaatcagtttattatcctttttaaacttatcaaataaggaaaaaaaataaggcaatagcatcgaaaatagctgacaagctttcataacagtcgacaaagagttgtacatgtacaaacgc

SEQ ID NO: 315684 - DNA, 877 bp, Cannabis indica
tctctctctctctctctcgtactactcctggaattagttgtaatattattattaggaataagaaactaagtagatcatatatggaaaaagaatatttttcccaggaaaatattgaacatgatcatcatcattcttcgtttactagttgaccaaacagaaataacccaataaccaaacaccgtgtacccagcactacaaacacaattaaccaaaatcaaaagccaaacaaattctccccacccaaacaatatactctctcacttgtacggacaccaaacaaagaaagaaacagagaaaaaccattaatattatatatttaaccttatttatttatatatatatatatatggaaggagaaagatcaggatcagtactaccgagttacgaccttcaggtgtcgtcgttttcagtggctactactccggctctagctccggcaccgatccacgacatgggttttgttcacttccaagatcatcatcatcatcatcataatcatcatcacaacatttatagcttcttggctccagcagccgcgtcgactcagcagcaggcagctgatctcaacactaccactactaccggctcggcttcaactacggcggctgcagctacggctatggctggatcgaattctgggttggggttttgccatggtgaccagtttgttggaactactactactgataataataataataataataatgttaaccaacaacaaatggtaattaaaaatctaaacctctttttgttttgaggtaatttataattaattacctttatatattaattaatggaattattttatatctctgtgtgtgattaaaaaaatgtctccataatatataattcttttttcttctcatttgcaggg

SEQ ID NO: 315685 - DNA, 1211 bp, Cannabis indica
tttttagccaatatgagactttaattgtatatctaatataaatgaatcactgagtactgatttttttctcacactatcggtcttagataattccaaagatcacgtgccctagaaagaaacaactaacaaaagttacaatataattcgaactctttaactcgaacaaagaagaataccgaccaaaacatcctcactactttaccacagaacacatgataaatgaaaaaaagagatcaagttgataaaaatgggcagcaagtagtgagtttgtgtacatataagagaaacatagaaaaaagaatgaaagaaaaattggtttaaagcatcattataggaaattaggaataggagtcccactctcactctcaccaactatttttgacagatgtacattgctatttttgcaattatggctgtgacccaccaaccatcaatacaaattctttcaacaaagcaaactagatatttttaatatttatgtatatttttctatttcaaaatagaattgttttgaacaagtaaaatagattattgaacattactatctataaaattataaatggtgtccgtaaaatcttataaatagttagcgatattttataataattattaaattaaatgcttaattatactaataataatatgatattttaaatggcactaagcaccacacagtgacaaatacacatgcatgcttatggaagttatgaaaaaaatagttaaaaaagatatatttttgaattagtttcataattataccctaaaattataaatacccacaagtattttttatagcaattaaattatcataaaattaaataaatttaataaaattaattataatttttatttaaagtagacaaaaaaaaattataacaataaaaccctcgtagtataaaaatttaaagtttatcattggcacacgagtgtcttttagtatttttttctattattatatttcatacaatattttataaataatatgtaatgagattagtgttaatatataagagaaatttgaattaatatgcttaaattatttaataatttttcctctaaatgtaaagttagtaaaattggtcatatatgaccactttaccaattttcctaaactacccctctcatttgaaaccctctctcttcctctctcttcgtctctctcagccgaacaaacccaacacccaaaacaacccatttcagccaccacggtt

SEQ ID NO: 315686 - DNA, 1234 bp, Cannabis indica
tgagccatattactagacagatcacaataaacagtattacaaaagaaaaattataatttacaatctaaatttcttcaaagttcatattcacaaaattaccgagcatattactttcacatttacataatttcatagtttgatttttttgttacaatccgtgtatataatagtaagagacacaaaaaattttcaacaaaacaatacaaagagtaaataaaaacacgcgcgcacatatatacattttacattattggtttgtattttccagtaatttatctatactcattcagaaatttcaaacatatcaaaaagattttataatataattgagagaaaaaataaaaagtaacttactctgccagttggagagctgcagtcatgtggaggtgatggaatggggaggggttcatggactcacggagaagagcggaagctgggagagagaaaccctaattaggagatataattaacaatttcagaaatggtgaagagaaagatgaagatggaaaatactgacaaaaggaaaaatgaaaattcataaacctataagtataagaaaatattacattttcaaatgtatatatatataaattaagcgacaaaagggtagtacaagtttaaagccaactaaattactaaaagcaggactccagagaagacgatgaggaagaatgaaggacccgcgccgccgttggagaagaacgactcaaagactggcctagagagaaagaaaggacagaggagagacgggcctggcgagagatagagaaggcggaggagagatggaccgactaagattgagtgggatggtggaggcaaaggtattcaaaggttttgacaaatcgccagaggtcttcgaatggttcactagggttcaagaatgatttgctgagtctaacaaattttgggtaagtgaacaataaaaggatttgtgtcggttggtcacactcgctacatgtttactgctggtttgaaaatcagaaaaacgaggcttttaaaacgacgctaaaattgtgtatactttttcttaaaaaattttctttttaccgtcggttttataattagtgatggacatagaactgacgcaaatcatctattatttgtgtcattttagaaatgacgaataaattgaatatgctactattcacgtcggtcaacgcaatgaacagtcgcgttgaccgacgtaaatagtgaattttgtagtagtggccacaaattactctaaattaaagca

SEQ ID NO: 315687 - DNA, 1079 bp, Cannabis indica
acaaaatcaccaataaagcagcccaaattcggcccaaaagcccctctctcgcgcaagtgtcacgcgcagaggctctctgcacctgggccccacgcgtacatcaccaacaggtgccttcgtccacctcgtcagccctctctcattcgtgagcatttgttagcatgcctacaaatgtatatacttagctgtacatcagcaataaataaaaataaacagttaccctatatatatattttggaggagcatgcttgtaaatgtacacttttttctaaatgatatataaaatattggtatttaaaatatcagccaaaaacaatgtgagatgaaaaggtggccaacatttatttagtggccctttatatttatatataacaaatgatggccatttacccaacatttattcagttttttaacattttcatttatcaagttcttcatttctataaccctatggctcatctaagtttcaaacaatgtgcttcaataataaaaggtgagctccaagaatctggccaaagtgattcaaaaaattctaaagagtgcaatgaatcaagcacggaaggttcaatcaatatgagttttgatgacttgccacctacaatgaaatgtcggtgcggagaggaagctgtagttcgaatctcatggagcagacgaaattcgggtagacgtttctatgggtgtcccaaatttgtaagatacattattggctttgttattttttctttttgtatatataaaaaaaactagcaactctagtgtcttgctcgttcatgcactaaattacacctgaaaaagaaaaattcagcgcacccaaaatgggattaagatctcaaaccagaaaataaatttcaaaatagttgataatacataatttttagtttcaatccccggcaacggcgccaaaaacttgttgtgaaaatttatatacgcaagtatacgcagtcaaacaagtaataagtgataagtgagatcgtctccacagggattgcaaacaaaaatatgttgtaaaaccaactaagtacaacttaaagtaaaaaaaaaataacatgaaagtgaatgagcaatgattcaaaattaaa

SEQ ID NO: 315688 - DNA, 1306 bp, Cannabis indica
attttcccatatttttgtaaatagcccaaagttaattatgttccaaggatgtaggtattttttaaaaaattaccttaaatttttgtatatttttttaaaggattttttttggggctaggctgagtgggccttaagctcaagcttcacccatctacagcccaaggaatttttttagactcaggcttgaccgtctaatgcccaaggccagccctcgtaacaaataaaacatagcaactaagcccactaatatagcaagagcttcagtttgtgcaatttgtatatgtataatgtacactaatatagcaagagcttcagtttgtgcaatttgtaatgtatatgtataatgtacacaaatattaaaagaaaaaaacaaaatcaagctacttacttgaattgttcagatctttggtgaggcagaaattcatgagattcaacttcagttgatgatatagttggtggagaagttccccagttcttaaatgcagcaacaaacacactaccaatcctaacaaatggacctttctcattcagtgtaatgcaataatacctataagtccttgttccaatcaagaaaacaaccaaagcaatgaccatagcaatacaaggaattccaaatccaagtgcccaactcaaattatcttgcacataactcacaacaaaaattgctactgtaccacccacacatacaccaaaataccaccaattaaagaatgaacttctacctttacattcctcaagatcatacccatcaaattgatcagctccaaaagcttgtgtgcaaggtttgtgacccccttgagcagctcctactaaatacaaggaaaagaagaacaacattacttggatctgaggaggagaacatgaaattggatcatctgtttggcagttgaaaccaatcagagttggcaaaatagctgacagagtcaataaacccaatccctattacaaattgaaacaaacaagcataagaattaagaatcgcccaattagtgttttgtttttcattgatttgatttgattgataccaaaatgtaaagcacagaagcgagaataatggtgcggaagcggccgagataagaatcggcaacgaaagctcccaatagaggtagcaacgacgccgttccggtccaggcattgacgttggctgcggccgcggccgttgactggcggagcggtccggttagataagttaccaggttagaactgatgccgtagtaggcaaacctctccgcaacctcaacacctgtggaattattttcatttcaatcgctgtaatgtacaccttctccattgatgacatcaaata

SEQ ID NO: 315689 - DNA, 3084 bp, Cannabis indica
gacaaaattttttcatgttcctctttcttgattctttgaagggaagaggtttgcaatacaaaactgttgactttgtagtcgtacaaatctcctctcttggagctaagagaattgagtagttggtgaagcgaggctcatactctcataagggattgcccccagtcttaggcttctttccgccggggagtttcctggcttaccaccgttgttggctctctttcctccgttcaaacctcccttcttcccattgccctgtacctcagtagcagaggtttgggattctggtggcttcttcttgccaccctttgagcccttggcttgcgtgatgacttcttcaagtttgataaagccatctgatctatataagaattcattcatggtgtatacagccttgagatgaaggtcggaccatagaggactcatctccttaagtctgactgcgagtgccataactcttgcatcctcgccaagacttttggtcttagtggctgcctctaagaatcgttggatgtagtccttgaggagcttgtctccttattgcttgatatccaccaaatcattggattagatctggcattgtcaagaaggagcaaactggttgccaaaagcatccactagatctttccatgagtcgattgatctaggggagagcttaaggtaccacctttgagctaggcatctcagtgtgacagggaggattctacacctaacgtcgtctctcacaccttgcagatcagttcgcaatttgaagtagcagatgtgagacagtggatcttctttcccaatgtattgatgccaagaaaggttcttgaactttgaaggaatgggaagagatttgattcattcggagagcagtgagcattattctttatcaagctcgaattcagacaagttaggaatcatgatccccttgcactgacggtgcatcattttgagttattctggccacagtcattgcttgttcaactcttcgttccttcgattggattctgcgagtctccaacggagttgtcaattttctaattccacaataagaacatacctcgtgcggtcatatgcatctgattctcttctctcgggaattttttcctcagggtcatctcttttggggttcctttaagtaggaccctttccttggcttctattttgagtttgtgttccctgaggcttttataccaattgatgcattgtctcttcttttaagactggttcatcatgttaagtattttccatgacgagaaagtctggctatgccggggagatgcatttcgagttcttaattttaaactaaggctcttaataaaagcaccaaattattaacacagaaatttattaacaataatgaagccttttaaataaaactaaaaattaattatgatcgaatatatataaaataaaaaggaattttacgtaattttgtagttaaatctacatactccacaagtcaatattatttttgattatattttttataatattttcaaatacaagagaacatctctaaatatttcattaatctccagagttattactcccaaaaactccatcgcctctttgtaggtttttgtccttattcataggattcttccaaatgtcagctatttcgtcttgaacttatctcggtaactatttttgaaacgtggataatccacatgtttcatttttacaacatgtgggataaataaaataactggcaataactgctttttaatcttatctagaagtaacaggtctttgctgaagtggtgtgttcagagttgtctcacatctttttgtaatagagatgaatattgcgagacaacttgatgctttacccatcatatcattaagaagcgatctaaagcaggtttttcttgatttgttttcttgcatttgatggaaaatggtggggcaggttctctttagaccatgacccttagtctttcaatatactcaccaatacgtgggtcaatgagttgtaagctcttaaagaactcgttatttactctttccacttaactcatcctttaatgtcttatgcaagcctcatttacctcaattaatttccaagattaactcatgatactgttatcctcgctagtcactatatgtataattttatcgtttttaattgatagccataatataatacaatgcgagacaacacctcattaattgtagcacatcccgagataagataaactttgtatttataagtccccttaattttcgagaccaatatccacttatcatgttcatacttatggttcgaaatatgggcataataataagcatcaacccttatggcagtgccctccatcaaggctgtaatattgtatttaattaatatgtaattttaagtgaataaaactaaatagtttagcttagttcaattatttaattcataattaaacaattatacaaaattattattttgccctaaaaacttatttattatagaaatcaattctttctcaatttattcctcaaattaaatctttcccagtaccaatgttgtatagaggtgatccaggaaccatagacctatatttcgaagctcttataaactcatgattattattaaactcatcaataaaataatcaagcttattacactactacaaaagtcacttttaatgtcggttctagtatcggttaattacaaaaacgaacacttaaaatcaatctaattattaagtgtcggtttataaccggcaccaaagagtactcaatagtatcagttctagactgagactctaaagaaaaaactgagactaaaggtaaaactattatacctttaaaatatgttaccattagagatgtttttaaattatatgtaatccgatatttaattacactaatagcgatatgacatcaagtaaagtactaacaacacaactaatacatttttaccatttctcaatagattagagggtagcattgggtactccaaaactacctttgagtaaaatacagtccaaatgggtagaaaaagcccataaaaattagaaaattagaagggaaatttcaatttttggccttaataatacaagccatatcaaaatttatacccttccttaatttgtacaaatttagtccattaat

SEQ ID NO: 315690 - DNA, 902 bp, Cannabis indica
atataaagatatatatataaattcttagattaaaaaaagaataaaaattatattgtaaaaattggtcactttgtaatatatagtgcggtgcggtttgaatcgcaattattaaatttaaaaccgcaaatcgtaccgtaaaagattttaaaccgtatttttatacaatatggtgcggtgcggacggtttgtacaatttaatgaaaacccctactttaaaagataaaaatactaattatttgttctagatatatcaagaaatagaatacctaaaattaaaagaacaaagagataacaaaaacttgtcaatatggtaagaaataggatataatataatatcatataaaaaataatgatggacagtgaaaaaaaaaaatctttatcgaataaaaataaataaatacggacacctgaaaaaaaaaacaaataaataagaataaaaatatataaatacggacacctgaaaaaaaaaaaaaacaaataaataagaataaaaatatataagaaactgaacccataaatttagaataatataattaaaaaaaaacaataaaaataatattttgaaaaattaagatttagagaggatttggtgaggaggacccttttttttgataaaagtttttatgagagaacttgaatattgtttattctcaattgaatcagtacaagagttctacaacaaaaatactgtacacgtattcaataatttaatttcctcactgaaaagaaaagtcatttgtggtcccctttccccaaattttttatcatttttattttttgaaattgtcatacaacttccattgagaatgaacaacattcaagtcaactttaaagtcatttttattttggggagttctatttacaccccacaaaatgataagtacaccccattattaaaaaaa

SEQ ID NO: 315691 - DNA, 2067 bp, Cannabis indica
tatagtcttctcagatatataatctcaattacatacaaattttctattctcatgatagattaaacatgtaacagacattatacacagaaatcctataagctatctaaaccatataggtactcttgccctatatcaaaattaagttctatttcactatagcataattgacactcgcttctcaaatctcgcatcaaaatcatagacattgaattgctgatcaggcaattaaaagttattaagtatgaatgaaatagaatacataaaaattgagggaaaataaatcatattaaaaaaggattttgtctatgaaatctaacaagaataactccggtgactgagccctcataacagactccaactcccaggtgacttcctccaccctactattttgtctagattactttgatcaatgctatggtcttttttcgaaggactttattcttttggtcaaggatctatagttgttgctcctcatatggaaagtctagttggagctctagggttttataactcagaatatgtgtgggatctgagacgtatttccgtagcatagagacatgaaatatgttatgtattgctgataatgttaggggcaaggctagatgatacactactaatttaactttcttaagaatctcaaaagtccctataaatctagcgtataactttccctttttcctgaaatatttaacccctttcattggagatactcgtaggaaaacatgatctcctagctaagttctacgtttcggcactctaagaggcaagcatcttggccttgatcttctatatttcctcattggcttgctaaactaattatggacctataagtattttctttctatagtttcatcctagtgaattggagatctataattcctgccacacaacatcttatagggagccatccctattgtactttgatagctattgttgtacgaaaactctatcagtggcagatacttaatataggagccttaaaatttatcacataggttcgtaaaatatcctctaatatcagaattttcctctcacactaaccatttttctgaggatgggaagttgtactaaacgccaactttctacccatggctcgctagacacttccccaaaacatggaagtaaacttcggatccctattcataataatagactttgaagccccatgtaatcatactatttcttttacataaatttttgaatattgatttaatgaatacgttattttcattggaaaaaaatgtgctaacttggtaaactgatccaaaactactgatatgaaatcaaagatacccgtggttctgggtaatctaaccacaaaatctatagtgacatcctcccacttccactcgagaagtgtcaaacgctgcaacaaccctgcaggtctttgatgttcaacctttatctactaagatctcaagcatctagtctcacattccaccacatccttgttcataccacaccataaataataaggttttaaatcttgatacatcttggtggtaccaagttgtaatgaatagggagtggtatgaatccaaaatctccattctaagttccacactgttcgagacacaaactcaggttttataaggtgacattttattacttcagactgtgaaatctttagcttggccatctaagatttcttcttggatcttcaccaattatgggtccaccaactgagcatttttaatcctctccaacaagtctgattgaaatgttaaattactaagtttgccaaccactagctcaatacctaatttaattagggcatctgccaattgaggtgagatcataatcgtgctaaaaacttgcttggggcctttcttaattagggcatctgccattacattggacttcccaggataatagcgaatttcacaatcatactcttcaactaactccaaccactgcctttgtctcatatttaaatctttctaagtaaataaatattagaggctcttggtgatccatgtaaatttcacacttttccccatagagatagcgtcgccaaatcttcaatgaaaaaaccactgcagcaagctctaaatcatgggttggata

SEQ ID NO: 315692 - DNA, 573 bp, Cannabis indica
agctactaaaaaatattattttcccatgtaattactaactattttgccaaacaagatattaggaattcacatgtaattatcaccttatatccaaacacactttgcattttaaaatatagtgtaattattaaattgtataattaccacccattttttaaaattttattgcttaattttcttggagtatctacccctccacttattgcttaattgtagaatcaagaactcatagaaattaagtcaaataaaattactataactaaacttatacggtgtgattggtaacaattatttaaaaaacaattttattagaaaagtgaatatttttataacgtttggtatttttttttttaaataaaaatcaatattttgaaaatttctaaaattaaacaaaattattttctctctttttactttattttctcactttatcaatttcactctcctcactgaaataaaaaggtaaaaataaagaagaccaaactcatttgttttttttaaaaaaaaaataaaggaaaattgttttttttttttaaaaaaaaaaaacttaaaatatatttcaatttatatgtt

SEQ ID NO: 315693 - DNA, 689 bp, Cannabis indica
ttctcctcaagttagagtgagaagctcaagagtgttagagagaaagagaaaaaagaaataacattagttttttgtgttgtctacaagaaagtgaggagaaacaatttttaaaaaaagagagattatcgagattatatgtcaaagaatgtgacatgaagtctcgaacgacattgtaattgttcaagtttggattatagtggaaagagctaaaattcctaaggatagctcacaaggacgtagcccaaaaattaaggtgaaccttactaaaattttgtgtttgatttttttactctattctgccctgttattttgtcattttaattaatttttattctaattttgtattaatctctttgatttgcattgtgaactcaagttagaatacatacataataatgtaggtttaatttcaattataaattataaactgagtacgaatattaatttcacttttagttgtaggattataattaattacatataattactttatgtaaaaatattagtattttaagtgtgtcaattgatatgatattctttattcataatattttgtatatgaaaattattaaaaagtattattggtgcctaacacccttctcaatgtcatattgttattggtcatgagtatctgaaaaactgtgtttttgcaaatgtcagttatatataggaaaatataaaaactgtaa

SEQ ID NO: 315694 - DNA, 1281 bp, Cannabis indica
aaagtaaaaaaaaaaaaagagagagagagagaaggcaagtataaatgtttaatattggtaaaaatagtcacttagtgtaaatttccctttttaaaacataatatgggtcgtttggcaaaattttttaaaaacagttttttaaaaattaagttttaaaaaattagaaaacagaaaacaccaaaatgttgtttttcaattttcaaaaataatttcttttgtcttacatatatattttatatttttgctcacatactcagatcctagacccaaaatcaaacccaaacccggacccagacccgaatgagttcatgtaatggtatggtgttaaaatattgattttttagtaagaagaaaatctaaaaatagtttttaaaaatttgtgtcaaatactattaaatttttaaaatgataaaaaactgttttctattcttacttttaaaaacataattttaaaattgaaaactgaaaacacagccaaacaggctctaaatataaccatttttttaagtttaatgctccatagataaatatatcattcttacaagtttaatgcaactaaaacaaaatactaccaagtaataaaataaaataaaacatcatgaaatgaatacacaaaagaaccaagtggtacaaactcaacacataaaaaatagccagtaataatataattataggactcttctactggggaattttcgaaatgccctaattgtagggtatttaatagcttgttctaattgggtaagtacattgtaataccatgatcatgaatgcaacatatttaaattaagattgattataatattttttttttattaattttctgacatgtgctatttttgtctacaacaaaaattggatttagtgacatttaatttttttaaaatttatcaaaaaaaaatgccacaatactgatattttaatgacatttgcctaaaaatgtcacttttcaaagtataaatgcttttttatttagttatatttttttagaaattatctgcatttatatgtattaataacatttaatacaaaatcttactaatttataaataattaatttttaacagtatttaaaagggagtaattacataaggcaccatttgtttgtaaaatatttatatttttacgttcaaagaatatttttttatatttttacggtcttccaaaaaataagacgaaaacaacataaaatcaacaagaaaactacataaaagtaacatgaaaataacatcaaaataacaacaaaaaataatatacatgtaacaaaaaatcaacaacaaa

SEQ ID NO: 315695 - DNA, 1071 bp, Cannabis indica
atacacgtaccaaacgagccctaaataaacaaatgaacaccaaaaaattatagtgattcagtttaaagtcgatctgtttaatcaacttttaaaagagatttgtaattagtttcattcggattggataaaacaggaccgttacaatattaattatatttaattaagataaaaaaatatctataaaataattgatagaacaattttgatcattcttatttaatattcaaatgggtgcgactaataaagtcgcatattagtcgttcacattcttgagtaatacatgaactcacggactctctagtgctactcgcatataaggtctttgaacccttcaaaatgcataaaaatctcttggaatttttattgatacatgaacttttcgaggtttataaaatagaatgcatggaactatgtcgatcgcatttatgtaccaacaatgtagagctcacaggttctagacaaattgtcgcacacattagtcattcagacataacgcttatacagatacaatctttacgcatgggagaaatatttggttatggcatataattgatatgtccgcgcgactattcaaacttgttattgtgtcttgtttttattctactatattatgcataatgtgcgattagacatgtctcagttgcacattcttgtaaattttgattaagcaaggatagtcctattaagattgttattgacatgtcatctttttttcaactgaaaactaagtctacctattgtatatactcttattatttctaagtgaaaattttaacactaaaataataataataataataataatatctgttgtcaaatcttagttacaccataacaaaacaaattaatacagggactattattccttggtttgactagtaatgttacttgacgtgacgaatacaggtcaagggcacgatatgcaaattttgtgggaagtgtatgtaaaatatcttaattcacagcctataatagcaaatatagtagcaaaatctatctatttatatctatatatatataaaggaaagcacaaatataatgatgcggaggtctatatgagttctccttcat

SEQ ID NO: 315696 - DNA, 1207 bp, Cannabis indica
atataaaattaataaaaaatattcaatatatatgtatatattgaagcgaatatggggtggtgtatcctaatagcgtacccgcaacatacctgcatatgtgcggtgcagttgttctccgctccaatcattttttccatttgaatgattattttcttcactgttcagatcgaataaccattgataccgtagattatattgccataatcctttggctaaattctagtattatagtataaattattcacaatttctaaagaaaactaaggaggttcattaaatcggcccggataattaaaatatccaaattatataaccatgatattttttaggggaaaataagcatgatgttgaatataggaattttgtttttttttttttgttatagctactagattatctcttggtgaatatatatgtgataggcctagcaggctgtcttgtgctacaattctttatattctcataactcataagaagcctcattatacattggtttaattactatgagagcatatataattttttttattataatatataagcttttgaattagttttgtatggtcatatatgatgggatggatctgatatttatatattgataaatagcagaaggttgatgaagcatatgggccagcatggaactgtgtggttgggaaagagtttggatcttgcattactcacttgactggaagtttcattttctttcatgtggagatgatggagtttcttatcttcaaggatggcaaggacttccatgaaacaaaagatcaagctattggcatggagtttcacacaaaaaaaccaatacaataatcaattaagatatatacatacatatcccttcttaattaatgtcctattttttagtgttaaacttaacttaattcagtagtgtaggattgttaatctcatctgccaattcaccaatggtatgacccaattatttcaacaaattataaatatatatcatatatatatatatatattatatttggtcattatataatgaatactgcaccaatttatcaagaagcgatcataattattatgcatagctagatacataaagaaaaaaaatccttgcagtttgcaaaaggagaggtccgaagaagaggtcaataggtttgtatcttatgtgtgggtgtcctctactagaccctctctctctacataaaaaataatatatttttacactatattaaaa

SEQ ID NO: 315697 - DNA, 1803 bp, Cannabis indica
attttaatattaatatttttagaaaaatttaattgacttaatacaatacgagttctaggtttttttttttttatcagtttaaattttttattcttatcaccaacaaattcaagaccatccacaacaatttgaatttttttgaatttattgttaattaaatttgagctgacgttatactgttttttttcaccaatttacgaaataaagaatattatttgtaattgtcaaatgtaaattaaatattaaagaactcaaaataacatatttaatttcaaattaaaaaatattatgattttaagagtgccacaaagacataagaatatgaattaagaattggacggagaatagaaatagaaaagtgaaattcaataataattttttaaaaaataatatttcaatgcattaaaatgcaataaataaattatttcaaaaaaaaatgcaatcaaattaataaattaaatgaaagttgattttttttctatattattctatttaatttattatccttaacaaaactatcctaagggtgtttggttgaaataaagaatgaaaatagaatgatagaaatgagaataaaaataaaaatagaaatgaaattgattaaatttcatgcatataaaaactagataaaaaaattattaatttattttatttgttattggaattgtcttttccgtattttcaaatggaatagtttatggttgagggactttctcggctttgtcatggtattgtacgtccggagctagcggaggcaattggagttcgtgaggcccttagctggattaaggacaaacgatggcaacaagtggtccttgagacagactgtttggtggtggtacaagctattcgtaatccaactcatatgatctctttatttggtgatgtaattaaagagtgtcaaaacttgcttgtaaatttaaggggtgtcactatttcttttgtaaaacggtcagcaaatttagtagctcacacaattgctagagctgctatttcctaccctgatcgtactttcagtatgggggatgtcccaactgatttgctaccatgtttggtggctgagtttgaaagttaaataaagtttgattactttcttcaaaaaaaagaagaaaattattctaaaattttaaaatgtcactaataaataaagaaataaaataaaaattaaattattttttttattccatttctttttatcacctccaaccaaacgatacttaagtttaaacacaattaattagtctatttgtattatatacggaggagttttattacaactttctcaatttacgcctctggaaacatatgttgtttttaaaatatattttttttatagtagttactatgtaaatttttttaataatttattgtcgaaaatagaattcttgttattttagtttaccacacttgtaaatgtagcaaaaataatgttatgcaagtacacacaattgcaatttgtaataaattttgaaagaccaaatatcgtctcacaataattaatctgttttattaagggtgcgtttggaaagccacaatgtaattagatttgtgtgtaattggaggtaattacacaatttgacatgtttgtctgatcatgtaattacactgtaactgtgtaattagaagtaattgagaggttctaattacactctccaattctcatagcccccatgagaattgaatgtaattatgtaattactaaaaactttccatattaaatattagctactacaaaatattattttcccgtgtaattactaactattttgccaaacaagatattaggaattcatatgtaattac

SEQ ID NO: 315698 - DNA, 1393 bp, Cannabis indica
ttttttttaaaaaaaaaaattgagaaaactttattcacaaaccagcaaataaaaaaacaaacaaccaaggcacaagctacaaacaacccacgacagctgctgcaaaaaccagcagccccaaccacacccactaccaatctttaattacatttagtaaatataaatttttaggacaaactttgaagggacctttgctctgcttctaggaacaagtaatctcaaaaatacacttagttctattcttccaaagctcgtacaaggttgctgccataacagcgttgacaactctattttggagatcaccattccaaccgcaacagtgctaaccacctcagccatagaagcaggccaacgataagtccccagccatttgctgatttcttcacccacttttttagtgtaaatatagttgcagaataaatggtcatgagtttcaatctcgaaatcacaaatcgaacagtgatcaacctgaatatttataattctgctcaagtagtctctagttaggagatgtttatttataacttaccagtatataaatatacccatttgtaagagtgaaaagcttacaatttccttcccatttttaatacttttgtacataaaaaaattgtctttttttttcttcgtattgcacctttgtaaatctcaataacatgcagtaaaaggaatattttagggcacttcattccttagcctaaaaaataaccccttctacatattggcctgaaatataaaataaccttaaaattaaaaattaaattagtaaatatcttttttttttaaaaaaataataattaacaaaatggtcaaatataataaattagctaataaaaattataaaaatacatttaatatatattaattttttaaaaaattatataataattaaattaagttatataaattttttagtattccatattaatatattataagaaaaatgaataaatatattaaattattaaatatatacaacaatatttgatattaaattaatatactgtagtaaataaattatataccacaaagaaattataataatactaaacttattatattaatactcaatatatatcatgccaacaaaattatatatagtattattaaaatatagagaaaaacaggaaactacaaaaaatgaaaaaaaaaattacaaaaatactatgggtcggtccattaaatatttatacagcccacaccaaaatatttataaaaataccacatgctctaaaccttaagctgcacagaacgaatgatgaagatgaacatacctccatcgctcaaatcagcaatataaccagaatgaaaccaaaacgagggtaatggaacctttaatttcgacaaaaatcaactggaaaagaagatctgcaatgatctaaacaaaaaatta

SEQ ID NO: 315699 - DNA, 1090 bp, Cannabis indica
aaatataaatatataagacaaataatcgttaccgtatagaattggtttcaagaggcgcgcggccaaaccccaggcatcatcatcgtcgtcatccaccttattattattattattattattattattattattataaacagcatccgaaaccgaatcacagccattgatcaaatcaagctttccgatggtattcaacgttcgagattcaatctcataagggtcgccaccttcccacaaacacagcagccttcctccccacattaaaacgcttgtattggctacgttcttcatcaccttcgtgttcccaagcttctgtcctcccttcaacacagaaaacggcccccggtaagcgaaccgccacgtgtcagtttccgagtcatgctcttctgtttgggcttcagtcttcacgtaccgagccatgaacttgacctcctgagaggagtcgaaaacgaaggccctgaggtagccatgcccatccaaagggtgcaccgtcgagccatgatcgtctgagaatatccctggtcccgtcaagtaatacgtaccgatgggaaaatcagtcggaacagcgccgtccacgactcggagtgttaccggtttagctgtctccgatcgttgggaaacaaatagaaactgatagtcccaaaatgcagcagtggagtcttcgacggcgtcgttttgggaagttattattgggatattactagtggtagtgacgcggttgtcgttgacagacgtggaaatggaaagggctgctgttggaggtggtggttgttgtggtcttgccttagtgagcggtgacagatgaacccggtgaacggcaggtgattggagcggagaagggtgttttggaggaataatttcgaggcataagttgctcagcattgttaaagagaatattatagttttggaagtttgtttttagagtgcgctggccaatgaaccattctatttatatatccataaatgtgcattttattatgaaatattatatatatatctttatatattaaaagtgtctatctaatgacaattcttggtttaacgattctttttttatttagccttacacgattaacccattcatcaccca

SEQ ID NO: 315700 - DNA, 1468 bp, Cannabis indica
tatatttaatgatttatcaattaagtcttttttttaattaattagtatatttttacttcacattgaactaaattaatcttttaagtgggcaggtaatgttacttaatttttaattattattgagtcaaattagctgatttgaaggtcaacaaatgggcaaaggattctgtattatcgaagggttatagatatgttatcgacaggttcttgatagttgaagtattgccaaaagatttaaattttttttttactgattctaatttaaatatcgacatattatatatcgataggttatcaataagatttatcttttggtggtagtcgttaattttagctattatcgacgagttatcgatatgttctcaacaagttctcgatagttgaagcattgcaaaagaattgtaattttgtttttaaatttagtattgcttgactatcgattgattatcgacgggttgtcgataggttatcaatacgagtttagaatttattttttttgctgtgtgggtttaccattgttagattatcgatggattatcaacagaatcttgacattttcttgacaggttatagtttttactagtttttgcaaaaaagttgggagtttggttattattatagattattgacgaagttgtcgatatgaataaatactcatcaattaatacaattttgtttttgaatttttgtagtttatactttgcttaataaatgctcatcaaacttcctttacttttatacatccaataaaatctctcaacactccaagcaacatcatacaatacaaccagaaatacaagcgatcctgcaattcaatacaaacacaaataatagaatcagaataacaaagataataaaaaattataataatgggaaagtttagacaaataatcgtgaaccaatcaagaacctgcaaaaaaggaaatcaacaatcgttgaaaataataatcattaaatcatttagaaactgtcgagaaatcgtcgataacatggggtaagaaagtttgaaaacacaattatacacaccatcaaaaaattattgacaaacaatcgagaacacaaagataacatgtcaagaatagttggaaatgcaaaactaattgagacattagtgttgagaacctttcgaaaacgtatcgacaacccgttgatataggtcttccctgaccttgagacattagtttcgagaacccatcgagaacgtatcaagaacccatcaagaaaaatacgaatacacagaatactctaaaaaatgagatttcacaattttagcaaaatttatatcaaaaaggaaacaccaaccatatagatctaacgaaaatatactatacttttataattatttaacaaaatgttttaaaaaatacttacccattaatccaccatgagaggaaggtagaggaggggcggcggttgggttgataagagaaggttggacgggcgcggagctaagggaggaaggcttttt

SEQ ID NO: 315701 - DNA, 2113 bp, Cannabis indica
attttttataaaaaaatatataagtaaaaatctgtaaaaaaaatatacaattttaaatacttttgtaaatgtctctttatatttttgtttgggaagagtaaataagattgagtttgatgagaaaagtgaaaaatggaaaattggcattatggaatttggaatttgcgaaatgagctgagtcggtgggttggcttcaagttttgactatctatacactacacccccacgtgatccaacggctgtaaacaaatcatattataaaaaagaataaaagatttcattttattttatttctttttttggggaaatgtcagagcaaaaaaaaaagtccaatcaaattattgactttgtcttatattcaataattggtggtaagttaagaagaaaaatataacacaatacaattgtttgtttgtttagtagtagactagacaaggagaagagggtcctaattttaaattattataaataatgaaataaatgataatggagaaaaaagacaaactataattaaattataaatatatcaatataaaaaaattaagaagaagataaggaaagtaaaaagagccataacatcttgtacccttcttctattgattctcacatgcttcatgttgtttattaatattatttttattattattataattagggtatatattgtaataaaacaactcatctttaaatattttggatgacacttcaatacctatcattcttaactaaaaactacaatacatcatagaatattagacaatgaatttcctaaaaaaaaatcatttaaagaagaaagtgatgtattcagaaaatattgttttttttttaaaaaaaaattatgatttaaagaaaaataatttattttttattaatattctttttactcatactcaaattataataaaaagtaagacgacgaacaagatttatgccttaaaacatctctaatgagtattttaaaaatacttgatgacatgtagatagaatgacaagtaataatgcttaaaaataacattcttgcatttttttttattattattatatcataaaagtataatataatataattttaataattttcagaattgcttattactagaatattttagaacaaaaagtgtcgaaaataatataagataaaaataaaatattatatttttaagtgatatgaaatttttaatgccatatacacaatcaatcatgaacaataaaaaaaaataaagactcattttgatgccaaagtagattagaggtaccaaaatacctttttttaaataaaaacaatcaactttcatcaaacttaaaattatagctataagaaataagaatgataactaacttaagagacaaaaaaatttctaagatagtatgatatgaagaaaaataaaaatcttacactccccaatataataaggagctttattagcaaatcatttaacaaaacataaagaaacataaggcaaataatttaacaaaatctaataaattataaatgttattataaattttctaataatttttcattattattattactattaccattattattgttttaccttctaactaaatctgagactaaaaaatgcacatcatatcgttaaacatcgctaatcatcgtgaaaatttgagtatgatttcgtgacatttaacgatgtgtttagtgatgttgtgaattagagatatttagtgatgtttcacgacattgttaaaaaccaaaatgcaaaaaatgagtgatttgagaactccaacaataggtagggatttcaatagtttcgggatggttgagctcataaattttggggcttcggaataaaaacaaaaagacctaattaaagtgagagagttagagagagagaattttttaaaatataataatatttttagaagaaaaagatgttaaaaatataaatattctatttttagttgagtgatatattaaaatactatactttatcttttaagtattctaaaccaaattatatttatacatattgttgtattagacctcacctggaccacttattaatactgcttacagagaagagaagaaatacaaataaaaacaaaaccataccagatcctatgtggcttcgcctctagtggatcaaga

SEQ ID NO: 315702 - DNA, 703 bp, Cannabis indica
ttgtgactaatacttttagccattaaccttttaatcacaacatatgaatgatgatatataattagtcacaattggtcataagttttgttataattaaaagtaagatttttaatagtatttttagggaacttttactgcaaatttttctattttaaaataaaatgtaattactagcctagtaattatacgacttagtaattatacaatgacttttaaatgagcgccaaacaaaattattatatgataagaataataatttattaaaataaatataaactatttgtgtatattaaaattatgaatattttaaatggaatatctttaatgacctttaaattatttacttgtattctcaaatagttcttatcccatgtcaattatttcttaataaattattttaataatcttggttgtttacatatgggattaggtaatataaataaataatgagaattataccttgtttacttttctaattttggtaagaaatattgtgaatgaaatatgttggtcctgttagaaaaattaataatgaacctaagatcaagttgtatataacatagaacacaataataatatataataattaggtatgcgtacttgattgatgcatggcaattacctcaattcgatccataacaattacttcaatttgatagtgcaatactaccaactaagtcttcctccctagatctctaaatca

SEQ ID NO: 315703 - DNA, 819 bp, Cannabis indica
attacaacaattaaaagagggagctgacttgatacaaaagaagacatagtagggatcaatatgaggggattataccaactctgttttgtatacataattcaaacaaaatcatttgttttttggccggcctctaatcttattaattaattgattaaacatattaatattattttcaattcattttttttttaatttgtaccagctataaacagagaattttaaacaaagttcaagtcaaacttgagtttaatttcttgctaattggtccagtcaattccaactcatcattatggattatcattacattagtatatttgctaatcctaatcaccataaccaacagaaggtgatgattcctccatcataagcttctcaatccggcccccatgaatagtcatcggctcagtcacttgttctcatatatatatatatatacatatatatatatatatatatatatatttacataagatattgggagtgagaaaactctgttttttgaattaagtgttttgatactaactaatttgtacagcatgtgagagtcataagatagtaaacaacagattctgatataaatatataacccattcatggagattcctgcttcaacttttgtcatcacgctgcaatgttgatccctacacaaactgaaaaagaattaacagatatgaaaattacactaccaatgaatctaattaacaaaacacagagataaaaagagataataactcacatgtataatatgaaaatactgcaatttcagtatctgcgttcaaccttaggacaaccctcaatatgaaaatactgcaattttct

SEQ ID NO: 315704 - DNA, 1504 bp, Cannabis indica
taaaataattagagtaagaatttaaatataaacaaaaaaaaatatttatagatattaattgctaaaagaggtcatgttaaatatttaattaattatattaagaaaagagttaattataattaattaattctaaaaatagaatatttacctattagtaacatgctattacaggtcaaaaaaatgtaactataatggttataataaaaatattaccatcgattagtcactaatatattgtagttcgatatatcttccacgtgatatatattagtggactattagtactacctcaagtgaccggtggcaccttattaattaggactagtttatatgcagaattttatattaaattaagggaaaatttcatgtgccacctaagtttggaaatttttttaaaaaataacgttattttcgtgagctaattttcctgatttatagttgccgttttttttgtggtggtttcttttttaactttttttattttgggcttgtttccctaattgtttggccccttttttttttttgaaaagctctcctctattcgcgtgcgcgcgtgactttagcctgagaagctacaacacgtcaatcacgtagagtactgattgtatcacttgttttcctctttcattatttgttcagttttcatcttctcttcataatattgtatctctttcattgtaacttttttattttcattttttattttattttttgttttataatctgttgcattttttggatttgttgtttatgtcgtttgttttttcttttctattttgttgatttttttttttattattgatgtatttttggtattggtttagtttatttttgattatgttttttctcttgtttcttagttttatcttcaatggaactaaggttttttttaacttttttattttcattttttttataatctgttgcatttatggatttgttgtctttttcttttatattttgttgatttttttttattattattgatgtattttggtattggtttatttttttttaattaggtttagttgctaattctctgtcgataatggaggttaagctaagaagatctcatcaatgaaagttatcaataatggagttctctgcattttggcgatggagattttccactgtcggagaattttctaggtttcttttgtttcgaatgagctttaaaatgaaaattgatgaatttatatgttttcgttgtagattgtgaatcacgcgctttgattcctgcattttaggattagctgttcgttttcagtttgaaggttacggtgaagacgatgatgacgtgtcacgtcattatctatttgatatatactttaacgttatttttgtaaaaactttgctaatatagtatattcctaaaaaaatcccttaaattaatcaattattttgttatatctctacggattttttgttttcactaagagtgtaatacccggtaaaaatatacatatattttaaattttatttgttatacaatttgtgtgagaat

SEQ ID NO: 315705 - DNA, 1213 bp, Cannabis indica
gtaacaagaaaaaaatttaatgatttttttattaattttttttatgcattttaaattttattccattcctatttctattttcattctcattcctattctatattttcattcgtaccaagttggcatctttaagcaattttctaattaggcaacaaattatggattcttttcactcggtcatatgaattaaaaataaacactctcattcactccctccaatcacacaaacccaattcgcataaacctttattctttttaaagttaacatctttaagcaactttctataacaattagccatcatatgcattgtcacacaacaaacctaaatctcaaaagacctttattcttttcaaagttgacatctttacttgcatcaactttttctttttggcataaatcttaaattttcatacccaaatccaaccacaaaacaatgcaccctttgcactgatatatctttatctttttttaataaaaaaaatttatagtcgtgcaggttataattatttacaaaatttaaaataatttataatttagaaacaagtgtttaaacaatctattttcacacgtgtataaaataaaaaaaaaaaatcacgcatacaacatactattttaactatttttggcgtgttaaatttttctaaataatttaaaattttgctgtatattttaaataattgcaacatgcacaactatacaaaaaattggactaaaaatgtaacacccccacttcaagtcttcattgggccttctccacgaaattatgagtcttatacacggacaggtcactatggctgcttcacgagatttttcaacgtgcaaatcaagcacacttaactttgaagttcttaaataatggactaccaagatgcaaaccgttaaagtttttttaactgtagaatcttatacctatacagtctcaaaatcatcaatttctccatcgatgtataattgcacaacctactcagtattttctcttagtatttccaaaaaatgaatcactgcatttcacctacttaatatttcctcttacaaatcacaagtcatcacaaaaagttttcatatcaaaacagataaaaatacatcggtacactttcctttaaagggtacattctagggctgtacagaaattttcgtaaaccgcccaacccgaataacccgactaaaccaaaccgacaaaaccgaaaaaaaatacaaaccgacataacttga

SEQ ID NO: 315706 - DNA, 1167 bp, Cannabis indica
tatcaaatttcctatctctccattccaaaaaatgttgtttcgggtgcaccaaatcatgtaaactaaggttgttgtggcagcagcaaacaccttctttttgaagccattgcatcttgcctttgacagccacctgcttatagctttcaaggatacagccgtggcttcccattgcagccaccctttgatattattttcgaaaaaggtagaggaaaagaaagatattatttttctctcaatcgttcttgctcatttgttgagaactcaacaagaacacactatatactttattataatagcccatactattccgtgttggtggtggatagattaaaaaatactggtgtgagtccaattgactcatcttcatcatattaattaagggatacgacatgcaagaaattttgaggataccctgatagtcttcaaaatgtatatattctaaacttatatttatgttttaatttaatgtacacacatatggagatccattgggctatggtacaatgataatcagataatatgaaactcttctgctgcgtacctgatttagtaccatataactaaaaaattaattttttgcaacctgtgcggacatcatacgtcctctggccgccccaacaacgcttaagtgtcgtcagggcagtggttccttagaaatttgcgatgcgtgcttcgattagtattttagcaataactccttcaatacaattcagaattggacgattcaagatgctatagaaagttgagaatgagatctaaaaactttatgttgagctacaagtccaactttacatctaaggtagttaaaattagtaattacgtacagacttgtcaaaccaagctctccgtcttccactattgttcaccaaaatgtattaaaccccttcaaaatggctccaaatgcataattagccttcataaaattcctaacaagtaaacatcatactaatcaatcatttaaagaattaattttgaaaatataacactaatcctattggattaccattctatttcaattttgaactttcaaaaaaacaaataaagaaaaacttacaaaatagacataaattttttttaaaaaaattacaaaaatacttcaacatagaatttttttatttttacactttgaaattttttatttacaaaaatacctcttcagtaaaaata

SEQ ID NO: 315707 - DNA, 585 bp, Cannabis indica
aaagttatggccaaaataaatttacaaaaatccagggccaaaagggcattagcatcgcgagggcgctgcggcacgccacttatagggaagaaatcccctggttttgggctcatgagcaccgcggtacccaagaacagggccgcaacacctgagtttaaaaacccaaaaaacctagattttaccatttcaaaaatgcccaacttcaattcaaaatccacctctaaaatcaaattggctaacaagcccaatataaaacataattagataaaattcacatcaaaatacacatgtctaaacacacatgatattaagctcaaaatcacaaagttcaagctatcaaactcaaagaaaaatcaagtaagatctcatgctcaaactcgtcaaattgacagcaaaacaccaaacgatttgacttaagaactcaaaatatgcaaactcaaactagcataaaaattctagcttagcatccaaggcaataacacctcaaatgtttcctcaaggtcaaacaccaaaaacccaacaagctagctccaaattcttcttcaaagattaagattacaaattttttgtagagagagagagaga

SEQ ID NO: 315708 - DNA, 1587 bp, Cannabis indica
ctatcattgacgaaaggactcaagtaagcatgatctttgagtctctatctccttacttcaacaacagcaatagtagtaacatatgcccaagtcgaaaggcaagcaagcacttaaagtcaagaagaacaaagccaaccctaagtcaaaggaaaacaaggtgaaaggcaagtgtttctattgtggcgtgatgggacactagaaaaaaaactgtaataaatatctcacagagctgaaaataaagggtaaatatgatctacttgatcttgaagctaacttagtggaagatgataaaaaattatggattgttgcttctggagccactaaccatatttgtttttctatactggattcgtaaagggagctggctgatggacaggtgaccatgagagtgggcaatggagcacaagtgtctcccaaattttttggcaaagtccatttaaattttgacaataagtttttgttattaaacaatgtttattttattcttgaatgtaccagatttattatttttttatctcttttgcatgaacaatcttttgacactgattttattaataatgagattattatttaaaagtttagaacccctatttattgtgaaaaatagagaaagggactttacgtgctcagactaagtgagcagttaattttaaataatgaattgtttagagtagctctacctcaacaaaattagtagaaaaaaatttataatggtgatgaaacgtatctatggcatctgtgtttaggccatattggcctcgaaaaaataaattggctaacaaaggatggtcatttgagagaactaaaagttggaactcttctggtatgcgaatcatgtcttgaaggcaagatggctaaaagaccttttactatgaaaggtaataggaccaaagaacaacttgagccaatttactcttatgtgtgtggacctattaatcttcaagctcgaggagggtacgaatactttgtcacttttattgacgattatttaagatatggtcatacttacctaatggccaagaaatctaaaacttttgaaaagtacaatgactttaaagccttaggtgaaaagcaattaggtaaatcattaaaggcactttgatcaaattgtggttgagagtatttggattctgaattcaaagactacttgctagaagaagggatcttatcccaactcacagcacctttaacacctcagcaaaaaggtgtttcaaagagaacaaactagattaaacatggtcaaatctttgttgagttactcgtcactgccactgagcttctgagaatacgcacttctagaggctacttacatttaaatgtagtattgttaacgcagatttttattaaccaaatatatgaaccttttatgtaataaatatactatagagttaataataacaataaatgaacaccacatatttttacgtggtttatagttaaaatctacatactccacaagtccatcttattatgaatggttgatttggatacatagtacaaattctctctttcagtctaataaatagtttttttctctcaaatttgccatctctttttccctaaattctgcccctatttataggtgta

SEQ ID NO: 315709 - DNA, 771 bp, Cannabis indica
atagattagtataggagagaaaatagagtaaactagttgtatctctaaaatcaaattctttaagcataatacatgcaaagatgccctatataacatgcgacaaactcaatatacatagtagatgatgatattaaattctattttaacactatttcaagaaatagttgcactagccaaagtgaaaatataacgagaagttgactttaaattatctacacaaccactgaaatctgaatctgaataaccaacaactcgaagattttcgacaagcttttacacaagcataaaattattcgttttttgcaaatatctcataattttcttggctgcaacccaatgatcaagtccacgatcagataaatactctcaagaacatcgactataaaagcaatgtcaagtatagtgcaaacatgagtatacatcaaactctctactacacttgcatatgggatgttcttcattacttctctatccaaatcgttcttaggacgttgttgcttaataaatttgtcccattttaggaacaaaactaacctcacataaatttatgttgaaccttgagcacaagagtaatgtaaacttcttgagataagccaagaacttttcaatttttgtcacgataaatctcaatctctaaaataaaagatgtctttctaagatccttcatatcaaagttggtagacaaaaaaatttggtctcatttagaaatgaaaaatttctgctggcaagtaaaatgtcgtccacataaagaacaagaaaaatataacgact

SEQ ID NO: 315710 - DNA, 1810 bp, Cannabis indica
cctctatagaattcgaatctccatctcttcttctttataattttcaagtcctatagtgaaagactacagtcccacccatagcaagtcaagtactcaatcatagtatgtaagactgtgaagaatccaacacttgaaggagaatcaggctcagatcttgataatactctacgacagaaaggagcaagggttagagatctgagttgaatgggacatattcttccactgcaatcaatgtaaggtttcttaactttatatgtgtttaaattctattattttagagaattcatatttagggtgttaatcaacaaacatgttagtaaatctagatcctagtaaaataattccaaacaatctcgtactttgcccctttggcatggttttgcctctaggatcagaagggcatccaagctcgaaagaaccagtgaccttctatatcctcgagggatggctggttggatttgtgtctttcttaggatatttaggagtagacttttgtgagagctcatgtaccttgcctttacctttatccttgaaagaatttgaggtttcagtcttagtttttttgtgagcacgctcttcgtccattacttgcaccaaagggttatcttcaaacttttccaagtccttaaacttgttttggagatggtccatcatccttttcattttcatagtgagcttcctctgttctgctaactccgtctgagtagcctctaggtttttagtcacacccagcaagttcaggtcatggtaatagtagtaaccatcttcgtaatacccttccttcatgtaattatcaccgtcatcctcctcttccatgtctttagggttctggtaatcatcagtgccatcaaacacgttctcaacatcctctcttcggttctcagcattggttgtatcttcttcgcttacaccgcctggctggagaccggaggtgagggagtctgcctcctccataatagtatccagaggagtattcttacttatgttttttcattttttcaccatggttgaggtggtacgatgactagcaaactttcctcagctctcaatcaaagtaccaaaatatttactgagattttcaaaatccaattaattagggcttaagaaagatataaactaataaatactagagatataatttttacgtggtttgggcattaataatccctagtccaagagtatgttgtattagccttgccgacgagtgtttgaatattacaagcgtatacaatataaatcctagctctgcattcctgtcatttttcttgaagttgaagaatgctagcaggaattttagaagaggttcggtaggtatgaaattgttcaccctttgtacataaaaagtgagggtatttataggcacacatgtggaaagggcatacccttcacccacctaggattttgtactaaacacgccacaagggctaatactacaacatgatgatttgaccgttggtcgataggaagctttcccatcctgtggtgtacaactgctgaaacaaattttgtgagaaagaggaaacatgttgctcaaaggtttcaccttgaaaagttgttgtctagacaagtcgttggacaaaaagggggatttagcggcacgtacacgcactaccatggcctgacaaaggggacaagatctgatttggtgtcagaagatatgtaaccgtcgccttgagctctggataagaaatagccaaataggttcaaggatcatcaggtcacatccttcctagattgtacaaacctgcatccctgtcgggatggtcgtggctgttggaaattattttaccacgatcttagatctactcac

SEQ ID NO: 315711 - DNA, 1733 bp, Cannabis indica
attcaatttaaatttattttgcaacaaaatttcagtagcagaattattatatttttaagtactaaaattgtatttgttactaattttaaggtgatttgctaccaaaatgtagtagcaaaaaagttttagtagtctttcaaagtaattattttgctactagattagatattttttgctacaaaaatattagtagcaaatttgctacaaattgtctcggtagcaaaaaactttcagctacggagtattagctacgaagtagccaccaaaaaaagttagtagcaaaaagtttaatagctaccaaataggcattatttgctaccaaattttttgtagctgaatatccttttttttgtagtgttattatttattatgtttatcatttcattcaagcttttaaaaaatattaagatatatatctattctatataaaatgttatacaactaaatttttagtgtaatggagtttttttattttttttttacatcaacttaaataaaatatccaattacttaacaaaatattttttataacttttataatattattatatatatatttaaaattaaaattatgtatatattttatataaaaaatttaatttaattatatatattttaaaataaaattaaatctatatataattgtatataaaatatatatatttaaaccttaattttacaacaacattttgttttcaaaataattaatgatgtatatatatgtttcggataatattttattataacaacactttaactacaaattaagaatattgtatctatcactattattattttttttaaatatatgtttagacataatatataaaatgtattttgaaagtaattaatactctaaccaaactcaaattttgtcaaaatattttatacaatacttatatataaagagatcaatataaaatatatatgcataaaatatgtaaattatgtataataataaaatttattctttaattgtatatatataaaatacgtatatataatcacatttaatgagcacacatgtagctgcaatagcaaaaacaaaaatcttaaatatcaaaatctcaaatcctattttaaaaattgaaaaataaaaatacattacctaattaaaaaaattaaacatacatgtattgcacttaacatcatttaattaaacttaattaaaaagaaaactagttctacgtgcattgcattgcatgtaacatcaacctagtatatatatgtttgaataatggtattaattttttttaggcatgttgtttagttttatatccaattttaatgttatttatttatttttattataattatttattaaaaatactatcattcttctctaacttctctcttcttctcccactttgtctaaagttcttaaaaattactaataaaattgaacaaaaattgtaaccaaaattaaacattttgatttttttttaacagatatataatggttgagactcaaaatttttctaatagcaaagttaaagaacaatgcaaaagttgtttttggtatatatgatctgagaggggagagatgtctaaaagctttttttctattattttttgactttgctattagagaggttttgagtcaacctctgttatttaaggtggcgtttggtaacacttttttaatcagttttctgttttttaaagtgaaaaagtaaaaaatatttttaaaaaacatgtttctataaaactgtttttacttttcaattttataa

SEQ ID NO: 315712 - DNA, 802 bp, Cannabis indica
aagtgaggacaaagcacgctagaaacactcgtgttggtctgtagggtcagtcgtcaatccaggaagcagccagagtggcatactcgtgtataagagccattattccatgggtgtaagggtccaatggaggcttgaagcggggacgttacattaggaattgagttatgtctttaaatcccaacctgcttgcagtaacttttgaaccttgattagaatagtatctaggtcattgtctgttctaagtttcttaatcttcttccctatttgatttttcaaccaatttcttccattcaacaaaagttttgattgtcctcgtcttttgatttcaacaagtgaactcaaacttttcttgagtaatcatcaattatactcaagaaataattagcaccaccaatgatagatacctttgttggtccccatagatttgaatgaatgtatcctagaggctctttagttgtgtgtcttcttatattgaacttcagtctatgacttttcctaaacacactctcttaccctttagaataccttgtttgttaagtcctgtgagccctcgctcactaaaatgtccaagccttaaatgccacaacttagtctcatcagaactcttctcagatgcaattgtgtttgcattactaacaatagtttcacctttaagaaaatacatgccatttttgttattatcccttcatgaccattacaaaccctttaataatcttaagagacttctcatttatcttaacaatgttaaataaattaacaattaacccaagatctatttgtatataacatagaacacaatagt

SEQ ID NO: 315713 - DNA, 1957 bp, Cannabis indica
tctataccccttctttcttttcatggacaaagtttgccagtttttacatctaatctagggtctacatatacaacatatatttctctcaaagacgaatttcacggtaccaagtactacaagatgtgatatactgtcagatagttattaggatcctatgagaaagagtgtatgattcaaggaaaagtttcaagattatttaaagctttagtttctttcaaagacaagtacaatgaaagtgaataacaatgagtcagttgggagtgcaactaattattctgatgaataagaggctatgggaagtgatactgacgaagacgaagaaggttgggtagttgatgagaatatggttacccaaattggtaacttgtaaattgttggaggaatattttctaagagaagatgtaatcgaaagtttgtaagaactatatttaggataatgtggaaaactgaaatgtggagagttaagattatgaagcatgataatatcagcacctttgctggttttttctttgactttgagaaggactatcaaaaggcaaaaagtaaacttccatggacttttaaagggggtttcatgattgtgaaggactagcctaaatcgggacaatgggaggatgtggtgcttgataaagttcttgtttggatacgtatggccgattttcctctcaaagattttaaccttcctaatgttaagagattgggtgcgttggcggggaaatgattgaagttaattggagtaataaccacaaaatgttgttgagctgctacgttagaattttgattgctttgtcaattaatcaaagtattatggttgggaaacacatgaagatggatggaatcaaacactagatttattttaagtttaagaagccactcttgctctgtttcacttgtggaaaatgggacatgatcagaaggaatgcatggaggcaaaaatactggaaaaaagcaatacaaggaagatggttcagctttatggagattggcttaacatggattgctcgattaagcatttctttgaggctcatggagagatcaaaaataaaagtagtggaaaagaaagtttgggagggaaaattggaggtgcaaagggtggttctcgaagatgtcacttttcaagcaaaatagagtagactcgaaacttcccgattcgcgactaatttgttgatattctactttgctgaaaaggtaaaatatcgaagtgtgaatttgacttgtcacaaatcatagctctcgtttaccacggaaaaacaatcagatgctcgagacgaaattgaagtcggataagcacaacttagcgcaccagcctatatgttaacctgggcgttagtttctcttcagagagtcacctgaggcttatattgttacttctatggcattcgagattgggaacgaggtctcctaccccattttggaccgagataagaaaaatgtatggagcaaaatttgcatttgaagagcggaacatgcgaaccaggttgtacatcaaactgggcagcgtgggtgttggggccatgtttggccctcaaatgatcttatttgcttcccgagaacacttgtatcttcgttatttatgaaaacataaaaatgttcaggacacttctcgaaaaagtacttaaaacagacctaggttgacaaaacgtcaacctgggcgttgggaccaggcaccaggtcaacatgggcgctgagtcctagttttgaccaccagatgactcagtttgacccccgaaaatgctcacatcaattgttggtgaaaacagagaatatgctcggaagactttgtcagagttgtcattggaaatggcctaggttgataatatgtcaacctgggcactcagacctagcaccaagtcaacttgggcaatggatcccagttttggcctctaggtcgatccgtttctttcccgaaagcacttggttcctgattttggataaaaatgaagaaaatacttgggaa

SEQ ID NO: 315714 - DNA, 638 bp, Cannabis indica
actttttcagtgacttttttcggtgactgacttttctggtgacttttccagcgacggtgactttttcggtgaaactaacttttttagtgacttttccagcactgatgactttttcggtgacttttgcggcgctggtgactttcccggtgacttttccgacgaaccttattattacaagttttgtcaaatttatttattatttttttcccatattttacacataattattttttaatcccatattcttttgcattatttatttatgccataaaaaaataaactctactacattttcccatatttatgaaaaaccccctttttttaatttgagggcacaatttcggcgggtcacccatgtaccgccgagatagggtactaacaataccctatcttgacaattcaggggtgacctaccaagatcagatctcacaaaaaaataattaatttttatatttaaaaaatgtcaccaatctcaatgtttattataaaaactgctgagaaagataccaatctcagtggttacacatggaattgccaagatcggtgtgccaatatagcctaattttttagtagtgattcaacaagataattaaaattctccaaatgaatgctcaccagagctcaccacccccaactca

SEQ ID NO: 315715 - DNA, 3244 bp, Cannabis indica
aaaaaagaaagaaaataaataaatatttccttttagaaataaaaataagaagaaaaaagaaaaaaatataattattgtgaatgaaagtgattttggacatattgttagtaagcttctcaatcattttaaaaattggaataattttgagatattagattattatgggtgcttgattggtttatagtatgcttatggaatagtataggctaaaataaccttttatctacctattacctaaatcattacattataaccttgaaagttcttttgattccaagtaagaattgttgacattagtggagaagggtaagtcatgaaagcatattgatcatttggttgtggtaagatagaaagagtagaattattatggtgatattcaattaaagaagtttaagttacatttatacactattgttcaaagaaagcatctgaattaattgttagagttttgaaattaaaattctggttgattaattgattgaggttctacaggtggcagcgagagtatgattaaagggaggcttaattaattatttgtcaacttagtttttagtcttactcgagcatgagcaaggatttagtttgggggaaattattaagatatttttagcctacttttttatcacaatttagagtaatttttcttctctgttgttactttttggatagttttatgcttgttttatttttatttaggttctcatgattttaaattacaaaattagttaaccatcgaagggacacagccaattggaaatcaggaaaaaattatgttaaatttctaaagcgcggtcgcgtaaatcccattgttggttgagactaattgtctttgcgacgagaagtatggtgtttgcggcgaggagctttagtagaatcaaaattttcaacccactacagtcgccacgacgagactaattgtgggcgcaacgacacatccgtacgggttaagaagattttcatattctcttaatttcaagttgtaaaatgaagttttaaaagggggtttcgaaatttgatggaggcattcaggaaacaggcctagaaaacaaaggaaaaggactcttgaagggagcatggcgatccgatcaaattttccatctagtctctttctcttccctttaatttcttatgttctattctatttttagtttaaatatgtatttgattgttgaaattataaactaatttcccaatttagggatatgatgaatgtttgttgattttattctaatgattaatgtgatttgctatttttttttttattttcgatctttgtgatttgttcatatttattttaatacatgttttagattgaccacttttaacatgatttatcctaatataaaatttaaaaagtgaatattaggaatgttctaattgaacaaacaaatgttttgatgtgaaacgagagtattcacatcacttgtgtgacccttagattattttttaatgcaaatatatatttttctatcctagagatgcaatagatgacatatagtttaggagctttacgatctgaaaagtatatttttcataattaatttttcatcacttaaagaaaaaagaatagctaatagcattaataattgggtatttgaaacaactggatttacatctctaatctctcatccacaattaaacaatatttactattttctttaattttctgtcaatcattattatttcctctcaaagattatttgtcatccaaatagaaatataagtctagttttctggtaatcaattttaatacatgtgggttcgacctctatatgtgcacttgcgtagagtaattttcgtaacaactagtgtgtttgttggtgatcaatggtgtcaagacgatctatttatacttgtgtcacaagcacaaatggtagtttatactaatgatgataagaatagatctgaatggaaactttcacataaactctgtcatcgaaatatatgggatattccaaatattaatgtagatgctcaggcaaatgaaaattacgatgacatcccaatatttcaagaagaaaattcttctaatttttgtatatggattgaacttccaacacttgataatatgcaatttcattcttacgatgatctcgaagaagaagatgtcaacgctaatgtggatgaactacttcaagtaagggtgaataatgagtttttagttcatgatggtgattttgaagatgatacacttgaggaatatgaagacgatcgtcatctagaaaatgatgaagatgatacatctgattatgaataataaatatatatgtatatttatctcttttttattcggtctaattttatgttttcctattctaataataagcatccgattatatttatatcttttattcttgtgtattctcaatttagtacgaaagtccattaattttttttctctcttacattgcagaattataactttttcagcaattattcatactgaatttctaataagaatggattttgaacacaaaaaacaaaagtacgaggccaatccaaatgtccttatgtgaagaaaaaaaattaaaaaaaccaaaagtacattggtagtggaattcgatgcggctacagtaaaattttatggagataataaaaaatcttttaacaacatatgggcaacaagtttgagatgtgatttctcctagtattttattaggatgatatgccagaaaaagactaaaacttttaattctagaacgactacatgtaaataattaactaattagtataaataataaactttaatatcatttgttagcagtaatatttggattgcaagcacattactcttttcaccttttctttttaagtttaactttggaaataatcttattttaataattctttggttagagaataattactaacctatttgtattggattacgcagttgaggtttgtttataatcgatcccacataatcatcttagatgagattaaaagattagccatgaattcatttagaggatggagacatatttaaaaaggtattggaaattgttaggtgaagagaaagacgcaaatacacctaaagaaaaaccattagagaatatagaactttcagattggctagttctttgtgattacttctgctcagaaaaatagaaggtatgtgtaattttgaagataattaaaattttattttgtttaatctaatttagtctaatgacttactttttcttttatacaacaactatgtgaggaaaattctgctaatcgttcaatgatgccatttgaaagt

SEQ ID NO: 315716 - DNA, 675 bp, Cannabis indica
tagatcctggtaaaatatatatcaacatggacatcattccctagacctcctcttaagcatttaacagattcgtctctgcctgggtcatcttggttttggtcgaagcaataatttcatccttggtcttcaaagtttcctacacctgttccctgagggccttctccaccagtgtgtcattctggagagtctccatttggctctaagcttccctaagcttcctcaacaccccgtccatgccgccctattctgagatagtgaacccttagtcaatcaaagtcttggaaagacgtccagcctctacaacaatctggttacaataaataataacatgggttggtaaggacattaaaaggagcaaaaagaaaaactcaaaaaatgtttaaagtgtagactcatggaggtaagggccacgctcatgtcctggatttggtagactgggttagaagaggcacataccgcgaatctttttgtaggaagctaagtcaagtcagcagcgaaatgacttaccatctcggaggcaaaaagtgtcaaagaagaacccaaatagcgcttaaaccagtcagtcatgatcaaggttcaagtcctagacttcaccaatgtattcaccccggaaagggccatcatgagcctcccttagccacttttttaaggcctctgcctctacctctcccttcg

SEQ ID NO: 315717 - DNA, 1138 bp, Cannabis indica
aaatattgcataaaatacaattcaatataatacaatacaatacaatacaacctaatatggcgttcaaatctccaattaagctttccttaattaatttgttctccaatcttttaaataattaattaataaattatttaatgaaacccaaaattacattatatatttatacatatacaaagacttataagctaatttgttgaaattaaagacaaaagagagatcaaaaaaaggtgaaatcaaaatcaaagcataatatatggcaacatgaagtcaatttagtttgttatgttggtgggtttttcttattataattaattaaatataacatattttttttaagtacaatatatatctcattattgtattcatcattatatattagtcatatgattggagtgaaaataataatatgaaattattgaacacaattcccacaaaagttcatcatcttttgatctctaatacacgtggcattcaaggagaagaagtgggacccaaaattttggtggcttgttaaaaagatttgatcttttcttttgtaaatataaattattgtatgataaatataatgaatgagtctatgtatgagataccatgaatatttatatatatagatatagaattgtcttgagtaatatatgaccccacattcaccattatatatgccagcattaaggaggttttaaaggcttttctagagaacaaccaaacttcttatatcattaaatattttaacactacatacctataacctttactattctcatgtgttaattttttttatttaatttaaataatatagttaacattgccccattaaaaaagaatattactcatcttttagtcataacataaattttttataattaaaaaagtttttataattaaaatgtagtattttgatacaagttgtcactagtttattagttttaatcacaacaagtattatgactaaaacatatccagttacaataaagtgtaatttttgtgactaaaacctttagtcacggatcttttagtcacaacataaaaattctaaatttataattagttacaatttttccttttaactaattataaattttattgtaactaaatataaaaatatttgttaattaaaaaaaattatttagtagtg

SEQ ID NO: 315718 - DNA, 2070 bp, Cannabis indica
tgcaccaactttaagtaaagcaattatcaaattagttagggtttcatgcatgcgcaaattctctttacgcgtacacgtgtcattcaatcaacatgcctcttttctcacatcatcatcattattattattattattattattattattattattattattattattattaaaattaaagtattgttattaaatattgtgtctaatgatttttataagtgacactttataattggttggcaatattttttaaaaattattttttaagctatatgagactcgataattaattgcatcaatagcggtatgagacatggtcagccttaagttgaaatgggctataggcaaaaaaagaaatttaggctcttactataaagataaatgatatttttaaaaattattaaaaaaataaatatattttttaaaaagtatttttttatttgggcccctaaaataagtaggccctcaatgcgggactagcccgcctatacctagggccggtcctggtatgagaccaagaagagtgctataaactagtggtgccttttaacacttctcttattgtattagcgtaaattgggctatttgtatcacacgtccctacactatataaattttggtaagttggtcctcaaattttattttttgacaaatcagtttccaaactatatacattttggcaagttggtcctcaaacttttattttcttagcaacaatattaagttcctactcttaaatattaatattttcattatttttatttttattttttttaatttcattactttgataaaaaataattataatatatttacttttttttagtatttaaatatttatataatatatataattataatatatttactttttttaacaaaatattttacatatgctttattcatttatatatattattaatatgaaaaaaaaaacatcaacactgaaaaatccatataatgcttagaagaaattttagccccgtctcatttttatatttttacatttataatatattttattattaatttatgaatatatagtattattattttaataatttcttaatcgtatatatatttattaattatttaaattttacatcaaaatttattttgataagttcattaccaagcataagttaaaaataaaaataatataatttacttagatagtttataaatatatattattaattttataggttcattactaagcataagttaaaaataaaaataatataatttacttaggtagtttataaatatatatatattatttaagcttttttaattattttttccttcttcttattttggcatatttataaaaatacatataaatgaaaaaaaattcaatttgataatataaaaaatattaaaatatttaaaatcaataaataaattaaaaaaataccatcatttaagagtgaggattttatgtttttaaaaaaaagtttagggaccaatttaccaaaaaaataaagtttgaagaccaacttgacaaaatttatatagtttggcaactaatttgcccaaaaaataaaatttagagcctaacttgctaaaacttatatagtttaacaaataagcataatgtttatatcatgaactaccacttttaaatactttgaatttttttgtttgttaaaattatcttgaactaatattacatatgtcattttcaaggtcagttttaaggtatataggacttaatgataaaattaaattttggagtccctatataaataatttaattattattaaaataataattttagtactttagtgtaatggtaaaaaaattaaaactcttaaggtctaatgtttaatcctcaataactacacatcaaatatttataaaatataaaaaaattaaagattgggaattgatcgcttaacttcttaacttaaaataataacttccaccattgcgctaaacactatttagttatacactacaaaaacagttaattttagtaacagatttttagccacaacataatttttttatgactgaatgtaacttttggtcacaacaaaaaaactacttgtgattaaaatatagtattt

SEQ ID NO: 315719 - DNA, 1177 bp, Cannabis indica
ataataattatatttatttttaaccatttgatttgaatggttttcattaatttacaaattaaagaaaaaataacttgtaatctaatagtaattctttaataaagcttaaattaaaattaattttattttaaaattaaattaattattattattattattattattattattattattattattattattttgtaatttgttgctaaacaagtttcttttaacaattaattttcttgcactaaaattattttaatatttataacaaaatttcttataatttaaaattataacacataatcttataatttgaaaatttaacatataacctcataatttgaaattattacacctatagctttaattttaaattgttacacctaaatattaaattttcataaaataatttatttaaaaatttcaaaattatatacatacaacttacaagtttaaaatctaacaaatattaaaacaaaaacaattataatactaatggagaatgctttggtggattgtaccctcctattttttttataagctaacatgtttatatttcattttactttttactttataactttattaattttatctagagttaatgtatttttatctttcataatattacacacctacgtgttaattacgtctatatcttcctcaccaattggtatcatccatcatctccataatttttttttaattgttatctacatttacaataaataaaatcagcaaaaaaaaatgtagacttatttttcctctcatttcctttaagtgccctctcaattcaaattgctacacgccaaaaaatattatccaaaattcatacccacaatgctaccagaacattgagatcgagaataaatagattcatatattagtttcactttatcacatacgatataaatataaatattgaatttgttatttattttaagccgaaaaagttttgttattttttttattttttttcaaacgagttttttttattgttttaatatttatatttgtttattttttaattaattaaatttatttttattattattttaatattttaattattgtatttgttgggttataatcaaatttactaattaataaaagatcaaaaattgcattttatattgcatagttcacataatttatttcatgattatatttaatgtataaattc

SEQ ID NO: 315720 - DNA, 951 bp, Cannabis indica
tgcttgatcaccattagtatgtactagctaatattgattttggaaaaaaaaataaaatagggttaattgaattacttgaatgatgcatgaatatcaccttagaaaagtgtgatttttaaatagtataagaatattttatttaccttgtataacatgaagaaattgtgcttgaatcagtattcttaaaatgaatttgacatagatatatgttaattaataagagaataaaaccattaacactttaaaaaaagaattatgacattttaaatttctagtagacattatcaatttataataatactcactggcaccattattatgatctcatgctaggagtcaatcatgaagttttttaaaatgtggcattgactataatcctagtagaaaacaaaagtttttgagaaacttttttgtgaaatcatctagcctacctcattttacatgcacatattgtaaccaacatggtcatactatttcctattgtcatatgaagaaatatgcataaatagacaagactaaatgggtaccaatagttctagaactaacaagaaatgatccaaagttatgtgggtaccaaaaaccaacaaatgaacttatttttgtaggaatcaacaagaaagagttgaagcttatggttcttggatagtggatgttcaaatattatgaccagtgatccatcaagattttcaagctttaaaagcaaggaaagtggctttgtcacttttggagacaattcaaaaaggaaaatctttggcattggtgatgtcggtaatgtatactcttcatgtatcaaaaatgtgcttcttgtttataatcttaaacataacttacttagtattagtcaattatgtgatataggtttttgtgttgtttttgaatcctaaaaattctccattgaaaatgcttcaaccaatgaagttatttttcatggagaaaggaaggataatgtgt

SEQ ID NO: 315721 - DNA, 1195 bp, Cannabis indica
cgaggaagtggaaaacctgcaatcggtggctcaaaatcattggcaacacttctcaagaggtaaggtcttaaatactgatgctaaattgacatatactgaaccaatgattaaggagggtaggaagatagcccatatagatatggaggagatgaaattggaagaagaaagttgaaaatgagctgtaatttgtatggttttgggtgctaatgtcccagtagtggtgtttgaaggctttattcgttgaatttgggggcacttaagtattgttcagatagctagaatggctaaggggctcacgatggttaaattcaatgatgaagcaacacgagatgaggttcttgaaaatggaatgatacaatttgattaggaatcggtcattgttagaccttggaaagtggatttgaatgttattgggattgtgaaatcggttcctctttggattaggctacctaatcttggtcttcaataatgggggaaaaacgttgagtgcccacattagcactatggggaagccgattatggtagataagcacaccaaggaaagaacaagagttcaatttgctcgtgttcttgttgaaatggatataacggagaacccggagcgctctttctggtttgttaatgattatgggcatctattagagcaaggaatagaatatgaatggctgtcggttgaatgtaaacattgtggttggtttggccatataatggctgaatgtaggaaggttgagaagcctaaagaggagaaaaaaatccaagaaaacaagacagtaaaggagggaaatgttgctggtgttcaagctgtagtcgagaaaattaatgttgagattgcaactattagtagtgaagaggttgaggctgctgcccctgagactgctactgttgctactgcagtaactaaggaaaaaaaaagccaatggccaagaaaaaactgctactgtcaaaacagttaatagggactagattgcccctaagaaccgtgtgtttaagggctctggttcgacaaggagaggcagtgacaagggtgagaaagtgcgtaggaattcctttgcgatattaatggggggacagattaaagaagcagagggagagaatgacttcagcttgtgttgttaatggatttttgcaatattagttgttggaacgttaggggtttggataaaaaggagaagcaagataaagtttctgaagtttg

SEQ ID NO: 315722 - DNA, 1858 bp, Cannabis indica
agctttccgtttttaggcccaagatcctggtccagagatctgcagtcttcaatatccaagatgggattgaagatagtgggctcacacataaatttatccaccgtacccaagcctgacagagtcttaaagcccagagtccagagatcatttgaaggccacgggatggactgggcctgacttcccaaaagagaggaataagaccccaggcccactaaagagtgagtatggcccgatactttagacgtacctggatgggccccccattctcacattgggtaatttcagtcgtattggggtcttcatctgtgttggtcttcatattgatagtaagtacaggtactgtactttgtaccaatgaaacatgttgtgtgtcttcaacgttcgactgcatgctaggagtgtcatcgctttcgttgttttctcctagtgcctccgaagaaggaatgtttgcaggaactttcagaaccaccaggtttgatgtatcctgaaaatggcacacttcaccaataccagggagggtaaccatcggaaaacgactgactctttcttcttccgtttccggcatgtcctccaccacctgctccaccaatccccgtttcccggggagttgtctcctagactctctagcctcccaagagtccgtaatcctcaaagagttgttcatcttccattgttccttaaactttgggtccaccgttagccgttttttaattatccattcctgaaaccacctcgggaggtctggggagaatggcctatctggccggttcttcgtgtttcatccaactcccaaaaagcggaaagaaaacactgttggggtccttaaccaccatcggcggtttaaaacagaatttctgttcgtgagagataataccccacttcaggcagaatttggggagtttctcatatttgtatagaatccataggtcttttatggtatttctcttcataaagaagccggagaacaatggtttatccacatctatggttgcccggaatcgaacagtccccataccaaatgaaccccgctcaaagtcgatgtacctgggtaacttatagttgggggatacattggcagtctgctcttccaaattcgtcttgttccagtaaaagggtggtattccgctcagcctaacccaaactggagacttgtcaaacacaatctctgccggggctaaccaggacggccatggcatgatgatcaacaaggctccacagacaatccacaggcgcctctgaagcacactccacgcatcctccttagtggcgaacgagaagtggagtattccatcgttgtcttccttccagctccaccctttaacgaggcccaagcctttttaagggtactaacaatgacattcctgctaagttttcctctacatattaatttgcccaacagaatcttaccttgaggttcttggttatcgacttctcccggatccaaccgacatgtaagatcagttgtagacacctgaactgtttcctcaaatagatggcttagactgttatcggccatgacaaagaaccacgcgtactatttcgaaagaaaacgcaaaacagagaataccataatattaccatattaggtattgatttggaattatataaatatgtgatgatatgttgatataatgtatttattaaaaaaatttaaatacaaatttataaataaaaacatgtatgtttattatttgtatcaaccatatacataaaaattaagaatatgtttctcatagtaaataaaatgttaattaggatttttacctcctaaactttaacatgtaccaaatcatgcccctgtaacttttttggccgttaaaaattgtccctgaactattgagattgttagattttagga

SEQ ID NO: 315723 - DNA, 2121 bp, Cannabis indica
aatttggcaagagaatgagcagctttatttctttggcgcccaatgtgatgcacggctaggcagtttgagaatgatggggagtctttaatctcttcaagcagcgcactccaatctgttttcacctggctgctgcccttcaagagttagccgcccgaacgcaatctgtttggatgataaaagggacagccgctgtgtgaatagccaattgaatacccatccgcaaggccaggacttcagcaagctccaccgagtaagagccctgctgctgctgaatttcagttgctataacatcgcccgaggtgttcctgattagagctcccagccctattgatggatcagtgctatttaagctagcataactgttgatgcaaaagctatttgcaggaggtccttcccagctgataagagatatctcctgaggtgtgctgctatgatctttcaggggtatattattcatgataaaatcgatttccaattgagcccatttgatccatatctcagcagcaggaagctgaatgttgagatgtttcttgtttcttctgttccaaattaaccaggacattactataaaaaaaaggaaatcttcttttgatacctgttcctgaatatggatgagcaaatccagtgtgttgttttcgctttttttgaggattggccaaatcaaaaatcgcctccaaatgttttttgcaaaggaacaaaaccatagactgtgattgattgtctctactttcactccacaccagcagcaaaccggattgatattcatgccccgatgccttaaaatcacattaacagggagccactcattgcacactctccatatgaagtttctgatcttagggggggctctattttccatattcctttccaccaattcttcgttaactctgtctccgagggacctgctttcatttcatctttagaagcctctttacagccgctgctcactgtatagtttccattcggtgtgaagtgccatataaggtcatcatttttgcttgttgagcaaggagctattccaaggatcattggaatgtcatccgagtgaaagcaatattcaactattgttgttttccacgagccatcagcattctttaagtagtctagggtggtcccttgaggcactgttgccttggtgcgcaatgtaaaggttgagggacggggaatccatttatcttcattaattcgtatgtctcttcctgaaatgatcctcctccgaacccttttttctatgattttcctgccccatatgatgcttctccacataaaggatccataacctcctattttagcctccaagaagcttgagttggtgtagtagcaagcttttagcacccttgcaagcattgattgggggttatttatgattttccacccttgtttagccaataaggcctggttgaacttctccaaatctttgaatcccattctcccttcatccttcgatttgcacagttttttccattttccccaatgtattttgctttttgagtccgaagacccccaccaaaatctggccatcatggcatggatgtccttgattagctccttaggaagacgaaagcaactcattacgtaggttggaatggcttgaattatagcttttaaaagcacctctcttcctgcttgagaaaataaactagctttccacccttggagtttggttcttattatagtccaaatttcttcaaacacctctttctttcgtttcacgattgatgctggcatacccaaatattttgtatgacactccacaagtttaacctccagcacagccgcaagtgaaagcccggtctcgtatgtaatctttttccccacacaaagctctgatttctcaagatttattctttggccagagagctttgaatagttatccaatatagctttcagatgaagacactcggaaggggtgccgtctatgaatatgaagctgtcatccgcaaagaaaaggtgagataacttgattttgtcttgaccaaatatgatgccatggatcctatccgctctttcagcctcttggataaggcaagagaggccttccaagcaaagaagaaacatgtaaggcgagagggggtctccctgacgaaggccacagctaggttgaatttgaccactcacttc

SEQ ID NO: 315724 - DNA, 1854 bp, Cannabis indica
acaatctaatctgatttgtcaacaataaaagattagaaatcatttatgcttacatgctgtattcatgtttatggtttaatttatatatatacacaaaatctgttaagtccagaacatatagtcattcgcaattacagtgatatcaacacagtggaatgttattgtggttatatgtttcgaaagacatgaatacttataattagatttgaaatttgaaaaataaaacataaataaaaaattacacaaaaaattcgaaattaattccatgaaaaagcatgaaaaaaaaatgaaaatttttgcattgggtgcggatggtatgcagtgcataccatcctcgcgcgcatgggagtgcacaaccgagaaagctcggtgctggaggctacgtgcagcctctccgcgcgcggaatgggtgtttagacaagcacttgggcgtgttcctccggacaaccccttgtctgaatgcgcgtgcacccaagtgacactcgggtgtccgcgcgtgcatgtaggcacccaattcttgattttttttttgaatttttaaaaaatcaactaattcaaataaaatcgaaatcaaattctttaaaaaagtaatttaattaatttattttattaaaattattgtttgatgtgttatctttttaatgaaatcttaattggaccttgaaaagtggccaacaacagctcgctagattggcgagatgaataatgaatgtaagtatacaatttagagaggcacataaaatttatagtagttcactccccatgtcaccattataatagagctacgtctactttgagtttttattatcatgggatggaattacagaaaatggataagtgtttaagatctaattactggggagaaaaactagagaaagttgctctgaccttatggctacttttcttgtgaaaaataaactaaaggagctctccttttataggtgaagaaggcccttgaaaataggaataaaataatgaaaaaatacaagttggtaatagtttaccatagatgatgatctaactgtgaaaattaacttctagggttgatcgttaattttcaaagcccatgccgtgacggcaggactcactccaggtaagtcagagattaattttttaactcccatgggaattaaatttggagtcaataacttttcaattataattgaagttttagacatgatttgatagatcattgaattagctataaaagggaagttgcatcgcgtcaattaggttaatattcagtgagttatggccatttgactaaaggttgtccatgacccagcgcccatgttgacatccatcgcccaagttgatatcctagtgcccacgttgaaatataaagtcaacttggacgctaggtaagtgaaaaaaacatctacgtatgtactttatgattcctatgtgatattttgacatcacctagtctgttttgtgttctagcaaagttggtcagcagttctcagagacttgaagctcttcatttcttagtgttcttcccatgttggatatgagaaatgtcaagttgtgaattttaattctttgaattcatggatcttagttattgtgaaaaactagatgaatggttgaaataaaatcataatcgaataagcaaaacttagtgcaccaagccatttgtcaacctgtgcccttggtacttcataactgggctcttgagttatctttttggtgcttccaaggttcttgaacttgagtacgagtactccaactccatttttgaccattctttagtgaatggttgaatcatatttggcatttaaaatgataacaaacaatgcaccaggtcagcctaggtgctaggctttgctttcagggcctcaggtttgtggtttt

SEQ ID NO: 315725 - DNA, 1982 bp, Cannabis indica
cttcgacatcgacattcatggcatctcagacacatataactatgcttctgccatcttctttatctgcttcgatcttggctctgactgtcccactgatgacttccattccttctggcaccactaggaatccaactacaaccttcacctatctgcccgtccaaaatcctttgcttgatggtaacaatccttttctttgacatcaatgccaaatgccttttactgacaactctttgtttactgttaatcacgacttacttcatgtcgttttttatcgaccttttcatgatgaacgtactccgtatcatctgggaactaaagatcaccaaaatcaccttatcgctttatttctcttgactggtcaagaaaatttccagtcatggtagcgagcaacttcgatcaatattgctgccaagaacaagaatccttttattgaatgtactatacctcgtccaccaccaaatgatttctctctttccacttaggatatttgcaacaacatggttatgtcatggattcttcagtttgtgtcccgtgagatcgctgctagtatcatgttcaaaaccaccgctcgtgagatgtggaccaaccttcatgattgctttaatcaaagcaacgatccctatattttacaactcaaaacctccatcaacaacgttaaacaaggtgataacttggttaccacctacttcacccagttacaagctctttgggatgagctcaatgaatatcaaccaaatatcccttgtacttgtggttgttcaacaagcgccagtgttgtcttggcaacactggcgttgttcttgctacttcagccaaaccaaatcccaaccaaccttactgaaccaagaaacctcaacttacctgttccaacagccttaaattgggccacctaattgagaaatgctacttccttcacggctttctccctggatatggcgacaagaaaaagaccaccactattgctcgggcaaatcacgtatctgtgaccaccactccagatccctttacggttggttcttctctacttcatcttgatcaacagttgaattctcttctcaatcaacaaattcaaggcactcaatccaccaataaaaatctcctcaatcaacaaattcaaggcactcaatccaccaataaaaatctcctcgtggtttttaacatcttcggtaataataattttccccttttttatggatagttgatagtgctactcatcatgtatgtcattctctttattgctttacatctcttaataaaaatattattgctaacttggttactttacccaatggtcatcaaattcacatcaacaaatttggaactgtgaaaatatctgaccaacttatattaatttatgtcttgtatattccagaattcaagttcaaccaataaagtgttaatgcttatcttgaacattgtgccaataaactcacctttacttttgatcaatgtttgattaagaattctttcttgacttctacaattgggacaacgaagaaagttagacaattgtatttctacatacatgatcatcattttctcactacggacatttcctttttttgcaaacactacatgtaacttgaaggatccatgccatttttgctttggccatctttctatgaacatttgtactatcttaaataatcatttgcaagtttctaagaaaccattcaattttatgtattccatatgtcattttgtaatacaaaagtggcttcactttacttctaacaataactttgctacttcttcttttgatttaatacatcttgatatatagggtcattttcacattactaatattgaaggataaggatacaaatattcttaactattgttgatgattattctcgctatacttgggtgtacatgcttacttctaaatttgatgtttcattcattattcttcaatttttttcttcttattgcaactcaatttttagtcaaaaagttgttcgatgtgacaatgctaaagaatt

SEQ ID NO: 315726 - DNA, 1013 bp, Cannabis indica
ttgacaatttacaggcccctaagtcacaatattcgtaatactgatgagtgatacactaaatcactttttggggatctaaaatcaaaactaaaactttccccatcgatagataacataccctaaatatcgctaaaataaaaaatttagggtgcccaaaactgccacaaccagttaaccagattccaatcggaaatccagttctaaaggttctgcctggggtaactagttaaccggttttatagtgcaaaactgaatcggttaaccaattcagtctaggaacctccaaaaatgtcccaaaccaaccccaattcgtttcaaaccttccaaaagtacctatttagaccacaatacacttaattcaagaagtaaaatccaatatcaacctctgaaataaaatctaccattgaagagcaagtttgagctctaaagctcaaactttgttcaaccacaacaacaagcaacaattcagtcttaaatcagctcaaacaacatcaaaatgacctctaaaatcagaatcaaactaaatttggaccaactgaaccctaaccttaaaaattgcatgaatatctagacctaaaatcataaaaaattcaaaggaaaaagagggagcttgcttatcttgagttggttcttatagactttaccaaaatcctgctagaacacaatgaaattgaaagaaaaccctagttttctgctggatttcaagagaggtcgagagagagagggacttggagagagatgtaatgccattatttttcaccaagtcaaaaatctacacaagttgagatatatataaaatatagcttcttccatcaattattctcttcaaaattcttcttattttccaacactatcaataactggaggtatttcaatcattaagaaacgattacatattaataaagcattcttttaacactgttaactaatttcttcaagatatagaaccattctaatcaatcttgaaattccgtattttaatattcccagtttgattatttaattaaatgatt

SEQ ID NO: 315727 - DNA, 765 bp, Cannabis indica
aaaaaaaaaaaaatacaaaatcgtttcggacatctatgagaattttttagtaattttcatataattattgtatatgtcctaattacttaggattagttatacattttataaaattataaaaaaaattgtaatataaaaaataatattcaaatattacaaatagatcttaaaaaactacaaccactcaactaaaaaaaatttaatagagtcaaaacaactttttcagaaatattgtagtataaatttttccaaaaaataatatacatctagataatgacacacaattacataataaattctttaagggctcgtttgaaacgtcgtattaggtcgtattgtattgtattgtattgtattatatttaattagattatatattatatttttatataatactatgttaaactttaatttatactaatatattatatatttaggtccatataagttaataccacatatagttttacataaaaatattgcataaaatataattcaatataatataatacaatacaataggcgttctaaacgaaccctaatagtattaattcaagataaatcttacgaaaaataacttgctacacatactgtacatacatatatacaacaaatttatattaatttatgtatgcatattttgatgaaaaataataagagtaactataaaggccgtactggccaaatcaatatatatatatatataaaggaatgcacaataagagtttaggtggctttttactttttttctttctatttttctta

SEQ ID NO: 315728 - DNA, 1807 bp, Cannabis indica
tgatatagactcccttccccggttgccaaagagacgccatcatgtgcctcatagcatcgaaatctagcgttctacccgtcaagaacttgcctactaaacaccatcgatcatcaaaggccacttcttctccctcattatcatccccaatcaagatcccctcctcttcttcctccaaacttatttgggcatactctttatttagatcaaatccagtatggctacttgaagccatgacgcacaccaatctacaaagccaaccaaataacaaaacatatatttttttcaaagatatattaaatatataaaattatcaatctattttaaaaaatattaatataattggatgataattggatcggttcgattcagttacttatttgattcgatccgatctaattagattcttaaagtttatatccgatcccatctaattatgattgatatatgattttattaaataacttaaaaaattcggttattattaaattggaagactttttacacacccatatttgtgattgagtgtggttcactgagattgctcaatgcatagatagatgtatcctgggcagtggtatcaccagctagatcatatctcatatgttttggattcattatttgacaatttaatgagtcataatattcatcatcaccatcattgcttacgtgtcttgtatttatatttatataatatacattcaatttaaatgccatggatgttgcatattgccatattatataataatgtatctatcttggccccaaaaacatttttctagactaataatgaataaacgactctagttgttgtgcttaccttgaaaacttatacaatgccaagtatcatggcatggcttaatgcatttaatcttaatttattaactcaagtgttatgacgacacatatttaaggttcaactaaagtgtcttattatatataatgttatttcttttctaacttttttaaagaaacatgaacaaaatgttaaaagaaaaacgtcactctcattttcaaaaagataaagttaatgaaacaacttgttttctagtaactattttataattattgtataaaagaaatatatactatttgacaaatatacacattaattcattccataaacccaacttttgaaaaagtggttcaataattgtgtacaagctcagctatagatgaataactccctaaaatcccagctagagttgcaaacaaaattattaccacattcccaaccaactcaaagttccatcttttatatgaagatgaaatttttaagtaacaaagacaaggaagcacaaatgaaccaagtgctacaaaaatagaaccaacaatggccataagattctcaaaatatgggaatacataggctatcattgtggtacttacaagtaacacaaacctaacaagtaactgaacttttctagagttcttgtaatctatggaaagccctccttcaatggcattggcaactggggttaacatcaaagcatatctagtcactggaattaacagagttgtgtaaattgcaacttgtgaactgatcaatttggttggtaagttgagtgtgatttgtgactcaacactatctccatacataacataacttacacatgaggttaataagtaagtcaaagttgtgagaacaaagctgaataataaaacctgtaaccaaaatcaaataaaacaaactttggttaaacttctgcagattgtaagtcagaagaaagaaaaaaaatgatatttttctaattattttctgaaattttcatactttatcataaaaaaaatgcatgtttggcatcataac

SEQ ID NO: 315729 - DNA, 3220 bp, Cannabis indica
ctttcatggagcttcttttacactttttgagttcatcatcaatgtccttcttataactagaactatattgttgtatgtactcattgtcaaagtcatccaactgtgcatcctccatatcaatttccattggccttttccctaaccccttgagatgaatttctgttgtctcatcaacaatcaagtcatcatgacactgctcatactcaggatcaccttcatattcataaccagcctcatcatcaagactatcctctatgtcattagtaatcttaggcctagaacaaccagctccatcaccaccacataaactaggctcaaaacaaccagccccatcaacaagcccaagagtaggctcaacaacaagcccaacttgtctaaagtgagttaacattgaactttgactttcaaacaccttggaatgccctataaatacttccaatactctacactttttgatagattcttttatatttctctgtggatatgtgtcaatttcaacatattcctccaatacattacttccaacccacttaatgtagtaaataaatggccctgtaagtttcaaatcttgtactaatataccatctaactcaaataaatttaaccattcaacatcacagaagtggacatcttgtacatactcaccaattaaataggattctcacttgtatttataaattttccactgtgatgcactttgagtgtgaatagagaagagttagcatttgcacataagacaaaataaagtgagttagtggtccaagacttattaaataataaccaatatacttttaacttcaaaagcatacaacaaactactcttttttcttaataaaaaaataataactatacatacattgtaatttattttttttaacagaaagagccttaacttgtttaccatacactttacactcaaaaacaaaaccacttattagagacgtcaattcaccatacaactcaaatacaaacacacacaaccttgccttcaattaattaatagaatttttgatcaacaaaacgtgtggctaatactttgtagtcttaccataaattctcattaaaaatttcacgtcaacatatataataggtcctatattatatatgtacatcaataaaagtagaaaaatacagtttgtttcattcagtaccctcaaagactaacaaaactataccccacaaacacatattccaattttcactattttctcatgtgatacggtcaaacaaaatgacaaaaaaaatgcctaaaaagcattcacataaccccaaatattctcagtacaaaacaattgaagcctttaaaatggagctattggtacaagtgtatttacacatataaacaaaactatcatccacaaagaattccatggtgttagacatacataaatagtataagaataattaatgataaaagtcataccataagatgaaattatttcactcatagtgtccccaaatccaaaataagaacccactttgtgaggtgtgaaactttcaagtgaagcttttccaatgactaccttccttctacattcctttgaaaatgtcgaagctttgttatgctcagaaatttttaagggtatggttggttatactctaaaaattttggaacttaaggcttgttatttactctgagtttctctctacaaattttaagtttgtttttattttatttttctttaattctaattttaattattttaggaaaagaataaataaataaaaaatcctcattgttttggtgttccatttttacccttcattaactttttcacatatacataacattaatattttagacagaacgagatggaaggaggacttctcattgtttatcacagattaaggggattttttccaaacaaaaaagttcagggggtatgagtctacacacgtaatagttgagggggaaaaaaagcattttttcctaatgaatatgctcatccgaaaattccttattccaagcaagaccgtgtgaatcaattgagcgcggccagcaaaagataagtttctactagcccagcagtttagattcctattaattttgtcccggatagcaccacagtcaaacgctttccattttgaaggatgaagattgacccccaaatacttaaggggaaaagatccttcttctatttgaactaactcaagaatccttgctttgacctcttctttaaccccccccaaaataaatttgagattttgagattttgaagtgttagcagattatctagttgcattacagaacttcatagaggcttcttggataagtctcaacaagtagagtttacctttgcaaaagataaccaaatcatctgcaaaacataagtttgttaaaccaaggtgcttacataagggatgaaagccaaagcctgttttctcagagtaataactaagcaaccttgttagatactcaataatcaagacaaaatcaaagggaacataggatctccctcggacgtttatgttgcttaagagagaatgaaaagggtattcttgtcttttgaccctaagttaattagtggacattctagatgataccctatgttttgttggctgatattattatataagaaaaagaactaaatcaacaaaggatattatcgaagtgtgaaaaaaaaaataaaattccctctttcctcaccattctctctctcgacctctttagaaaccaagcaagaccagaccagattaatccttgttcttggtgattcagtaggagattaagtaggctttcaattaagaattgaaggtaaagccctcactcctctatcttctttgttttctaagtgttaaacttgattttaagttttgttttgctactgtagttctatttagttgggtgtttgtttgtgaagtaatttaagttgtttgctattgattttctgtggcttttctggctatgtgtgtatgttgagcaagattgagtttttgaactaaaagcttgctcaataataaaactttttgtttatgaggcttgatgatgtgtttatttgttggaatttttttatatcctcagtaactattcttggcctaggccaattcttaactagatcgaccataattccatctttctcgataatatgccctaggaaggacacttgtgattactagaattcacactttttaaactttgcatactgtgacagtcagtagtcctatgatctgtaagggaaaataccaggtaagctctgcaatcccacatcgcctggggaag

SEQ ID NO: 315730 - DNA, 1387 bp, Cannabis indica
aggcatttttcaacttacccctcgaaagaactctcttatgggtaaaatttgtatctcattaagaccaactaaagaaacatatatttatattcgtagtatacataaatttaaattatatacaaaagtattacaaataaaaacatggcattgttttttaaaataggtttcattcaaaataaaacaatagttctatactatatagtaataatagtattgttttgtggttataaagaattggtttctacttcgttagaaagataaaaaaaacaaagaattgttttaatttattttttctaaagaaaataaaataagttggtatacaatattatttttaatattgaatcacatatgaataaatttgttgacaattttaacttatcttagtctcaattcaacttctgacagacaaagactttcatgcaaaattgaaaagatatttttgctaaaggaaatggttaaataattaatctgttatatatagggattatttcacaaatacatcaaaataataaaaaattataaaaatacaattttaaagaattttacaatatttttaatttttgatacagaatacggtcttttaatactgtacttttattaatttgttgtaattttttattgtctgtatattattttcatgttatttttatgtaattttcttgttgttttcgtgttatttttatagaaaaccgtaaaaatataaaaaaaattactttaaacgtaacaatattctttttaactaaaaacaagtgccttatgtaattattcaatatataaccaaaaagttaagatacaacagaggaaaccaaatacaatttatgtccaccgaatattggattaaagtatttacgtcgcaaattactatttaatttttaataaaatttgtagattttgatgggcctacaccagaaaacattataaggtccactgggctaaatgtggctattgatgggcttggttagtgaagattaactaaagaatatattgaaaactacatgaaatatttgttttcttaataagtttgcaaaattatatatatgcatacttttttttcaaattaaattattttacttcactttatttgtaatatctaaatatataaatttgttttcaagtacaaatattggttgatgcaatatttactcttaattaagtttttttttttttctttctgtattttcttaactctttttcataaaattttggaaaatatatattttgcccatattcttataaatgataagtgtaaaaccataatttcaaaagaaattatctcatatatatttttaaaaaatttacataaaccaaaattaaaaaaaaattacaattatatgtcgactcgaaataaatttcagttttacaattttaatttttttttaataaaata

SEQ ID NO: 315731 - DNA, 1560 bp, Cannabis indica
atttcaaaaccgttctcatcactttatctctttcacttctagtcaacattatattcaaggtgttgttatcgttatatctcaattgtagttaactatccttcccaacatgtttgttgtgtatacaaaacaaatcaaacaatgagttaactacttacttttatacataattaaatttgattttttttttatatataagaaatgtacaaaataaaatccattaattaataatgagaaagtagaaaaaattgtaactaatcaaatttaaaattctaatggtatattttagatattaagttatttatcaaatgttatagtgaaaaaaatattagaaatagaattatcatcacacaaaatagagatctatataattaaaaaaaaaaaaaaaagaacaaattgataaatctagaaaactatattattcaaaattgctatcattgttgtatctcacctatagtcgtcacttgatcatattcaaagatgttctcgtcaccgtatttcacttgtagccatcactatcccttccaatagggtttctctctaaaaaaacaaaccaaacaacgaattaattactcacttttataattaagtgaataattaagatagttaagtaaatatatttgcagacgcagtttttcgttaattgatctaagaagattgtaaaaaataagaagaatgcaatgaattgagttggctaaataaaattacaataaataaaaaggacactggtgttatgttcacaagagtgtatggataatactacaaaaagaaatttctatgcgaaattgatatcaaagcttatgggtaaaagattcacgggagacccaataccataaacttgataataatggtggtgctaatattcttgggaacaatacaccaatggaagcaagaaatgagaatggtctcttgtttttggcaactatgtatatcaatagtgtttgagtaatggaggcttagtgtcgacaaagtgtgaaggacttgggaaaaaagatgaagaaagtaaatatcaatgggtgaaatgttcttagcagccgtccagcaagcaagcaattgatcccctataacttgcctatcactatctttatataggcttagggtttgtcaatgatcccccaaatgtcagtgtgtctcactttcaaatcccgtatcttatttccaatcatgaataaaaattacaaataaataaatatgtacaaaaatctctcttattcctagaccaatatcccacaaacattaggaaaatggttattctcggctagaatataccaaattagagagcagtgacaagggatgtcacctctaagcttgaaattcatgaaattagagagaagtattggaaagaggtattttgggatggcacttctcgcatatgattccacatgggctgtggcatagctctctaacatctcacacttaattacatcgctcaattctcgagttaaagtgtatcagcctgtcgttgtgagctaatttttgagctcgataacttcagaattgagctatgactatgagagacacatatatccttctttgaaaaagatatttccaatgcaagttgaa

SEQ ID NO: 315732 - DNA, 3051 bp, Cannabis indica
gacacacctatcgaccacatgatttgatacatatttgaccaaacttacccaacagtactttatgcatcagcatgcatggtccatgcatggaaatacattgtaaaagtatatgtagatcgaaaaatttaatatgcaatgtatataatggagaagatgccagatgaatatgctattcatatgagaatacataattattttatttatttatttattttatttcatttataacgtagcatataaaaaagcttgctgtaaacagaaattcatgcgtgcctgtgcctggatatgtaaatgtgataagcttaatttctatagaatatgaagcttaaaaaaaaaaaaaaaattagcagtcataatgcaaatgatcacttttcacttataaatttatattctaaaaaaatattactatcattgttatttacatttttacgaagtataaaacgtgacatttaatgagagagaataacgtaatactttcctatttgagtcctttgatcctaccctgtcatggagaggcttcctggaattgggaaatattcaagaaggaaggatacacgaaagcctactcatactagctttaacctcctagacgtggaaggtgaaatacttcttcctgacccggagggtttaagaacggaagctcaccgagatcatactcgaatggtttaacacagacatctaccatcctaagttgtcgcgaatgttgaccttttatacatactaggtcaccaaagtgtcggttatgctttttctgacgaagatcagatcttgtttcctacatctaagtatggtagtacgcataccaccaccacctttttgccaagcagatattacacactcccatttgtaaaggagtgtattttgagcaacatgtgacctctacttttaaagattaaatatttgcacgcctcgtatcccgatggtacgaagtggtccctattatccagttgttgcacgcacgggcataatatttctcatgggatcattcagtcagctttatgtaatttaccccaaaagtgatatttgagcagttaccttaggaaaattatgggcctgtccatacccgctgcttagtctataaataccccccgattctcatacgaagggggcatcacatctcacatagctaaaactctgccagtattactctaagtttgagttagggtatcccgcaaaaatattataaacacatcaataccgcccttagaggctaatagactgactcgtggactaagatttatttatacccgaactacgtaaaattcttcatctctttatttttgcaagttactatttctttagctcctaaatatttagtttctgaaaatatcggtaaatatttttgtactttcattgagatctgaagaaagacataaaccactgctgctgccatggtgttcacacaaaaaatagttcctaaaaagactcttcaaggtggcctctatggaggaagtaaaccccctctcgccagagcacacccagtcgagcagtgcaaggggcgagaatacgtccaatatgaatgatcaagaggacgatctagagaactagcatgaccatgtcgacgatgacaagcatgctgagaataaagaaggggaagaagacgatgaagattatgtcaaacatggatattataaagacggctaccattatgagcaagatcttgaggtggtttgagtgcataatgagttgcttgagactagatagaagctagcccgttaagagagattttctcaaaagatggagaagatgatggctcgcctttgagccttctttggagatttggacggggaagattctcacaatgacccttcagtggagtgtgtttgagcaaatataaaggaaaaccctagtgatattggaacctctgctcctccacaggacaagggagaaggaaaaagtaagtgaccctaagaactttcatgctcctcagcctcctcagaaaaatgcaaatcaggccaacaggccttctcaagcacagaaggcagccaacacctccaggctcgggcgctcttctacctagaagacgccaaaaaggcttggtgtgaaagtacctaagcccaagggaaggaaaactgtccatgtgatttagtaaaccaagatggtggggcagggggacagtactccgacaacagtcggtccacagtggatctcaaaaggtgtttagacgccaagtacaagaaataaaaaagtgagaaggcgaggccttgtggtaatgagctcaggtaccacttgaacgacaaggtcagtgagagggatctctcgggaagtgacactaaaaggttggaacagtagatagttgccttaacaaaattggtccgaaagcaaagtggggtgttatcccaatttttgacctcttgacatggcatgtcaacataggcaaaactgaggccacgtggaatacaacctatcaatagaatgagcaaggtcaccttggacaacacgtcaattaacaagggtgtcaaatactcaggcacgactgaattgtaggaaatggccagcgaagagggtctggccgaaccatacctagctggccaatgaagcttatgtgccagccatgtcctaagaaaagggaaggccaaccagcacagacaaaaagcatcaaagggggagtccaattgaatggtgaggtccacgaccatctttctggacgattcacaacttggtttcaattataggacaactccaacaacccacaaagtaaggaatttaacctcaaattatttacctatctttcaaggatattacttagttatttttgtaacttaaatatatgataaaagtgttgtgtttcttattttgaagggatacttacttatttgaatattgatattttgtaagccctaaaaatatataaggatcttaagcacttagaaaggggacctgaattctaatctcttaagctctgtagctctattactccctctctctcatgccatatcctattcattggacacttagtctattttctcatctcgcttgttcagaatctgtaatgcatcaattctcaccattgtaacattcaaagagagtcatagctagaaattacaaggt

SEQ ID NO: 315733 - DNA, 1893 bp, Cannabis indica
atttggcaccatccatagcagctcgagcaaggaggtctctggcatatttatcttgagagaggtgcatacctatggaggagtgagtgacttctattcccaagaagtaagagagagggccaaggtctttgagagaaaactgggtgtgcaagcagctaattaagtaagaaacagcagcagggtcactaccagtgacaataatatcatcaacataaaccaaaacaagtagagtagatgatggtgtatgttcaataaaaagagagtgatttgccttgctaaagagaaaaccaagagcttgaagactgtgctgtaacttgtcaaaccaagccctaggagcttgtttcaggccataaagagccttgtgcaacctgcaaaaaaggtgagcagaccatggaacctcaaaactaggaggttgcagcatgtaaacctcctcttgcaaccccccattcaaaaatgcatcaagttgtctaatagtctagccatgagaaagagcaagagtgaggacaattcgtattgtgacaggtttgaccactggactgaaagtctcagagaaatcgaaccctggttgttgatgaaatcccttagccactagcctggcttttaacttgttcacactaccatcatcattctctttaattttgtagatccacttgcagcctatagctgtccttccaggagggagaagaacaagtgtgtaagtcttattccttatcaaggcaaggatcttatctgtcattgcactattccattgtgggttgagcaaagcttctttaacaatggcagggagtcttgataagagtaagggtttaggtttacgaatccctgctttagacctggttctcattgggtgagtattggagttgttggttgctgcaggcagatgtgcagcaatagggacaacctgagtagcaccagaaataactgggcttgttgtagctggaatagctgatgtgggccctgttgaagttataggagcatcaatagatggaatagcaggctcaacagctggagtggtggccattgagcttatttgagttgaactagcaacatcctgatctacatgttcatggggtgtacctgtatcaagcatagaacaaacttggccagagttgttagtagcctctgtgttgatgtgaatagttggcaaaggattatctattgcattatgttgatcaatctcaggtatgagtgcattgtgatgtgtaatagtagggatagtggcagtgggtaatgaaacaaatggagaagaaatgggaggtgaagcagccactttagagtaaggaaaagagttttcatcaaaaataacatcacgagatatgtacactctacctgtggggtcaagatatttgtaacccttatggttaaaactatagcctaagaaggtacaaggggaggatttaaattggaatttatgcttgttgtatggcctaatgtttgggtaacaagtgcatccaaaggttcttaggcttgtgtaataggtttggtgttaaacaggacttctatgggtgatctgtcatggagaataggagaaggaagtctgttataaagatatactgttgttctaaaagcttcatcccaaaatttcaagggcattgaagcttgagcaagtagggtgaggccatgttcaacaatatgcctatgttttctttcaatgaggccattttgttggtgagttgttgggcaaggatgtcgatgggttacccctatttgttgcaaatggcttgtgaaggatcaaaattccccaccccaatcagtttaaagaactttaaggtttttggacaattacaactcggcttcagctttgaattgcaggaacatttttaaagcattagatttagccttaagcatgtaaatccaagtaaaacgagaatatgcatccacaaagctaatgtagta

SEQ ID NO: 315734 - DNA, 1333 bp, Cannabis indica
gcacagttaaaagatgtgaaaaaccaaaggaaaattacttactcgggtggattccttcaacaagctgcctatgaggagctctactgacatgtcctcccctctggccaactgatcgttcactttgggaagcactcgatcttagtagaactgaagcatctccctaccgttctttgttttcggattaagcacgagaggagttgctagaggcttgggaagtccgtgtccgtcagtgtttccccccttagaacccttggacgaggaaaccatggaatgagatttagagttcttcttggtcggtaggattatgtctgatactgcctcaaaaacctcggaggcagggatagccaagctcttctctacagttagctgagggtttggtgcttggagcaatgattttaggtggcatatcgtccaccttggagcacttcgtatgggatttcttattggagtaatcacccgactttttcttcagtgcacgtagcattgtttgagacataactagacctgaataaaatagagatgttagaacaagcataaatcaaacaagtgcagataaagttaagaataaaataaagtagcatgcacgtggacaggggaaacctcctgaataagcgaggaaggagcatcctcatcagaagagtcttcttcttgcttgaccataatggattttccctttccttccacctagagggaaggacgagcaacttcctcgagaccatctctaatcctgataggctgctcgacgggtgctggcttgccttggtgagccctttttttattcttcttctttggagccttttgttcaggcaccacttctcgtcttggccagacgcaacctctctagccacctactcgaccccttgattaccatcgaatggatagatttaatacttaccaaaattgacctcagtagccaagagagaaatattctgagcatccaagggaagtttaagtatttcttgagccctcttggtttaaggtgaagggaggctggcagtatgaaggaatgtgttggaaactcgtgtgattggtgtgcatgcacttgacaacgtagtagtcctctacataactgccaatttttgacacctcgggatccatagtgctgctcaaccacatctctttgatctgggagaagtagaagtacccagagctattttacttggggctggacttcaagtcaaacaactaattagtgtcgtgggcagacggctgaccccattcttgggaagcatacaacacaaatagggaagataagtacttaatgcccttaggagtgagttgggttgacctaatatggtagtaactggcgatctccttgaagtacagatgtaat

SEQ ID NO: 315735 - DNA, 2806 bp, Cannabis indica
gttatatctcacttgtatatgctaggtttgaccctaatatatttgttgtatatataaaacaaatcaaacaatgagttagttactcatttttataaataagtgaatctacagaattttttatataaaataaatcacaacttttatttaatgacaactaaaattgtataaaattttttatataattttgtatgaaaaattaggtgtgtacaagcagaccgatccaactcgtatttaccgaatctcgttattataatgaaagtcagacacgacttgtataacattatgttaggctcgacccctcgaattgttataagaattaataaatttatagaggacttatcatgtgattttaaaaccgttcttatcaccgtatctcacttgtagtcaacattacattctaagttaagggtgttgttattattatatctcaactctaatatgttcgttgtatatataaaataaatgaaacaatgagttagttattcaattttataaataagtgaatcagcacaattttcttttataaaaaaaaatatgtcaaataaaatttattaattaataataagaaaatagatagaattgaattaataaatttatataaaacttatcatatgattttaaaaccgttctcatcaccgtatctcatttatagtcaacattacattcaaaatcaagggtgttattattgtcatatttcacttgtatatgctaggtttgactccaatatatttcttgtatatataaaataaatcaaataatgagttagttactcatttttataaatgagtgaatctacacaattttatatataaaataaatcatcttttatttaatgacaactaagttataaattgtatcaatttttttatataattttgtataaaaaaattaggtgtgtacaagcggactgatccaactcgtatttactaaatcttgttattataatggaagtcagacacgacttgtataacattatattaggcttgaccccctcgaattgttataagaattaataaatttatagaaaacttatcatatgattttacaaccgttctcatcaccgtatctcacttgtagtcaacattacattcaaaattaagggtgttgttattgtcatatctcaaccctaatatgtttgttgtgctggaaattaattaggccacatcttctcaaaccagaagaatcccaagttgatactgagatgtccgagatagaattagctaataaacccgtaacattcataaaatagaaactcaaggcaatatttcttctctatctatgatacagactgtcctttaaaaatgaaaacatcagttttattcttttaatttggttctcgtgaagaatcaactacccaaggggaaagtggctctgatgtggttgtaccttaactgaagaagtcaaaaggttcaaaatctctacaagagtgagccgaagggcaggcttctgctgtgttggaaaatcttgaatctcttccagccatcaaggaggtctctgatgttggggatttgcctcaagcttcaaatgaggaagccattactgatgttgataaagaggaggttgaagttgcatgggagaaagctgatgagccaaaagaagcacagataggagaggcaaaccaggttgattctcaaaatgacaatatcttggcagagagtttggatagggcagtagggaaagagatggtgtctgatgacagagcacttgatgatgctatgctaagacaagatggagtcagggtagtttctccacccagcagaggtcgtggtagaggtgtgccaaggggtatgtggtaaatgaggacatggatccacacctagtgaacaaccttgagatttatcaatggtcgttttatgaatttcgtaagtagttgttttgaagaagaattttgactaagctttcagacttcttattttatagtgagaagttatagtaaatatccctaaatgagtattagaaagataatgtcttcaaattacaaattggagaaaaatgacacctattacaatttactaatatttagaggtgttaaatttgacctatcttttttctcatctttccttacaatattaatcaaatgatataattgttagatatacaaaacgagtataagaaaattaaaatgttgtgggaagttttaactaaaatagagtataaaacaccttcaaagaattaaggtagtgtttgattggaaagaataaaaatataagaataataataagaatgggaattgcaatagaaatatgaatggaatggatttaaattaaatttaaaatacataaaaaaaattaataaaaaattattaaattttttctcatcttgtattggaattatttttctttctattttaaaatggaatagatatttcaccaaaataaaggaaaagttattttattagaatgacatttcattactttaaagtacaattaaacaaataattggaataaaaattattttttttattaacatttcattacttttaaccaaacaccacttaaaatcaaagaattagtattcaaatgaaatgtaaaagaaaaataagaataaaaacactagaaattatccttggttcagaaaaagttcaatgggaacttgttcctaattcagcttggaacatcatctctcatctttatttatttttatctttatcagtagaatagaatttagagtttcaatcaaagatctttcattctctcatgtgtttatctctcaagaacactaaaacttgagcttatactttcataaagtcaaatagctcattcaattctccatattcccaaactctctttgtattctctctctctct

SEQ ID NO: 315736 - DNA, 2812 bp, Cannabis indica
taaaataaattccaacaggttctactgaggtgttccaagtactgtaagttgggacaagatcccttcttccaaaaagtagtctttgaattcaaattccaaataattgctaccatgatctaaccgaaatgtctttaatgatttgcctaatttcttttcagctatagctttgaagtctttgaactttccaaaagttttagacttcttggccattgggtaagtatgaccgtatctagaataattgtaataaagtgacgaagtattcataaccacctcgatcttgattattaataggtccggacacatcattgtgaataagcttaagttgttctttggctccattacttttgtagaaaaaaggtcttttgtcatcttccattctagacaagattcgcatgccgaaagagttccaacttttggttctctcaaaggaccatgctttcttaacaagtttattatgtctaggccaatgtagcctaaacttagatatcatagatacgtttcatcatcatttaaatcctttgcctcttatagtgttaaggcaatgctactctaaacaattcattatttaaaattaattgtttgcttggcttgagcacataaagtcaatttctttgttttttagaaaaaaattggcaatccattttgaaaataatagtctcattattaataaacttaaatggactttcccaacacacttggtagacagttgtgctccattgtccattcttatggtcacctttccatcaactagttccctcaacaaatcaagtatttacattgaagaaaaatatgattagtggctctagaatcaataatctataacgatttatcatcctccactaagttagcttcaataacaaataaattgcacttacctttcttaagctcagacaaatacttattacagtttctcttccagtgttccatcacgccacaatggaaacacttgctttttgcctttcttgtcctcggacataaggttattgttcttcttggctttaggtgccttcttgcctttcggcttgggcttgccactgcttgtccttaccgtccctttcctttgcttcaacattgtttgactcaccttccttgaacttatcattgttaacgttttcaaacatagtcaactcgttcaactattgaatcatgttgaactatagcttattcatcacacaacttgtggtgaacactttaaagcattgagtgagggactcaaggataatgctgacttgagtcctcttgtctacgatagacccatgtgtctctgcctcatgtattagcacaatcatgagcaatgcatgagttcttacagagacactactcagtaaggaaaaatttagcggttctcacaaaccaacatcatatttagattagatttccacttaaggaattcacaattcagtttttcaatagctagtaaagtaattaagggattttggcatagtagacatttttttaaataaataaaatgacataataattatacttgacaaataaatatcatttctgaattactataaacatgatgcatgagcgcatacaagtaaaacacataaaattttgtttatgttattccacgataaatttttttgacaattgatcgttgccttagggtcagtattgagtcaatttcattgagcctatgagacaattctcgtctttattattttgaaacctaaatatctcatatttcctttttaaaatataaagtaccactttttgactaagttaacaactaaccactatgaagattagttacactttgtgagtgtaatttattattttagatttcatgacataacttagaaacacttccttaaggatcggtatcgcactaaaatatatcacttcttcttatcttagttaagagatcaaccttgaacaatagtatagacacataccttccttaggcggacgaaatttaagtcgtctcgaggctagtttatattcttttggtgttaaccaataatggaagtcataggttacattgacatatacttctgctctccttcattattttaggttaatgtgtttattttattaattctcaaaattaatacatattaataattttaataattatgattagtttatttataacaaaagccttaaattattcccgtcacaattattaaatttgaattaactttttaatttataatttaaaactattttaaattaataggttaattttaagttaccaagttaattataaattaatcttagtcagcttacatgtttttggtttgaaaaaatggtgaacacataaacacataggacaatcctaatatatcatgtttctactatgagatgcatgataatataactgtgtgggatttctatgtatgacatgttattcactaatgtataagcatattattaatcaactattaatgaatatttatttaaaagtaataaataaacaataatgatgaaccgataataattagatatttctaattttataacctttaaaaaaattaaaaactaaattataaagctaatctccatcgttgcaagagtatttttataattttttaagatcgtcgttgtaatgtcctgatacataggcgcgctacagtgatttttcaattttagtgccacctttgctaatcaaaggatttttcttgaaaatcgtgtcaaattaaaactttggatgtaattgctaaactttaaaaacttttatacatttatttaaaaaagtcaggatcccgtatttaaacttttacatcactatcaaaatataattagtcaagtcgcacaacgactacaaaataaaaccccagatgtcccgagaccgaacactccaggt

SEQ ID NO: 315737 - DNA, 682 bp, Cannabis indica
aataattctaaatttaaaatattaaatgaatttaatctaatctggaaaaaaaattcttaatttaaaatattaagtaaatcataaccaactaaaatacaatattcatggaatcaatattcatggtggagtggtgtgggaagtacgttcaggactttcagcaaggtgttgggcggattcacgggggtggggctcgtcaaaatcagcgttgggagttgcctgctgctgggtgttttgccgtgaatgttgatggggggttttcattgcaaggggctggggcgtcaactggtgtagtggttcgggatgagaggggaatggttcgctttgcctctgctactgctgttcggtttgttgggtcaccgttagtggctgagcttatggccatccgggaggggctgttagctggtatacacgccggctgccacggtttcatatgcagacggattgtctgcaggcggtgcgacttctgcagggtgaggaggtgggttgtcgagaggaagatggtcttcttctggagatccaacgattgcttcagcatggttctgttagtgggttgcagtttgtgtttagggaagctaatgtggtagctcatgtattagccaattatgctttggttaacaaagttagtgctatgtggattggggtttctcccccttgtgctcgtcacgctattgatcgtgacttg

SEQ ID NO: 315738 - DNA, 1266 bp, Cannabis indica
cactaaaggaaaataaaagattcatcaaagacaaaagcaatgctatatatgtactatctatggttttattataggttcaattcaattattgcattcaaacataaagttagatatattttgactagctattttttactgtttagagattcttaaagttgtaaagacataagcatatatctatatatggcataatggctctaggtttgcatagaatcatatatatttataccctttaatcagagttttagaaagtttcttcttttttggtctttcttatctggatattattaagatcatagtagcttatgttatatgtattttccgtgatttgttattatgattatgatttatgataatgctaaagttactatatactaagagatcttgatatatacacaatttcaatttttttttttaaaaaaaaaataatattgaaaaatgataagaataagattataagatattgtgtacaccttaactacttggcccaagaggaaaaggtctcttttgaaagggtgcagaataataatgacagctcaaacagctcttatttttgggattaattaaatagataattaatccatctctttataattacaatcaatacatcctaaaaaggagttgctaattaggtcaaaacttctgttcacttattaggtttttcctaatttaacttttcccttttaattttttgattatatataagatattagaaaaaaagagaaatgctaaagggtatcagtggtgactagtacccttttatgtgtcagtatcgctattggtccaactaagtatcgggttctatataatttaatataatagtttttaggaagtatcgctagctaatcgtaacacgacatatcgcaaaggtgctagacactactggtatctaatagtaatgttctagaaaaaattctcatgtggggtgggagggcctacctgtcttttgcctcttaacagtctcacaaatctgattgatggtgggaagtgggaaccacatgcaaagactcttctggccacatcattaggcacttcatttggaatattcaatttttttatatatatatctaatgattacattacaataacaattcccaatcttataaaacttagtagaggaaacactttgatgaccgtacaacttccttgtaaaattaattgggaaatttggatttccatacttagagtatctctaaggacacattaaatttggtgttacactatcactaaatttggtgtcaaaaattattttcactccaatcacaa

SEQ ID NO: 315739 - DNA, 2610 bp, Cannabis indica
acccaacatgtacagtgtctcaatccttgagtgacatgtcatattttgttagtaccccagttccacactccgcacgtacctcactcgtggagcggaaggggcgagagttgctcacggagcaattggatcctcccaaagataactaacctgttattactccttgaaaataataaactccgaaaataattaaggcaatatgtcttataacaagagtctcattaccacctggcttatttctagactgccacaagagtgatgttaaagagattgttcactcttgaagtggcttctcttatgtgagctgagattgtaattgagctgctaaggatgatccttacctatgtacttttttttttctctaatctgctttgttcattaacttagctattgttattgcattattgcttagctgaattctatactatgattgttgttgataatccgcaacagtaattaaagtacattgcacaataaatagtcaaatacgttttcttttccttggaaaaattgtgtacttgtaagagagacaattcaaccaataaatcaagagaggagaatgattgttttcatagaaatgacgtgtaaaagttatatattaatgaaagagaacatacaagctgatgtctggcatataaaaaaccgtgtttctctatcaccgagaacaatccctcactttccacattagaaaccccagaaagaaaagaaaaaaagaatattgtaattgaatagaaacaattccatgaataacttaaaacctaccgagctagctaaaagtgttaaaacccaaccaattaaaagaatcaaattcaaataaaatcctaaactgtacctttggccgtcaataaataaggtcagtctatgaacaatccaacaaatatgatgggatcatgggagacgagcagcatttgtattaaaatcggttgctgctttcgctaggggaaatagagggcccttcgggcttcacaagacgagagcctctgccgttactgttgttgctgctgctgatatcaagcccctgcatccggccaatatgatcaagctgcaacatctctgaggaagcatgtgtggcatgcataggctgatgtggaggggtcacattagactggaaatgattaaaatgttgcatttgaatattacgagggtcacctggcccagattggggctgatttgagaagaaggaagattggttgtatggaatatgatgcattccaaagttgtaagtatcggtaggggtcatcatctctccggtggccatcttgagcctctcaacttctttcttcaacgcatcgtttagagctgcatgattgaatagcatagcaatgcattgccagtcataaattcttactgattgagagaacacaataataaaaacaggaaaggagacagtgtaaaacaataatagaagaaagcagttacaagtcatagcacataaataattaaacttcctttatttcttcggtgaaggttgactaaattgacattccaaaaaaacaaaccatagttctataaactagctttttgctgttcaagagaatatggatcaaataaagcttgtgcatgtttttctggtagcaaacattaaaatcactgaaccctttacagaccaggatagggaaataatcattcaataaagaaagacaatttcagaagaaaaaattcacatattagtaagattattcttttaaggtggagctccatgaaattaaattgaaaacaagccatttgaaaccatacataccatcacgcaactgagcttgttgttccatagcttgtagtcgaagcttaaggtctgtgttttcaccactgagaccagttgtatccctctaaaaaccaaaaccaaaacaaaaaaaaaaaggaaactactgttactaacaagttatagaaaggtctgtgataaaataaggaccaactgaaaagaatctaggaactataaattagaacacggaaaataaaaaagctaacttaaatttgaaaaaacttttagattggaaactcaggctagaaatgaaagaaacattcaaaatttgacatctcaaggatttaagataatacaaattataaccaccataccaaagtaagagattaaccaaatatgtatgactacataatttttaagttatacgcaaatgaaataagatgagaatatccaaaagaacctggaaaagagtcagttgggcagatagagtcgttgcttctgtttgaagggtttgaacttttctctccagctcagttatgtaacgggcctttctctctttggaacgggcagcagactgcctgtttgccaaaatcctataaagacatgaaagtgaaagttcagctaaaaaaactacaaaaagaattgcctcaaattgtgcaaccaaacaaaattaatgttgcacctttattgacaagctttctagattacaaaaaaaaattgtatatttaatattaattcaatataaaacttcattgttagatatggttcctattcaccgaattttcactttgagatgtgtaactagataaagtaaacgttatatctacaacttaaaaagacaataataacaacccataattacaaatctagtataatttaagcaacgaaaattcaagttttttttttttttcaat

SEQ ID NO: 315740 - DNA, 881 bp, Cannabis indica
ttttgataagtgtgtgttaaatatttttccgtgttttttttggaccctatggaatcaacgaaataactgctttcatcataataaatgtttgcctccaatgctcatatatgatcatgcagtcacttatttgcagaaatttgaaaaagcgaatcataaggtaagtgaaggtaggcagctgcaacagtccctgagcagacaacctcaacaatttgtgcctaaaaaatttaaaatcaatattgatgttgccttagacaataaagcaaagaagcatagttttggagtggtagctcgagatgatcagggtaatgtcatggcaggtgtcgttgctcctgcagcaaggaatgtgcctcaagaaatagctgaggctaaagttctaattctggctttatagtggattcaagcgatcaacctacctattgctgtcatagagttagattgtaaaagcttggtggataaaatttatagtcagttttgtaatcatttagtaattagtgatatggtttcatgtattaggaacttgttgtcgtttagtcctactctctcagtcacatttgtatctagagatcttaataaacttgttcatacatgtgctaggactagtttaggattagacaacgagtagatttagaatggctccttgccttcctaattatcctgaatgtctgtttctatatttgattttatttctttttttttttttttttgtaaattaagcgttgatattattgcattaaataaagttagatctcatggtcgttacataaaaggttctccggtaagacagagaccaggatagtaccgaaacattttgatgagcaaatgcccatctagctacattgtgagcggcaaaattacaagtccgactaataaaggaaaaatta

SEQ ID NO: 315741 - DNA, 856 bp, Cannabis indica
ctaagcccattaacaattgatcactaacaacatgggctaacacagcaaagaactatccaatcaacccaagttttaataaaaccaataaaatttaatgtaagcccaaataaaagtctaacaggtggtccacgtcttgatgtggagcaatgaggcctacttctcgtaggttcttagtggtaacaagtctctatacttgcagctctttgggcgagaaggatttgtagaaagttatcctctcttccagctccaaggtcaaaggaaattgaggaatgtagtctaacatatgtgaaaaaatgtatcaaaatacatcaagcaggaggaaaaataaaatcctaaagtctaaagaagagaatgacacttacttgcagtattgaaatccaaactaagggtaggaaccctcttcaatgggaagccataggtgtaaaagtaataatccatgaagttgttcgtgtactttgtggagctggtaggacaaggaatactcctagtgtagtgttccagcctatagatcccgccttctccttattacttctcatggcctaaaacttgatcttgtaaaaatataagatctcctctggcgtcgacacggacttgtcgtgttgaacacaaaaaacgtaccactctaacagatagtggtacgcttggggaaattgaaaaggtgctactccagccacggtgcaaaagttagtaaagtagcacctcaaaggtaagtgtgcacccatcttgatgtggggccagctccagacaccaaagcctccttttgcacacttgttgggcctctctccataaatggaaagcctatttcgtaatagccttgaaagtaaatcaaatcgtcgttttaattcatattacatga

SEQ ID NO: 315742 - DNA, 1280 bp, Cannabis indica
actgaaataatacctcaatttttggcctatgttcagactcaatttcaatgcacagtcaagaaatttcattctgataatgctcatgaacttgtgtttaagaatctctttgctcaacttggaatcatgcatgacttctcttgtgttggaacccctaaacaaaacgcgattgctgaaagaaaaaatcagcacctattaaatgtggctcgtgctcttttctttcaagctaaaatgccaataaaattctggtctgaatgtgttatgacagcaagttccttaataaatcaaactcccacacctcttcttaaaaataagactcattttgagttgatttttggcaatgcacctgattattctaacctaagaaacttcggttgtcttgcttttgcttgtactcttactgctcatcgtacaatgtttgccccaagagaaaaaccgtgtgtttttatagggtatccacaaggcatcaaaggttacaaactttatgacttgaatagcaaacaaattttcgtatcaagaaatgtgattttccatgaaaatatttttccatttcaagctctaaataaatctaatattgatgttgatcccttttctcacttagttgttccatcttctaatatatctaacacaaatgtaagtgattttcctgcagaaaatcatactgacagcactaatgttactcgttggcccgaggatactactcctgccatgccttcaaacatgcagattcactcatctccgaataccagctattctcaggacactccttctatacctgatattggtacagattcacccaacagaaccatatccaacaacccctcattgcatgatctaccaaggagaacaacaagaacaactcgaccccctacatatctcagggattatgagtgtcattctataatacaggatcaatcatccactccacccttcctaacaaaatttatttcttatgataaattgtcaaaatctcacaaggctttcattcttacagttactgccctttttgaaccaaggaattacaaccaagctagacaacacaatgtgtggaatgatgctatgaacaacgaaatatatgcttttcttcgaaacaagacatggactgtggtgaaacttcctcccaatagaagagtaattggctgtcgttgggtatacaagatcaaattcaacaatgatggatcagttgaaaggtgcaaggcacgattggtcgcccaaggttatagccaactagaaggataggactttttcgatactttttcacctgtagcaaagatggtaacctt

SEQ ID NO: 315743 - DNA, 811 bp, Cannabis indica
attttatgtaaataaaatcaaaaaatcgtaaaaatatttaaaatttcgtgaaattgtatttatttatttttttttttttttttgtcgcatttgtgaaagggttgattaactcttctagcttaaggcaagataaaaaaaattatttatagaattttttattagtttttatttatatattttaaatttaattttattctattgtttattttgatgtctattcacatccaaaagccaccttaattgatggtgaaaaaagatcaattgatgttataatttatataatgcctaatttttttattgcctccactttaatctttaatgccacccaactcagaaagagaatctcacacagtacaacaacgtaattcacgagctacaacaaaatgacaaaattaacctactaactaaaacgatcatagaaccttgcaatcccctacaatcatcttgaccatatatatatacaccacataattaagggcatcttaagttgtgaacgaccacaagatgcatcatagtgttattttaatatcggataattctaattaaatattttaatttaataaattatataagaaattattgaaaattatagaacttcacattagtgtgccaaataataatactcttagggttcgattggtacaccgtattacaccgtattgtattgtatagtatcatattgaattacattttatgtaatatttttatataaaactatatgtggtattaacatttatgggcacctaaatatataatgttttagtttaaattaaagtttaacataatagtatataaaaatatgatatataat

SEQ ID NO: 315744 - DNA, 1850 bp, Cannabis indica
aaaaaaattataactaattttaaagaacaattcctacattgtaagacatcctgagtcacagtttatgagcatgagagaagcgggaagaatagtgaggcttttaaacgctcctctccaagacaaaatacgaaagaagagtttgctgcaacaactattttagaaagtcgtgaatgagaggaagagcttcgtaagagtaagggggtacttcagaaattgaggtagttactagagagctctcttcaatccaaacgatgagaaatgacgctcttcctatttagattaatgttggagatgagagcccaccatccacttctaatttaagggtggttccattgcaagatattcagctgcagtctaacaatattttggtggaagagtcttgggtcaatgcattcccaccattaggggagcatcaacattgccctcctgaactagtgcttcgtgttggcgagtcccatgggcctaccgaagttaagaatcattataaaagaatatctattgtttgctccgaagtggaggagggtaagttgtttcaaagtacctttgggtctatggttaaagcccaaaagaagaagacgtggaagaggcatacatcctccctagatagacacgatgctagtagctcgatagatggtttggtgtctacacagttagatgagggtaagcggcctcctagtggtgtgaaaagaaagaatgatgttgttggtatggtagaagagcgaagagtggaaccgaatattccaccaagtattagtcctatggaggtcgatgatgaaatggctcaatctgtggagcaggctcgccatgctcaatgagtattttatgctggaatgcctggggtttagggaaccccggtacagtaaatgcgttgcggactattgtgcaccagcattccccaagtttggtcttcctatccgagactaacctttgtggtaactagggcagaaggaattcaaaggcatatcaattttgctaatagctttcatgtggattgtgtggggagtagtcggggacttttattgatgtggaatgatgatttggatgttactattaaaagctactctactagacctattgatgctcttgtacaatatccagggagtgcactatagcaatttataagattctatggcaacccagatgctcatctccgcaaagagtcttggctacttcttcagcgtatatattagttctttaatctaccatggatttgtggggggggacttcaatgagattttatctatggacgaaaaaaagggagggacggatcgtgatggtacaatgatgagtgaatttcaaaaatttcttgatgactgtatgttagatgatttgaagtacgaagggccaaccttcacttgggtatatcatgcttggtttgagttgtatcctttaatccaagtgtcccatggtgattttctttgttctgatcatcgtcttgtagtcgctaaactagagaatgtagtggtacagagtcagaggttgtctcccacgttagccattgtacagagcatggatgaccttgtgtactagagaaaatgatctaacgactaaggaaaagggaaattaaaaaaggaaagccctaagatgacacgtgtccgaggcctagctcgtacggtctgacacccttaaatgccatatgggaaatatgcgacctaacaacccaacggtaggatttcatcccaacggtgatccatctaagactgcccatgcaaagaagctggccaataaatactccagaaaaagtacaagggaggaggaccttttttgtggagagagaagactgattcttcatcatccaaagcaaacacattttgtaaccctacaatcaactccagaatattcctaccaag

SEQ ID NO: 315745 - DNA, 1770 bp, Cannabis indica
caatgtgggctgatcttcgacagtttcacgaacgaaatctagagttgagcatcatggaagatcgcggcaagagaaccagaagttgagcaacaccggaggaaggccactacgcatgcgagtcatggcagagattcagacaaaaaaaaatggatcttggtcaagcaaggttaaggttaggttttctctctcttagtctgataccatattagagagatggagagggaaaatgttttttattaatctgaatatatgtattaaatgatacaataaaagagactttatataggggagaatatccaaccttagaatatacaccaaactcaattagaaataaccttatctctatacccgaacattaaatgtatttatttaagacttaataacccaagaatttcaaatagtaaataaagagataaaaaattgaaaaaaaagagctttttgaaagaaaaattaccagagttaggcttctttgtaccttcttctctataaaaagccatctttttcttcaaatccttgagtttcaattcgatacctcttcttcttcctcttctctagttccttcttctcttatctggtttggttcgaacctcttcttcttcctcttctctggtttgaacctcttcttcttcctcttctctagttcggttcgaaccactccttcaatcgttccattcttttatcctcattcattttgtttatttagttatgattttatggttttgattttatgttttagagttgtttttttttttgtttttgaaacgatgttttagagttttaagttaggaaagtaatataatataatttattttcaataaatttttagaatttattttctaaaattaattaatttatgttttaattagtgagaataaaatattttttttttaaaaaaaaaattgacattgcacccattaaatgacatggaccaattaagagtggactgttgatatcctatttggtagataacagtaagtagtaacgactgtcaataaatactgaacttaggtattttagctgccaaaaaagtaactgaagtatttaagtgctacaaatgtggaaaattaagtattttcgtcacaaattgctcaatattttataataattttctatttaattttaaacataaattattttttttaatttttaaatgattttaatgtaattttataatattttaaaaattaaaataatttggaccaattaaaatattcccaagtctatgtggcaatccaacttggcattgaacatattctgtttcaacaatacctttaatttgcaaacaaaagtcaaacattagaaagtacagccataaaaaaaaagattagagcttaacaatataaaaaatgaaaacataagatatttttaataaaagatgtaaaaattgtgttatatttaataccaaaaataatgttatcatatagttacatgagtaatttgcggcaaaaatacctaagttttatgccgagtagcagataaatacctaagtcctatttttggcggtataaataccttccgtcactactctggaacttccgtaggtacctctccgttttttgcattgtaatgtgccaggtgtcgtgccatgtcattaaaatgtatgccacatcactcacaccacttaaacttaaccatgccacaacatacattaaaaaccctcttaaaataaaaccctaagattaattaaaccctcttaaaatcaaaataaaaatacttacaaaaaaccaaaaaattaaaaaataaataaatattttatataactcaaaccta

SEQ ID NO: 315746 - DNA, 593 bp, Cannabis indica
aaaattaattaaaaaagtattaaaggatgtacttttatagtgtcaaaaataaagttcatatattttattgcacgtactattattattttttctcatacgaatggtgagcaactttttaaatttaatcttcgacattgtaaactattcaaaaaaaaattaaaatttacttgtggtcctaaataaatacaacttatataatcaattaagaaatggactctaggataccgaaatagatatagggtctactgaaaaatttctttaggggagcatactacagattttttccatatatataggtacgtgtgtaaaataaaacaggcacgtatgcaactaaaagtttgaatattatttttattccgtaaattattgagaattttttaaaaataaaaacctagcataactgtaattcaatggcggacccaggatttaagttgaggcggggcgacaatttttttttataagtgagggggtgcgtctttttttttctacattgcataatatgttaaaaattaatgcaaatttatattttagtattaaatatagtataaagtaaaaaaaaaaaaaagtaacaataaaatatatttggttcaata

SEQ ID NO: 315747 - DNA, 651 bp, Cannabis indica
aaaagtacacacacgtggcgttcttgcagatcaaggtgttacaatcaccttctacgatcgagtaacacctaaaaattcatcattttatccctcatcctccacatgtccacattgaaagagtgaagcaagcttccaccatacataacattctagaagtttgggggtaaatattattccaatttctggtaatggacacgtggaatccatgttagcatccaaggcccattagtgggtcctccaaagaagataaagtgggacaagcccaactggataggtccttctgggagtgtacttcagcttcgtgaacatagacccttccgccattgacagcccgtgtccagacgcctgtttagtaccgtgagtccggaagggtaagacaggatgttcctggaagactagtctagttttcctttttattcttgcagacaaataaggaaacaatagctggcagatctcaatagagaattgtatcaggccaaatagggaaacttcctaaaacagatattaagaaattaattcatagttaaatgtccacaatcagagtacatgtgttgaccaattctaaccaaatctgatctgcctagtcatcgtctccttcgtgggctggacttaacgaagcaacccaagtacgttatgttgggtttatgccct

SEQ ID NO: 315748 - DNA, 1222 bp, Cannabis indica
aaaaaaatactaaagtaaacatgcttttattgggattagaactcatgaccttctttagatgcatgaaatgacttgtctattataccaaagtttattttgtaaataaatatcgcttctatatataaatatatgttgtaacttactaaaatgcatatatatttttttcttaatttttttttcagggtgggcgactgccccacctcgcctgtatgtgggttcgtccggactataatatactcatacatatataaaataataaataaaaaattaatctatctatacaccaaaaacaaaagaatgtctctattatatcatactcatagattaaacatttcaagttccaattcctaaccctccttaaataaaatgtccctagtgttgctcttaccaaaaacattttctataattaataacagtcgatcaactaatcatcaaattctaaactataggtaagagaataagcccagaaacataggcatgagtaatctaaaaaaatatactacatgtatattttaatattagtttcgaaaaatttgtaactatatataacaccccatcagcatgatccaaataatcaacatcgatctcccacgactctccaacaatttttgtattaaagtaaaaatcgtgtttagacttggtcaatagtttttaacttatacaaataacatatttgtcaccaacattttattgttttaaatgtaattagtatctaaataatgatatatatctcttgtaatgactaattcaaaaattgtccctattataatttttttctccaatttttatatttaattaaaaataaaaaaaattcttaataatattttttctaaataatatcattcctcactcactaaatttataaataggtaaatatcattttcgactatatattttgtaaaagttaataattgaaccttctgttttgttaaataatagtttagattctattttttaaaatagtacaaaatagaccctgaatcttattttaatcaaattaaaacttcataataatctgaccagtaagtttgtaacgcccgtattttaataataataaactcggaaattaactttaataatttatatattaataaccatatggatcgggatcccgagtattaaaatttaggttaaaagtactttactaataggtacatacacgtttttttttttttttctttaaaagtttagcggacatacatttccaaaatatagactcaaa

SEQ ID NO: 315749 - DNA, 607 bp, Cannabis indica
caaagatgatcaacaaagaactgaaaagcaatgataaaaccattggagcaagaagaatcatcaggtggcacgtttcatgggtgttacaagagagtacaacaagcacatcacagtggttagtctgatgagaaataacaagtctgaaaaataacaattcaaattttcaacttgtagactgttggagactgttaaaagataagctgaaatgtaatgcaatgtaccaatctgaaggtttaagagagcaaaggtgtcaagatcaggagcatatacttcatcatctaatgcaaacatcaatgatcacaaagtttgtgaaaagcgtcctattggccaaaagacaacaaagagaaatggaaagggaaagaaaatatacttggtgaattatgagatagagaatttacttggtgaattctagatctacttattgaaagctcggttatataggcccatggtcccctcaactaatattgcttgcagactcagttaattgatttaagttaatcaattataattctaaaattagactatgtcttatttatgaattttcactaagcaagggcttaattgtgaagaaaagaggcttagggggtcaatttgttaattaagagac

SEQ ID NO: 315750 - DNA, 1095 bp, Cannabis indica
cttactgagtctgtcgactcacagtttacgttgcatgtgtaggtaaggcaaggcagttgctgatggaccgtgagcgagcttatgggattgtacatgtcggggcggttaggcctggagcgtacgatcctcgggacagcacggctgaaattttgtaattgtcgttagacgactttattttgatgtaaaagttgaacagtgaaaacgtttgtaaatattttataaatcgggatcccgagacttttgtaaaatggtttataagttaatgaaaaggcaaaattttaattaatcacgtttttccataaacctcgttgattagcaacgagctgcacagtacgtttaaaaatcacgtaatacgcctaaattagttagggtgttacaaattccaattcccaggtgtctttccaaacgcgccctatattttatttttttatatggtatttaataaaacaaatacgttcaaataatcatatcactttaattaccatttttttttaaaaaaaagtacaaaatactcaagtaaaactaataatacgtagctccacacgtaatatctacatagtatatattatatatatatatatatatatatatttattgtgttgacaaatctcaatcttaatctagtcttgttcgcgtgtaactatacttatcttagaataagtgttgatcaacatgattagtatcacataattaattttaatatatatatatttgtaataaaatttgaatataaacggatgaattcgtatcgatttcattttatatgggttaatcttacccaacccaaattattaccgtgttatttgggttcaacctgcccgcgactatttttcatgatcttaactcgcaataaatcgtattgaatttgcatatcatgttcgcttgtcataacaagaatttgtggagagggataaaacttagagctcccaccgtctcgtgaaagtagaggcacttacaagaaaactaggcttttttattcatagtgtgacacaattattaaagggtttttttaatagtatacttaaaattgattttatttgtaaaaatactttcaacaaatttatttgtacaaatatcgatgtgccacgtcagcat

SEQ ID NO: 315751 - DNA, 2484 bp, Cannabis indica
aattacaacagaaccaaactaaaaataacaagaaaagctaacaaacaaagtaacagaaataactaatacaatactaaccaactgtcagaacagttagttagttaacatcccccctcaaacgaaaagggaaagacacaactttgagtttggttttcaaataatgaaatctgtcgtctttaggcaaagatttggtcaagatgttagcaacttgatccacagaaggaacatatcgaaccgagacttcattatttagaatctgatcacgcaacaaatgttggtcaatttcaatgtgtttgcaacgagcatggaagacagggttggcagcaagagctgcagcccctcgattgtcaaccaagatgatgggaacatcggctaaagtcacctgtaattcagtaaaaagtgactgaaaccacttcagttcagctgctgtgttggccaaggcacgaaagtcagactcagtggatgatcgagccacgacaggctgtttcttagcagaccaagagatgagatttggaccaagaaagacagcgtagcctccggtagaatgtcgatcatcagggcaacttgcccaatcagcatcagaatacgcttcaatagacaatctcgttgctggtgtgagctgcaggccgtgagagatggtgccttttaagtatcccagcaatcgtttacatgcttcccaatgaaccacagtaggagcatgaataaattaagataattgttgataataaatgctacatcgggccttgttaaggtcaaatactgtaatgccccaagtgtgctacggtagagagttttgtcctcaaatggtagaccctctgttaaagccaatttatgagcactacttgtaggatttgagcaagcttttgcaccatctaactgaacctttacaagaaggtcagttatgtacttgctttgagacaagtacatagtatcattgtctctatgaatttcaacacctagaaagtagtgaactgcccccatgtctttaagtgaaaaaatagcatttagatgagtaataagctgctgaatgagagtaggattaggcccggttattagaatatcatctacatatacaaggagaataatttgagtggaacccgagccatatatgaacaatgatgtgtcagcctttgaagctttaaaaccccaaccgaataaggtgtttttgagtttgtcattccaagcccttggtgcctgcttcaatccatatatagccttgttcaatttacatacatgattaggatagagaggatcttcaaagcccttaggttgaatcatataaactgtctcactcaagtctccataaagaaaggcattggagacatcaagctgccttacttcccactgatatgttactgctagagtaagaattaatctaacagtaactggttttaccacagggctaaaagtctctgcaaaatcgatccctggctgttgtaaatatccacgtgcaacaagtcgagatttgcatttgtctaaggttccatcagcatttaatttcactctataaacccatttgttatcaattaaaatcatatgagactcatagggcacaagagtccaagtaccttgagctttgagagctttgatttcagttgacatggaaccattccaaactggatcacgaagggcagatttgagagatttaggctctctaggcagtttgtattctggcagcctatgtttagttgcaagataggcttttggcttataaatgcctctcatagaccgagtgatcatggagtgagtacgagggagattactagcaggcgatgcagaaaatgtattgtcactattagttactggtgcaggcaaggtagagaccgatgtggaagaagagacagattgaaggtcatgagtattagagtgagcaggcaagatagcagtatctacattagcagcaggcacacaaattgcagcagtgtctatagtttcacgagtaccagtatctatattagcagtatgttcagttgcagtggctatattagcatgattcccagactgttcaatagcagtatccacactaggcattgcaataggctcagggacaggattagtagcaatattatgagctccagtaacaaattgcatagtagaatataatggggcctcagaagttaccttggatgaaggggcagaagtcttgaaggcaggaaaagaaagctcatcaaagacaacatttctagcaataaaaattcttccagcagcattttcacacaaataacctttgtgttttggagagtatcctagaaaaatacactcttcagacctatactcaagtttgtgatgatgatatggtctcaaatgtggatagcaagcacaaccaaatggtttgaaaacactataatcaggttgctcattgaatagacattcatagggactaagattgtcaagaactggggtaggcattcgattaatggaatgagtggcacactgaaatgcataccaccaataagaaagatcaagattagcttgagctagaag

SEQ ID NO: 315752 - DNA, 2098 bp, Cannabis indica
aattccatacatatttaaatccataaatatgtaacataataataataaaaaatactctcaactaaaaaattacaaaaaaataccctttcagagttagcggatattacagagccagcatctaaccgatgctatgtatctatttgcaacacatcattattttctattttcaaaacaagcaaatacaagtaataattgtaatgagattaatgagcaaaatcaaagtgtctacttagaataattgtcatttcaattacaatcttatatcttcaatcaatttctggaaatctaacttttgtgccttagaatcctcgcatataatccttcccaaatctttgaaaaaaaacaagcaaataaattctatgtaaacacatcgctctaaagcagagcaaaattaaggtgtgttactttcttattctagaagttaacaatatacctttgaaaagagagagctgaaagagtatgagagagatcctagaaagatagatccaacaccctcaaatttgatattagaaaaaaaaaaaaacaggatatatgatatgaaatgaataacataactatatacaccaatgacttttctcaaagttttttcttttaatttttacaattaatcatgattgacattcaagaccaccatcaattcaaagattctataaactattcatatttacactactacaatttacctttttagtaacactatctagttacccgtagaaaagtacaggtcactagagagttgagagtgattttcagtgacatgcacaattagactctaaaaattcaatgttagtctcttgtaatgcaggtcactaaaaatatggactgtcactaaaaattttaattaataaaaaaactattggcatatagtgacgcgccaagcgcgaatggataaatatatcgccacccatctagtgtgtcactatatcataacttaatttttaataaaaaaagtacaattgtaaataaataaataaaaaataaaaaatatatttaacaatggtaaatcctaattatacacgccactctctcttttttaatcaattacaattctcaatcaattcaaacatttatcaacctataaaaattaaataataaaatataaataaatattaaataaaaaaagctagatataatcaacctatttaaaaaaaacccaacagctgttagtgttaccctatttctctctctaaatttatttattaaaagaaattaaaaaaaaaactaaaaagaggtataaaagggatatgttagagtaaaaatcctaaaattcctttctctactgatctctatctcactctccccgtttcggtgcggcgatactcctcaatctgtgactatctctctttccctcttccagtcatgctccggccatcaacgatcctcaagctctacccactaaactccgaagcccttaacccctttcccatccctcgttccctcttcttttgattggcggagttgctaggtgaatgatgatggtccaaatagaacacatcacagtgctcgcagcacccgaaattctgagcgatgagaagagcaaaggtctcgacgtacggccagagtagtcaccggtggccattcgcaggcctcgacgaacgacggccatccatttcgcacctccagtttaagctttctgaggtttgatattgggctgttcatttgttagttttttttatatatagatttagagattttagttttgatttaaattgtatgttgtttgtgtccattacttttattgttttaaggtttatcatttagttcaaatgatgtataaattttttactaatgtttactcattttgtttgttaattctagatttttgttttttaatgaagaaaagagactatttgtatatagatttgttattattaattatgtatagatttttgatgaattggtttttaattttgttatattggtttattaataattttaaaactaaaattaaaatatattaatttataattgataaatatatagttaactaaattgtatcattaattaaattatttttataaatttataatatataatttgaattttaaaaaaataacattaattttttatatatgaaaagcatattaacattaataaa

SEQ ID NO: 315753 - DNA, 825 bp, Cannabis indica
atatttgtgaatttttatatatatacataaaaatacatgtataaaataattttgaatcaattgaacaacaaaagcattaaatctatgaatattttctttgtatatattgtgatttttaattttttttctctttcaattaatctttatttatttttattctttattattgttattttttagaatttagagctttgaagaattttttaaagctttaatctaatatttttttcttgctttattgtttggagcgaaaaatattataagaaagcatgtggcattacataaattgcagtgataagaaagttgatgatgatactatagatttgagcagcaacaaccacaagattaattttggaagaaaaaaaaaatgatatttttttatgacagactaaataagaaaaataatttttggaaaattctaaacgtaaaccctatatgatctcatctttcccaaacaaatccttgactcttattttcttcttttcaatattttaatatattgaaattattgaagtatagaagagatataacgctgatctacatagtcagaatcaaactcaagattttccttaacgctggcctttcctcttagcctctgaaggatatggtcttgagattgacacctactatatagactttgctattatatatcttctggtgatagtttcggagctactgataatattcttataatctaccctagcggagaaatagcccagagaggagatttagaaagacatatttagaaagatagctaaggtttttattattttcaaacttgatacccttaacagaaatgagaggccatatatataggccctcaac

SEQ ID NO: 315754 - DNA, 2810 bp, Cannabis indica
tgtgagacataacttgatagagagcttaaatatcttcaagatccaagttgaattgcatcatttggataaaaattaagtgaggtatgtctattttactgaagggagttcaagtcccaacacccaaattgacattccagcgcccaggttgacatctgacatcaacctagatgctgtaaaagtgtaaaaacatccaagggaagtcctttgagatgcctaagtgatggtttgacaccccttagtctttttatatgttttggtgaagctaatcacacattctcgaagatgttgctatttgtagaaatggaaaactcaaaacttctggcttccaaatgatccaaaattgaagttgtgaatttagttgatctaacttaatggatcaatgcacttgtaaaaaacttgaagaatggttgaaacaacattaaatcggataagcagaacccaacaaactaggcgaaatgttgacctaggcgttagggcctttaaacgaagctcttgagattctatttttgatacttccaaggcttctgaacttgagaatagagtttctcccccgtttttgactacatcagattcaatggtcactttggatttggcatttaagcgattgaaggcaccatcccaggtagattgtcaacttgggtgttgggcccaacactaggtcaacctgggtgctaggccttgtttccaaggactcgagtttgtgattttctctccgagtttacttgaatcatcattattttttatgacgctgaatattcctggagcacttttggctgggctgaattggaaacagcccaagttgacaaaatgtcaactgggcgctaggtccctcttatgcccctttgaaagctctattttgtccccaaaaatagcgaattcttaatatttttaaagacagagatgatgcttgaaagaatttcgggaaaactccattttttgaggctctggttgactaattgtcaacttgggtgcaaggccaatctcaagtgtcaacctaggcactgaaccttgctttttttgcccaaaaattgttgtttttccctagaaggacctatttccatatttttgatgaagatggtttcaatgcaaaagtcagataggatgcttggaaggtgcccaaatagatagattgtcaacctgggcattaggtgctcggggccgcaggtgccttaaaatcaacttgctcagaatctcattatgatgtctcaaatatgttcgtggtatgtcaagtcaatgtccccatgcatgttttgcaaaatttgcactaagacgggcccaaaaacaaaaaccctagttgaggatgtcaacctgagcaccaggtggaaactataggcacctaggttggtttccgtgttgcaggtttgtgtaatttcaactcctcgacgttgtcttaggttgcttcatgtcttcatggtatagaatagtgaaagatagtgagttggatttaagttattaaagtacaaactttcattttggagctctcaaagttaacctgggcgcaaggctagggaaccctcccaggtcgacgatctacaacttgggaatactcaactctgaaatgtcatctttcttcccacacgtcaaacattaatgtccacatcatcagggttagtttctgagttaacactcccaaagtaagacttgtagaaatcttctctcaaagatagcggtgcttactttctctcgaattaagacttgtagaaatcttctctcgaagacagcagtgcttacttcctctcaaagtaagacttgtatgaaccttctcccaaaagttgctctttatgttcttcttaagaatgtacctcatataaaagtacttataaagacacataaactcaccaaggaataatagaacgactatcatttacaagggacactcacttataagaatataagaaattaagaagtagaagagtttaaccttttgctgctggttttggtcatgtttatagtaataaatgacacctaaatccaagctcaaaagatttaaattgaaagagaaaacattaaatggttttctaacaaaaatcattaaaatgatgaaattctgtttgagatatggaaagtgtgcagacaaaatcctaatatatctagttaacattgttagtctagactccataaaaagtaagttcatccatacgaataatagatcatttcagaaaaggaacaaaataaatcaattacaaataaataccattatatagatatagtatttattacataataaaatattttattctttctatctaaaaacacaatatgagtaacaatatcttctcaattaataatatgcgacaggttgtgttttacaagtaatgaaacaattaaaaaataaatgaaaaatatttctaaaaagaaagtgagactttgtacaaatagactgttaattcattcacaacaaagttaataaatataaaggcacaactgtacactgtatcttgattagaaaattaacttttttttgataaacaataaatataaatacttttcttaaacataaaaagaacataaaaagtcaatcatgataatttaaataaggaaattctatattaaaggagaatattgaaaagctttaactataatacgtagagagcttttttttttttaaaaaaaaaaaaattagcagtgttaatataattcttattttgaaagagaagttgttttaggattgtattacaatttatataaaatactgacattatataaatattagtaatcaataataattctgtaaacccttaaaaacaaaagtgaaaaccaaaaaatcataataattctgttcaaaaaatattatcttttatttaaatcaa

SEQ ID NO: 315755 - DNA, 1307 bp, Cannabis indica
ctttatcttaaatggttttaaacggactagctagtgtgacgtctcgggaaatcggggtgttacatgttgttcccaatatcatatgctccaggcctaattgtcctgacatgtacaatctttatccgctcgctctcatgactgctcagctttagctttgccattacctatacatgcaaacaacatctgtgagtcgacaaatttagtaagaaaagcataatcataatcataaatataactcgagttataattaggcgcccacacacccaactgtaatcatatcctcacaccctaggtagtactgagtctagaacgttcatacgataatagtatcgaccataatattagtttatactcggtactctagtcatactctagtcgtactgatgtgacagtatcgattagtatttgagccaagcatacatctatctgtatccaatacaactctacgtatattgatactgctatcgatgtaatctaacaagcttaataaacatgtacggtaaacatgtaaacacatatgcatataattatactaatcttacctcgtttcttaattcaggtgtactgatcaacttgagtaaaaaagctactcgatgacttacaggcccccaaatcacaatatttgtaaaactgatgagtgacgcgctaaatcacttttcgaggacttaaaataaaagctaaaaatttccctatcgaagaataacatgaaaatactctaaaaatcccgaaaacatgaaaaattagggtgcccataaatgccccaaccgttagaccaattcctaatcgaaaaattggttatgtgagtgtctgcctggggatgaaccgtaagaccagttcctccaggtccaactaaactggtcgatcggttcagtgcaagaaacacaaaaacactcctaaacaaaataaatcgactccaaacgtatctaaactttccaaacctccttttatggccacaataaacctaaatcaagcaatagaactgaatacaacaacgacaaaccaaaatcaccatgagagagaaaattttgagctctaaagttcaaactttactcaaacataacaacattcaaattaactccaaactagctcaaataacttataattaacctcagaaatcatgaccaaacttaaattacacctacagtaacctaatctcgaaaattgcatgaaacacaagctttaaatccttaaaaactcaagagtaagagagaagagcttgcttaccttaaatgggaacatagagatgcaatcaaactttgctaaatcaccaagagaggatgtaacgccctaatgctaaggcacgctac

SEQ ID NO: 315756 - DNA, 750 bp, Cannabis indica
ttagatctcagtcaatgtgattggtgctactcaaaggccaaggcacttccttgaatcaaattcattatgtggaaatgtggtacacactctgatcagaaatgatcttcctcacttaaactaccattacaaatttctctcattgatacaacttctctctctaaaattctctttaaaaatttcactatacaatcaatgtctcatttctaagttgattaggtttggagtctaatatatatagggtgagaaagagagtagataagctaaagtaagttgtagccgaattaacaaattttgttatgaactgtttagttgagtcttgagtcttggacttagattacttgttgcaactagctagtcttcaaatgcaataagagttttaatagatgagtcaatgaatgttcaaaagaaatagggaccaatcctccccaattctccattttggtttctatttcctttgagtgtaacatacaagtgaattagcaactaacttggcaaagttccaggaatcaagtcttgatactaagcaagtccaatgtagcatttaacttgctaacttgtatcactttaatgattagcatatctgcatgattgatctttgtggccattttcaccccttgatgagtcccttgttaactatttgtcttacgaaatggagtttgatgtcaatgtgtttctgttggaaattattttaccaggatcttagatctactcacaagtatgttttttaacatcctaaataagaactttcta

SEQ ID NO: 315757 - DNA, 1877 bp, Cannabis indica
tgattctttgcctaagaccttactggcaacgggttacaattatagtctgatacttatgtaattaatgagttatccataaaagtaatggcatcgattcacatttccttcatcttgacacgtgtccttcattgaggcggcaaccgaattttgggtataacaatgtcatactacatcaataacccaaatcgagatatcgtacaccaaataatgggcatcaatgaactacactagcaactattgattaaagattctataactttaataagttgcacactattttattcatggctaagtgaccttaattctccgtacaatacaagtcacatcctcatatatgaataaggaatttttcaatatttatatttataattttttcaatattaaatatcagtaatttaacattaaataaaaatgttcaagttatattgataaatataaataatctttacaaacttttcattgcataaaccctaacagatactgcctcgacagccacccaaaacctccaagatctcactagcagactttctcaatccaaacccccacgccttggtcatacagaagataaaaactttatggatttgaaatcagagtggagcgtaatcacatatcatccccattagatccaagaactcataagattaggctaacaaacaacccatgcttcgcctttaagaacccacttccggtcagtcatcatatctcgaataataaaaaaaaagtattctttcctctcgttgttaggtttatttttatgtattttttagagtctaatttagggtgtattttagtctttttattattttattttgcagatttatgcttgggttttttgtgtgttttttaggaataatgttatgagatccttaattttggtaattttggtcattttggtgttctgcaagctttttctagcaaaaatgaaaaaaaatctaatgatgaaataaaaattcttttaccttagcgtaatttcctattttttaaaatggatcaaatattgaatttttagctcttaatttcgtggtcaaaaagaaaaaaggaacaactttaaaaaaaaatgaaatttctatgttttggatgttcaaaatgctcagttttttgattgaaaataaagtctcaagattcaagcgaatttttgactatgattcattcgcttaaaggataaactttctgaatgaaaattctagatctttcttttatctttcaaaaatatacttgaatcgtctaattctgagttatatatagaatgttgtggctaaaatactattggtcgttgcaatagaaaacaacaaagaaaagaggaaatcacttgtaataggaaacttcaatttttggctctatttaaagggggctgatgccaaagctttgggaccaatcaaaaatttagaggattctgagtgtagaaggaaaataaagagaagaaggcactggtggaggactccaaaaagttttctttctcttccatctctatcttttatgtttttcattgaatttttttattttagaatgtcttttagtagctaagttcttttaaggattattatgtgaaccacttgagattattttatggattaatatgatgatacaatttcttctacttctctttattcaatttctattcaatctgttttaattttacaattatttactggccatctataatcgttatttatgaattcaagtcaaaagtctaaaaggtgatatttaaatatgctctgattgatattgataaaaattaatttaggacaaaagtacctaggttgttggtatgattttattagttactatgttttatgtgatttgtgtgattaaacttaccatagaaatataggaagtttttacatagattgggtttataagtcttaaccagattataa

SEQ ID NO: 315758 - DNA, 2647 bp, Cannabis indica
tcctgaagaacttcatccagtgggtgatggaagtagtttcaaagacaaagttcagtgacgatatgaaactggtagctttcgagtctggattaatagtaggttccttcttgtggagagaaactcaaggaaaaagagctgagacgttgtcctagttcttgtccaaagctcaaggaactaataactaggaagacacttataaacaagcttttggaatccctctaacacctactccaccagtagtaacgccaagttttaccctgccagttctatctctagtagtcacacttctaggaacataatatactctgattgtctacaaactcgctgcttccggacaagcacccacacaaacccatttctctaggtatggagtggtatagacttgatgcaatatctctcccagacacttgaagtaacatacgtaagttccaaaaagaagtgtaagccattccaagagcaagctaagcagaagaagttagaataagaatgatgctccaattaaaccaaggaaagagtatgagcccaaatttttcgagtacacaattttggttgatactcgagaaaatgtatataatgaaacctccaacatggtccattaccggaagcctccgaggatgccctaaggaggaaaacacaaaagagatcaaaataagaggtgtgaatatcacagagacatggggcacaccaccaacgagtgtgacaacttaaaatatgaaatcaaaacgctagtcagagcttgacacctaggccaatggatccgaatcctgattatcatttgttgacaagggatggtccatgaacaacttctcattttgggacaacaaagaactgtaaaatcatccacaaggggtaggtcttcctcaagctcccaaaacacagcttctgatcctacctgctccgccagcacatgctgctttagctctaggaccagataatccacatccactaggtttagctccaccttttgttgatggtcatgttgccaccatttctagagggccacacattgcaggaagcaaacaaaactcacaaaagagatatttaaaggagttagagcgtgagggataaatgtgtggtttagtgcaattgtaacgccctaatgattaggcatgttatagtgatcttttgattactgtgtatttcttcgctaatcaaagggttttctttaaagtgataaattaaaactttttgaataatattaaactttaataactataactatataatcatagaactaagtcaggatcctgcttttaaacttgcttacatattcaaaataaaccttacaaccatgccgcacagcaacttcaaaataagcctaagttgtcccaagactgaactctccaggtcacaccatcatgacatgtacaatcatctttgacctctagactcattactaatcagtgttagcctttcttttacctacacatgcaagcaataactatgagttgacagactcaataaaaaaagtatataacatacaatatactactaacttatatttaggcgcccatacacatatccacaaagcttaacaaatgattaagaacgttcgtaactaaggcacgacctctgtaccacatgcactacgtactgctactgtaatagtgttggtatggtttgaaccatactccgagtaccactaagtgttgtaccacatgcactatgtacccaactgtactagtattggtaacactggattatactcttaaaattaatatattgtaccacatgcactcaatactgctaccatgctagtgttggtagcagatgagtcatataacaacatgcatataacatacatacatatatacatatatattctatgctagtcttacctcgtttccaaattcaagcgtgccagtcaacttgaatagaaaatcacttactgaacggaggccctatgtcacaatcacgtaaaatgagtaaacaactttctaaaccttttcggtgatctaaactcgaaactaaaaatttccacatcaataaatagcatggcaaaaccctaagtatcgaggaaacacgagaaaaataatgaaatggggaaactgcctgaaaaatggcaggctatttctataaaaataggaggctttttttttgggctttacaccagtacgaaaacgacctgctatttttcactgtagaaaaacaaagagcctcaaaacatgctcaaaacaaccccaaactcgaatctaagctttagaacccctagtatcatcaatataaaccaaattcaagcaacaaaaccaaatataaccaaaaatttcacaattcaccattatttaggaatgtttttgagttcttgaatcaaacttgctcgacaacacaaccagcccctaaaaaaacctaacaagcttaaatcattaattacaaactgcgaaaacacaaaaaaaaaaaaccaaaccctaattcatacacaaaaaacgcatcattttgcatgcttaaaccaaagaatactttccaaaaacttaaggagaagagaggcctagtgttgcgccctgatacttaggtgcgacacagtgattttctaattaacgtactacctttgttaatcaaagggttttcctcaaaagttgtgcctaaataaatttttgatttaaattattaaactttataaacatatatatatttacataaattaggatcc

SEQ ID NO: 315759 - DNA, 658 bp, Cannabis indica
atgccatatttatcataaccttaataatttttcccatatttttgaaaatagcccttttaattatcttttttataaactcgtaaaggatacctccaatcctacatataattatattataatattatgcagggtaagtttatatatatagtacacttttttaaatatggaaatagtatattttttatttattttggcatttgggagaatttttcatttcaaattatttttataatcttgtacattataattatttagtattcaaaaataaatttcacacgtgactattttttcttattatatacgtggtaagcaattgtttgaattttattttcgattgtaaagtagtattctgaattttctaaaaatgtatacgtggtcctaaataactagaatacatgatcatgaaaagagatatacgaaaaagctcatttgaatgtcgaaacagatagggacttactgaaataacactgttttaagatgctacaaaaagtcttacttttagtaataaaacttgtgactaaaaatgaaaaagctgtgactaataataaataaatatttttatattgtgattaaaatatctatggctaaatgtattagttacaaaaatcacaatttgttatgactaaatgtattttttagtcataatatttgttgtgac

SEQ ID NO: 315760 - DNA, 1337 bp, Cannabis indica
catattaggatgtaaatgaaacatacttgttagtaaatctagatcctggtaaaatatttccaacagtgttgtgactaaaagtaaaaaagttgtgactaaaaaatttgtggataaaagtagtattaatcacaaaaattacaatttgttgtcactacttgtagtcacaatacttattgtgactaaaaccaaattagtgacaactattctatccaaatattatcacaagtaactttttgttatagctaaaagtcatttagtcacaaaaaagttgtgttatgactagaaattttcattaaaggtctttttttatagtactgtcttaacacatatacattagtagcattaattattattttaaatttaaaaagtaatttttcagtctatgctagctcaatatattctgccacatcaaatttgttttgcttccccaattaaattttagatttacattatgtcacggtcagaagtgctaataaggttgttattggcttagtaaaacatgctctatagagaattttttaatttgatattcactcacttatttactctattattgtaaactacttatacataatcgcaataattgtccttaaaaaaattgatttaattacaggtatatggttcttttttttttctaacaaaaaatagtttgataattagggttatgcgtgcaaattaatattgtatcaggagagtattatgatcaatttcctattacagtctcttaactaggcaacttccgtgcgtgaaaacacaaaccaaaatatttttttttttcaatttgtttttcataaatatatgtttgttatagttacagtatcaagatcactataaattttgaagaaatttaagtagtttacagtactaaaaataagtttgaaatattttaaatatgcgtgataatctagaataatatcaaaatctatatttttggtactataaagtatttcgaatgtcttgaaaatttaattaattacaagaatgatattactataacaaatattgccatgtgacgtaaatgtggaagtttactaagaaattgtataaataggttaaaattattattccccatacattagaataaaatgaaaatggattccgaattaaattttcattaatatattaatgaaaaaatagatcataatggtctaattgttaaaaataattaatgtgttttttttcctttatctatgattttgcaaaattaaaaaaaaaaagaaaaaaaatcttgtggcggttttaaagtgtttacattataaatagttggtagaattagtgttgagagaccatagtaattattttcatcacaaataaacaaacacacagtataatagatc

SEQ ID NO: 315761 - DNA, 879 bp, Cannabis indica
tacaggacacacaaaatacaacagagttcacttgaaactcaccctattgactagagtgaaattggctaaataataggccacttgatttgtttctctaaaagcaaacgacacaccacaaactggaggctgttgcataaccctaaaccctaaatttctcacttctttacaattcgattcaacccaaaaagagtttcagcctcacccaataccagcttgtaacccgattcgaatggctttcaattcagctacaagcgacattaacatgccaggcagaaagctcgctcctgcgcataatgaactttgccagtgttatcacgcacaaccaatccaatgtgtggggaaaattaagactaaagtgcaaaatcaaaatccaaaaaaaaattaattaccaaaatattagcaatgacaagaataacaaacacaaaacagtaatcggagaaaacagggaggaatagagtattaaaaatcagaaacgattaaaccagtaaaacgataaaatcaaaaataagatatatagtggctcaagttcgatagattgatgtgctctatagctctattccaattctggaacaccaccaaatcttctttattgattgagcaagaatatgtacaatacagccgagaggattctctcaaagtgtttcaactctcacactattacccaagaatcttcttcatcaagacacaagtttcttcatacgaaacccaagcccaatatctctttcttttctccaaacctctttctacccctcaatctctttctctcttaatctcaaagtctcatcttaaaactcttcaattcagtgtgcttgaaatgataagtgttggagatatttatagatctaggatatggatcctaaagtcggtggctgcacatgc

SEQ ID NO: 315762 - DNA, 1608 bp, Cannabis indica
agagtcaatatttctctctctcctctctttctataatatttttataattctctctttcctattgatcttttgcatgatttatgatatatagtagagcataaactgacttaatttggcaaagttttgttgctatgagacagggttggttcattttcatgtttgattaaatagataggcttgaatataaacacaagtgaatcctgtggatcagtcttattggggaataaatatttctgcatttcacatattggagataaagggaatatcagatatggctggctggctctaggagaaaagtagttagggttaatatatttttaattctatgtatttaagtatttccctattagtttaaatgcactactgatttctcttcagccgtagaagtggagtttattgatcgtgtaattacattggtctctgccaagtctaagtgattgttcacataagtgttgtaatcgtagttggattatttaaatatagtttttgcatatattgactcataattggatgtttatgtgttaaaacacatttgaaagctttttcaagagaaattttgagattacagaccaaatgtggtcgccttcctcgtcaattcaaattatagggctgtttgatgtttcaagtactactaatttacaatacaacagtaataataatatattgttcattttttgtttgtaatcatttggtgctaattttgtttaagtgttaaattgtggtgttaaattttgtagtgtctcatcactatttattttgtcaattcattgataatcattatattaagctgataatcttcttgtttatccattaatggcgatagctctcttcgatcgctatattcttggagaaaggcataaaaatatagttttgatattttgttcaacatgtaattaatctaatagtttccatttgcatctaaatggcttctagctggggaagaagagtctacgaaaagtcgtttacaatgaaataatagtttgttttctgcataatgtagggccaggaacatgtacatgatcaaacatataagcatgagatgatggaacaatttgcagggtcaaaaccacccttaatatcataaagaaaaaaaggtatgaatatgatagtaatatgattgaaatcacaaaagtgttgatcagactctgtaattattttcttaattgtatgatagcagatttcttatttgagcttcggattatagttcatgttgatcatccaaacatagccaaacttattggatatggggttgaaggtaatgcaccttattcttgatttgtctccacatgggagccttttatctattctttatggtttgttctcctctatataatgtctaaatatatatttaaatatttctatatacaactaggtgatcactatgaatttatatatatatatatgtttggtgtaaaaaattacaaattgttaaataaataaattaagtgtatactaccactattctaataaatgaaatatacacagttggttagtttgaatgactttctactattattgatgttctataatttgataatgcatgtggagaaaattatatgaaaaattgtaattttttttgcttacatttatgcttcattttataaccga

SEQ ID NO: 315763 - DNA, 1301 bp, Cannabis indica
aacaaaaacctttcattatcttcttctgcaactttgaccaatctctcaagcaaatctttccctttaaaaccaagattatgtatatcaacctcgtttgattctcctttagaggtagtaagaatgccttttctcaaacgagaataagttggaagcttttcaagagcagcccatttgagagcatcttcatcatcttcttcccttgaagatttagagaaaacctccatgttattgttcctccataacgaactactcgtacttctcatgctatttcgcaggctattacccgctctgtataaatcagctccctccattttcacccaaaacagagatcaatgtcaaaactcaccaatacccacaatcctttttatataaagtttgcaactttgaacctataactagccgaaaacatatacatacgtgtgtatatatatataacaatgtcttacaaggcacgcactttttcagctgcaaacagaaacccagatttattttctctggatgattttgatgaaatgaattacaactataaaatctatatatatatatatatataaataatttgtaggggaaagcaaaatcaaaaagaacttctagaagaagagggtggcaagaaaaaatctttcatttcagattgggtcagctgaatttaatgaatctgaaaaggagaaagaaataggatccatttaagcatagtaaaaatgatttagccgtggtcaaatgtcaaatggttttgcaaaaattagacaaattttaaattaatatatttcttctttttaaaaaaaaaaaattgcttaaaatagtaatgaaaagttaattttaatgtttttgaataattatttataaagttaaaaataaaattctttcttttaaaaagaaaaaaaaaagtaaaaataaaatctttggattttacaaagtatgttttatttagattttttttaatgattaatgtagtgatttgatcaagatttgggggtgtagaaaagatatgatggtcctataagtactgttttgaacgtagtatctagtattatttagagatgagactttatgattggttagtgatatattttataaaaattattatattaaattatataatacttgatacttaattaattgcacttatagcaatattacacttaagaaattactaggcacaagtaatatattttagtatttctctaaaaaataagtttttaaaagagttattgaacactattagtgtctaacatcttctagacgtgttgcattgcaatatattttctaaaaattattataaattatatgagactcgataatta

SEQ ID NO: 315764 - DNA, 1564 bp, Cannabis indica
tcattctgttcataacagcaaaattccatctaaagagagttagagagcgaggaagcccgattacccacatcaactagtttcccttgcagatcaaagcttatgtgggtttgaagctcaagaatcaatggctggaggtatttcgatccttattcatagtgtatatatgtttgatttaattccgtattttatacttaatcatatatgtttcagtttatacatataaatgtctaacagaattgtcttggtaaaatgatcagttatcattcattgctttgtatgcttctcgacatatgtgctaaacggacacttcttacacttgtgttcaatgtgactccacagagtactagtcccacaattcttggaatcagctgcacaatcagcttcacaatacttacattgtgctatctccctctcttcttccttaccatttgcttcttttaccattttttttaactatagtaaaatgatcccaaatgcctgacattcttgtcccttgcctcttcttttctgcggtttcttaattttagccttctttttttctttagtctctacagacttaatctatttttgcactttatcatccacattttcctcttcattctccacaagtaatgatctacaaaacaatacatcatacacattctaatctaaatatttatgataaaaatagcacaaaaaagtgagaccaaattataattaattataaagaaatatggtcttataatgaatattttggactgatcaagattacaaagttagaagataaatatatcaaacttattagaaattcttttgagctataactcaagctatgcaaaatttcaaatttcataaataatttacacaaaaaaaatataatttataggacttgctccactaaaagattcttaacttaattaataatattttcttaaatctcaatttctaaactaaataatcaagcttcgcacccacatagatttttgcattttatttaaacaaaagggtaggaaaaaaaatacagtaccaacagacattttatcaagcttcacacccagtgaatttgaaccattttatccgagaacagattattaattttatttttcatttttctgttgtatattctttatgattatcattattctcacaaaacaatttcaattacaaagtctcccaatcaatttttcatgcgttctgaaattaacttgtaaggtgattttttttaagaaacataaaatcaccaaggcaaaactaacgttaagttcatcaatattcaatagcatataacaatattaacaaataacatagtacctaaataaaatctcagattagatttagaaaactcattaccctaaaagtaaaataaatgttcaaaaaataaaaaatatgttaaacttaaggaataccaacagacaatgacagccggaggttgggtggttgactggtggtgctactacgctgcctcctctcccgccgcatgctgttacgctggaggtactgagctgagcgaagatgatgatgatgatggtcgccgcacgatgatgatgatggccgccgcatgcgaggatgagagagagagagagag

SEQ ID NO: 315765 - DNA, 1882 bp, Cannabis indica
cttaaaaaaaaatgtaaccattaaaacctcttccattattattattattattattattattattattattattagaaatacctaaccagttgttcttaacaacaccataaaactcaacatcagttaacagtgattctcaaatctaaacctatggcaattatgaaaagaatcattaagaataatatgtatatccctgtgattcgaatcagagagaaagacaagtgttccaaaaaaaaaaagttaggaaaaaagattcatccaattattattaacaataccccaatcaaacttttctaaaataccactatgttttcaagtaaatttgctacctaaaaaaaggtaagagaatatatttattcacaaaagattgaaaattatacctaacaaggaagatcctaaatgctaaatgaaagtcaccagtgcattgtcatattatcgcctcatataatttagaaaaatttacactccatactgtttaatcttattttatttaatttcactattacctaataattgttacattttactgttctattttaatactgatatactgtgtttttaataaaaaaatttgttgttctatttttaacacacgtggcagctcattgtatttgcatgtccttcattgttgttatatcatcgcctcatataacttagaaaaatttacactctatacttttttttcttattttattttaattttactattaccaataattgttatatttttacaattctattttaatattgatatactgtgtttttaataaaaaaaaaaaattagttgctttatttttaacacacgcaattcattgtatttgcatgtcctttttcattacattttatgttttaaaagagttttgatttgacgtagtgttgtcaaatttgtctaagttctatttttgttaatttaatttgatgatgaaatatatcacaccatttatactttacacgttcttatatatttgaagtcaatttactgttcttacttcatctcgccagaattaatagttattttctaggtgttctcatgttgctgtggtgattctgtctgtgagtgtaaaaaatagagactataaatatatttttcttctttctctatgacaattttttgaggtttttttttttttttactttgattttactataattacatttgaggagcttaatggcaaaatgattttgaagcgtgtggctcttctatgttttttaagtagttatttttactcaattgttttacatttatttttgtattgatttagatttattttaacagtttttttattttaattttttaagactgtacttgtaaatatagtcactattacatataatgttaaaattatgcagaaaataattagttttttttcttttgttttttttttttaaatttgttatagtagtattttaagttattttactatgattatttatttaacgtggatttcagtatttttttgtcatgtgttataatttaatgtgatcatttttattggtcgctgccattgtgttctcttaaatgaacttgattggcattgttctgtcttgtggaatcattaaacttgagttctttgggcttccaagtgtgtgtggtacataagatcttgcatctacgcacatcagcttctctaaaatagataaattttaaaaaatataaaaaaaattatactaaaaatacactacaataaatattctaaattctttcattttaaatttttttaaaaaacttactatcattcaacacactatatttatagaacactatttatttttctaaatattttattaattattttaaatttttataattatgtttatattaaaatgtatgtatattaataatatatatttaaaataaagaaaatatattaaaaataaaaaa

SEQ ID NO: 315766 - DNA, 808 bp, Cannabis indica
ttaggtgtaaattgatacataaatttcaagcaatgatccttacaaacatataccagctaaagagaaaaagcaattcaaactcaaagaggtaaagggaaatagaaggttacgtacagagaaatgggagtgattcgattgaaggatccttagtgtgagtgtttctgggagaggtgatgcagtttggatgggtgtagagctgaggccggtgacggtgacggtgacggtgacggtgacggagggacggtggcgatgggggactcaccagagtttgggtgtattgggttgctccggaggtatcgggagtcaatgaataacttatgtgagggtatattggtaaatcaattataaaaagatggtatatttcaatttttcaatgatggagactttttcatttttacacttcaaaatagattttttttttttttatttttacggaattcagaaacttctattgaacctagcgttgcaacctaaattgcaacaaaaaatcatatagaaacatctattgcaactagcgctgcaaccattttagaaactcaaaccgtaaatttaaaagaaaaaaaaataaaaaaaccgggtaattcctttaaatattaatattatttattttaaattaatttaaatatatataaatattaatatattatttgtaatattatttattattttttttgaacatatttttttttatttctaatattaggagtatatttaattttaatattcttaaaatttatatttattttatttaaaaaaaattatatttatttttctcaaatttttaaaattttaaatatttaaaaaaaat

SEQ ID NO: 315767 - DNA, 1131 bp, Cannabis indica
ctcaaagaccttagattcatttcctcaaagggaatagaattagccaggtcgaaatgatctctcttaaaatgcgatttcagaggagctctaatgttctccttacaaggcaggacaggaggaacacatccctcatcacatcgttgaaggaatgaaccacacatagaaaaagtatgatcaaacctcccgcagaaataataatatttttgaagacccttgtatttgaacagaagccacttagttctacctagatttctagaaaacacacgtgcatcccccttcgaataggcttagaaacatcaagcaagacacagattcgaaggaaaggaccaaaaatttcaagcagagtagttttgttgatctcaatgagatcaccaacatcatcaacaacaaaactagcaagattaggagatcgaaagccaaaaggaatataatgaatttgcatccagaaaggaacaaatgtaagctgatcagattgaaagagatcaagcccctcagggttagcgaaaaccataaggcagtgatcgaaatgccaaggttggccttcgataaccttgtgcctatctccatcacattcgaagtgagcaaggaggagcccagaatgatatccagtgaaattaacgggatagtataatgtccaagcctccctcatagctttgattaaccagtcaggtttgagagttttctgagtaagaatcttaacaactagacaataagactcagaagaagggccatttcccaaagaaaccccaccaaaatcatgaataagatcttcctcgtcattcaaggcaagatgacaaggtgaactacgactagaactcgccataacacagaagaaaaggtttttatagacagaaacaatataacaggtagagagaaaaatacccagagaagaactgaacattttaggcaaaataaagtgagatatatataggaaaacaaaataacctgtaagagaaagtcaatttcagaaaggatagaagataccaaataccatctcaacattaattgtagactggcgtgatccctcgatagcagaagtaatgatcgcccaaatcccctgagttctcctactgacggcgcgctgagaagaaagagaggaagggagacaaaaagggttaagaagagtctgca

SEQ ID NO: 315768 - DNA, 1513 bp, Cannabis indica
tgaagctttacttgcaaggtatgaagttcgtcaaagaactacacttccttatcatcctcaaagtaatgggcaagcaaaaatttccaacaggagattaaattaattttggagaagacggttcaacgttcatgaaaagattgggctaagaagctggatgatgcactatgggcttacaagacagcgttcaaaacatcgataggaatgtcaccctatagattggtatatggaaaggcttgtcatcttccggttgaattagagcataaggcatattctgggccatgaaaatattgaatatggacttggcagccgcaggagaaaagaggctgttacagctaagatctataaggagaaaacaaaaaaaatggcatgatagaaacttagtcagaaaagagtttcaactcggacaacaagttctattatacaattccaggttgaagctttttcttggaaaattgaaatcaaggtggtttggaccgttcacagtggttcaggtattcccatatgccggagtggaatttaaaggggagaaaccagagactttcaaggtcaatggtcaacgattgaagccttattgggaggccacattgatgaagccaagaaagttatccaattggtgcctctgtgagggaggcgtcccagcattttaaactttttactgctaatttttagaaataattacaatagtttttattttagtttttagttcttagtaaactttaattttaaattttaaatttttttagaaaaagttatgtaaaaccgtggaaatcgtgaaaactagtcaatttaatttttttttagtgtctaggaataacactttaatgtctagccttgcaggtgacatctaagtgagcaacaccacataagtaggtagagaagggaggtgggctggggcatgaagaaacacgggccgcggcatggtacataacaagcaggaccctgaatgggacacgggccgcgacatgctaaatgctatgccgcgacacgccccctgaaacatagttccagcttcgtccccaggtttttatttcaattttttttcaactaaaaacaccacgaacagcccccttttaacacacgaacagcccccttttaacccacgaataaccccttttaaaccaccaatttcaccatttttctccactctaccaccaattttttccaccaatctccaccattatcacccacaaacataacccaaccaccaatttcatcaaaatccacctacattactccaaatcaatccaaatttttcagaaaaaaactaaaccccaatattcattgtgttcatcatctttaggggatttcttggtgcaacaaagcttctatcctacaagtaactgttttctcttcactaaagtttggtgatttaagagtaattcattgtggattgtgtgatattattgtttgtggagaatggatatgtaaagaccgcttagtttaatttggaaattagcagttaatcacgtttaattatgaaattatttataactatttaaataattattatact

SEQ ID NO: 315769 - DNA, 1475 bp, Cannabis indica
ttggggtctctttagtgctaattctatatgtttgctagggttgggccaaagggtatataagggagccttagtatatgctgagggacatcagattgttaatgattgcaacacctacttcgtatcagtagattgctctacagacccaagagtggtagctcaaatggtcagacatgtggttgatctcacaaggtccgaggttcgagtccctcttgggtacctataatgcaattatagtttcctggtccctaaatttagggttagggagggagcctagtttaaaaagaaaaatatgattacgaaattatttcaatttttagatttctgtgtagagcttattaaattagtgcatgtatcttttctcttttcatgatatttttatcaacttataggcttgagaattatcaaatgcatttgattctctaatatgccgtattttggaagaaagccttcatttacagtaaaagggaaaaagaagtcttctgttacggcctcttgtatgataaggataaatttatggtttttaaaacctaagaaatgagtcaatagtagacaaatatagactgatcatgagttaatttcacatctcatggctattatttgctggtttccttgacctcctgtaaatgttacagcaataagaattgggagggtcttctagcattgtgcagtactgcatagtacatgcgttttggctttatgtcaggggaaaaatggaaggatatattaatgaggcctcaagactctcaaccttttggacagtagaatatttgtttcttgtaactagcttgagctggtcaggtgttgtttaaaagagtttgcttgtggagatttaatgtttgtttgctatgtcttaaggcattttatatatttttctcctatgtattttattccccttgcaatatatctctactttgtttaagatctggtagtgtatgggtacacctgcatttttaaagggatttggtcatagtgtccaagctagatatttttcagatgaaataatagtcatcgtaaactttatcatgattgttttccttgaggttttttgtgttttctttttgttgcagggataagaatatcgtctttgttcactatttggaagtaaaggtaactgttcttcttttcattttcttgttgcgttcagtgttattctggtattgatggttttgctttagccttcacattttctgttcgtggtggagcttcacagaatttatattactaggttaaatgtttatctcgttaatataaataaagcatatactttatagcttgccttctgggtgctatgctatttgaaccagagtattgcacttatcatcctcaacatttcgtctgtagttttttgccttttaataagtttaaaaattttatttaagtaaatttgagtgctaacctagtcacaccagtaggaagtaagtgtatgtagtggtttgtagagtgagaactatgttctaattagtattagtctacta

SEQ ID NO: 315770 - DNA, 2014 bp, Cannabis indica
gtttgtttttctgggtttctctggaggtacagagttgcattctgtaactacagaaaactgttttcagtaccagttttattattccgcatttaattaatcatttaattaaataatcaaactgggaatattaaaatacggaatttcaccatataattccatcatctgaataattatagtacaatcaccttctaaaacacttaaaaaaacatactacaatattttcttttgcacttatgttggaaatactttagtcaaaatcaaggttcaacaaaaagagctagaacatgccatttcacatttgtaagcaaaagcaatgtaataaataattgccaacattatgagtagtcacagaaaaagaaaataagaaacagctacactacatgcttaagttcaatacctactcacaaacgtcatcacttcgagaaccaagaagtttgacaaatatagaaaaagctccatgatcaattacagctttggagatatttgtgagagcccaaactgcttcaaactgcaggaaaatacaaatgataaaaataagacgcattcagcaagtaaataatatttggtacaaaaaattgcaaacctacaactgtagaaagtcctccctcattagaaattcaacaaaacaaggaacaacaccagattgtataacttcctcaattgtagaaattcacactgtagttgtggagtcttaaactccgaacaagaaccaacaaaacaccaagaacaacgcacaatgattaagaacatgaattgaacataaaactagcagcataaatcataacataaaccagcaataacaacaactaaagaaagcacaaaacaacaacaaaaacttacgtggttgagctacacaatcaaggtgatgatgagcttaatccacaggagaaagcatccttaaattggctgtggagatgaaattttattgatctaaacagaggttacaaaacagggatgaaacccttgtcacaatggagtcttgctccttacaatgtgtctcactagtgacactctcaaacaaacacaagagaggccatttacaactctcaaacactctctctatttctctctaaacccctgtctcttttcatacacaagtgagaggcatcccttttataggtactcggttagcatataaataacttaactgtcacagttaagttagtggggagagtagctaactgtcaaaaccgacaataataccaagttcaagtggtcaaacctcaacaaattccacctagtttgattacctaaacacctctgaaattatttccaatataagaactgctttctaattccaatgtaggttgtctccattaggagataattctttagctgattctgagtaagtttagacaatgtctaaacttgtcacttgtggtactctttgtaaagatgtctgcagggttgtcatttgttccaatcttcttgacttgaacctgttttgaactgattatatctcgaatgaaatgtagttttatatcaatgtgctttgacctctcatgaaacattggatttttaatgagatgcaaagcactttgattgtcacagaaaacaatgatgtcctcagattttatctccatttcatttgacattctcttgagccaaatagcttctctaatggcttttgtagcagccatattttcagcttcagtggatgacagagcaaccactttctgcaagtttgatttccagctaacacatcctccatagacagtaaaaacataactagttagagaccttctggtgtcaatatttcttgcataatctgaatcaacatagccagttacatatccatgtaattggtttctgcaatcaaatatcagaccagtgtttaatgttcctttaatgtatctcattgtccacttgagtgcagaccagtgtttctctctagggttggctaaatatcttcttgtaacactcatggcatgagcaatatttggtcttgtgcacaccactgagtacattaaacttcccacacagcttgcataggtatttgactcatgtacttcct

SEQ ID NO: 315771 - DNA, 1040 bp, Cannabis indica
attttaaaaaggaaaaagaaaaatggaagcaataaatattaaattagctaccccttaatgtgtacaagggtaaaaaattacctttaattttatcttgcatgcttttataaactctccctcaattttatacttaagttcaaaaggtattagatattccaaacacataccattcacttgagattaaaagatccaaacacataacatccaacaaaacataacaaaaaaaataataataacatctaacaagaaccaaaaaaaaaataacatccaacacataaaagtcaaaagacactaagcctttgcacacaaactaaaaacatataaatatgaaaaaagatgctaaaaaaatgcaagagaactaatttggtggaggcccaaaatgatccatgtatgccttctattgtgccatttcgtcttggatgttgtcaaaaccttgctccatgtctccccttaaggtgggaatgtcactccttatggtagccatctcatgttggagagtgaaaaattgagtgttcatttcacctctgaagttgttgaaattggaagtaattgaggtggaaaggttagtaaaacctcttcaatgttgaagtgaagagcttggggtattagaggcacttcctcttcggcttcctcatcgctttgagcttgggcttctttctcttcctcttcaccttcacttgagaccaagggtgcttcctcatgggcatgggacatttgtttagtagaaattgacttttttcatcttcattgaacttgtagcgcatagacttgaatgtgatctcaccaagagtgtggaatcattagattcataaacatcgatttcatcttcaattgggatacctaggagtgagagcaagtagctaagaagataaccatagggtaaggctcaaacacttcattgatggtttttaggatacgtagcctaaattaatttagttgtcatgcaagataatattgtataggagcacttgatcaaatgcacttaggaggcgtttggttgggaggaatgaaaatataagaataggaatgggaatgggaat

SEQ ID NO: 315772 - DNA, 542 bp, Cannabis indica
aaaaaatacaattgagtttttacaatcgtaattctattatataattagtgtaactctttgaacaataaaacaattgcagtacatgactcaaatttgtaaagggtgatcgtattttgcttttggtttatcattagtatttacgatcaaattaaacaattattttgatttgattttttataattcaaaatgtgaatttgaataatccaaatcaattcttataaatttgaatcttttcaaatttatatatctcttatggttatttaataaaaattatcagttaaatgattcttttttaattttttattaaatgtgtctatttaacggaaatagttagtccaatagttgttttttaatttttcctttaattagtgtctattttctgtaacagaattcttgtacatctacgattggcttttctaaatatacttatgttatttagttggattttattctaaataagaatttaccactatttatatattatatttatatattgctaaagaatttttctatttatttttttggtctcgatcaggttataa

SEQ ID NO: 315773 - DNA, 1910 bp, Cannabis indica
atttagtcacaacaaattgtattttttgtgactaatatatttagctacggtcgaccttttagtcacaaatttataattatttaaattttttttttatttttaatcagaacaaaaattgtaactaaaagtaacaaattttgtagtgataatgaaaaaaaaatatatatatattcgtccgaaaaaaagagaaagaaacttacgatcagttaaaatattttaaatttggtattagtaattatatttagtgtttttttagttatttatgaaaaatgccaaattaaaaaaaataaaagtaaatagtgacaatgactttccaatatatttgatacatctcaactactataggaaccattacctttcaattccattatttatatctactgcgtttgcgtataattttttatttaatattgataatcagtatctatattcctaacgttgacatatatatttatataatatgtgttcttgtttgatttatatatatatatgttcttacgtagtagtatatgtataggagaaacagtgtgtgctcatcatcatatataataatggcattttcatgcttatggtcggcaacaatgatttgtcactttgttcaccaatgtggtagttgtgatgtttatattatttacaacaatgatttatcactttgttcaccaatttggtagttgtgatgtttatattatttatcgtgtagtaacaaaattcataatcaaaagttggaatatattgaaatggaaaaatgaaaaaaaatttaatgtgtcacctttctttatccttgattagaaaactttttctttttcttttaggttgagacaatcataaatttgttttgttgtacatctatattcgcacattagttattttgaatgatgaccatggttgagagttgattatattagatttatatttgtacaaaatcaattaagttgatttttatatgtatcaagataatattcattgtttcattaattatatttgatgataaattatgtaataaaaataaatatttataaattgtcagattttgatttattaaataaatgagttctcaatttgatttttttaaattacttgtcaaaatattctgacaattaatatagtgaagatacgagttaaatatctcacctataaattaatgtagtgaagatacgagttaagtatttcacctataaattaatgtagtgtacgagcttcgaagctcactactcattctataaaaaaaaaattatctaagggagttagagagagcttgaaagctcaaatacccacgtgaactaagttttctttcttttttttttggtagatttaaagatcgtgtaagatcaaagctcaaaaaatttctagttagaggtatttcaatctttttcacattgcatatatatttgatttattacgtatttcatagacaatctatatgtttcatgttattcatagaaaattctaatagttggtatcagagtaaaattatatacttttatcttgattatattctgtgtttataccgctatatataagactctatttttttgttattttcttcgttaaaggatgaaggaaaattttgattttttatagttttaatacatattgttgttaggattactttttttcatcaaattctaatatttttatgcaactaaacgaatttatatatatacatataaaaaatcatacatacaattcttatatatagtatatatatttatttatatatatatggatatatttcaatgaattaatgattttatattacatataattgattaggatactttattctatttgtcctatatatttttaaataataaaatcatagtgcatggttgcatatatatatgttgtaattccagcggaaaaacattgaggattcaatcataaacctgcaataatctcaacacttgaca

SEQ ID NO: 315774 - DNA, 521 bp, Cannabis indica
gggtatgtttaagcaatcacccccgaaggagagtaactacccccatggatgtttgagcaatcacccctagcatgagtaactacccacaaggatatgtttgagtaatcaccccctaaggtgagtgaccgcccacaggggtatgtttaagcgatcacctctagggtgagtaattatccctaggggtacgatcaccccctagggtgagtaactaccccaagggtattttgaagtaattaccaccaaacgtagacacatgtggtgcatggttgtcgtcagctcatgtaagatcctttggtttcttatatttcccctatagttgttaaatactctcacgggtgagataggtatctacccccaaaagtgggttagacagccatctccccctaagggtaggtcatctacccaggggtagtaacttattctaggggttaatgcccaccccctacactcttatggtcgtaatatcacacccttgttacatatgacatggatagtgcaatacttgttgggttttgtgccct

SEQ ID NO: 315775 - DNA, 808 bp, Cannabis indica
ttttgtgtaatactagcttcttatactgcaaatgttgtagaaaatggtttataattattcttattttcaactttggatttttttttctttcagaatttataaggtgatgaaaattctgtttttgggttgatttttctttaattttttttattactatttttaattgatgatgggcaccaagtgtgaggttcatagtcaaaaagttgaattaggtgatttttaactgagaataatgaacttttacacctaataatatgcatagtatgcttacacttcattttttgttggaaaaatgcattttggtaatttaaaattatatttttgaaaaattaaatttgtataattataaaagaaaaaaaaagtaaaaatcgtataggtgtaaatgtaaataaaatataagaaaactaatttatgaaaaaactccaaaatttttacctaatacacttaaaatgtgaagaatttaagccactaagggtggaaaaaagggagagagtgggtttgaaccttagactctaatttattagttgatatgaatttgttttaagaaaacataacagaaaaaaaaaattatttttacggtttgaactttttttttttacaaaaatatgatcgttagaaggataaattgttcgatatttttttgagttattttgtagtttatttatagttgtcataatgttgatttctcgttcttttttgttgtcttttagtttatttataaatattttctagttgtcacgagattgatttctagttatttcttatagttgttttttctttttttttaaaaaaaaatgagaattcttat

SEQ ID NO: 315776 - DNA, 1163 bp, Cannabis indica
tcagttggttatttttcagttaggttgttattgtattttaggcacgtgttagttttctttgcttcagtattctgttattctgttacaacagaatactgttgcttcatccctttgtatcaagagctttgctctataaatattgtaatccttgcttcagttcaattcaatgagaaaacactttactctgtttcattttctctctgctaatatggtatcagattgatacaactgcttccgctttcatcttcttctctgatctttctcaagatcgattccttccttgcatcaatggccaaacacaatacacggagctctgtcaacgatgagaatggcgatacatcttctgatcccactcccaatccagacactaactctgctccaattccacaagccaccatagaaaccagagatcgacctgctcatgaggacttgtccagtccctatttcttgagcacaggagatcatccaggtctcatgcttgtatcctcccctctcacaggaccaaattttcaatcctggcgtcgagcaatcaccatggcctttgctgctaaaaacaagactgcctttcttgatggcagtcttcccaaaccttcacccacagatcaggctttctgttcatggaccagatgcaacaacatggtcatgtcatggctcatgcaatcggtttcccctgaaatcgctaagagcatcatgtactttaaccttgcatctgacatgtggaatgaccttgttgatcgctttaatgaaggaaatggcccaagaattttccagctgaaggccgaacttcacagcctgcaacaaggagatcaatccatcagttcctatttcaccaagctcaagtctctctgggatgaattaaaggagtttcaaccctctgctaactgtacctgtggtgctcttcagcgtctccaagagttttacaaccaggatcaagttcttcagtttctcacaggactcaatgaatcctataattcggtaagagctcagatccttctcattgaacctcttccttctatttccaaagttttttgctatgatcatccaagaagagcgccaaagaactcttggctctgctttgcctcctatggctgctgctactcagcccccaaatcaaccaagaaacaagaaaccaagacctcttgctctcattgtcacaagcctgg

SEQ ID NO: 315777 - DNA, 747 bp, Cannabis indica
ttttttagattggatcggatccatctgattatttagatccaatatttattggattggatctaaattttaatcttaattttcatatatatatatatataaaatctaattatttatccaaactaaataaaaatctctaatgaatttaattggatattgagtgtattaaattattagacacctcatttaacattcgatttttgatccaattagatattcaaaaataatatcaaatataatttgatcatttaaatatttaatatttgacggtcagtactagtaattgaatcgatcaattgtaattatattagatcaatttatgcacacctctatttttcatcattttctcttgaagtgatatctatggtgtggttagtctctttcaaaatgacaatttggattttcttttttattaaatagcaatcttatatatattttttgtattgtacaaattaatatcttgaattcaatgtttcatatttttttgtttaaatataacttacataaaattattttttaacacaaataaatgtataaaaaatagggaaactactttatatactatttttttttattttttttttcaaatttacggtttgagtttctaaagtggttgtagcgctagttgcaataggggacgtttctgttgacttcgcttttagccaacgacaatgagtctttttgataagcgataaacgatatgtcgtaatgagaatatataagaaagcaataataagacacaagaatttt

SEQ ID NO: 315778 - DNA, 1985 bp, Cannabis indica
ctcaatatcttaatcatgactcatgagctactctcattctaatcaagcccaattttaaaatagtccaaaaaaaataaaaaaaataatactttattaaaaaaataaaataatattattaacaatattttattttattttgttgaagataaaaatttgaaagatacatttatcagttatttttattagttttgacttaatatttattcaagccctcactcaactaaatttctagcttcgtcactgctcgtcagaaaggttaatctattagctagggtttcaaggagaacttagaatttttggcttttaccaatttgaatgttttgttatccatttaagcatttgcaatatgtaagcactgaattttagttttgttaattattgttacatatagtttttttttattatgttctggttgaatgatcatatggctctctcaaaggttctttattgtctttgctctttattttttctcttttttttcatttctatatattcttgtgtgtgaacattattttatttagcagaccaacaacaagagagctagcaattgccaatgaactttgttttattcctatacacatggggatatgagattagtaatgcaatggctggctggttgctgcttctagtatttattattcttatacctaaatttaaatgattaaacttattaggatttctttttgcgtaatgtggtgactctgtacattttctggactgtgtaggtacacacgcccatagcaggtccacactggtctttttgttcatccatggtgagcattttcggacatgatcattattgcttagtcaaagatcacaacttaagaaagccatatatagtgagcaaattcttcattatttttgttggtttggatctaatcaaaatgaatagctggttattatcatttctttaatattaggatgcaactatataagtaaacattctgtgatgcatcacaaagtactactaaataatctaacaattcacgcaatactcttaagctttttcttagtatttgctggatgttttggtttaacttagtattctaatcaatccaatgtatataattttgttcctaaatattttgatgcgttttacattcatgatttgggaaatcttagtgagcacccaaggatttttagctctattctgctcattatttctgttttgatattgttttcagtacttgaagtgaaggtgaagtaattaaagtggattatcatgttagattctattgtttttacctttgcgtaatcacaatagcataataggtacagtgtccatcattgtgggccacgctgatgttagtgatgcaagtgtgtggcccaagctacagacttttgagagtaattttatttgtaacacatgtattaaatatttgagttaattaatatacgaataattagattttattaaattgtaattacatcaaatttaatttgtgacatttcatttaaagaaaatacaaaaactaacattaataaagtgttattattaagaaattgtaacattcgtatatagttattgttaataaattgtaatgatattaaaatataatatttttcaatgatcatatcataataatgtaattaaatattgttgcccctgattttgcccaatatacgtggaccaaccggacagggacacgtggattaaacatcttaatacttgaattatttgctaagtctttatgaaagaaggcagcatccgggacgtgcctcccggagaaggaatactgagcccctatactcccggaagcctaagtaacatcaaagcatcttcgcgaggcgtcaggcttcccctgagcagtcatttcgcatttaatgtcgcatgagaggaaacgtgttgggactgttacacgcaataaagtctgacggcacaacacctaatttgcacctgcgaagtaatgatcatttaagtctattgacggctacactgtgaagagtcacgtcagtcaagaggcaataaggacattccacataaa

SEQ ID NO: 315779 - DNA, 592 bp, Cannabis indica
tttaaatttttcttaaaatttgtcaggatagagttacccatgtaccctaccctatacttgttacggtaataccccatacccttcccgcaaaatataataggataatagggtaggcttgtgtagggtagagtatggatgaaactattttcataggatatggtcttggaataaacttacactacccatacttttttatgtagaatgacctcataaggcaggtcgaagagggaacactggtgcttgaaggcaatatggttattcttaccctggcgcttggcacaaatgaacacgatggacgttttaggggcatggggatgaacatcacctatacacaatattttaagatcccataccctaccaaaaagagaaagtggagagttgatggtgactgaaagccagagagcagacttcaatatagtctcaggaaataaatcatcaaagtcaacaacaactcaaggaacttttccaacatactcaacctaacaacgtggttgggacgtcacatgcatctagttcagatataagaggttcataaaatgaactagtgaatgtttcactaataattgtctttgctccaccaccagcgccacca

SEQ ID NO: 315780 - DNA, 966 bp, Cannabis indica
taataacagaggctcgtggactaaggatcattaacgccccaaccacgtaaaaaatcttcatctcactttcttacagctctttattataatcatattttaatagttgccgaaaacctcggtcaacaggtatcaagtgccttctagtggtttttgttctttacgcagatttgggcttgccttagcccttaccgtatgaggttggatacttctttaagctataattcgtttcaaagcaacactggtctgaatacttctattttagccagctgggctaccaatggttaggcaaccacaatagtaaggctatgtcgaaggttggaaggtacccttggaactacttcattgcctggggcatcaggtatgctagtcaacacttttagagggtgcccacatatactagctccatccctaacctccaattgagggatagggtaaaccacatcttgtctcttcctgtagaaaggcaggacatactcatgctagccaccgaggcaaatttcagaggtatgatctataccctcctgtgcctggtactgagagcattggaggcccttctaaaggtcctggtgacactcccatggtagagggatccagtcgagaggaaaggcctacacttgagaaggagaagggtgagtctaatgacaacattcccatggcaaagatgttgggttttgtgccctaaataaaactcattttaatataatcagatgttgcatggttcacatgatttatttcatgattatgatcgtttattgtataaattttattaagtccaaaacatatgtatttgtccatgattatagtgttgtcagcacagtggaatataatcatgattatatgatcaaaagtttaattccctaatttgtcagttcgctagatttagactggcatgatactcagcgataaggtatacttacaccttggatgttatgtcctttccagggtattggcaaagtttaccagtat

SEQ ID NO: 315781 - DNA, 1747 bp, Cannabis indica
aaaaaaaaaaattgaaaattattattagataccaatcatgcctttataatactattatgagatgactcattgaaaatagttagcaatattctacaaaatttattatatgaaattattaggatctactatgtggcttttagcatttctcaataccttttgttagttattaagggccaagactactagtgtgtggtatttgtttttgtgtttgtatattattagaatgattatgttatctaagaaaaaacaactcttatcaaatataatataacattttaacaacttcatagtaatttaatatgaacaacatcaatttgtgtgtacgttgacgtatatacgtgtgcaatggaattttgtctcaagtcaatgccataagctcgtagaaaagactcaaagatatagctcattttccagtcaaacatgtgtgtcaagaatcgagatttggtatatttcacactaagtcgtcgaatctttcaagtaaacttataagactaatttaaatgaaacgagcaacaactatccacctataatatttaatttattaatgaacaaacataaattttgtggagacttatcagctgaaaaaccacatacattctttatttctataaaggtaaattgttcctaaatattaaaaaatttaaatttgttagcaacataaatttaatgaaaatttttagtaatataggtattaaatatttaaaattataatttttcttcaattttcttaaaatcttaaacagatcatatatatataaggtttgtattttaaattattgagtttgaacaaaaatatataatattaattattttcaaattttcttttaataattaattcaaaataaaatctatattatattgataaaacgggatgaaaattataattttaccaacattaattaagtactcatatcgctacaaaataattaaatttatttcactaacaaactcaaaatttaaattatgtatgccacaattttatatagataaaaccacatacatacctataattaatgtatattatatgtgtcaaaattgagtataaaaacatatatatatatataactatatttaaagcctattatatatagtttagtttggtttctttataaaaaaaaatgtttatttacaccgcatactgaaatttttaatatattatgtaagttttatactgtgtactgtgttcagttttcactgttgttctacggttatttttttagttgttccgctgttgtttttagttgtactgtcttgtgtactactgttgttttataaaaaacacattattttttgaagaaaaaaaattcgtgtggcaatatactagattttaggcaaaagtttacaattttaccgtcacacagaattttttgcgaaaatactatctttctacaaaacaatctaaaataaccgtaaaacaacaaaacagaacagttaaaaacaacagtaaaacaactaaaaaataattgtaaaagtgaaaacttaacacagtacacagtatatgaaacttacacagtatttttaaaaaaaaaatccaccctacagtaaaaaagaaaaaaaaatcataaatttcagtatgtgctgtaaaaagcccaaaaaaatatgagaaaattacactcactatgggattttataagttgtttacttaaatatggtacttttaagtttgaccaatttatatgacatttttttatttttaggtatttttatggtattttatatgtcatatatatgtaaattaagttttcaa

SEQ ID NO: 315782 - DNA, 884 bp, Cannabis indica
agttagttaaaattaattatatatgtctttaattaatattaattatatcctgtaataacacactgaatattctctctccagctagagtctcattctcattctgactctcctacgtacgtacactcactcgctgtcacataattttcattctcatttggtacgtacgtactctctctctctctttctctctcttactctttcttattctcattcttgatgtatgcatggtgatcttgttctgataattgatcaagaagaaattttttaattaagcagacttgattgttatatattgtaatgatattttatataaatgattaatcttttttaatgtcattattctaaattcttgatgcatgcatgttggttttgttgaaagaagaaaaagaataatcaaatggcaagaaacaacatcaccatattttatataattaatctttaatttcttcccaagatcactatatatataaaaggatttttcttaaatttaggaatacctaattaaatttatcatatatatataataatatgctgtgtatgttttttcatttcagcatttcggattgatcatatctccagagctaggatgatggtgtacgaacatcttcatcaattgatggtatgtctattttttaacattaatgtccaattattaatgttatcaaattaattgaaggtttttaattttaaaaaataatgaattaataataataatttaaggttaaaatgagataaaatagtatttttaaagaataattagtatttttaccttctgaacttacgatactacctgattttgcctcctaaaatattaagcttgttaaaaattctctataaaatataataattacataattatactccttctgttaggttccgtttct

SEQ ID NO: 315783 - DNA, 934 bp, Cannabis indica
tagtatactaatccgtaaaactgtattcttaaattgaaaaatgacattttttcttgggagtaaatatacaaaacggattactaaatttaatagtaataaattaggattataatgttattttagaaaatatacatacaaaactagaaatttaaatgggtgcttcccattttaatctgcagaaccattcaattgttcaattttgcaattagttggagaagaaatactactcataatttaatacagaacttgcattgatgagtagtagataactaattcttattaatcttctattgtattgacatttttattttatttatgtttttgaatgtgaatgaaatggtggggatcttctcaaagcaaggcctgtaaaatgagaaagggatgataataatataacaatgtttaggtaattccaagagttattttttttcttatttgaaatgagaaatggatgataataatataacaaaattaatattaaataatattgaaattaagaataaggaaataaaaaaggtgataactagaataggttgaaagtgaggaaatgacagttggtgagatatctccctctccaatttgatggagatatctttgttgtttgagttgacctcccttagtcatagacttatggtcatagaactttagttttgtataattttgtcttgtggttgtggttgcctttaaggaacactccacattcatgatatacatatataattattgaaccaaaataaacacacaaaatcttcaaatacaatctaaaaaaaatacaaagagtacaaacgacaattctattcttctctttttagataaaataaaagaaatcttccctagttacaactcatttccattcattgcctaattcatttatcaatattgtttgtttgttttgatcttgttattttttatttttgatcttgtttgttttgat

SEQ ID NO: 315784 - DNA, 1393 bp, Cannabis indica
gtacaggcgtgtggtggtggtccgatgggatggtggtggtttgatgtggtactttaggtgattctatggattgtggtggtggtccaatgggatttggtggcaatatttttttttttatttttttgcttcggtttataaccgaagcaaaaaccttttggcgtcagtgcattacaatttgcttcaattatgaactgaagttaaaaacttttggcgtaggttaatgaatgaagcaaaaatctcaatatttgcgtctacagtaataacgtcggttgcaccaaccgaagcaaatactttatgtgtcacttaaaaatcgaagcaaaaagccctttttgtagtggtgaatctccccgaacacaaggattgaaggctacacaatcgctaaaattgaagccctgttacttgcatctgaatcatgaatcgagaaaatgaatcaagaacatgagatcagtgctattcttgacaaaactaacgctgattatgtctttgatttggatctgaatcttgaagctaatgtggctcagttcaattgtagtatgagatatcctatgcaaaattgcagtaattttaacacctctagaggaggtcatggtggtaataactctcgagaaaatggagctcaatttcagcaacctaattccaacaatcgaggagttccttctactggaagaggaggaagatttctagctccatctacaagagttcagttccaactctgtcattgtcttcgacacactgttcttgactgctattacagatttgacaagagcttcattggtgctggatccaattttactaaatagacacaagctcagactaacacagctcataactcgacaaatcaagtactcaaactggtatcctgactctagagctccaaatcactgtactctagatgctcagaacctgatgactcgaaccaattacaatgggatagacaatctatatgtttgagatggcacaggtttgtctatggcacacattggtcaatcttagtttttgtccaatactaatcaccctctcatcttgaataattttcttcatgttccaaaaatcactaaaaacttgcttagtgtctctaagtttggcagagaccacaatgtctactttgtttttttactctgatgtttgtcatgttaaggatcaagtgatcacccacaacacactcctggctggtgttcacaagaatggactgtattcttttgatgaatcacaagtccaattttagtctaccaagctgtcccaagtgtcaatcccaactcaaaaactgaagccaaaaccaacacgttcctgctcaagcctatgtctctacctcaaaaaataaagatagtcattcaatcaacaaatctcaattccaaatgtggcataatagactaggtcatcctagtgaaaaagt

SEQ ID NO: 315785 - DNA, 1452 bp, Cannabis indica
aagatcaattttctccttgtaatgcttgttgtctaggaaaaattcacaagttcccttttcttaaatcttctaatactgtgtataatgaacccctgcaacttggtgtcactgatctttggggtccatcttacataacatccactaatggatacaagtactacatacatttcctagatgcctacactaggtttacatggatctatttgctcaaaaataaatttgatgccctaaacaccttttagcttttcaaggctgagtctaagctccaattaggcaacaaaataaaagtattacaaagtgactgggggtgagtatagatctttcacaccatatctcaaccaacatggcatagttcatagacatccatgtccaacaacacatgaacaaaatggcctagctgaaagaaaacataggcacatagtagaaaatggtctaacacttctagcacatgcttcatgcccttaaaaattttgagataaggcatttagaactgttgtttatatacataacaggcttccaacacttgtcctacaaaataggtttccaatagaagcgttattcaatattaaacctgactacaccactttcaaaacctttggatgtcaatgctttcccaacattaggccatataataaacacaaacttcaattcgatcctcaccatgcacctttcttggatacaacattaatcacaaagggtttaagtggttaaattcatctgggagaatctacatatccagggatgtcatatttgatttaaagaagttctcccaatggttagctcaaacacacaaagtgctttcttgccaaatcgtttgatcacggacaatgtccttgttgcctttgagttgatcaatgccataaaaaaacagcaggccaaaaaggaattgcttctttaaaactggatatgagcaaagctttcgatcgcattgaaaggcatttcattgaaaaagtcatgcagaaaatgggtttagatgatagatggatatctcttattatgggttgcttgactacaaacagattctcatttctcttgaatcgagaggtcacaggctcactaattcctactagaggtcttcgataggattgcccattatctccatacttattttttattttctctgaaggtttataaagaatgttacagctagaatagaataatggtcatctaagtgggttcaaacttattactagacatactccactaatttcccatctattttttgctgatgatagtcttctcttctgtcgagcaaatgagagttcttgtcttgcaatttagagagtcttggatatctgttatgagaatttcaacacgcaagtgcacataacaagtagtaaactcacaaagagttaggttgatcccacatagattgtagttaagtactttaaaattaaacttttatttctatttggttgaataaaaattaagaaagaaaattaaaataagaaa

SEQ ID NO: 315786 - DNA, 623 bp, Cannabis indica
tgtaacagctatcaagctgtaaagaaaagagcatatgtatgttcttgtaatgttctgctgtataatttttcttattatcttattttttatttatttatatcgattttgtacttgtatttgagtattttgaagatgaaagtaatggttttgaagctgttattttttttgaagtgatgcgcgttttgccaaaatatatttaagaatatggttttgagtgtaataatttgacagtatcttgttcatgtttatgtctttgtggttacattttcaagggttggagactgcttggaattctttggctttatgttacgtagattaggaatgcatgtagtgaattcttttgcttttactattcaagggttaaatattttagctcattatcccaatttgaggaaatgcatgtactttggcggtcttcatccaatctaatctgcattattttgctcatagtgtattcgaatcgcactaagtgcagatttcatattttagatctaattcaatccacacaatagctaaaattcaattcaatacatattagatcgattattttggattagttactttttaatattaaattatttaatatctatcaaaaaaatatattttttcatataactaacaac

SEQ ID NO: 315787 - DNA, 840 bp, Cannabis indica
ggaccggccgagatagagagagaaagagagatgctgggagagtttgggggtatttttggggttttgaaaaaaaaggtatagtttttttagggtttaaattattggtttaggaatcaaattttttgattttctaagtatagaaaatcaaatttcccttttggaaaatatagagtctatcttgttatttaacaaaatagaaagtccaattaataaattttacaaaatacgaattacaaaatgatatttaccttataaataaagaacatctatattttaagaattccaattgtatataaataaagaataatgacaaaaaaaataaaactataaatataaaatatcccaatatatgcaatttttacattatagagaaatatcgttaaaagaaaattacactattaagacatactgaatatatataattatctggatatcgttaaaaatggtaaatcacttaaaataattcttaaaataaaattgggtcaaatgagatatccacaataaatagaatattattaatcaagtttgagatctaacacgtttgaaaaattgaaatctgattattatctgctattattctcaataaataaataaataaatgaataaatatatctgctgtaaaatgacgcgtcaataccaacagaaatttttggtcgtaactcggtgatctacgtgctctcatgaatttatagtttgataatccaaatgtaatatatttagcactaaataaattatattttaattgagagattataattaaatagagttacactagaaataaaaaaaattaaaaaactaaaaaatattaatgtaacaataacaacaataaataattattaa

SEQ ID NO: 315788 - DNA, 1865 bp, Cannabis indica
tccatgattttgatcatgtttccataaacaccagaaatcactctgagtccttctgccttgtggtcaaaattctctcaccaaaaaccttgacagtggcatgtattgaaacagctatgaaggatgcctagacactacggttccccattaccttctctgaatatcactctgacctgtttcttgtcacttttggttgtgagtgggaccatcgccgtgtcttggaagaacaactttggaatttcgacaagtccctcatgatttttgtgaatcctgaaggttttgacaccatcacccctctctaactgcgttatgtcccgttttggatccaagcccataatataccttttcgggaaaaaactccacaacttgcccaattcatatcggatgaactcggtgatttggttgaaatctaccctctgtccttgcttgaaagctttggcccctacctcagacttcgtgttcttcttgacattacaaaaccattgaggcatgggattaatgtctgtttctgtggaatctttgttacaaaatggctcagtttcaagtatgatgggttacataacttttgttattactgtggtcttcttgaccatagctataaaaaatgtggtaaataccttcaaaaatgtgatgagtgcattgttcctcccatcttaggctataaagacagcttaagaacccctgctagaaactcttttaaaaagaacccttttgatatctccaacttggtcccccttgacgaaattcttggccaggataatagctctgagcaaggccttcagcaagctgttaaccagtttctcaacatctgccccctaatatgaatccccaatccctcaatttttccccgactctgccccaaactacccaaccccaagcctcaccattcggatagggtataagtgacacttatagggccctgtcaaccatgtctccctcccctgttgttgtcagttcggtcatcactcacaatactcaagggaagagctcttccactcgggacaaaggaaagggtattgcctatggtaatgctccttttaattgttcggctacttcacgaagccatttcaaaggaatttctatcgccggtcctgcacaaatagcccctgctcccactgcaggaagaaagcgctcctattcctgacaaaacgttcctgttggtggattagttcgtagtatgctgaagcgagcgagagctgcccaggatgattttgttgttgtccctatcatagaacctcctgaagaataggtgggtgttgctaggcaaccccgcctagaaaaatgaatctcatcagctggaatgcccgagggttagggagacctcgtgcatttcgaaacatgtccctccttttgaagcagcaccaacccattctctgttttgttatggaaaccaaacttcaagctagtgaaggtgacaatcttaggattagattggcttttgagaatgtctttgaagttcctagagttggtttagggggaggtcttttgttattatggaacaatgttatcactgttaatattttaactgttggattttgtgcccttaaaaaacccatttcaatataatcagatttactaattaataaagatcagaaatcacattttatattgcatggttcacatgatttatttcatgattataaattctattaggtccagaacatatgtatttgttcatgattatagtgttgtcagcacagtggaatataatcattattatatgttcaaaagcttaattccctgatttatcagttcactggatttagactggcatgataatcagcgataggtatacttataccttggataagtgttatgtcctttccagggcattggcaaagtttgccagtatcggatgtatggagtat

SEQ ID NO: 315789 - DNA, 821 bp, Cannabis indica
aaatatttctacattttatttcaattttttttcttttatggatttcttattatttaccaaagagtagctaaggaacactacaaaaaatgtcacttttaccagcgcagtttgttactgcattggtaaaactggtaaaaattacttttaccagttacttttaccagcgcctctcgcaaattgcacaaaaatgaaagttttaccagtgcacatttgcagtgaaaattttttaacttttaccaacacatttacgtgctgagaaaagttatttttgccaacacttttcattttgccaggaccggctcttggcataggcgagctaggcccgcatctagggcccactcattttaggggcccaaatcaaaaaattgcctttttaaaaaatatatatttttttaataattttttaaaacactatttatctttatagtaagggcccaaattattttgtattaaatttggagctattatatctggtaggtgacaccaaattcataaaaccaaccttgttaagattttatgctttaattaaaactcaattcaatatgtatacatttattattattattattgttgcccctgattttgcccaaaatacgtggaccaattcaatcgcgacacgtagatctgaagagtatggctttgatatattttggctaagtctttataaacctagagggtcggccaaagagacacctctcggagaaggtgtgaggaaaccacgcactcccggagggcaaagctatagcagagcactttcgggagatatcagaccctctttgaacagtcatctcgcatttaatgccgcatgggagaaggcgtat

SEQ ID NO: 315790 - DNA, 1625 bp, Cannabis indica
agagcattgaattagctttaaaacacaagttgaattgcatcaattagatcaatatttagtgatttatgactattttactaaaggatgttttgggccaaacgcccaaggtgacatgtgatattaacctgaatgctatgtgagtgggaaaacgtgtcgagatgtattttttgatgcctaagtgatattttgacataacttagtccatttctgtgttgtggcaaagttgttcactaattcttgaagatgttattctatagaaatgagagactcgaaactacccagtttttaagtaaatcacattgttacaaatgtgaaaatatgaagttgtgaatttgactgttctgatttcatggctctaagttattgtgaaaaactagacaaacggtagagacagtgttacaatcagataatcagattccaacgcaccaggccatttgtcaacttggactctgggtgcttatttcggagcttctaggatgtcattttgatactttcaaggttttagaacttgaggaagaggtatcctaccctgtttttgagtatttaggagagaattctcagagcaaaattggaattaagtgatcgaaaccagcacaccaggttgattgtcaacttgggcgctaagcccatctccaggtcaacctgagcgttgggctcaattttcatgcccttgttattgtggtttctcctttagtttgcttgtattttcactaatctgataagggaaaaattctcaaaacactttttttgagaaactaattggaaatagcccaggttgacaatatgtcaacctaggcgttgggtccagtttgaggccacctggaagttttgtttggccctagaaatagttgaatcttaatttttcttgaaaatagagaatatatgctcggaaaacttctcggaaaacatccttcgaactggcccaattctagcacccaggatgtgctatttcttccccgaaagcacttatttcctaattttcgatgaaaatgaagaagatgcacgagtcaaattttttatttgatgcttggaagtggcccagattgacagattgtcaacttgggtgctggggtgcccgggcactaggtgttcgcgtgctaaaaaatgaaagttcttcaaatctgattctaatgccacaaatatgttcgtggtatgtctagttcatgcccaatgcatagtttgacccatttgcactaagatggtcccagaaactgaaaccttagatgaaaatgtcaacccaggtgctaggtgaaaccctaggtgccaatgttgactactgaggtgatgattcgtgtgttttcagctcccgaggcctggactagtttgcttcatgtcctcatggtatagaatattgaaagaaatgttggaaatattttactaggatctagatttactaacaagtatattgattaacatcctaaatatgaattctctaaaacaataaaaattaacaaataagggttagagaaaaccttacattgattgcagcagaataatatgactccttccgttcaagatctctagctctttattcctttctgtagcagagcattattaagatctgaacctggatctctttctctccttcgagtttggttagcaacgtcttactcactatgattgag

SEQ ID NO: 315791 - DNA, 776 bp, Cannabis indica
tactctctctctctctctctctctctctctccctctcatattacttgctgagcccttcctcctctggtttcctcgatccatttgtctttcccttcaatggcggctcccaggatccttagcagcgatggcagtgttaggttattgagagacaaagagaatgcaaaggaagaagaagacgattctccatccggaaagaagcccaaattcgatagatttcccctctctcgatgggagttcgctggtgccatcgatgtcttcttggtcttcagcgctggtcttttctgcatctacttgacgatgcttcctgccgagttcccctgattcaattatgaccattaatcttgctagagtttctcacatttgacaagataattcttcctaattttccaacttctttttggttttagcaagttctttagttattcaaatgactttagggtctagctcattgtaataccctaccccttctttattgtcactgtcaccttctgagtcatcctctgggtcttctaggtcatcttcattggtggaattttcatcaatatatttttcattatgttgagtttcttcgtaggatggctagtcacttcgaatgtatctcctaaaacacctcatttcccatgtacaataggaggattcacgtcatccatggagtgtccccatcacgaatggtagatttgccaactgtggtctttgttgcaatataaaactttgacaccacctctttcttcagctctcattaaaagtaccaaaatatttaccgagattttcgaaaa

SEQ ID NO: 315792 - DNA, 1372 bp, Cannabis indica
atatagtttgtaattattttatttaaattaataattagttataggttatacaagaaaaatgatattattgatgttaacaagtactatatatatctcgtgacaatgatcaaattatgacaagacaacaaataagtaccaaaaaaaaatgaagcctttcttttagttgacaatcaaggaaaaccaatgaaacagtaatgggagaagaagagagaaaagaactgatactagaagctgattcttcattaatgaaaacagagcaattacaattcatttatagtgaacacaacagaaatcaaccacttaacaaccagcaaaacaaacataacaaacccttaacaaactcctaaccaacttctaacagacactccatcttacacactttgatactcccccttaagatggagtgtaaatattacaaactcccattttggtcttgagtgtttgaaattgattaggcagcagggcttttgtgcaaatatctgctatttggtctttgctagaggtgtgaacagtctttataatcccttcttggaccttctctcttaccaaatggcaatcgatttcaatatgtttggttctttcgtggaacacagggttggcagcaatctgttgggcagctttattatcacaaaataaagaaaatattaaggacgcaagcaagcaagctgatatattattattattttataatattaaatcttatacaatttaatttaataaataatataaaaaactctatacctaattataatacaacacattaatataatattttagacattaaagtgcttaataatgtcatatgcttgtagagctgtgttaatcaactcaattttgttaactatctattcatactggagccaaattatgatcttgccaaagaaaataataaagaagatagagtgtatttcgaggtcatatttgtggaagggtcaaagcacatcacaaggggctgagttgattgcttgggattcggtttgccagtctaagaaagtagggggaattggatatttagaaaggtggaagagtggaacttggcagcaatgtctaaatacatttgggcaatagcgaacaaagagaacaacttgtggattaaatgagtacacaatgtgtacattaagggggaagattggtggagctatcaagctccactacaagcgagctggtactgaagaaagatagtgacagccacggagaaattcaagcacaatatcgaatttcagcagctgatgtgcgcaggggcggacccacattgtagcgaggggaggcagtcgcccccctgaaaaaaaaatcgagaaaaaaatgtatatgtattttaattagttacaacgtatatttgtattaaaagatgatatttatagacataatagta

SEQ ID NO: 315793 - DNA, 861 bp, Cannabis indica
ttgaacagggacttgggggaaaaataattttgtgcacgtgatgtggcatgtccacgtaagccaagacagagaacacgtggaatagtaccttgccaatagcaggacaaagtctccttaaaagacatggcagaaccatcaagaaataagcgagagaagttatgcaaatcgtcaagaagctgcacaacaatgtctaatcagccaaatggagtgtataggacgactaggatgagcttgtatggccggctagggtttgagcacaagctagctagccaaatgtgactttcaaaaaaaggaggggttcgttgaaccaaggaagcctgacctctacaaggaaaagttgtacaaagggtggccaacacctacaaaagttggccaacaccagcaaaggctagccaacacctacgaaggctggccaaaacttaccaaaactggcaggaacatgacatgccacaccatggcaggaacatggtcggacagaccctcgctggagcatggtcggctagaccccaacctacaggcattgtatggccggccagcctgcacctggcagatacatggtcgaccaacttttacctggcaggcctttggtgcacaaccttcatccatggacaacaagttaagcatcgaattagaccttggcagccaataaaaatggggagaaaatatcaacaactttcctatttcgatggataatttagtcatttaaagtttattaatttattatataaatatagctttatttgcttatttttaagggatgttaaggatttaagctctactgtataaagagcattagcctaaccctaattctctaagtctctaagctcattaaagctctcaagctctaagtttgaaacccta

SEQ ID NO: 315794 - DNA, 1084 bp, Cannabis indica
gccaaaagacaaaactcgaaccaaagaaaaagactaaaaaaccatgtcaaaagacaagactaatgggaaaaactaaaaagaaaagactaaagaaccatatcaaaagataagactaatgggaaaactaaattagtttcaacacataaacacgatcacaacattaaaattaattaaggaatgaactccttataattataaaccccataaaaatattaattggaattaaactaataatagtaaattaataaatgaaaacaaaaatctgaaacgaaagatatcattgagccgaaccgaaccattatcagacgactgctcttgaacccttcacagaaaaagacgttgacgttgtattcccttcttctttgtgtacagtaaaacagattttctcatgccgtaaagatccaattctcataataagactttcacaaaattcaatgatctgggcatggcattgatttgcgcgagaaatagaaggaggacgatgataataattttgattctgagactagatacttaattacaataatagcgatattacatgttgaaagaatactaaacactactattactttttaacatttttctatataataccttccaagtaatagagatcaaaaattgagaattactaaaaggcactagtattacattattttctggtaccattaaatatatatacacatattttattttagaataaacattattagcggtatctgttgtttgttaaatgacaatttactctatgttttttaaatagaaatatcttcagtcgaattttgttcagtattttttaggaaagaagttgaagaataattcttttatacattaatcaaatttatatcgattattaaataaaatttaatttaaatatatattcttttataagtataatatatccaaattactctcacatcctcacatcaagacacaatttcaaacataatagattgtgttctttgcagattgatgtgtaggtttgtgaaaaaattaagacaaaattttggttaaagaggaatagagactatcgtgataaaggtaaaattagtagaatgattgaaaaaaaaataaacataataaattt

SEQ ID NO: 315795 - DNA, 2654 bp, Cannabis indica
ccatcaaagttgacatcagcaaaacgtatgatatggtaaattaggattttctagaggagcttcttaatgcctacaaatttccagctagattcatcaaatggataacgacttgtgtgagagccacatcttactcaattcttatgaatagaagagttcaaggcagtttcaaagggaagaaaggtttgagacaaggggatcccctttctcctcttctctttgttctgataatggagtttttaacaaggaagttgaagatggcagccaagaagtcagattttagattccaccccatgtggaagagtctcaacatcataaacttatgttttgctgatgatctaatattattttgtaaggggaatatgcaatcaatccaggttataaagaagtgtctggaggagttcaaaggtatctcggggcttgctattaatacaggtaaatctcaaatgtactttgaaggggttggagaagagactaagcaggctataatgagagaattaaatctgactgagggtacttttcccctaaagtacctgggagtctctttgaggccgactaaatggaaagctgaagactgtagtgtgacaatcaagaagattaaacaaagacttctctgctaggcaactagacacctttcttttgcaggaagagcgcaactaattcatttagttcttcttgggtttcgaaattactggatgagtatttttatcctgcctcaaagcatcactaaagagatagaaaagttgtgtagtgggttcctttggggttgtaatgggaatagaagtaagctccatgtggtaagctgggagaaagtttgcctgcctaaacattatgaaggtttaggattcaaagaggggactaaatggaatgaagctatcatagctaaatacctttgggccattttatccaagagtcatgacttgctatgggtgaaatggatcaatgatatatatctcaaaaataattccatttggtcctataatctcaagactgatatgagttggtactggaagaaaatttgtcatgtacgggataaattttctagatctgatattgttaatgcaagtgctaatgggaagttcagaacaaatcagctttataacagtaaattaccgcaggtagtttgggattatagtaggagtgtttggtgctctttcatcacgccaaaacacagatttattctatggcaagctttaaatgctcagcttttcactcgagacaagttccaacagtttcacatcgtgttggacaatactgattgtccggtttgtggatatacaactgagacaaaccaacatttttttttttcgagtgcagctactctcaaatggtgctagaacagattgggggctggctggggaaaaagacttggccggttgagtatcatggatgaaaaattggttgattcttgacagaaggaacaagctgcacaggatccatatggtaatcttagctgctgtgatttacaatgtgtggattaacaggaacaattgcatttttagaggctattcttggctggcggctaagatagttcaggaaattaaacaagcttctttgtgtagattgaatatagcgaaaaagaggaaaatagatagacttgagagaatgtacatagagcaattatgttgtaaataaggttttcgattggtctaagcttgtttttgttgcttagatttggttgtaattgctcgtgattattgaagtttgttccttcttgataaaaaaaaatatatattgtttttttttaaaatataaatattattataatatgtattaagttttaattgtatacaagcagttctatcgtaagagtatacaccttacattataataaccacatgatctaaaatcaatgatcaaaaaaagttctagtagaaaatttttgctaggttttatcatagtcttaccctatatttatataatcatattcatatttatataattataaatgtgattgcataacctgcaattgtaaaattcattattgtagacttattaaatatttttttatttcaaatttaaatttaattttgcaagttattttttaaaaatagattttttctttagattattgtttttctttgttttctttatatattattttatttcattttctttcatttatatattaaatgtgggatttttcatttgttttgtttaatgaaatcaatatgaaaattaatatggtgtccgttgattatatttgtccaagtgggagagatattggaatcttgtatggactaatataatcacaaacataatttcatattcacaaccatgttagatgttttataaagagaccatatgagatttttccttcgcaacaactctcaagatattaagattcaatagatcatatcgttttattctgaatagtctcatgaatgttgtgattgaataaagatttacatctaagactatttaaagagttttaatattatgaggtaatataagacattgtatttgacaatcttgtactttaatcatataagagaagacgaatatgtaagacatttatatgtataatataatatatatgtatgtgtatataacatgcggaataaataaacatatacactatatgaatataaggatcgaaatacctccagccattgattctttgagtattaatcccacataagcttgatctgcaaaag

SEQ ID NO: 315796 - DNA, 1012 bp, Cannabis indica
tccacagataagacaaactcacccctcaaaggaggccgccatctacctggcacgcccaaaccagcaggcccacccctcacaaccgcccccccaccattgacgcccacactagccccttgaaactccactaaagcctccctcgcaagctctacaaccccacacaaacatgattgttttttcccgaacaagaccgaattccgatcataccacacccaccaccacaccattgaaaccaactcaaactcatccttgctaagcacatcaaataaataaacaagcaactcagccagagaacccacccgaccgcaatacagataatgccaaacccgaagcttagtccacaaaggaagtaaagacgagcaaaacactaacgcatgttccggagtctccgattcctccccacacctatgacaaataggctgaacaagaaccttgcgtctaataagctgggaattagtaggaagagcccgatgatacattctccaaaggaagatcttgactttctgtgggactttcaaattccacatcccattccaccaatgagattgggtacaagaagaggagccaaacctctcacctgcaacatcaagagccaccgcatacccactcttcacagtataagaaccattagaactataatgccagcaccaacgatccgcacaatcactactacccagtggtataccaagaatggcatcgacatccaattcatgctctttattaagtggttttaggggcttttttttctactgaaacatattatttttgtaattttaacataatattttttaaaatttagaatagtaaaaatataaaaaaggctgactataaaaatgtaaaaataacccaaaatgaatatttttataagatctccatttaattattgagtagccggtagtaacttcgtttttttagtggctcgattgatctcttattggtgcctgcagctcaggataaagaagtcgtaatttttttaaaaaaaaataataataaaacaggaaaaaaaaaaaaa

SEQ ID NO: 315797 - DNA, 4021 bp, Cannabis indica
gactgcttcctgcttccaagaatcgaccagttggtagatgctacagctggccatgagatcctaagcttcatgaatgcctattcaagttacaaccaaatcaagatgcatccaccagatcaataacacacaaactttatgacagatttaggcctgtactggtacaaggttatgccctttaggctaaaaaacgtaggggccacctataagagacatgtgaacaaaatgctaaaagatcgcattggatgcaatacggaggtgtaggtggacgcaagtccaaaaaggctgtagagcatgttgaggatctagatgaatgctttaagatcctacgcgagtataacatgaaactcaacccctcaaatgtttattcaaactaggctcgagaaaattcctgggcttcatagtcaatgacaggggaattgaatcaaatctaaacaagatcaaatcctttttggatatgaagtcgcccacaacaatcaaagaagtacaaagcctgatgggtcgtattgctgcactaagcaaatttgtgtccaaatccacggataaatatttgcctttctttaacatactcagaggaaacaaaaaatttgagtggacatgggagagtgaaaaagcattccaagagctgaaaaaacaattagctcaacctcgtgtcctatcaaaacctctggacaataaagaattgggtgtgtacctggcaatcacagaacatgttgtgatgcaatcttgataagagaagaagacagtatacaacatccagtatactacatctacaaaagactggtcgacactgaaagtcgatacccactcatggagaagctaacatgcagcttactcgtagcatcaaaaaagttaaggtcatacttcaaagctcatttgataagggtttacactaaccagccattgcaacaggttttaacgtgaagcatctgggcgactactcatgtgggccattgaactcgaccaattatagatcacatatcaaccaagagtggccataaaaggccaagctctagctgacttcatggctgaatgtataaacatatctcttgaaatgtcttaagattttggagaaaagcatgagccagagaagaagcgagagcaagagcagcaacaaaaacctgaagaattaacatggaaattacatgttgattggagttgcactgatcaactatctggtgcagtcattggcctcattaaacttgggagaaatagctgcatgggcaatcaagtttggcttcaaagcctataacaacgaggcgtaatatgaagccctaattgctggtctcaagctggtgcatgaagtacaggctgaccacttggacatatacaacgactctcagttagtcataaatcaagtcctaagggaatacacaactcacagtgaaagaatgattgcctatttgagcaacatccaagacttgctaagtcagctcaaaggctatacaataaggcagatccctagggaagagaaggcaatagccgatgcacttgcccatttagcaagcaataccatttccgacaaggcaaatttggtgccaatatagttcataaaagaacgaagcattactatcccagaagaggttgacatgttggatgacagtccaatcttgatgacacctattgcagcttaccttcaaactgaagccttgccaaaaaaaataaggaaaaaatgataagaaaagaaaaattgctaggtatctaatcctacatggagtaatgtccaaacaaggcttctcaatgccactcctatggtgtgtccctaagacataaactgagtggttattaatagaagttcatgaaggcttctacagaaatcatgccaaggggtaaagcctatccaaaaagatattttgatgatggttcttttagctaacaatgatcgaggattcgttgtgtctaaagattctcaaagatcccaagagctctacctaacgatctcacattgatgtagtctccttgccccttttccatctggggaatgacctcattggtcactcccaaagggtaaaataggtgtgtagtatgttatagtcgcagttgactacgtttaccaagtttggactgccatagaagattgtgttagacaacgagaagcaatttgacagtggcatgttcactgacttctacactagaatcgacatcatcaaaagcttccctattgttgctcatcctaaaatgaatgggtaggtagaagttttgaataagacactaaaagaaactttgaaaaagcatctagaagaagcaaaagacaatttccaaaaattgctcccaaaggtactctggtcgcacaggaccaccgagaagacaaccactaggcagactccatttatttaagcttgtggctatgaagcgatgttgcttgcagagctggtgccaccgtcttataggaggatgacttatgaccaagaagataacagtactttactagcggaattccttaacaaaatagaagaaagaagagaccaagtcaatctaaagttgtaggcctaccagcaaaaggttgcaaggcccttcaacaaataggtcaatgaaaataaattcttcataggagacttagtactccaaagtgtattcataaatactaaagatcctgtggtaggagtgttcggacctaactaggaaggcctttaccaagttacagaaataacaagtaagggtgcctagaagcttggcaagtataatgagaacaaggagttagttctccgaccaaggtattggaatggagagcacctccaaaagtactaccagtggtagtggtagttctattaactcatttataagagttagttttgaaagagctaagtcttcatcactcttcagtgatggactctatttggcatgtcgggtagggatagccactggacttcttgaagccgactttttattttgtaagcctgtagaatcaataaatgtacctttcacaacaataaaaaatattaaagaccaattgatgaataaaaacggtgtttcagttcaaaaatattgtgtctaaaccacttgctaacaagataacttcttaaagttattatttagttttagttccacatgagtacaactggtagccctcaaagaaaattcacagggaaggtctataaaacttggtgagttgcaagtgaccaagagaccgcaagtctgcttactcacttggggggaacccacacaatacaagcatcgaactagcacagtaaacttatgcagagaaatttaaagcttagtatatgcaaaaagttgaaagctaagtcaatgcaggcatacttcgctaaaaataaaaaagtaaatctggatatgtacatgtctaagcataagaagaaagcaaggattaaagaccgcctggtcggtcatatgtctatagtaaaaggctttagtgctaaacataagtagtgttcgaaaatagagggcctatttgctaaaacaagaacatgaaagccttagggctgaatataagtaatgttcaaatgtaaaaggccaacaggccatatgtaaacatgaaaataatatgaaataaaagcataaataagatactaatgaaaaatgtctactcgtgtgaaaatgcaagaggagtcgagctatgagctgcaacattcagatcaccaagaagttggccagccatgagatcagcagtctggccagcgatgagattagcaatctggccaaccacttcctccatgggctggctagccatagctttgccaagttggcgagatggcagtccctcaggtaggacaacagtttggcctgccccctagctgacctggtctactcgcatcctgctttcgtagatctccttcccttgagcgagtgatctcccaaggaaaggagaccctatgtagaagaggttgacattggggttatgcaaataaacatataagagcttggaggacaagcccaaatactcatctttgatggcttgttatccatcaagggcaagttgctttgccaggcactcgttctcaagctctatctctaacctagaggctttagcaacaagattggtcaattcttggttcctaataccaagtaa

SEQ ID NO: 315798 - DNA, 811 bp, Cannabis indica
ttttataaatatgtatggattggatttttttttttttgaaagaacaaggttcatgtggattggaatggatcggttacttttacatgtaaatcaacattcaatcctcacaagtacgaattttaaattttctaatccaattcaattcgcacaagtgtggatatctgcactttgtgaatttgatttgattgaatcgtacgaattggattaatggatcgactattttatgaacacccctaaatatatatatgctgaaactagaaggcggtatatcatttgtgcaattctttatcatgttgttttgaacattttggacttgccatcgtttctaataacttatataatctcctaaattacttatttatatccatgagcgctcgagtaatcattggaaaccactaaggattttgtgacgacctttattcaagttcaaataaaaatagaaactctacaaatagtgaccatataagaataaactcatcattaaacacttgactaagtatagttaaattttcaatagaaatacagtaatggatttctcagctcaattgagaccgaggtaaacttttcattaaatagcaaattccaatacattaggagtcaatataatggtgccaaatggcatacataaaaaaaaaggcaaacccgaaaggagagagaatattctctcaacaatgattgcacaataacaactttgccaactgtaggtgtagactctactgctctaaggtgcactagaaaaagagtgtttactcatcacacacacacacacacacacacacacacacacacacacacattcactcatagttct

SEQ ID NO: 315799 - DNA, 622 bp, Cannabis indica
tgtccccttttggttacaaatcaattcaaatccaaatatcatgggatctttttgtattttttttgactaaaaattcattttttaattaaattaaagtccaaaaattgtagaaatttatatttttcatatttgagcctaaatatcagtttaaaattgataatttttaatagattattatctattgagtttttcagaaaccaattaaataagagcttaagaaattaaataagtaaataagtgatggagatagagatttttacgtagttcgggtgttaattaaccctatttattggttgaaaggctttgatgtattacaatggggtcttacaagttgaagaaccctagcttcttgctatagtattttccctttggttttcctaacttagagaaaaagagagcttaagagggaaggtgaaccgttcgtcccccttacatgaaggtataaagggatatttatatgcttggatttggatccaggcatacccatggctcgctagtagggctgtacatcggtcggtttgggcagtttatcctatatattttctaacccaatctaaattttgggttgctaaaatttaagtgcaacccgcctaatttaaaaaaaaaaaaattgtaaaccgac

SEQ ID NO: 315800 - DNA, 903 bp, Cannabis indica
gtcaattagaggtcttaggctaaaaatatctacttagtacgttttttgtattattttttatgtttttgtatatatatatagtagtaaaatttataatacagtatttaaagtatgttttatttaataaatattaaatgtagtattttaaaaataaattaattttttttttttgaaaaaataattatactattttataaataatagttaaaatataaaatattgtaattttaaaaaaaaaaatttatctccttgttaggttttttttttccttaaatacggctttaggcgtgttttgctgaccctgtccgtgcttcaagagactgtttgaatcttattatcgaaataaaaaaattagactaaaatatttgtgtaaacgtcgaaaacagattagtttgggtgcattttcgaataatgtatgcatattttctttgatatgtcgtgtcccttctctgtcaattagatagcagaggacgaggtttttatctctttcacaatttctaagcctctctcctcctcaagtttcatactttgaaacacttctttctctctctctctgcacatatattttctcacctcttaccaacatggaggccaaccacagagatggattttccttgaccttacctcttatgtcagatgataacaagcaagagtataataataatggactaagtaccaagatagaggaagtagagtcaaaccattcttcacaggccacaggctcaacctctttcttcaaaacatgtttcaatggattaaatgctttatcaggttcacctttctagccagatgtatttcaatttcattttatgcctggcttttgtttctgaatctcaaaaatgttgctaattaagttgctttttcaggagttggaatactctcagttccatatgcattagcaac

SEQ ID NO: 315801 - DNA, 1819 bp, Cannabis indica
catatgtgccgatcaacctgagtagaaaattgctcgacgatagaaggatctaagtcgcattagcagtaaactggtaagtgtttattctgaaacactttctaatacctataaataaaatctagagcttttctacctaactacgtggtgaaaacacctaaaataaaacatatattttggctttaatttatgtaccatgttgtagtgcttttcacgagctttctaacgatatatataacgtctaaaacgaacaactaggtgaaaagttttggccaaaatacaaaatccatttttcccaaaactgtccaaccggacttccagttggtacaaccttgtaccattaggaatttcgattgtttgggtagattttgctcaaaaatcctcaagttttaaatccccaaaacttgctctaaatttctctaattgctatcaaactttccagaacaacataatagggtattctaaacacatatcacagctaagaaataacaatactgctcaaaattgaaacccgccattggagaccaagctttgacttttcaaactcaagcttggctccattagctacagctgctaactaaccataaatctaactattgtaaaccataaaacaagtatttaaacaacctctaactcaattaaaaccaaacaggatctaattcccaaattcacataaaaactaaagttcttcatcaaaatcaaagaggaaaagagtctaagagcttaccttgagcttgaatacaaatttccctttaattacaaagggagagagagagtaattttctaattttgatttttagtttattccttggcttttgttaaataatgaagagtgtatcatcaaaattccaactgtccatagtcctccgcaatacttcgagagtactaaaatgtactattgtgacactattggttaatctgtcgagtttctactattgtcgaataaaaataataaaaaatatcaaatttcacaaataacatacacctaaaattcaataaaacctccttagttgagagattatattacaaatgcatatttttcaaaataagacttattttcataaaaatgcacatataatcatgatttactaattaattattaatataatactaataatctattaatttctatgtctaataatgcggtcattacaattatctccctgttaaaaggattttgtccttaaaatctaacctgaacaactctagatactaatgttggatgttgtaccaggatctagatttactaacatgctgttgattatattctataatctaacaccctaaatatgaattcttaaaataataaaaataaacacatataaagttaataaaaccttacatcagtggcaggagaataatatgactcctttcactcaaatctttaacccttgttctattctgttgcagagtaataacaagatctaaacctaaatctccttcaggtgttggattcttcataatcttccacactatgattgagtaattgacttgatatgtgtgggtatgtactctatcactaaagggttcgaaatttatgaagagaaaaagaaagaaaatttgaaatctatagaaagaggctctcaatttttagttgtctgacagagaatgaaaactaggttatcaaagatggatgagaatgagagtcatcttattccttatatgagatttctcctagggttagatttaaattatgtggagttaaaaaagctaaaaatacacttaagtggtcggccatacaatgggccatactagttacaattttgtcattttatactataatttatcttttctttcactaataccatattttctaatttca

SEQ ID NO: 315802 - DNA, 611 bp, Cannabis indica
ttttactaaaaaaaaaaaaaggaaattatgaggttggcaattccctggcaaatatactcttttattgaaaaaagttataattagatatagtgttataaacttaaaaattattggaaaattacgcccgtttattttttttaagaaaataaaaaaagtgcataatttaaaagtaattacgacattagtagttaaaatattgctagtttaatgtttaactttcacaagacaaatttgattcatgttctcttgtataattaatgtgaggatggtgaattagtttggatgaatgatattttattttgtttaattaatatattaaattctaattattttcaatgaatgtctatattatttacaaaaagaaaaaaaaaaaaaaaaactccgttacaagcttgacaacttttatttaaaaaaatgtattattaaaaatttgtaattttttttgttgaaaaacaaattttatattcagctgtaaatacaggttgagttttttgaaatgacactaagtttgcatgagtttgagaggtacgagctcgagtatacacaaaaaatattatttttggtatgatacgacacgatgttataaattttgggtacaatacatataaaaa

SEQ ID NO: 315803 - DNA, 1670 bp, Cannabis indica
acatccacataattattaatatttataacaaaaatagatttttcttgttatttttttgttcttattttatttaattttactagaaggttttatacatagaaattttattgaatgaaattagacaaaagtctttaaatctaacaatctgaatagttcaaagggaacttttaacggccaaaaaaattcagggtggcatgatttggtacatgtcaaaattcggggaaaaaaaatcttaattagcctaataaaaactacaataaaatttaatatttactaattaatataaagatataataaaaattatttatataataaaaaattatttttatttttattttttaaaataatatatatgatttatatactcaatcaaacactgtatttcaattaagggtaacataattacatattaccctacacaaccaaacacactttacacatttgtattccaaatgccccctcacaaaaatatgattactactatcctacacagtaacacaatttacaagttttcctataatcatattatcgtttcttataaacaaattagggacacgattttgtcctgtaatgtactttcacggaatgtattccgtggtacattaaatgggtctcagagtacattagatgagtgtctgggtaagttactatttttttaacataaattacccctagattaatctcagccttcagatcaaataactctctcatttaacggctgtcgtacatcacataatacatcccggagacaaaatcatgtccgaaacaaattatgctaaataattataactctcatagaagtgtgagggcaaaagagtaatcatagaccaacctaaaatctttcttaaaccctaaagggagcttgagtgtcccactatttcatcgttgagagctcaaagctgagaagaagcttctacactctactacatacattccgctcttttctcttctctgatttcatatggcgaggcgcctgatcccattgttcgatcgtattttgattgagaaaatcgttcctcctgcaaagactaactccggcattcttcttcctgagaaaacttccaaggttactcttttctccacaccatttcttttatccgcatacacagatacatatatgtattattctataaaggttggtcgaaacatggctccaaaagtaattccaactccagctccctgattctgataagaaatgaaaagaaaacaacagtatttatgtgagctgaagactaataaattttgtctgttttgtttgtgatttctgttctcgatttatatgtttttcaactgggttttcgtttttctctttgttgttacaattgttctttccaatttttcatgttcttattatctgtacttgtttgtatatacttgtaattagtttggtcgtgcttgcaatacttatctttttgttttcgacttctttggggattttgatgtaagtatgaacctctttgttgttttcttgttgtcctcccattttcttattgaattttatgtgtgtttcctctcttgcgaatattgttgtcatgttcttgatagcctggcttgattaggtccttcattttactcgaaaaaaaggaagagaaactactagtgattaccttaaatttactgtcaataatttgtaaacttagtttcctaataagttaaagtcattactgtgg

SEQ ID NO: 315804 - DNA, 845 bp, Cannabis indica
aaaaaaaataaaaattaaaaaatgtttgcacaaaatatagatctaaaataaaaagaagactatatttttattgaaaacttatcatataatttcaaaataactgtcatcattgtatgtcacttctagtcactactacatttaatgatgtcatcagcgtatttcacttgtagttattgttaatatccttctctattggtttgctccgtacttaaaataaatcaaataatgattggtaagacttgaatttaggaaaatattgaatgtataatttactcagcccatttccaaatgagccagagtgtgccttttatagataaggtaagttgttacaatttaggctatgagcaacggctctttgacaggtggaagaatacataaatcaataaagattacaaaaagggaatatagtaacagaattcctaatgattgctccctaatgtttggaccacaaggacatggacgacacctgtccagaagggtgaaatcctctgtttcactacattgaacatcagcatgggaatgcagcagaatgatgacaactctatttctcaacacctcccctcaagcgaaagagtgaaggcttcactccgagtttgtcaacaagaaacgagaatctagagttggacagtcctttggtgaagagatcggccacttggtcatgagaaggaatatacctcacttccaattccttttcagtactttgtcacgcacataatgaacatcgatttcgatgtgtttggttctagcatggaatacgttgttgggttttatgccctaaataaaactcatttcaatataatcagatgtacttattaatatagatcagaaaataacatttaatgttg

SEQ ID NO: 315805 - DNA, 1625 bp, Cannabis indica
aaaaatttgtaccagggagttcccagggttcagatttgttgagatcaacatcaccaattgctcttgctgtaaaagttggatctgagatcttgttgatgagataaaaagtgattagttcttcatcggttgggtgaaatcgaaaacccggtggcaatttctcagttgtatccaccttgttatcatctgatgatccaccacccatatctctcctaatttcttccttttccttctgatgactacttgtttccttctattcatcatataataccaattacatttagtaattattattattattataaaaaaaataaaaagtctattacatattcatgaacgtgtacatattcctaataaattactcatacaattaattgaacagcaagaataaaaaatagtattgagaaatatgggaaagaatttctatatatacataagagtatagttatatagctacctttttggttttgcatatagagaataatcttcaattaggttttgacgttttcatattaagggtaaaaagtttcatagaataattatgtggtgttgaataataataataaacagaaagtgcaaataatgatgtgagagagagagagagagatcaatataatagattattgatacgtttagggtttcttgcttaccattctcaaagaaaatcgatgcagtagtactggaatttaagcttttctatgtgaagggtttaaagaaaagtttttgagtgtgtttttgaagctctcacctactatatatgggtcttcaaacacaaggtaggagctagattataaccaaatatatataactaagggctcatcatcactctctcacactgttgttattatatctagttaaatattttggttaacaaacataaaataagaaaattgggatgagatgcaaaggaaaactccgttttatttcatttatttgtttggttatattttaaagtatttttacatcattttagtggaatatactattttattattttaaaattaataacatgactactattttaatactagataagaaaaaatttatttctttttatcaaattttctatacattttaaatttgattttgttacatttctattctttatattaccattcttacatgtttatatgttttcattcattagtattccaactaaacgctaccttagattgtataattggttgatgggataaaaagaaattcattttcatttcacggagccaccctatacataacggggtcatgtctctccaaaattctaaaaatatatataaggaatatttgcggtgaaacctccttaacatttataattgttacacatatgatcctaattaaaaaaatggcagtaaaaatatcttatcttacgattttgttgcagccgtactatatttttgccgttaagtgtcaactcaaaaacaagtggtgacatattattagaccacatattaaataagctaaaggaattaaattaatatatcgtgacgtgtttcttagctagcacttaacatgcttaattggcacttaacagctaaaaaaaggtatgactgtaatgaaattataaaataaagtacttttgccaccacttttttttattagggtcatatgtgtaacaattgtaaatatta

SEQ ID NO: 315806 - DNA, 943 bp, Cannabis indica
gggcgtggccccgtggactaggagcaattcgaaagagttgatgataccacgtataaaatgttgtatgtcattttattttctacatttttacttactgcagtatatttctgttctgtgagattctctgtctaatagaacaagataaattctgttcaaacaatttactataggtttgcattttttaaattgtttgataattttacttggtaattataaaaacagaatttcatcagttataggactatgttacattgcataaaagaaaaataaatcgctcttactacagaatatatttaattttggaatggcattaggttcacaattccaaggtttgttaataatctattaagagtaacttccatagtcttgattttggatagttatgatgggcttcatacaggtcacatgcaatcatatagtcaatcacttcaactgaatttaagaaaggtgaattatttttggcatatttgaacactaagttggtttaagggaggtaaaacatcaatatatgggataaaattctcttttgatttaagggatttattctttggcaatattataatttgtctaaaaaaaatttgttacttactatttttgcattatttttgtaacatttcttacagggagagatctctctagagagtgcagttttatgatgttgattctagtcaggcaaatgtgggagataatgatagtcatagcaatgatgatatattgatgatgacacaactgatttgtagtagtatttacttattttagttgaaaaaattatacttatgttagtattttaatcatatgtttatttactaatttttagacaattataactatattatgcatgtataattagaacaatttaaaattatgctttattgtgtaactatttataattaagctttcttgttttattttttatttattttaatttaaaaataattgataa

SEQ ID NO: 315807 - DNA, 1791 bp, Cannabis indica
atttgggggatgagttcgactcgcgttagtgtttggtggggagattgttaactgataggccgggtgattctgatgctctaaaaaatgttatggcttcactgtggagaccgggtaaggggatgtacgttaaggagttagaaacaaaccgatttttgtttcaattttttcatgaggttgatattagtagagttttggaggggaggtcgtggacttttaatcggtcaccttttattatacaacgactgcatgagggagataaccctcgaaccataccattaaacacgatggaaatctgggttcaagtgtatgatttacaggtgggtttccgttcggatatagtcctgaaagcagcagggggatatattggaaaatatgtgacatcgtgcccaaagaatttcaatgggatctggagggattactatcatgtacgggtattgattaacattgaaaagcctctcacaagacgaatgcgagtttataagagcaaggaggaatggttctaggctaacttcaagtatgaaagggtgccgaccttttgttttatttgtggcttgatcggacattcagaaagattttgccatcgcttatttgatgaacctctggaaacaattgtaaaaccgtatggtttgttcatgaaggctcaggatcgtcgtccaaatcggcaaattggtgcacgatggcttcgggatagcatggggcagttggttgaggaaacaatgggtagatctccgacggatcaagaagattctcaaggagcaaatcatggagctaaaatcaaggaggtttctaatggagaaaatcgtggaggtataactataggtaataattccattacaaagtcaaatgttgggctaggtaatattttgggaaggaatgtaggacatgttgtcaatcctgaattggaggaaaatgagggagagggtaatattgaagatttggttattattgataataaaagaaggaggactcacgtgggagttgacggtgggcctttaggtgatggtggaaatatgggtcaggattttattgatttaaatgggggccaggtggatatgaaagtaaatgggcctgaggtatatgggccacataaggacaaagtagcagttggtgttgagagtagaagtttaatgccacaagaggttggaaagggcactgttgaggggaaaaaaggaggtatggttcaagtttgtattattcaaaaaaacgactttttggcgagtactcatgctgggtcccgccaatcattatgagtttgttaagttggaattgtcggggtcttgagaacccgcgggtgatgcaattccttgaggaaattactttctaaaagagacccgatcttattttcttatgtgagactatttgtaaaagagataaaattgagattttgaaaaaggtgttaggatttgaaggaagcttcagtgtggaggctcgggggcacagtgaggggttagctatgttatggcgtcaggaaaatgatgggaagttattgagtttagccaaaatcacattgatattgagctaaaacttagtggttcgatagtggttcgtgtgacgggttgttacggggagcctagtagaaatctaagaagcaacacatggagattgataagagagctagttcgacgttcaatgctcccatggtgtctcattggagacttgaacaatgtccttaatcaaagtgataagagaggagggaggccttacccgaattccttattgaaggggttcaagatgtggtgtcggactgtaggcttattgatatggctctttttgttcatccgtatacttggg

SEQ ID NO: 315808 - DNA, 726 bp, Cannabis indica
agttcagggggcatgattttgtacatgtcaaagttcgggagaaaaaattactaattagcctaagtaaaatgatgactcaaggcaaattgatcacttaggatcttagagccttaaaaaatattaaaatattagttgaatggacttgaggtgatcttgagaattttatttatcttgacatgtttaatcttattggcaaactcttttttatttgttcattttttctaaaaaaaaaaaaaagtcaattataataggatcaactatatttttttaatccttcaataagatttcattcttaacttataaggattttagagaaattaaattttgaaattgaaactatgtttgaattattttatatagatattatgtgtaagaaatatttaattgttttaataaatattttatttttctaaattattagttataagatttcaaattttactacttgttaattttggaggtgttcatccaatccaatccgtattattttattcacagtataagtgtgaatttcatattttggatccaattagatcagcacaaataattcaaattaaatacaattcaatttgcaatagtgcaaattaaattgatatgttattttttattaatatttattaaaatatgtttttttacattgctaattaacaaaaaattattatattattaaattattaatatttgttaaattattcttgttcatatatctctaatgacaaattaaaa

SEQ ID NO: 315809 - DNA, 565 bp, Cannabis indica
ggtgatcagcagaaggaagaagacttcgatgaagacattgatggtgatgatgactacgttgagaagaagaaggaagaagaagtaggtgggggaaattacaagggcaggagctgtttaccaaagctgaaacttttattggcaacttctacaaacaactgaagatgcagagggagggactcatggaagaagattcatggtttttatcagagagccttctaagctatttactaccattattcatgaccttggcttcctattattttgcttagtgtctaattactagtaactattgctattaccttttttttttcttcttttattcagtcaaggtaggcacaggggttggggggtatataattggttggggaaccattctattctactcatggttctttcctttcattattattgggttctgtacataagtaataattatcaataggtatagtatatatatatgttccttgtctagcaaggtttctatgtataggaactattatcactagacctcgatcacagtgtgtctatatacatatatttatatagctagctaggtccatgttct

SEQ ID NO: 315810 - DNA, 1737 bp, Cannabis indica
ttttataaatacaattaataataaacataaattaaatataattttataaatcaaaaaaataatttaaatatatatttataaagtcaatgtcgttggtacagtgccatgacatatatgttgtgcactgtagtcacacgacaaatatagggtgaaagttggagtctcgttagagacatattgtgcatcatataagagtaatttgcggtataaatacttaagtttaattcctagttgcaaataagttagagttaattacttatgccgtaaattactctttatataaatatacagatttaatcaactcaattaatattataaatatttataaaaaatataaaattatagatcaatctaaaaagttacattttaattctttttctgtaaaatacttttgcaaatatacttaagaaaaaaaaaagagtattgttaaatggatagaaattttatttcttatataaatatatttaaatttagaccttaattattattattttgtttctatatttttttattaatttttactatatttttttaaattatataaaaaataattaattaaaaataataaaaaaaattataataataaattaattaatatataatacaatttattgctcaaaaatagatgataaaaatataattatttaaaatatataatttagaattattataaacaattggtcctgaagcacaatttatttatataatttttcagtacattatgtgtatttcattatgttgcaacgtatacaacttcacttttaagtagtgactattcctgttcattttactatttacaaaattgtatcctttaagatttttatagctttcatcctttcaagtttctttttacttatatttagtttttaattattttttttatttaataatgataaataatatgattaaaaaaaattcaaatgagatttgagtccttcaaactatgattaaattgagtaattatatatatataaaatatatatatatatattgttttcttatttaagtgaatgacgtgaatttatatatgcaaatggtttatatatgttatttttttcttttttgatagaagatgattatccttaaaagacaaaagctatagcacatacaaatgtcaatatatataatatatcatattgtacttctctgtccattttaaaggttgcaaaaaaattatattattttaaacaattaattttgtcattacctttttttatttaaaaaaaaaattattaatattgaaaaatatgaaatagaaggtttatacacattctcaataaaatttaaaagtcacctgaacaagtgagtgaaataaggcataatcttttttacaacatgattgatgagacacaattgctcaaaaaaattaataattattaaataatataaaatattacatcatccaatcaaaacaaaaagatcataataataataatgatatgtgttaactttataagagtataataatatttgtgattattatttttagtaattatatttgtaaatattattatttaaactgttgaacgataatgggtagttacgcacgattcagaacgattcagaggattgatttttgtggaatgagaatcgttcactttcggttcaaagcgatctttttccttgggtttaaacatgatacaaattaggtttttcagctctgatttcgtacgccaaaatagagagagagagagagagagagagagagagagagagagagagagagtagagagagag

SEQ ID NO: 315811 - DNA, 565 bp, Cannabis indica
accaaggaatttcacttccttccaatagaactcgcatttctcctacttaatgtaaaatttttcttctctcagccttgtcaacaccttccttagatgctgcaagtgttcttctaaagagttgctataaatcacaatatcatcaagatatactacaacgaaccgatccaaaaattcgtatagcacatagttcatcagattgtagaatgttgcaagggcattagtcaaaccaaaaggcatcaccaagaattcaaaagacccatacctagttacataggttgtcttcgcttcgtccccactacaattcgaacatgccagtaccccgcctggaggtccatcttggtgaagtatgatgcttttgttagtctatcgaacaaatctgctgcatttggcaccgggtacttgttcttcactgtgactttattcaaagccctataatccacaaacattcgcaatgacccatctgacttctttgaaacaatatcagagcacgatatggagctttagagggaaccatatatccggattccaccatcccgttcaattgttttttgagttcttccaactc

SEQ ID NO: 315812 - DNA, 1156 bp, Cannabis indica
ttatagtaaaaaataacaataacaggaaataaatgaaatgtaaatagtagccggacgaatgagtggacaagcggacgaacggactaaagaaacaactacggtggtgaggcttaagagaaaagtttagaaagacaactgtctacttgagcaagtgagtagtgtgagtatcgaaatgttcaatctcctgcctttgtcgtatggtttctttaatggtgttccctcggtaccgttgccctccatccacgtcacccattagactcgttcaagttggttgattccctcattttacaggaatggtaaccatctttcttactggttcaatatctacttggttccactcgtttggttgactggccgaactcggacccggttgcagggtgatcagcttatgtcccataggctcacttgtttgtctgttcaaggcttagtgagtccgtctgactgccttattgagcccaatattattggatctattattgatgagctacttgcatattgaatttctcaaaaatatttcaaatattaagcgatttttcctctacaaatattattactgttgtaatgtaatatcctgtctaatatattttaatataataattattataaaaaattattaattatttataatatttcaagatggtgtcagaactggtaagtttaggtaagctaggtccacgcgtctaggcctcgcctgttttaagagctcatatttaaaatattttttaaaaaatatacatattttttaaaaacttttaaaaatactatttatttttataataaaagtcaaaattttatttttttaaattcgttcatttcaattcaagatttagagtggtggtagacactactaataatttagttaattacaatattcttttctatatattttgtaaaaagtgtgtatacaaattttattagtatacaccacacttaaaaaatagttagcgtttttatatatatttataaatttaaaataaattaaattagactaagagtatataaataattttttttttttgatttgggatcatataataatatgtgtcattttcagaacacaaccaaccaacctgcccattccacccacatttccatataatatgatatgatgatgatgatgatgatcatggttggtaagagatatatatatatatat

SEQ ID NO: 315813 - DNA, 2297 bp, Cannabis indica
taaaatacaataatacaatattattatctaataacaatcacattcacattctcacacacatacataaacacaaattaatttacacaatatgattttcttttaaaaaatgtatttatatatatcaacacaaaaacatttacacaataatacaatattatcatataataataattatatacacatttctcttacacaaatactgttatccgtgtttctgaacaaggcatatgcagcataattagaatagaagatttgttaacctcccaaattagcagagatgaccatcaagattcctcgcagagatgtcttgcttatatgggaggatttttatggatgcttaatggggagagccatccctagctcacgtagcgtctccgggacacggaagaatcatattcatccccaactctaagaagtcctggaacactattcagttgaatgacttctgggtaaggacctttacagactgatcacgaatcataattgatgcaccaaggcaaatggcgaggtcagcttcatatggaaatcgacctacaggcggttatacctttatctgacataggatcagatcttgtcccccataccagaccatggtagtgcgcatacgtacctcaagacatgccttttgcccaacggcttgtctagagagtattttgtaaaggagaaacctttaagcaacacatgtcttttatcgaaatggtactagccactgcccttgcgcattgcatgatcaagaaaattcttcaaggctggacgtctagatctacaattgtatttttctacccttgcaacgagctttgttacaaaaccctaggtgggtaaagggaatgtccttacccacatgtaagcctataaataccctcattttttatgtacaaaatggtgaacaatttgacacaaaaggagtgaagagctaaggtttatactataaacacttatattacccaaatacttgcctaaaaggctaatacaactgacttgtggactaggtattattaacgtctgaaccacgtaaaaaaattacttgtctattatttattgttttatttatttttgaagctctctttatttagtttccaaaaatctcagtaaatactttggtgctttaattgagagttgaagaaagtttgctagccgtcgtactgttggaacatgttttgcgaggatctagatttattaacatgtatgttaattataggattataatctaacatcctaaatatgaatttctaaaacaattaaataaacacatataaagttatagaaaaccttacattagtggtagcagaatataacgacgcattccgttcagatctcttacccttgttcctttctgtcgcaaagtattaccaagatctgaacctggtttctccttaggtgatggaattcttcacaatcttccacactatattttgagtactatcttaaaatgtgggggcaagcactctctcactatagggcacatattcaagaggagaaaagactaggaattttgaaattataagaagcctctcttatttttttctgacaaagtaaaactaggttatcaggttattaaaataagagcctataattatctatttatatgatgtctattgggttatataagaatttaaatatagaataaaaaagataaaatagctttaaattgaatcctatggccaaattccttttgtgggccctataggttttaatttcgccactttattaaaaatttatctttctttctcaaatactatattttaactctaactctataaatgtcaattttatctatttaataaattataattaattattaaataaaattaccatttaacttatttattattagacctttcaaagtctcttaattaataaacaaaccttgaaatctcttttcttctcaattaagccattccttagtgaaaatttataaataagacatagtctaatttagaattctaattgaataattaaaaccaattaattaagggaaacagtagtaaatggccctttatttctttttactgaagcttaatgtccctttttaaaaataatatagcaaatagcctttattatttttagtacctaaaataccctaagttatataagggtattattaacattatattcattctccaaatagaaatagaagctctgctccaaaatctaaatgacaaagcctccctctccttatttttttcggttagtttggatttcttcaaaaaaaattggtattatcgtgatttctcccaaaaggcgatgaaatatttttctctcatcaatttatttgattcattcgttggatccaatca

SEQ ID NO: 315814 - DNA, 679 bp, Cannabis indica
attaatttctcatctactgtattacacaagtgtacaaattttttattatagtttcggcgactaacttccgtaaacatactgtgcataccttaattcattcaaaaaaaaaaaaaaataataataataatcaaagaaaatcctagaacaaattaatgggcttatgtataagagtcataatttgaagtgtggctggtgaaaatgaaagatatctcttggtcgtagaaatgatcattttagcattatatgctatagtctatttcgtatggcttaataggaatagtgtcctttgggatcaaaaacttccaatcactaaagtcattgtaaaaaaagtaataaatacagttagtatgaatgagcttgaacaaattcaatagggtagacaaagattgggtggaggctcttttaagagcttgtaataagttttcggattcttgttttgaaagctgtaattgagtttggagtgaatacaatatattacagaatttaaaaaaaaagaaacaaaaaataaataaataaaacatgcaagtaagaatttaaaatgtaataacataataagttttttgttacttttatattaattgcagcccgtagaatggggaaaatcatcaatgctggacgcagaaagaaggcttttagcaaatgccctcttggatacaacaaacgagagatttgttttatt

SEQ ID NO: 315815 - DNA, 1529 bp, Cannabis indica
tgtaagaatgttgaatacgttgattaacatttttaacataaaaaaacagtaaccgatccaaagtaaccgatccaatccgcactattgcggattggattggatcggattttaattgttatgcggattggattggatccaaattttaggatccgcacctagtgcggattggatgttgtttgaccaaaaaagtgcggattggatcggatgaacagccctaatatgtcatacttaaatgtagattttcttgcacccattcttttatttatgctcaaaatcatatttttcatatcaagtcattggaataattgaagatgactatactaatagtgaaagttagttaatctgttgttattgtggtgtaatcatttcagttagttaaagtttgttacaactgtttgttagctcattaatttttgtactcggtatttttcttatcaatatatataccaaaattgtctcaacagttcgagtgaggagcaaattattctctccatttccattcagttcatttccatttcattttttttttctctctctctgtaattttgggctttcttattttccttcatggtatcagagcttaaatggccaataatggcgagcaagatccaatcaatcctcaagctctaattgcaaatcttgctcaagaagttgcattaccaaacaacaatctcctaccactcaatttgagactcgatcgatctaactatacactgtggagatcattggttcttgcagtagctcgagcttacaacctggatagatacattctgggaacaaatcctcaacctcctcgtgttcttgcacataatgttcccaaccctgcattctccacttggttacaatttgatcgatttctaacgcactagttaatgaactctgtaaccgaggcaatgcttggtcatgttatcaatgctcgtacctctgtttaaatctagacaatctttgaacaattctttgccacaagatcaagagctagattgctccagataaaaggtctgcttgagtcgaccaagaaaggctccttgtccatcgatgaatacattctgaaaaggaagcaacacagtaatactcttgctgctgttggccaatctctttcagatgatgatatgatcttaaacattcttggaggtttaggatcaaaatatgaggctgtgattgtcaatctcacaataagatctgaaaatctaaccattcgagaagtacaatttatgctccaaagtcaagaaatgagaattgtagaaaatagtgattcgaattgtgtgtagatttcatagaataatacatatttatatacagagttaggagactaaatatctactaaatatctactaaatatctaactctcttacagctaatatacatctaatatctaacactccccctcaagctggagcatagatgttaatcatgcccagcttgttacaaagataatcaacccgcaccccattcaaagcctttgtaaaaatatctcctagttgttctccggtcttcacatatcctgtggagatcagaccttgttgaatttt

SEQ ID NO: 315816 - DNA, 1274 bp, Cannabis indica
gtttttggagctcaaaatgattgctcattgaaaaagagttgtaaattcatcaaattatttcttattctacaattttatagtggtttcatagaggggagctgcctgtaacaggtttgttttctaaatatttatatctcagatttttattagaagagatagcaactaggagttattactgtgcttgataaatcttctcaagcaatatcactgttatctttaactaatatcatccataagatgcttccaatgatttctaaatatttttttttgtgaaagcacacaccctatgctgcccccaatttgtttttttttcctttcttgtgtatggtcattggattgctttttttgattgataggctgagactgacagaggagcagggttgaacaaaggggtttcagataagcaaatactcttaaagatttcatctccgaaagtacctaatatgatgcttgttgatttacctggcataactaaagtccctgttggagatcagcctagtgatatagaggcaagggtcagggaaatgataatgacccaaattaggcaagaaaagtgtattatactggctgttagtcctgctaattctgatctggctacctcagatgcactacaaatggccagagatgccgatccaactggtagggattttcgtgacttaattttttcactgagtttactctatgttttttgtgctacctcctaaatttttgtgccaaacatgattcttgaacaggttctcgaacaattggtgtaatcacaaaggtgtgtttattttcttttcaaaataaaatgaaggatacttttcactctctttagtatttgtcttgattgtactcttgagttgctataatgttgttttgtggttctctttgtagcttgatataatggatcgaggaactgatgcccgcaactttttgcttgggaaagtcgttccacttcgccttggttacatcggtgttattaatcggagccaagaggttaacttttttatttttcttggggaaagtggtaagacatgaaaacagaaactattgttgactaaaataaaaaaataaggtcaaacatcttcattggtgcgtagtctctagttatggatatggacaaaccagtttgatgattttttattttatttgtcaggaatatgcaattaagctgatgccttgctctgctcctttctgagtcgcaggacattataaaaaaccgtagcattgctgatgctcttcccgtgaagagaaattcttcgtgatcatcctgtactttgcacttcctttgc

SEQ ID NO: 315817 - DNA, 758 bp, Cannabis indica
actcaaacccttaatttttttttttttttttttttaagaaacctaatttcgaatttcgaattttgaatcacaatgctctgataccatgtagaaaatagtgattcgaattgtgtattgatttcatagaataatacatatttatatacaaagttaggagacataaaagggaaactaccaaaaaataggaaactactaaatatctactaaacatctaattcttttacagctaatatctaacatttaggatgttaaacaacatacatggtaataaatctagatcctggtaaaacaatatccaacaactaatggggtagctcacgctttagccaatcagctttgtcaaacaaagctatgtggattggagttaatctcccttgtgcaagctctaccttgcggcgagactcacccaatcctttgtgagactcattttctgtatgaagttgttttttttttaacaaaaaaagaataaatagttacacatgcaataaaatatttaaatcttattttcgatcctataaattattcagaattttctaaatatattatatatataatcctaaataactacaatatatatgattacacctaaacttaaaataactaaaaaaaaattcatgcttactgaattagatagagatacacctaaactccttttttaggggtttcctataatttttcttaaattactaccttaaaattataaattttgaaatattttggctaattaagattttttccctccgaactttgacatgtac

SEQ ID NO: 315818 - DNA, 2942 bp, Cannabis indica
caaaatatatatatatatatatatatatgtttttttgaaaaatatatattagagctatatcaaccataactgaaacaagttattaaaaaaaaaaagtgaaacgaagaaatagggtactcacaaatctggaaagcagaggcaaaaataatgggatctgcgttgagacttcacaatttatttttttcttgatgatctagagtcgggaaccaaagcaagaacttgaaccagaaatggtgtggtgtggtactgttttttttagtttagatagtagcgacgggcgaggcagctttatggggcctctgtctctgtctgtcagctggtttcgatgacacacttaattttgcttgacgcttcatgtacttaattgtatatttaactttttattttttattattattattaggaatattatttggtattaaaatttttttattttttttttttaaatttgtgatttgagtttcttaagtatttttttaggtagtgtttttgtaagttgtcatacgattttttgttacgatttaagttgttccgctagttacaataagaatttttatatagaatttcgtaaaaatacaataaaaatcattttaaaatctaaatatgaaaaagctcaaaaattacttcatatattttttagcattgcacttctcgaatactggtctttacgtttcaactttcaacacattggatatccaatgtttttttttaagggtaaatgaatacccatgtttatcaattaattcttaaaaataatacaacattgctattaggtattagtagtgcatagcaccttcttgatatatcgcattgtaattgactagtaatatcccataaaagctattatattaaattatatagacccgatacttagttggaccaataacaatattaacacataggaaggtattaggcaccactggtaccctttaccatttttcaaaacaatatatgtccttgggcaagtattaggtattttagttttaccatttgtaattttttttatttttgtaaggatcgtttataaatttttaaaaaatatttattaatgcaatatgcatttaaaaaaactattaatgcaagcaagaaaatatttggaactctatatgtttttttaaattattctgaatttttaaaaaatttaccaataattttaaatgactaaaacatatataatttttttatgaactacaacatacataattaagaaaaaaaaaactaaaaatttcccttgataccatagcaactttttttttaaagatgtagtgtagatttgttctatgttgctgggactttctccttcttattagaagagtgctaattaaaatctccttttacaatctctttcttaatctctatgttcaaaaactcttcttggaatatttatttttttataatttttttttatagtattgttcattatagttacaatatcgtaatttaagtgaaattataatttttatcattgatataataagattcttattttgatggctcctcacgacgcgttgattttgtcctcctacgaatggaatttatgaaaataagttaaacatcgtcatatctcacaagatagatatttctaaaattaaattctagtcgattcactcctacgattactattagggctatttttttaagaaaataattatcattttttccttttaaattttttacactaccaagttgttccccttataatatacgactcgttaataatattccttaaaatataacttttatcgtaatgttgtccttccatcaaattatatttaattttatcgtgaaatgagtgacatggtggatggtaattgataaattgatgcaaattaaataccattcacccttttttacattaatgaataatagaataaaagattttttctctaataatttatatttttattttaacttttttaataattaaagtaaacaagataaaatgtatttaatttgtatgcatttatcaactaccatcccactacgtcattcatttcacgataaaattgaatagaatattatggaaggaatacattattgtaaaagttatatttcgagtggtattattaacgagccatatattataagggcacaacttggtagtgtaaaaagtttaggggccaaaatattaattattcatccttaaatatcgaaacgataaggtgaagcttataaaataagaaaatttgtttttcgttattttgatcaaataaaaaaaatctagtgatgtgcattagatgagtttactactctatttaactgataatatctttgactctcgtcgtctaggacactatatcatttagttagaaaaccttagaaattagagacatttttgtttgtttttggtattttttcctatatctgtcataattgatatatgtttacagatttcataagatatgtgattagaatttattttcaaaaaacaatgattttatctattttattgaattgtagctttaaaatggacaatattatgattcatccatctataacatgttcatcagagaaattaaagattcttatatgttgcttgggaacataatttgttaggaatactgtaaaacttaatatagccctaattaattcatgagaattaaacaataagattaaagaatagcggaagcgtaccggagtccataaaatcgacctttaaataatctttattggtatgatcttccaatttgcatcaaaacctttctctgtaaacttttgctcttggtgatggggataccagagtgaaaagatacgatgcaaatggggaccattacccgttatattaccaacagacaaacctgttggcaatatttttgactatttctatttggcccctcatcaatatagaaattgtctaattggtatccacatattaaaatcatgacaatcatgcccttaagtcataaactttattcaaaatagaccacataaatttgacttat

SEQ ID NO: 315819 - DNA, 1804 bp, Cannabis indica
tgcctttactaatccaaattactaaagcggtcattactgaaactgtaacccacaccctacttaactattctggagatgactttcataattattatcattttattatcaaattttatatttattattgtatgattattattattattttatatttttaataaattattagatgaacattaaatgacatattaaattttgtatcaagatttgtaattatgcatttaaacataagatcatcttcaatgggagatgtaaaagttgaactatatttgatacaaaaagtagttttgtgacatttttatatcaacttttactattgtgctccaatgcataattgtaaatcttgatgtaaaatttaatatgtcattttaaatgctcacttagtaatttattaaaacaaatataaaacaatactaatatttaaagatataaaattaataataataataataataataataataatacaattcatttaatataaaggagcttgttaactaaaatcaataataaaatatttaaaatgacataatgtaaatataagagcataatatttattgtgatgtaaattttacatcatgctatgttgtaattcaaatttggattactttttgttatgtgacatatttgcatcacaatttggtacaccatggagtagagttttaataaagtgagactatattttgcatttgcgtcacttatttgcattttcattggagatgctctaatagtaaaagttgttgtaaaaatatcacaaaattatattttgtgtcaaatattgatcaacttttgtgtcttccaatggagatagtctaaatacaagttaggtactatgtgttttcaataatacttatttagtaccctgtattttagaatcatgcatatttgatctcttaaattcatttttttgataaaattttattaatataattaaaatgtctaaaattttatgaattttaaatttaaatttaattatttggttacatataactgagacctgtttgattaaattgataaaattgtattgattaaatgttactttagagcatcaaatatgtataatttaaaaatatgatgtactaattaagtattattaaaagcacaagtaccaaatatattttttaataaaaagacaagtaactaaataaacatattctccatatataatagtacagggtcaggatcagaaaggtgtcaaattgtactatatgtaaatagtccatattatatatctcttttgcctttgtggtgtgttttaatcaaaattataaatagggcatgatgtgaaatgatatcatatgatttgatgatctacatgtgtaacacataattgtacctcatattcatctttgacgtgccgtgctgtgctagtgcaactctagattttgttttatttttttattttactttggtaagttttactgtataactacagccatgatgggatagtggaaattttgctaaacttagttcaaaaaatagtcaatctgtgtttgatttaaatattacaattgtgttttaatgcataataaaataaattttattttaataaaaaaaggaaaaattatataaattagggtgccgtatggtaacactttttaatcagttttctattttaaaattgaaaaaatgaaaaaatttcaaaatattttaatcagttttctgttttacttttcaatttttaattgagaatcaaaatttcaaaaacaaaaaaatacactttcaatattttttaaacaactttttttcttaattcaatatcttggacttctaatcatgacacagatccaaatcccccaccgat

SEQ ID NO: 315820 - DNA, 1220 bp, Cannabis indica
gtcaattaaagcaaaccagtttatcaaaaatgaatttaacaaagatgaccaagagaatgttatagtagttcaccccctttcacatgtaataggctagtccacttggattgttattagtctcaatgcttaaggagagttctccaaagttatattctccaagatttcaatcctaaaatgagtttttagaatgagagagtaagagtttgttagaatgatttcgtgaggatcaaaattagggtgcttttacaagtgaattcactccctttatataggttttcatctaggtctctcttagagtttaaaatatcttaacctaacacacaccttcccctaactatagtaaggttaagtgtaaaatagaaaatgacgaaaaaaatcatatttcaaaacaaatatctgaaaaatgataactgctgaagatatctttaatctacatgtgctagcttatttttttcaggaggagcacatgcatgttaatgacgagaacatgttgagatggtgatgctaatgagtcgtgagaagcacgtgctgaggtaaggagcatctcctctagggccaagatgatgactttatgttgtgatctcggctagggccgagattatgacttgaagtggtgatctcagctagggccgagatggtatgaggtgatgagctttggtacaaggtgatgagctttagtacgaggcaatgaattttggtacgaggtgatgagctttagaatgaggtggtgagcattggtacaaggtgatggtgtttgagccgaggtggtggtgtttttaaccttggtctgaggtgataatctcggccttggtccaaggtgatgatctcgaccttattttgaggtgatgatctcgaccttggtttgaggtgatgatctcgaccttggtacaagattatgatctcggtatcagtctgaggtgatgacctcaatcttagtttgagaagatgatactttggccttttgcaaggcttggagccgaggttatgaacctctttggagccaaagtgaggatgtttgaggatgccaagatgatgcccttatgatgatgtccatcttcactagggctaagatgatgccctgatgaagagtacctcgaccttagggaaggtgagttgacattgtgtcaccacctaaatgtacgttgaggtgattagtcatggtggtttcaccaccaaggttcctaggtgaaatgctatctttgcaattgctattttttttt

SEQ ID NO: 315821 - DNA, 1050 bp, Cannabis indica
caggcgatgtgggattgcacagcttacccggtatttctccttacagatcacgggactactgactgtttgaaaaccaaatatttttagagcttaaagaaataagaaataataaataataaacaaatagatttttacatggttcaggcgttaataatccttagtccacgagtctattgtattggcctctttgggcgaatgtttttgaaattaaaaggtggttacattaaagactactttgcttcactcgagagattttttgggatttttgcagtgtttgtaagtaaaaatgttcttctttctcttaaagaaaaataggactatttataggtgcatatgtgataaatggcataccctttacccacctaaggtttcatactccatacgcgactaaaatcaatactgctaaaggacaatctaaccattggttggtaagaactttcttcattgtgtggtttacaactgctgcaaggacttttgtacgatccagaacacgcatcacacaaaggtctctcctttgcaaaatactctctaaccagtcgttgggtaaaaaacatatttgagggtgcgtacgcgcactaccatgatctggcacggggggacaaaatttgatcctggggtcaagaaaaaggtgtaattgtctatgaagtgacttttgcaagacgctgacgtggccaacatctacaagacctttatcatgctccggattcttcattaaaagaagttactcccgaaggtcatctgctctcgttacctctcaagtttgggagacgttccttttctcagtaacctcgattgatcatgtcgtggttgtattctaccctccgatcgcgccacatgtcttatttgcaaaaacttggataacacaagtaatgtaaacacatcaatgagaatactcgttattctaattctgattcatgcaagtcatgtaaacaatattttgatttcgcatcaatccaatttttagtcattccgattatgtgtaagtcaatgtactatagtgtgttccattttaatattaaaatgaatgtatttagtgttgggttttatgcc

SEQ ID NO: 315822 - DNA, 2242 bp, Cannabis indica
catttattgtatttacattttttattgatttaaatgttatattgaatgtacaaatgggttgataatgaaatcaatctctgtgtaatcaaaggacacttgttttgtatataaaggagtgatccaacatgaaatggacaagacagaaaacccttgcaacagtggactaagcaaacagtgatctgactaaaccactatacttcctttgtgttctttatatttccagaatgttcatgtatccatagtttgaatactcgccattcgcgtaattctatttatattttaaatatattattttatttggtgttgtttaaattcctccaacaacaaagagtgttatttcaggtaatccactccattaaagaaaaaatcataattaaatcctcaattgggcccatattagtctgcctgaagatgcatgactgcctatgaataaagtcattacatctcttcaaaaggattctagtgttggatacttattttactaggatttatatttactaacatgtatgttaattataaatctataatctaactacctaaatatgaataaatctaaaacgataaataaacacatataaagtttagaaaacctcacattggttgcagcaaaatacaatatcttcttctgttcagttctttaacccttgatcctttctgttgcagagtatgataaaaaattgaacctagattctccttctcctttgattgtggtcatcataatcttccacaaatgtctgagtatcaccttgaatagtgtgggttggtactcaatttacctttgaacaatttagagatagagtaattctataatgaattcgaaaatcaaaagaaagaagagaagatagatgtctgacattgaaattagtcagactagaattgtgagacttaggttagatctctcttctcatcactttctttatataagcttcacttagggctacggttttttttattgagagaacttagggctaggtttagatgaaatgagcttaaaataaagacttgtgctgaaattagctctaggatcggattcctcatgagctttagagttagatttttgctactttatttcaactaatgaaactaaagtgtcttttctaattttagcatttatcttatctaattattcaaatactaattttattttaataatcacccttataaataatttttaaataaaatacaatttaaatatatttatttattagacccgcaaagagtactaattaacaaataaacccctatatctcttttcttcccaaaatttcccaaacttagtgaaattttcaaagaagacatagtctttttttaattctatttgacttgttaaattaattaattgagtctacaagataataatatctcagacaatatggggaccatgggcctatgtaaccaagctcctaagaagcaaatcttgaaatttactcgataaatttcctaccttattaattttttctaaccccactatagattcagaattgtactccagattacatagagcactctatacaccaagtatagatacactataacttatatattgtttcaatcactacaatcattgatcctctattgactgtttacattgaatggggacaaaattactattttacccttcaatgcattttattcttaaaatgtttacctacttgtaaatgatattttgagaaactaatataattatcgaaatgaacgttcaaccatttaacgcctttagtcaagttcaaaggaaactattgtttcacttctaataaacataaaagttatagatgtccatatcaatgattaacgcgtccactcaattgcactaccaagttctccagatgtaagtatgggctagtcctacgcgtaagctggtaacgaacaagtcaaaaaacccatgcaatttaattaagctagagctcaaccatcttaggattgagatcaaataatctatgatcaactaagtgacattgacttagaaaagatataacagtaagtttatgatattattttcactgtcaatatctgtccagtctgatgtatacccaatatatccaatcttggtttactttactagtgttgtggaaaagatatttcacttatccaagtgtaatcgaatctcatcgttagttatcacgtcagtgtaaatttagtgcactaataaatcgtgggactaaataatttgaagcatataattacaataactttctactgtgatgacatcactgtaattgtgaataactatatattcgagatt

SEQ ID NO: 315823 - DNA, 561 bp, Cannabis indica
tatatatatatatatccaaatttctctaagtttattggaagacaagtggcattatcatgtactaattgaatttttacgaatttcgtacgtggtggttagtatattgattacacaaggtattacattaaatttactcttaatattatagtaatttttttaaaaataaattacttcatatactatttattaacttattttttttttcaaatttacggtttgggttgcttcggtagtttattcggtggttactatatgggttgttatacggatttttgattgcaaattagattgctccgttaattgctataagtatttctgtgtgaaatttagtaaaaatataaaagaaaaatattttgaagtgtaaaactgaaaaaacctctttttaaaaaatctttcaaaaacttaaaagcataaataagtcaataatttttttattatttgaaattataacatgtatttatattttatccaataaacataattttcttttaaatttagtttctaagtttgttattttttttccttgcataagttaaaaatttataattttgtgtatttaaa

SEQ ID NO: 315824 - DNA, 640 bp, Cannabis indica
ttacgccccctcactttaaattctgggtccgccactgtatataaataattcttggaattaatataattgactatatatgtatccaccggaaaattctaaataagagacttctataaaaatggaatagtacaatttagttaaaacttcaaagtaagacacttctaataataatggaacgttgcaaagtataatatattatttcttaagttgatttttaatcaataattaatttgttcctttcttcctttgtctttctcgtgtttttacttttttttttggtctaagaatttatatacacatgtgtttgatttacatggtaattaattaataaagtctacaaagtttcccatagatttcaatgaatagagttcccaccgtttagaatccatgaatagagtttcgataaacataaattaacgatggctgctaattatgatctctatctaaacttttcgtcccacgtgtaaaatatgtgaaaagacctttatttaatttaattttacatgaatttcacgtggcgaattgattgttccacgttgagagagggttgactcatgggtaccattccataattaagtcctttcaaagttttgttacttttgtctccatgtgtgatcatagggaaattctataatgcacc

SEQ ID NO: 315825 - DNA, 1256 bp, Cannabis indica
aaaataataataaaattgattaccataaggctaaggagtcgttagctgaccaattctctcagttgatgctctaggaagatagaggcaccaactttgcaggggagagtttctgtgataaggagttccctagctactagtaacacggagaatatccgtgagtcaaagccttcttcagttccaggaaccaaagccatctactcccaagaagaataagggttttcctagagggtccaaggaattttgagacacgtaaaatcgggctacacccttagcccatgagagctctacctgtacgtgtcagtctacgaacctagtgaccaggcattttcaggtgcaacatcagaagttacctcccatgacaatatcagcatgcatgtccttgtgtaccttacaaatgatccaacaactagggataaaggatattcaaaaaggaaaagcccagggatgacatgcgtatgaggcccatcttgtacgatcggacacccttaaattccatatgggaaaatgccacctaccaatccaacagtcatattttgccccaatgatgatcaatctacggccacccatgcaaaggagttggcctataaatatcctcgaaaaagcactagagggggaattttttgagagacctttttttcagagagaagactgattgttcataaaaaaacctcatttgtattacacctagaaaactctaaaatattcctactaagcttcctcttcttcaggaggaacacgggggagaggagatccagtccaccatattcctacttgtatgaattgttaccgaccgatgagcctaataaaatagactcgtggactacggatatttaacatctgaactacataaaaatattttatttgttgtttttctatttatattatttgttaattccttaagctctacaaatatttagtttccgaaaaacttggtaaacacaaaataaaatgatttctgatcttttatcaattaagaaatctgattatattgaaatgaattttatttaggacataaaatcccgaaaaacttccaattttactaatataaaactaaaaattttatttcaagtaatcttaaaatcttgatatccaaatcaagtgtagtatgtagtaatatctttgtaataggatctgacatgttgtattcagtacaaactttctccaccattacatctccttagtcacaaaattcttgatattgtgaaattcctttctatatgtttactcctcttagggtattggattctttactattt

SEQ ID NO: 315826 - DNA, 2603 bp, Cannabis indica
tataagagtataattattaaattttttgaaaatttcttattcatatggagaaggtataatcttgtaaggatgtacaagagaattaagattatatgatatgaataaaacaagttgtagaatattaaagtactaggaatctttaatatagaactgctaagcatggtttattatacactaaacttttagtgtgtgtgattttgattcaaatcacatatgtagatggacatgtgtaaaggtactgtgtaaaattagcttatgcatgactggatcgatatgtaataaacatccttcattaacttaccgtttaccatgaaaagagttattcatatcacaataatgatcattagtagatcagcctgaatcttgagtataaataaactcatatttgtgctcattgagttctttgattcactcattaaaatttctcagagaagatgattcttgcaacttatgttttgggagcttaataatatgagtggttgggaacatgttatacaatagtagaatccaagcttttctaacggatcaaatattagttctcttatagtgttaattctgggagtgctaacactcggatccaaatctataataagttatagattatctgttcacattgaattaatggtacataaggaatcaagatataattagaaaggtaaaaccgtattttgaccaactctaattatgaaataataattggagggcgggctacttatattaattatataaatggactacaagtaagaattttgtaaatataattttatattattagacagtgcaattacagatttatagtagagtaatactagaattagtaaactagattattctattgatgagattgacataatcttgagtttattggaacttttaaaatataggtccatggtccccgagtcacctctatacaatactataccaggaaagattttattgaattttgagtgagaattaatttctatggaaagtaaatccataaaggcaaaatagtaatttgtgaatttttttattttttgataaatcaaaatttcattgcacaagaacaatatttttataaactataagcaccaagccatgttaggcaaggcctttaatatctatacatcatttacaaagtatgaaaccattcctcatcttttttgcttactttttttggacatacaagtacaactctttgtttgacattctctttattctatttgatcacctgaacaacattggggcctttcttatgctagattacctcatttttggtcttccacaagttgtagacaagactagctagagcaacagccatcaacttcctcttaaacctgctcactttagttctttgtatccacctggttaacctagataagttcttgtccgagtgtctccattccagccaacttgcaatcccaaaaaaaaaaaaattgcacagtccagctgtagtcaaagaaaatatgttcccttgtttcctcttgactgtttcatagcatacaacaagaattatccacaatgcaaaacatgtacaatctatcttttgctcttagcttcccatgcatagctatccaaaggataacactatgcttaggcatgttgaacctcccccaagcttgttaccaccatctttgtttctcttggactagactgaacagagtgtaccctgctgcaatgtggtatttctctatctcaaactggtgagtatcaacaagagagctaacccggtttttgagtgctaccaatcttctccaatactagctcccatgtatggggatagagtagcaccactagttttcctccttgatataaatagtgtgtacccatttaacccatagattttattctctttttacaactacccaagtatttaaccattgcatccatgttccattcttaactcttttaaggcctatcccccagttgcttttctctagcaaactatgtcccaagcaatggcaccagcgccatggaaagtatgctggcccttccataagaattccctacaaattgcttctatctccttgatcactttgttaggtaacaacataacctagccccagtaagaatggatagataacagtacagagttgatcaatacaactctctcagcaaaggagaggtgtctagtactccaagttcttatcctccctgtcattttctctactaagattgaacaatccttgacccaagatctttttgtcaccaattggaatccccaaataagtaaacgggtagctcctgttgggaaaaaccagatgcagtaattactctaaacaaatctgtctcagccatgttactgcaataaattacaaatttagcttcattagagaaaaggcctgctgtgtgtgaaaatagcttgagaccatgcagtaagtaaatcacacttttctaatcaccattacaaaatagcagcacatcatcagcaaagctgagatggtaaagttgaaaattttctctacacttgtcatgaaacctgaagtcagctttacttccctactctcttcattattctagttaggtattccatccccagtacaaacagtaaaagagacatggggtccccttgcctcaatcctctctttgaggtcaaaaaaaacaatagcaatgacccattaaac

SEQ ID NO: 315827 - DNA, 766 bp, Cannabis indica
ttctaaatctttcacaaaagggtgagaccaacctgaaagaattgatcttcatgcttcctcatcttgggatttgatgaatgccctcattctaacctttcaatacatatagttagagttatttagaagtggaggacgaataatagaacttccttctacaaagagaaacatattacaaaaacacaagaaaacattaaaagaccacaagagtttagtgtccctctctgataccaattgaaaaaccatgtttttgcaaatgctaatatatttattaaattctagcaattaaaacagaactgttcccatctgtagtaacagaatagaaacttgttgttgcataacacaaattcgcataagtaaaatagaaataacagtacgcaatgtaaaaacttgacacaagagaattatacgtggtattagtgttctttgaaacactcctatccacggggccacacccagatcatgaaatcaattagaaaagtctcaaataattactaaatacaattgacttaaacaagtctagactctttatagctttgtcgcattacttgtaatttagtttgccaatctaatttctaaacaccacaaaatagcaaatccctttgtcttttgatatgtgagtgcttacttcctcctaaagtaaggctttgataagtcttctcccgaagacccttctcttgtttaatggagttcttcaacctattctaagaatagcatacgaacaataaacaaagaataaaatccaattgaacactctaggttttcacaa

SEQ ID NO: 315828 - DNA, 894 bp, Cannabis indica
tggattgtgttttcaggtgttcttgagggtatcaatgcgtttagggaagatttggtcgagttgggagaatttttggggtttgctggtgcgaaccgttccactggctttgcaaggtatgtaaaatcggttagccagtttccatgcgaggccccgaaatctcgactcctctgaatctgtgttattttccgatcatgctttggttatccttagtatttaggatgatagtgcattattgtgtcattaggattaccctagattttgagctagggctttggtttagttgttcaagtagtttacttaattgtattttgtgacttaaaacctccgtttagctcaaggattttccattcaagtcgaccgacacgcttgaatctggaacgaggtaagatagcataataatgtatatatgaatggattcttgtatttgatgtttgcactactaacactaatatgtatgtgattttaagggtcttagtatagtgagggatatcagtgtggttatggtgttacgaacacgagtactagggggtatctacgagaatcatactggtggtaattctcttgccttaaaaatcatgcggcaagggtattactggcccacactgcggagagacgccttcaacttcgcaaagaaatgcaacaagtttcagcgaatagccacgtatgttaaccaacctccgagtcacttgcattttatcacgagcccgtggccctttgcagtttggggcatcgacttgataggagaattatcaaaaggaaaaggcggagtcaaatacgctgtagtcgcggtcgactactttaccaaatgggccaaagcaaaggcactagcaaccatcacagcagctaaactgcgcgagtttgtctatcactccataatctgtcgatttggcatcc

SEQ ID NO: 315829 - DNA, 2222 bp, Cannabis indica
gttgtagaaattgagctgatgactcatgatgcgaaagctaaattcgttcagttttgatttccctacgcggctcgcttgatatctcattctggatgtgacagcgaggcatcctgtttggtttttccgagcagatgctccaagcggactacacgtgtcaccattcccgtgatgccacgtcagagtgcaaaatttgggataacacatagcaataataggtttgttaaaaaagttttaaacaaacaatttaaataattaaacaaaacatgtaacaatatgggaagtttagatatttattaattatataattaaattatcatttaaataaccaacttatttagaaaaattaaggttgttgaaataaccttaaatatcattttcaaaatttcaaattcaaactaattttaaaatatctaggtttatttaatttattttatcaagttaaattaaatatctaataagataaatgatatgaaataaccaactagatatttttgatatcattttttgaacttataatttaataaaattaaaataatcaaaataaaccaattttaaaatagatatggttaagcaattattattttaagaataaaataataaacaaatgataattttaaaattgggtaactagttaatggttatttttttactgtaccatgatggttacatttgttttaacctataatagcagattaccaataggtaaaatttccttttttagaattacattagttataattaattattttcttaaaataattaattttaatttaaatattaaagaaaaatcttttttaggaattaatatttataaatagtttaatttttatgtttaaaacccaattataatttttttaatagtgaaaccatttaatgataatatttacaataaaactttaatttttttaacaaatattagacttacaccccttctaagataaatttttgaataataaattagttgtaaaatgacatttaactttttttttccagaaccgcttgatccatctttctcccttataaaaaaaaatctctaatttcaaaaattagggtttcaatttgtcccaacctaacatcatatgaattttctacattgatgcaatctcctacatctttaccacaaacccattcctccaatcgaccaaatatatcatgtcttttccatttccctctggttctcagtcgtcttgtcgcatggccataccaatgaagttgtatgtcgttcataaatcaattgacaataacaacaaaacgttattttttcttatctactttcttcaaattcttttccacatactttagttttttcattcaaatgatgtcatttttaggtcaacttttttttttaaatgacatttttagcatgatcattttgtcattcatatataatacttgtattctcttttttcgtttttgcttatgtgaaaatttcatacaaaaaaaaaaaaaactaaaaaaaaaaattcatgatggagagtttggagacaagaggctccatcctgaatcaatattattttttggtgatcgtttcactatgtaactttgtcctccttgtttcaaatattattttgaacatgatgaggaaggataatctggaataaaaattaacttatttttaattttataattggtattagattttaaactatttgttaatttaatttttaaattaaaaaaataactaaatgacttgaattaatttggaactgacatactaattttgcacttgtattgaaaataagattgagtgtagaattacctctaattagaggttattcttactattttttagtaattaaagttatatgtgtaataaatttaaattataaaaagttttgttacaattatttgaataatttaagtccaaaaaagttaatttctaaaagattcttatttagtaacaaattgtaaaaaaattaattaataattattagtaattttaattttaaatataattaattttaattaaaattttataagaaaataaattttcagggttacaagttatttatttatttattttctaaattaatcacaataactcaataaaaataaatataaccattatggttacatatttgatgtaaccattgaaatctcttccttatatatatttatataaattgtatattcacttatgtataaaaatgagtaattaactcatagaacaaatcccttaaaaaatgatgaggagttttttttacagattcatcaattgttac

SEQ ID NO: 315830 - DNA, 1020 bp, Cannabis indica
tttttctcattccatattcaacatagctattgttattcaagtttttatcaatcagacacgtggcataatcagaggagaggatagggtcataacacgagttattcgtggtagctacggataaaaatgactcccggacctggagggaaataagagacgatggcttccgggagtaacttcccttaagtaaggaatctgaaagacgatgagggttttaaagacgttggccacgtcaacatcttgcaaaagatcaccccatagacagttaaacctttttttgacaaaggatcatatcttgtcccctgttttaagtcgtggtagtacttgtgcacccttgagtatgctttttgtccaacagcctggttagagactattttgtaaaggacaaacctttacacgacatgtgtccaagggcatgcgaaagtctctacaaacagttgtacaccacacgatgaagaaggctcctactagccaacggtcagatggtcctctcacacgacacgcctcaatggcgtatggagtacgaaagcctaggtaggtaaagggtgtgccctttgccccatgtgcgcatataaatagcctcatttttcttgagaaaaagggagaacgatccttcaattacagccactctgcaaaaaacaaaatagaaatttttaatattattttcaaatcttataatttaataaaattaaaataataaaataaaccaattttaaaatagatatttttaggcaattattattttaagaataaaataataaacaaataataatttatcaaattatatgtcaaaatatcttaaattaagcctttttttaaatttctacaaaaatatctagattatttaagtatttgaaatattatttataaatgtttgataagtaaaatgatataaaatatcatttttctaacttataatttataaagaataaaatatttaacaaaataactaatttatgaatttgaaaaaattatggttaggatgtctataaaaatatctaggttaatttctaatttattaat

SEQ ID NO: 315831 - DNA, 1005 bp, Cannabis indica
tttaagtaaacatgccattagtttaggaagtgttagtagagaatttaccttaggcccgttttggtttacaaaagaaaactattgtcatttgagatcttcattatagactgtttaaaatgttgatatcatgtaatctacagcttcatatgcaaggagttctatctgttctgttagctacatttaccggatttggggttacaatgtgtgggaattctatacttgttgagatttcaaaatggagaagacaacgacgctctcaggcaaaccaacagcaggcttccgtagaaacatctcagatggatcaactacctgcaaccccgccacaaatacagacaaataatcctaacctcgatgaaaatcatcggcatggagattcagaagctattcatggcaattgatttgaataatacttatcacattcattaaaaatgtcataaaatagtaacataacaatagtgtgctcttctgtaaagaaagtatacaaacgtttgatggtgtaccagtttaggagcttaaattaactgtgtattttcttggcttggtcatatgatataaaatattagagttcaaagcattatatgccaatcctagtggagataagatacaccagatttttcaagatttatcttttaaaaggacaataatgattttggcaatagaaaatttcatgataacgccactaatgtcagtgccaatgctcgattgagctctgccaaaattattttcttttgactctcatcataatggagcttactcaaaactttacacaaaaaaaaaataaatgataatgacacacattagttgtgtaattatatgttgagtttttaagtggtcgactgtttggtacattatgagtgctagcaagttgatatacacactgtgttgtgttgtggggaaaagtagtatagcttgtagtgtgtgtgagaaaaataagactgtaaaaaaataaaactgaatattggtaaattataaattttaaagtaattgtcaattgttaagattcta

SEQ ID NO: 315832 - DNA, 1160 bp, Cannabis indica
ttctaggtagaaaaacccaaaattcacgcgagcgggctgcgattcccccctgagcccgttgcggcgtctaggttgaaaatcaagaaatgccaattcaacaactcgaatttcaagcccaaaacacaccaaactcctaccgaagcatactcaactcaaataaacatttcaataatacaagcccacaatatcagagagctaaaagcacttattcaagccctttacaacatcaatgtatgcaatttaaatcaagatcaacaagaattaccacaatctacaatcttgaactcaatatcacaaagcctcatccacacatattcaaacacaagctcaataatatcagctcaaactttcagctcagaaaatcaaaataaaacttaaaatcacacattcaaaattcatccaaagcttccctacaacaaaagcatttaactagaactaccttactagcaagaaaacctagctagaacaccataaattcaacccatcatacacacgtacatttcaagaattcaacaataaaataaaatgctttcaagcttaattaacaataactaaactcagcaagagaaaagaactagaggcttaccccaaattccaaaagctttcaaccacaaataacaccaattcaagctacacatcaagttccaattgattatgcattgatgagaaagtgaaggagggaggagtgggttggttagggtgtgtaaaatcaaaaaatagagttttcctgttaggctatttttagcctatattttggatcaattttatgtgcgtttttcgctgtgttgggatagaattacgcttgttttctatgtttttaggttctttggagtaatagaagtctcgggatgaaaaagtccaataaaagatgagttgggccaagaaaattactttttgaggaaaaatgcaaatctggccgcggctagatacagattggccgcggctagattgtgaagcaggagtaggattttcgaggctacattcgtcgcggcgaggggtaatgccgccgcggccatttaagacttacagaaccgtggattttaggcatttatctggccgcggccagactaagcttggccgcggcgagattccgtacggctcaggggcatttttgtccatcgaaccctaaaaattagttataaatagaaaactgcgattgg

SEQ ID NO: 315833 - DNA, 824 bp, Cannabis indica
cgataacaatcgtaataaataatcgtaccataaactatgagactaataaaaatatgagcatctctcatatatggacaaaaataatcatactactaacacaaacatgttttgagccaattgagatttccccaatctttgaaaaagaaataaggcaaaacccctttccacgaatgaataaacctccatatcacttaaaaatatattatattattttattttatctctttttcacattatttttggtactttttgttttaaaatattttaataaaattatatttttaaaattttcgtaagtacttattcattaaatgtcaagtcaatggtcatgtggcagttcctgattggtctacatcattaaaattttattttttatttaaaaattaatttaaatataccaataaaaaaaatgacaattgaataataacttgacacttaacagttatgtgtatctatagaaattttaaaaatataacttaagtattattaccgtaaaaaattaaacttaagtatttatttatcattaaaagttaaattttaatatttacgccgtaaattactcattatctttaatccatatataaagatgcattgcataaagtaagctatatttcttttctttcttttttcaataaaattttataaaggtggtatgatgatatggttctcaggaggcattatgatcacttacatgtttctccacttctccaaaaagctcaaaatggtcaccacaaaaccattacaaatatccagtgcaataatgaaccaaaacaaaccaaaacaaaaccaaaaaaaaaaaatccaaaccaaaacaaattaaatgt

SEQ ID NO: 315834 - DNA, 1188 bp, Cannabis indica
tggccttagttctatataaaaaaaaaaatttgggttgaaatttattactagtttttttttttgagaataagttctgttattataaattcaaagagtcatttaaaataacagaaaatatagtaggaggaatctcccctaaccaaatagaatcagaatccatcgctaacgcatgtttagccaagccatgagcagcttggttagcatctctacgaacgtgaaatacacaaacattagggaaattggataacagattttttacatcaaggaccaaatctttaaaagttggagaacaagatgcaaagttgctaatagcttggacaagcatcagagaatcggtctcaatttctgcaatctgcaagttcatcagtaaagtccattgaagagcattgaacaaagctttagcttccatttcttgagacctgaaattgcccacatcaggcctagacagagcagccaaaacagcacccctatgatctcgaatcacagccccataacccaatttattttgtgcagataaaacagctgcatcgacattcaatttgcacagaccaggtggtggcggtatccacggagaatgatcagcaactgtaggatctttttggacaatagatgatgtatgtgaggcttgagaaaaatggctgagataagccattgaaccagcgaaaatttcagctggttttttgcagggtttttgatgaaccacactatttctattcgaccatatagaccacattaagcagataattcgttcaagctccaatttggtgaatgtgtgagacaagtgtattagataatcccctgcattcattctgttagctgctacataatcaaaagaaaaaccagagtggcgccaaaccgatgtagcgtgtttacaactgaataacgcatgtccaaccgattcccacgcacatgtacataaactacaagagctggaatcaatgattttcctttgaaataaattagcagctacgggaatagagtgatggaaaactctccaagcaaatatcttaaccttggatggtaactgtaaactccaaaaatatttccaccattttgcttgagagtcagaaccagtagtttgattttgtgtggctaaggaataggcaagttgataacctgactgcaccgtgtacacaccagttgtaataagaatttttatgtaaaattttataaaaatacaaaaaatta

SEQ ID NO: 315835 - DNA, 1058 bp, Cannabis indica
tatttattggcttaaaataataggtgtcagaaaaagaaaaaaattaaaggaacacatgtcacttttttagattgtactatgtttgttgatataatataaatatatatatattatattgttgtgcgtcactagtcacacaattgacagaatgcgtgaccacgtccaaagcctaattatataatcacgtatatatataaaaaaaatcccctcattattttgtagaaattgcaccctatacccatttttttgttaagcaatttcatttttactctttcttttctatatatttaatgtataccctcttttatttgttatatcccgattataaccttatgtaataaaaaaaatatttctcacctccctgaacagtacccttatgtaagggtataatcagtaatggacttataaaagagggtacatttcaattgaatttaaactaaggctatttttggttaactgatgaaaaaaaggggtatattacaacttacccctattatttttctttggagagtttacccgtccatgcataaataataccaatttttctttttctttgttttttattttttgatgaagataaataatagcaattttattaaataaaaactaatgtacctaaaatataataattattattatatatgactaattttatttacgtattagaaaatgaatgcacattacctaaatctcttaccaccattataactttctttaaataatttttggtagccaaattttttgtaaggtttcataataatatttttttattaactaaattagagaattaatccgcccttcgcacgatactaaataatatttgttatcttttttaagttttaattttttaatactaaataagtgatataatataaaatatgacatcatgttataaaaatatttggaattaatatagattttttgaaagaatttttcttatacaaatatcacatatagcaaccaagaatcttctggtgtaattgacgaaatacgtcgaagttatgcaattccatatcgtctagtgtgatgatttgaaactgtgtaggtatgggactaca

SEQ ID NO: 315836 - DNA, 717 bp, Cannabis indica
aaactgtacatggcaccatcaatctcgagccaaattaatcttcttaaaatattatacgggtttcgaattaactcttatctttccttagatgaaaatattgataaatgatatgaaataatcactacaacatatcccctcattagcggtggaccactctgccgctaataaccccagattcggctgtaataggctattaggggcagaaatccctcactaaaagtccgttgctaataataatttgctaatactgttattagcggcaaaattgatgtccgccgctaagaatagtattagcgacggagcattagcggcggggtcccgccactaatgccatttgctagtttcaaacttcgcaactggcaaaggacattagcgacgggaccccgcctctaacatcatttaaatatagaaaaaattataattttctaaataatattatataatataataatattaataattgtataatattataaaaatattcatacaatatcatataaatcattgtataatatattaaaatttaataattttataaataattatttataaatatttaaataataatttaaatataattaattaaattacaaatattataattgctgccattttttccacctctaaaaactcaacagaaccaagatgttcctgagtttaatgcttagccttttgaagctcagctttactaactgaaacttgttggaaattatttta

SEQ ID NO: 315837 - DNA, 1047 bp, Cannabis indica
aaaaaatattaccaaacgtcattataacaaattatgttatataatttaataatttgaggtacaaaagaaaaaaaaattaggatgtgcaaaagaaaaacttaataacacttagagattatttttatttttacatttttaaaataatttttttatttatataaaaatacatggaacaatttaaattgtaatataaattcacataacaactcacacagcgattattgaagtaattcaaatcataaaaatatataaaaaaaaatacaaaataatataagagataattcttacttattacgtacaaatttgcatcgttaagatagagttaagaaaattgattaataacacttcctcatttctttttttttttttaaaaaaaaaaaaataacataccgtcatctataaaaaaaattaatcaatatataataacactccataattattataaccctagcaacgaagaattgtgaaacatttttgtggtcaatatttgagtcaatgaattcattcgaaattttctttaatttgatgatattattttttcttaaagaaaaccatataattggattttgtaataataattaacttgtttaaactttaattaatacattacagggtcccttattaatgactcgtccttttgacgtgccgacaaggtaggcttcgtgacgggttctacgtgacagaacacacgtgtcaataacggataaaacaagggtcccaccccttccctcattgggtgccacgtgtacaatttctattctattctattccttttttttcgttctactgtctcggcaagtcaaaattcaaaaaggtcctactttgggcccgtttggcacagcttttggaaaagctaaaagctgcttttcaaaaaagctgtgacaaaaaggtgtttggtaagcagttaaaaaacagcttattgaagaaattatgaaaagctacagctaaaagctaaagctggtacaacccaacttttagaaaaagctgttttgattaaaagactttataataaattatttttactaaaaatttatttaattatttatt

SEQ ID NO: 315838 - DNA, 704 bp, Cannabis indica
ttccattcctattcctatattttcattcctcccaaccaaacgcctcctaaaagaaattagacattgagagaaaaaattggcagtagtatcacaaacaacaacaccacagagataacattttccaacctcattaccaaaaatgatgctcaacctgaactcgaaaggaaggcagtctctgcaaatcttccaaaggaagagtttcaatctttcatgtaagggggagttccagagataagtgaaagttttagagttggaaaaagcaggacgaagaagatccatataggcagctttaagtgaaaaggttcctgaagaggtggatttccacaccaaagagtcattctcatgcagctcaaatagattgcattccatcatagttttgacagtggcaggcttgaacaatctatcaatctgttcaccatcccaggactcaccaatgcctgatctgaggtgttacatgcaagggtactgggactaattagtaattattagtattgtctagttagtataaatatgtaatactattacacaaatgggtagaaataaaaaaacataaaaacaagcacaaatataaaagataaaaactaattagagcccaaatattcttttaatattcagtcccatttctttctaatttcctactaaattctcagcccaagtccaagcccaagatccatagggtcaaagagagtctcatgtcactaatg

SEQ ID NO: 315839 - DNA, 794 bp, Cannabis indica
atgttattaatttttattttagttgaatctggaaaaaaaaaaaaatacctaattcggtttgggcgggttaacccgcccaacccgcccaaccccgtttggtcgggtccagaatttttttttttaaatttagggctagtttgcatgcagaattttataacccgatctttatgtcgggttggaaaatatatagtataaaccgactaaaccgaccgatgtacagccctaatggcgatagttaatgccaccaaccctgccataaatgataacggaagtgtttttctcgtttggaaactactgtaaagcttgctccttgtgcctcttctcaacaagctctaacctccttttgccttgttggaagagttattgcacctatgattgtcaatgaagcttcagtcatggattttgtggacaaaacttggaagttcaaggtgaatgtggctgctatgtatgagtccattaacaacccaaattgttttgagcttggctttgctcacgcagaggatcgagcctaggcccttgctaatggaccgtggcgtgtccggggctattccatgattcttcatgcttggacccctaggaagtccctcacggtcaatctcgattcgatgaagatttggatacaaatccaaacctcccccggatctatttttcagttatcaatggtaatatattggggggggggaaagccggcaaggtcatcaatgtggagctggatgaaggaaaaccggctttgtggagtaaattccttaaaattttaattgacctggatgtgaatcatgttgggttttatgccc

SEQ ID NO: 315840 - DNA, 1322 bp, Cannabis indica
tcttctcaatatgcatggcatctaggttgttttttaacttgagtgtactccaatattcaagttcgtaaaagatgctttttttttcagttactttcactcatacttctttttcgataaattttcatgtctttttgggatctgaggttgtagagcatttacttgttctaaaatcttcttgcacctaaactttcttagggcacgtctattgaggtgcctttaggttgtacaaagatggtttagagcgcaatacaaataactgattcataaaaaaaaaaaatcttcttgaacctaaactttcttcgggcacgtctttcctcaactttaccatcaaagtcgaagtcccgcctcatgtcatgattatgtggcaagaatcatctatgaccaacataatatgtattcctaataacgcggatggaagatgtatctttattgcacacaggataagctttatacccctgaccactccatccagacaaactattacaagcaaggaaatcgttcactgtccacagaagggtagttctcatgttgaacatagtattcgtattgacatctcttgtttgaatcccattactccacaactctttcaacaagtctaccaatagtctaaatacatcaatattcttacctagtgatcttggcggagtaagaatactcaacttgaaattattattttccatacaaaactatatagggaaattatagtttgtcaacacaacaggccacatgttgtacaattgaaacaaattaattgggcttgttattaatgttaaaataatttcaatttatttatttgtattggttgcaatgatttattttatgtaccttcatgctatttctctttacttcaatgttaaaatacgtatatcattattcttttattaaggttattgtattttaagatcattcatattaaatttctattttaatattttaaatacactacaaagtttttatttttttctattaacatgaatgataaatattacagaaactttaaaatttctccatatataaataaaataagaagtcagtgaaaagtactataacaataaatcatttccaaatcctaaaatttagctagcaaatgagccaataaaactaatcaatgaaatgttatttatctatttatatcaaagtcacaaacctcttattaattacaattctatcaacaactttacaatagacgctaagtacaaacatatttttctccattcttaaaacaaaataatagtgctttaatgtatgcatttcataataataataataacaacaacaacaataataataataataatcataatatgcaaaacgaaatttct

SEQ ID NO: 315841 - DNA, 1184 bp, Cannabis indica
atatttttgtcaattaaatatgccaaaaatagaattaacactacatatgttgattccattagaaaataagttaggaaattatgtgaacactagagagaagattatcctggctctatctccatttcctatttctacttctttgtattctgtttgtgtacaggatgttgttaacatgtttaacaattttatgcaagttgaattaattttatatgtatatacacaagagtaaattggacagccaatatttattggtggatggtgatagaaatgtacgagtaagggcttccactccagaaaaagttgtggtaaatctttctttgactatataagttatatatttgcaatcatacttctttttactataaatatatagttatatatataaatgtattcaacatttgttatttggggtgacctgcttgtaatgcctctccctaatttttttgttgtgtgtgtgtgtgcataccttaagtagagcatgggaatatgtgtgatagtatacattgatgtactttactgtctttaacacatatagacttataagttctgacataatatttatagtcttaatctaattaagtttattttttcttgatcacattgactaacttggtagatcgatttaagaatctttaaggtacgactgttgttttcctttcttactttttttttttcatgaaatgttgatctgtataatatatggttatggagtttagtggatctctccaagtttgatttcttatacatctaaatttgactttttgctattgcctattgactcacattttcatcagtgttgcctcatgatttgacaaacaatgaggtagtgacaacaaccaggtatgtcaaccattgcttcagctatactaaattactaatttacaattgacatggtcattttttttgaaaaagcttgcttgctgggatctttgacatggtcatttttttaatactttgttttagtaaggagatgtatagagaaacaatcatttatacccttactcaagaattttattgttcacaaggttgttggacaaccacaaaaatattggtaacacatttaatttggataagtagttttacacccttattctgaatttctattgttcacagagtacttgacatttaaaactttgtttatgagtatagttaaatagttgagagctagcctggattaaataatg

SEQ ID NO: 315842 - DNA, 1355 bp, Cannabis indica
gaaacaatatataaacaaaaaagtaacaaaaaaaaatacatatataacttaaaataggattgaagaaatgtgaacaaaattaaaaataaacaaataaacaaagaacatagaacatacgaaactaatttgaaaaaaaatacaattgaaacccacaacatcaaattaacaaagaaaaaacccaaaacccgaaaaattaatgaaataaacaaataataaacaaacaaaagatcagtcgaataaaaaataaacaacaacacgaaaacagcagaacaaaaaaaaataaaaaatgcctttctaggacgaacaacaacgaaatcatcgtcattatcatttctcttcctcttagctttcctagcatcaccagatgatggctctccaacatcaaccataactttggatttctgattagggggtttcgaagttttttgagcaactgatttgggtttagattgtttaataggctttttttgggtttctttagagaaggggacaataaactcgaacgagatcgagtaacagccattactcaaaaacaaagaaaaaacgcaaaaacaacagtcagaaaacaaaaaagaaaaaaaaatgaagaagccgatgatcaaaatgaagaagaacacgaagatgagaatgatgaagaatagcaaattcaaaatatattgataataacgagggagtgggttagagagtggtaactggcaggagaagtgattgaaatttgacagattggagggaaacgtgtagacagttaagtgacataagcaaaaaccgtatatgatgtaaaattttaaatagtaaccgtataaatctttaagcaaaatggtaaaaataaaaaatgaaactatagaaccgtaaaaatgtttataaacagaaaaaaaatagcattttctgtaaaaattccaaaagattaatacaaatgtatgacataaaagtaatttgattatatcttttttccaccaaagaataagaagaaaataacttgtaccacttgtagtttaaatttttatctgggattactgagctacaagttaaggtagcgtttgattggaagtaatgaaagaaataagttttatttatttattttttttatttggttgcattttaaaatggaaagaattactaaaaattaattttaatgatttttttttaaagaattttaatgaattttttatcaattgtttttattttttatgttgttactagtcaaagagtaatatttttggcttattttttatagaaattgtgttgattttttagtttttaataacatcgagctagtgatatgggttatgtattaaattcttagtttgttttattaattttattttgaagattgttattctaatataaatgtgttt

SEQ ID NO: 315843 - DNA, 755 bp, Cannabis indica
tactttgattaatgcatatatttataagaaatttatttggtgagaacgttagtttcactttcaccctagtggtattttttatatttgatatattaagaaattattataaattaattttttttttatgtgattgtatacattaatactagatctgttttctttcgggcggttctaaataatttagagtacaaaaaatagacattcagttgcaagtgtttggttttattttatatgtgtgcaaaattattttaaattttatttttgacataattagaattttttaaaaacatacaagatgcctactatacaatatcatataaaaaaaattgagatataatttcttaaaaagtataaaaaatagaaaacacccataagatatagtaaaatgatgcttttatgcctaagaagctccttatatttatatatgtactaggcaaatgtttatatgtttaggttcttttaggttatgttttgatttttaaaggtttgaataaaaatattaatttaattaaataaataatattattttagtagaaaaatatttaatttaaagctctataaacaaaatacaatagtatatttttgaaaaaagaaacatatgaatacaattgctcaaagtttttaacataatttatctcaaaaaaaactttaagaacaatgataacaatgataatgatgatgttttggtataataataataataattattatgattattaataattattattaatttttataatagaattcatgat

SEQ ID NO: 315844 - DNA, 999 bp, Cannabis indica
gggcataaaacccaacaagatgctccatctacatataacttccaagtgtctgcgtctggtgggataagtggattttcatcttggattattccttctatttggaaatcggccaaagccttgatgggtgttcttggctgataattatgtcaaactgcctcagttcaatagacaattttatcaacttccagaagcatctggttttgacaaaacttgtctcaagggttgatcaattaacacctttatcaaattttcctagaagtagggccttaatttgtgagatgcatgaattaggcatagggcaggattttcaagaggtggatacctcaactctacccccagtagtctcttactaaaatagtaaacttgttgttggtgcttcccctcttctcgcactaatgctgcactaatcgcattctctgagatagccaagtagataagtaaagtctctctagttattggtttagccaaaacgggaggggttgataaatgtttctttgtgtttgcgaaggcttcctcgaattcatctgtctattcgaatgttttatgcctcgcaatacattgaagaatggtaggcacttatcagttgatttcgagatgaatttgttaagagctgccatttttctattaaggcctatacttccctcagctttgttggtgatggcatttctatcaaagccctactttttttaggatttgcctcaatgcccctcgtgttgactatgaatcccagaaattttcctgaggagactccaaaggaacaattctttgggttaattttcatattgtacttttttagtatttcaaagcactccgcgaggtcctttgtgtggtctccacttttaatcgacttcaccaacatatcgttgatgtagacaaccatgttcctccctatctacttttcaaacatctcattcactagtcattgatatgttgccccaacgttcttcaaaccaaaaggcttactttataacaataaagtcccctgttggttacgaagct

SEQ ID NO: 315845 - DNA, 1209 bp, Cannabis indica
aaaaaattaattttttttaaagagttgaccgagttgactgagttgaccgggtcaacccgccaacccgctaaacccgaccaaccgaaacccgccaacccgccaacccatgccctattcgggtccgggttcggtttcaattttttgaacccgaaacccgccaacccgaaacccggtaaacccgcccgatgttcaaccctagtgtaaggtaaatcatagttgggaggatgtagctgtatattactcccaattattaagtaataatatctctaacaataacattaataacagtaagataatcaaattccaacaaggggacaagcttcagctacatcaaaagaaaaaacaaccaatccaagtcctagtaccaaaagttaagaccaagcttgtatcatcacaaatctaagatgatttttatcaagcaaattgggcttgtgttttgtcctaaaacttcactaaccatttctcccaagtctatctacctctgattgagatttcgaggcctaccaacctaatcccatctcatcttattagtcgggttgtttgaaaaactacacctaaaactattctaatccagttaattgaatgtaaaaaagcatatataaattataaattatttaattgattagctgtattgtcataaatgcatatttatgtgttgtttcattatttaaagggctttttcatttgtttattaaatccttatccctagctaactatagttactaaccacatgtattgtttgcttaataatttagcatctttaatctatatagacctctgaatctgaaatcaagtacaagattgaaggaaattatatatgaagtgtaagattcagttctaaagttgaagttatttgtgatttagtgtttgtatgagtagagatataaaatattatctgttatgttataattttaaattagttcaaatataaaaattataatcagcctaatcataacacttattttttaaattattatgttgtattttgatgaaaattaaacttaacaaaatattattttgtactattttaaaataaataggttaaattatctttcaacaaaacaaaaaattcaatcaataatttttcaaaataatattttatataaaatgttgtataaatctaaaataatttactatttttaaatttttagtacaattttttaatttttttttaaattttagtataaactgcttctaatagaaatctat

SEQ ID NO: 315846 - DNA, 1864 bp, Cannabis indica
tttaacaaaacaaagagtacaatcagtaatttttacaaaaacaggattcaaaatagtatttacccatatctaaatagtaccgaaaataaatttcaaatataattgtttttttaatatatactaaataattatttaaattttattttctaactaataaattatttaatttttataaaaaatttataaatgaacttaaataataacatacacaatgaagaaatattcgactaaaaatacggtaaactattcaaaatattttaaaattttacaagtaattttaaataactacaaaatggacaatcaccaaaaaaaacccgattaaaaactcttttgaatgccgaaataaaaggagtaccaaaacacctctttagagggtctactacaaatctttcctataattttatatagtatttagtaaatattttagacataattatctaaaagaaaaattaggcataataataacggacagataaattaagtcctgatattaattaagggtcagtaagttaagctacctaccctaaaaacaacccttcagctaagctgtagctaaactaattaaataagtagaaattttgggtcttataacttgcatttataattacaaatttacaacagcttattcttgagccataccactttcactttgtctaaatatggtaactttaacctcaggtttattcttcttgatcagctcaaagatgcatacatcacttgggttaagagagttgtctcttgcaaatgcagcccatccagcagaaaatctatactctaatccagaagatgatgatgccttattaatagttaaattcacatgccaatgttcctcatcaacccaaagggtgacaatttgtgactttttctcaaaccaagggtttgcaatagctattggaatatactgcacaaagaaaaattaatattcaaacattcattactagtgatctcctcatgatatggaattatctaaaaagaatacaattttgatacagagatgtcattataataatgtatatgtcactttattcagaatgatatgaataagcaacattttctacataccagtttttgtccatgtccacgcacatgggttgatctcaaattcacttggaagtaaggattgttcgagaagaatttgctggctgcttcagaagctatgctaagtcctgaagatgaaggcctcttataattagtgccttgacttccagtattttctttagataccagttttgtaaaattttctgcattaaatataaacaaactgtatataagccaacttttcttggggaatgtttttgacattattcttgtcttgaatcataatagactctttacctgaaggttcaattacttctttatttgcaattatgtcatgtggaatcatactggctatatcataattattgctagtagatgaaggttcaatttccacacaaggagttgaacttctcttatttgcagctgaaaaacaacaaatgcataagttaactctatagccttattcgcattcaaaaatattggctaggaactttattataattctcacctagattgttataatgatcgagacagtatattattacaggtcagtgttcttgtttacctggtattggtaatatagacacttcgaataagattactccaatgctctttctcaaaacaaaggcacaaacatcacctactttcaagtcattgtcttgaacaaatgccttccaaccaccctcgattgtggttttcgaagatactccacgcggtctgacatagtacttcacagaccaagtcctcccatccttaaccgtaaggatcacatcttgaggagtactactgatcccgaaaaggtacttttttgcaaagggagatggca

SEQ ID NO: 315847 - DNA, 766 bp, Cannabis indica
ctattattttttggatgttatttttcattttttttttcctgtgattgtaatttttatgacttgtaatttattttcctaatggtatataatttttcaactactatctatgtataatgccacattattaatttaacagtcaactttagtcaattttaacagaattagatagaaggattatactattccaactgatatattttagggggtatttttaactacacttataaattaaggggcatcatagtatagtgtcataagtacagggactaaaaaagctaattattctaaatttatatatggacgagcattgttattgggtaatttaacattttgtagacgtattgttttataattgggtagcaataccctctaaaagttattgtatcaaactctatatgatttgatacatagttagaccaatagtaatattaatatgttacaaaatttaaataatgacatttttttaaggcattcatctgaaaatttccctatacatctaaggatatacatactttattaaagtcaaaattaaatatactataatttatctttaaggagatcattttttttatttttaatattatttagttttatttgctttttattttatgtttttatgttttttttttttttgaggagaaataccatgttattataaatcagaagatagttcatttacaacaacagagtatatcggcggtggaatattatccaaccaaaagcaagcttcttccaaccctaaagcatatctagctaacccatgggc

SEQ ID NO: 315848 - DNA, 1887 bp, Cannabis indica
gtgatctaagtagtgttatctcttcatatcaatacaactaaaagggtataggtcattacctgctaactaagggggccaaatctctataaaatcttgtattcatttactttattgttcttattgtgtaacacgtggcaagcatcagcgttgaatatgactccgctgttggttggctaaatttgaggttaacagtttggtgctttcattgagagtgagttgatattatttcttatcaaacgccatgcttaacacgaggagaactccgactacaccctcaagatcttctaattgcagatccttatgtccatattcttgcacgacaaaaatttccatggacactgtggatgtggtcaatcctgccatctcggaagacaccacaaatttggccactgcaactagccagggtgacacaaacatcttggtggatctaagcaatgcccttgccttcaaggaaagaccatccactggcgcctcccactgaaggaaggacccatagggaacatactccaggcacaacaaaatattaacattaaccacatcattccaaaaaagaaacaaccccccctaaacgttgcctagggacctcaaaagcattatcaaaagacagtttagccttaaacaaactaatactatttgtcggctgcttaatctccatcacaaaaaggattttaagacgatgttgagtcaccaggagggagagagtttggaatgctcgggaactccctaatttacgagcattccaactgatgatactcatttttctaggtggggttgctaagcaacacccgcctcttcatcagcatgagagagagtaggaaccacagcaaagtcacagtttgaagatcgagctctcttcaacatactcctcacagaggagcccacttgacagctttgtcttgtataagaccgcttagtaccaaaaatggtgacaggggcaacacgggccctaggacgtattggaggagcaggtatgtcccttggagccttagggtacattggggccttgcccttggtggaggaggtaatcacagtggtggtcataacaggtgcaaaatcaatggagcaagtgaggtttctaaaagtgagagaagtatggacgggtggtggatggttatcttcaacaggggcactagggggaggcagagtagagggattctcaacagcggaagtattaaccaaagaagtattagcaatacttggaactaggaattgatccaccgcatcttgaaggctttaattggacaaaatgttaagggatggaatctcttcaaaagggatagagttagagagttttaaaatactttttttgtagaaggacttagcaggagctcttaagacatccttgtagctaagtgatggggagtgggtgtgagtgtcgcagtaatggaggaagaaatcacatttattgaatgtgtggtcaagcttaccatagtggtaacaatagttttggatgccttcatattggaacttcagccatttagtgagtgagagtttcctaaaatgaacattcattcccctgaacagagactttgtggtgtcgagaagcacacggatacgcatgaaaggggtgatagagtcatacagggatggaaggtgaacctcaatgaggttcccaatagtgttagcaatgaaatgggcaagaccatgggacctattaccaaaaggaataaagtgaacctgcatccatagtgggatgtatcgaagctggctgggggggatgatgtcaaagcgatctggaatggcaaaaagcatcagattacggtcgaaatgccaaggttggccttcgacaacacggcgtcgattgttaggttatttttagtattaattatagattaagtttagtatatttttaattgagttttaatcgtgtttggagcatttttacgc

SEQ ID NO: 315849 - DNA, 1457 bp, Cannabis indica
tatttctcttgcagacaaagggcccgtttggcacagctttaaagttgtgatataaatgtgtttggtaaatagtcaaaaaaataactttttaaagaattttttgttgctttgtaattttttttttgtttcatagttatttttatgttgttttttattttactaaaacatagtatttatgtaattttgaaactttaatagtaaaaaaaattatcagtaaaaatgtaaaaatgacaaaaaaaatatatttttgtaagatcttaaaaatttattagaggaattacctcacatctattttatcatttatttttatttaaatttacggtttaggttgctcctgaaccgatagttttcatgtgggttgatatttgaattttagttgttaaattgttggttgttatataaatttttatgtgaatttttgcataaatatataaaaaaaatattattagggaccgttattataattagtgtaaatgaatatttattattttgattgtgaattatttctctttagaaagaaaaaaagaaagaaatgaaaaggatatgcctaaaaaaagagaaaagatttatgacaaagggaaacacacttttcatctaccaacaacgttcaaacttcaaatttgagttgagacatttaaaaaaaaaaactctaaatttaagaatccaaaatacctttattttatttttacctcacaaaagaaaataaaaatagtttttaatataaagtattaagaaaaaaaaaagttttagttgattttttttatttttagtaggatgaagcctcacagatcctacctattcctagttctaatcaacaacaagatcatctgatcttgtactataatttttcaagaagttatatgatcaagagcgagtattggaatgccataaagttattaaaattgggtcaaaacgatttatttttgtgctcatcttcttggtggaataccttcgaaatctttctgttccttctaaggtgagggtgtttatttggagagcttgtttagaatagtttcctattaagtctaatcttgtctctcataaagtttccacaaatcttatttgtttagtttgtgggctgaaaaacgaaacttcattccatgcactttggggttgtacaaggcttgcttccatagttaagctggtggattttactcttacatctaaagaaatttctcgggttaaccttctctctttcattcgagaaaaggctgctaattcttctttggcatatttggtatcgttgaaaccattaggttcatgaccaaaaatttcttgatatcgaaggcatactaggctgtgttagacttttatttgggcttacattaaattttatcggttttattaaaacttgggttgattggatagttctttgctgtattagcccatgttgttggtgatcaattgttaatgggcttagcatctgtgagtaaagtctaggtgaagcagaagtgtgg

SEQ ID NO: 315850 - DNA, 1132 bp, Cannabis indica
ctttaggatggaagttcagactttattaactaaaatccaactaactatctttaagtatttctgtagcatgaagacatggaaaaacctattttaaggctcgagagctaaaattacacgaacttgcaacacaaaagccaacttagcacctagggtttcacctggtgcgcaagttgacatattcaactaggatttcagttttggggaccgtctaagtgcaaagaggtcaaaacatatattgagacatcaactagatataccacggacatatttgaggcatcaaaattagaatcagagcaagttcatttttgagcatctggagcctcgagcacctagtgccccagttgacaatctatcaatttgggcaccttccaagtatcagatcggtgatccaacttttgcatcttctttgtcttcatcaaaaacaagaaaaaggtcctttcaaacaagaaacaacacttattgggtgcaaaaaaatggggcccaccgcccaggttgatacattaggttggccctgcgccttgacatttttcaacctatgccattttaaatggagtttctcaagaacacttctgaccatcttttttcgtttttaaaaattattgagattcaactatattcgagaaccaaacaaaatttttgaaggagcgaaattgggacccagcacctagattaacacatggagctaggcccagcgcctaggttgacatattgtctacctgggttgtttccgatcaagttcaccgaacagtgttcatgaaattttttctttcatcataaataatgaagattcaagcaaactcgaggaaaaaatacaaactcgagcccctagaaaaggggcccagcgcccaggttgacaatcaacctaggacactgccttcaattactcaaatgtcaaatttgatatgaccattgaatctagaatggtcaaaaatgaggtaggagacctcatactcaaatttagaagccttggaagtatcaaagacaagatctcgagagctcgacagtaagtacctagtgtccaggttaacaaaaggcttggtgcgttgggttctgcttattggattcttatgttgttttaaccgtctatctagtttttcacaataacaaagatctatgaagtcagagaagtcaa

SEQ ID NO: 315851 - DNA, 543 bp, Cannabis indica
ctccattaaatataacatgtaaaacgttattattgtaagtaaataacttatcattttcagtagaccatttgagttgaggttttaactttgaagtaccttcgaaatctaccacaatggaatgaggccatcttgaaagaattattttccatactttctcatcttgagacttgataaatgccctcattctaaccgtcaaataaggatagttaaaagaccacactaagagtttagtgtcccactctgataccaattaaaaaagtgtgtttttgcaaatgtcaatacatactaaatttcaataattaaaaaaataacagttttgatttgcagcaacagattaaaatcttgtcatagtacagcacagatttgaagaattaaaacaaattcataaataaatagtgcataaattaaaacttggcaccaaggaattatacgtggtatcagtattctttcaaatactcatagtcctcgagtcacacccagagaataaaatcaattagtaaagtatcaaaaattacaaaagcaattgacttaaataaatttaga

SEQ ID NO: 315852 - DNA, 1491 bp, Cannabis indica
cccacaatcgttttgtcagcttcctgctatttaacatcactcttgccatctcttgtaaagttcgattctttctctcaacaactccattttgttgaggagttttaggagctgagaattcatgacttataactgtagacttacaaaaatcatcatatacagagttctcatattccttaccatgatcactccgaattcgaacaattttaccaatgttacatttacgggagagtcctcctctataactgcttggagaggtccccaccagactctacatgcaaaaataaaactctcaaagagtatcaattttggacgatcagatcggcaacacataaggtcaatcgaaagaggaaacaaagtttcatttggaaccataaaaggtctcgaatagaaggaaagaattcagtcattcctattgctaataacgtagctattttcaatcaaaactcaaaaagggtagaattttacaatcacagaatctactcgtggttatagatacaatgtgcgaaatgctcttattctacaaggaagatagaatcagtccaaggcctaagttttgttcatcatcaacataaagcaatcatgggactatcaagcagaatactaaacctagacatttatcaagatttaagaaatgtacagaaggaagcttacttggtgaagaactaggtgatgatgaaaattttgaagaaaacaaaggccccgaagaatgaatccttgcgtcaaaagaaggtgtcaaagaaaactatgatatggatggtcaatcaagatgtgcgaccgtagtttgaagagcacaaacttgactaataagtttatctatctcagtatcgatatccaatattcttgatgacagtgaagaatcgccaattagaactgggggtggtgctcctggattctctcactcatgaatctgaagaagaagatgaatacaatgatcgatgtaatgcttcagtgttatcttgttcattgtcatcttctctttgcaggttcaacctcggtttgaaatttgggtgaaagtggtgaacgtacatgtttgcaccatatttatacaaaaaaaaaaatggcaatccgcatatttctagattaatggccatgattacgctcaagaaaaaccaaaaaatatcaacggattgggaaaaaattgatagttggacatttaatgaaatgttttgtatcaagaaaatttgaatgatgatgttctttttgagacttatgttgatgtaatcaactgccatctcaccaagattaaccacatgcatgccatcaataaaatttacctccacaaactgatgatacaattccgcacgtgttactctatttcaaaaaatggagagttgtcaaccacaaacaagatcagtatggaattcttaaaagttctgccttttagcctctacctgtcccgaggaagagtgcaagcttctacaacccttagagttacggaagctagtggtaaatattatccgtgtttctagatggggacacgtggaattccaa

SEQ ID NO: 315853 - DNA, 902 bp, Cannabis indica
tctaattcatagttattgatacatataaaaagcacttacaccaagtctcatattgctactttttataataataccaaataaaacaatattcaataagagaattttatttgcaccgctataaaggtatacccgttttaaatatttttattttatataaaaaaaatatatatatttaatttttgtactaatttattaaaattttatacttataaaataaaataaaatatattttaaatatttagacagaaaaatttgtatttattaaaaaaattatatatgatttaaaaaaatgtgaaaataagatgaataaaattattgatgtaagaggaaataatgtgaaaaagaaattttaaaaaaatattaaaagttatttttaaaagttgtatttaagtttaatttttttttttttaattatgaggtgaacttataactttatagaatgtaaataaaattcccttagtcaatattaaagacaatttgatagctaataatattagtaatataatatctaatattaattttgtagttaatattagtaatataatttccaatattcatcatttcatatatttatagatacgattatttgataacttttttattactttatatttataaatattgggatatgattatattagtggcgcgtttactaaactgtaattggaatcagaataatcaatgggagaaatgtatcagtttaaaatagaaaataatcgaaaacaatattttataatgatgtttactaaactgttcggaaagaaaaccagaatcatattattttgtttagataactagaaaaaataatcagaatgctttaatttcacaaaattgtcattattagaacatgtaattattttctgtttatagatttttaaggggtatatttatctttttcattt

SEQ ID NO: 315854 - DNA, 956 bp, Cannabis indica
tacacaaatagggaaaccatatcaatatataccagccgaaatatacaaagaataataaaatatttttatcaattaaatatgccaaaaatagaattaacaaactcagtttaacttattatttgaatgcattttataaatgatattccaaaattctctcattattattattattaaaagatgaaactattcgatagaaatcagaatcattaagatattaattttattccttctcttttttcacaatctttgtgtactgtgtatatatttgaagatatatttacacaaaaggaccgatctttttcttattctataatatttgttgctttgttggggtttggtttgggtgtatataatgaaggagtttgaagcaaattcttaattatcctttgttgaaaaagggctagtttttgtaaagaggaaaatgtatatctaggagaaagcttgagtggcccatttagtgaaatttacactatagcctacaggataagacttgcgacagcatctctagctagtatgtggtctaatgataagattcctctctttatgcttggaagatctatggctgccaaacttatcatcatttctgcttcactataatgtttgtattacctattttaaaaaatgaaatatcaaatggccaaatgggtatctcatatcatatataaaattattatgaataatataaagttcataaaaaaaaaaaattaagaaatgaaagataaactggataagcaaactaataaatatataaataataattataattaatgataattaataaaaaaattgaatttgacttaagtattttgtatataaatatatttttgatatagtgtaaaaaataatattttttgatatttttttttaattaagtagttaaattaagtatagaaatttaaaattttctttttattattcgtcgttggatgaaaatctaatagtttaatattttaaaa

SEQ ID NO: 315855 - DNA, 828 bp, Cannabis indica
tgccatttcttctccaggttcgatgagcagcgacaagctttattctccaggtgtggccatcgtttaccccatgtgacactcactaggtccttgccgtccttgacatcgatttattcattcgaaactagaaggtcacagcaggtaagctttccattgtttcttgatgttttttctttttttctcaccaattctctttttcaaatccatgaaatcattcattaatcatcaccactaaatctgtcaaattttttatttctacacaaatttgaatcttaagttttattttttctaggtattgatttttcattggcaatcattttagattttatttcaaaactcaatgtttcttgctaactttgaagtaacgatttgtgggatctactctttttttttttttttgcagattgacaaaggtagtgggatgaaaaggttcatagatggtcgatcatggtccagtagtggtgattaggagttctatacatttatttattttattttgggtttgaaatgttatttttctgggtttgttgagttcaaaatgttcaaatgctagtgtcattttgtttcctctaaatagcaaaaatttgctacatgggtttggtaaaaaaatgtgtattgtaaaatgtgtgtaattaatgaaaaataataatattttctaatcaattgtaatttatgttgcaaaaaaattattttattttattaattgttcattgtaaaatttgttcataaatatatactattaaagtattaataatataaaatcggattcaatataaaaattaaatacaataattgtaaattaaaaaaaatatatatatatagtgacgc

SEQ ID NO: 315856 - DNA, 830 bp, Cannabis indica
tttttggttttttaatttttttagtgtaactctatttagttataacctcctaattagaatataatttacttggtcccaagtatattcttggatagagattctactatatattgtaaacattgtaacaactaacattgtaatactatttcaaatggaagagaattaaacttggttcacattccattcaaaacaagcacaccctaaaatgttattgtcattataaccttaagtgggaacgggaatatgatcaaacacgttgtcaagtttttatcattattatttaatttttcacttagcaaatcataattttgtacaattacctagtaggtaggtaatgattaattaaaggactaaatttcttctttttcaaccttgacacaattacttattactgagtaatataacttcttcgtttttattgtaattaactcttgtaattccgattaaaacctccatttattgttgctatatgtgatttgtcatgatttttatttaccatattattcatttaaatagcattttttgttaatgatatatctagaagattatccggagaaagatatgtcatacaatatgtttagataatattttatttttccattacaatctaagaacatacttaaataatataattctagtagatacaataagatggataccggtcacaacacatcttattaaagaattaaagtggaaaaaaaaatagaactaataattcacacttaagactagtttgtaacgccgtattagattatattgtattgtattgtattaaattatattttatataatattttaatgtaaaattatatatgatattaatttttatg

SEQ ID NO: 315857 - DNA, 948 bp, Cannabis indica
aataatattttttataagtgtaagttttatccaaaaatatttttttttgccccctaatattggttggctccgccactagattcaaatttaggatctcctctttgttaaaagggtgaaactactaaactatgtctatggccactttaattagttgtgtactaattattacttttatagttattctcacaatttttcttattttatactaattttagggagcacgtccattgcacgtgcccaaaaactagtaacaagattaaagttattttgtgaaccattagtttcctagtttaatgtaaaataataaattaaagaaagtatgattttagtaatttattttgcttcaaagatggcattaaactgttatcaaattattattattattttgtatccaacatatttaaatattaatatttaattatagcaagttattgctggaactttataatcataaaatcttcacaaaaacaaaagtaggtacttaacaatctacagcaattactttaatctgcaaaactccataaactagactagtaagacatgtagacattgaatctcattaatggccattgaactataactaggtatctttcctcaatactacatggtcgagcgagcaaatattatatcataaaaaagttgattcatccatataactcttacacacacatatatacaaaccctactctagatttattgattttcttagatctaactcacccgggtcaaggcccaaactactttagaaaatatatattattactaaaacaaaacagtgataatacaaatcaaatatttaaataaaaaagaaaagataaaaaataatgacaaagtatactataaaaaaagagagcataatttcttacccaatcatatatatacactaaatcaatgctaagtacaacgtatacttaatttttattttggttatatatgttttagctgtat

SEQ ID NO: 315858 - DNA, 1040 bp, Cannabis indica
ggggtgaactactataaattagttgtgtctctctaaattacttagctactttttttattctcaccaatctagcgagtagttgtggcttagaagtctagtccagattatgagttaatattttcgtgctttcattgagagccataacttaagaaagttaccaaacaagatggtgggaacatgttctacaggtgttgacagacagactccaacagctggccaagcaactgggggcatgccaattgacagggttggaactgggacgacttttgtgccccaagcgctagggaacagtccttaaaactagctcctcaactcgtcctctaaagccaccacaaactgcccccaagaaaggtaccaacgaccagatcccacctggggagccacacatggagatagaagaccctgaggagatcgatcctcaggtagctcagctcagtcaaactgtggctagcttgtaacaacacatgtgagattctcttgataaagcaacatgaacagtttaaactaggggttttcattaaaatgcccaaaccgctcaaactgcccgcaccgcaccgcactgcaaaaaaatgcagtttgaaattatttgcggtgcggtcgcggtttgaatttttcctaaaccgtgtggtgcggtgcggtttgcagttttgaattgttaatatgcggttcaaaccgcaccgcaccgcatattataaaaataccaatttttatatttattaggtccaatatgtgaatattcaacttaaagtctactattctttcaaaaaaaaaacttaaagtctactaattattgtattgttgacacttaaaattttttttctaagccttatagtattttgacaagttttgcttcaaagtttgttgtatttgtgatagtttaattatttagttgatagtccaaaccgcataaaccgcaaaaattgaaccgcaccgcactatttttgtcggtgcggtttttgtcgggtttttaagttttgtcggttgcggttgcggtttgggtaatttggtaaaaaccgcgatgtgcgggttggtttgaaaaa

SEQ ID NO: 315859 - DNA, 588 bp, Cannabis indica
ttaataaagtaaatctgattatatgaaatgagttttatttaggacataaaacccaacattagctacattccgtcactgaagtaaagtcaaagtgtagatgaagatcaagtcgaaaatattggactgtggttaggtccattctgagacatattaccactaacggaaatggagttaacatggagaatttttatttaattaaaaactcaaaagactatcgtacaaataaatatggatattaactattaacgtaaacttaagaaaataatatacataaatgaaataccataatatcataataagatgctgagattgagaaggtttctcatgaggatgagaatgatgtggaagatggtgatgaggatgagggtgagaatgaagaggctgataatgaagagaataaaaagggtgtgaatgaggatgtttctcggggtgaaaaaaatgatattaaaggtgtcaataatgatgaggaggacgatagagatggtagtggtgaaggggatagtggtaatgatgttgaggtattagaagatgttgtcaacgatgagaaaaaagaaaaagttgatgatgattttttcaaaggttatagcc

SEQ ID NO: 315860 - DNA, 658 bp, Cannabis indica
aaaatagactcgtggagtatgcacacaaaaccacgtaaaaatatttggtgtcatttatacatttatcatttctcattatttttgttatatatttattacgtaaaggctaattattttttgttaacgaaaatctgcgttaacacataaaatctattaagataatacatataataataaaaatatttcaactcagtatttattttttcataaaaaatgcttacccttttttttcttcttacctctctctccctctttccctcacttctatgtgacaccatgtattaatctctttctcaatttgattcttatatgcaacataagaaccgacattaatgatataaatatgggttgagttttttgatatgacacgaaactagtacgagcacgactggacacaaaataataggtacgacatgacaaaaaaatatgagcttaggcacgacacacatcacagtacaaatttgcacgacacgatacaaaaagtcttaaagcatggcacgtaagcatgaatagattagctcaaaaatataacattaaaaaacatgataattcgataatattaacaatgaaaaatatttatttatcaattaaaatgatagcattattcaaattttaataattataaattatttttatatgattgtgtaactattgttga

SEQ ID NO: 315861 - DNA, 1529 bp, Cannabis indica
tgtcatacttttgcaaacactgtaagagctcagtagcctcactaaaagaagcttgatagaagaaaattgtgtcatctgcataaaaaagatgagataaaggcgaagctccatggaaaatgctaatcacagatatacctctagactgctctgctctcaacatcagtttggagaggacttcactacatagtataaatagaaaaggaaacagtgggtccccctgtctgagcccacaattaggattgaagggagtcatcagagtgccattaagtaggaccgagaaaataactggtgtcacacatgccataatgagagaagaagccttttcactaaaaccattagccttgagcactcgatggaggaagtcccattcgatgtaatcataggccttattcatatcagttttagctgccataagacccttttttccctttttgtcttttaaggaatgaaggacctcctgcgccataagagaacattcaacaatccatctccccgaaataaaggttgattggttgggagagacaagtctatcaatgatatctttgagttgatttatcaaaatgcgagaaatgatattgtatccaaaattacataagcttataggtcgaaactgtttaaacacaacaacattttccaccttcagactgaaacataagaaagtatatgatgcaactattgatgaagaatacacatacgaaagaactccttaaccatacaacacacatgttctcccacaatgtgctaatatttatgaatgaaaatactagggaacccaatcgaacctgaggccttcaaaggatgcatcatgaacactatttcacgaatttccccatcaaaatactactaagaactttattttcttcctcagaaattgtattaagatctcgaaataaactttcaaaatcatcatcaataataggctctgtagattgatagatttctgcaaaatttctctaaaaatactcaccaatcataccttaatctcgaatctaaatcccaaacagggattcaatacatccaatacggttacatctttaatagatcatagtagaagcatggaataacttcatatctccatctctaaatttcagccaacattcacgagatttttgcttcgacacaggctccattctaccttccaactccataatctctagttgaataatcgcttcctcctccaataaagattgagagataggctcattctaaaatagcgagagtttctgcttcatctcctgtagcttcctatcacaaaattcaaaactttgttggttccaagtcttgagagccttattcgtattcctgagctttccagtcaggataatactctggtttccatgcaccgaagtccttcaagcttataactttgtgatgttacaagttataattttggtatcgtttggtaacatatttgttttgtaattttttaattacaaaaatgaaagtaaaatttttgtctttaaaaattttgtttttaaaaaacaaaaatgtgttctataaccacttttattttataattttaaaaatag

SEQ ID NO: 315862 - DNA, 1230 bp, Cannabis indica
gaggttttggggtcaatttgttaattaagaggctttgtatggtctaattaataaattacataaatggcaattttatttagtaactaattataattattaaataaataattttgacatttataaggattgaattggaaaatatggtattatgaaaagaagaataggtggttggaaaaagtggcaaaattgtaactaaagattggctcatttaatgtatacggccaagtgtttattttgcccaatatttattctttttaatccatataattcaaccctaagccctagttgaaacactataaaaggaacatgatactctcactcatctacttttgtcaatttgactattcaaccaaacctagatgagaaagttccttctatagagatttcacctccttcattgttcttcaccatattcgaaagccttagtgatgagtgacgtgcccacacatagtaagtcaagtactcaatcatagtgagtaagacggtggtaacaaaacccgaaggagagaaagagatccaggttcagatcttgatatagctctgctactgaaaggaatcaagggctagagatcttgaacggaaggagtcatcatattccgcttcaatttatgtaaggttttcttaaacccttatgtctatatttcattattttagagaattcatatttaggatgttaatcaatatacttgttagtaaatctagatcctcgtaaaatattccaaccagtttggaaatgcagatcagtcagcatgggatctgtagaatcaattggttgagttcttcaaattgttactaccatttgaattaaacaaaatcaatccaattgtgttcttgagttttgctctcaaagaaagcaccaaaatattgacctcacttttggccaacgacactaagtcttaaaagcgataaggaatcaataagattcacaaagaatataattaatattaagaataactaagaacacgatatattatatgggtttatccccatttttttggtaatagtttacttccctttttgttttatttaacttatgagtagagaagcaaaaatggcttgatctccctcaaaagccttacaaagaaaatgagcagagtaatagctctcccaaataaatgattattttatttttaaattatgtttagattttaaaaatttattaatttctttaatatttatatattatttaattataagatcagatatgttaatattggacatattttaaat

SEQ ID NO: 315863 - DNA, 1319 bp, Cannabis indica
atctataaaagcaagatagtttttcccaattctaaacaccaatataaaacaaatttgagcctagttcttctcaaatcctaataaccttttctacttaactttcgagaagaacctttttcgagagagaagatattctagccaagtagttgtgatggattcaagtagagaagtttttaacgcggttgtgatgaacaacaagattaagggaagtacaagaaaggaagtagttagcaggagacaactcggtcgggaagaggaggatgttgataatttagcggaagctttccttaagaattttcacaacagcctaaacatggagcgtgaagaattgttgaaacgcctccacgaaaggaaagctcggggtgtttagcaagaaaagtaaatgattttctcttctacaattttgtgttttttctcttttggaaagtgtaatgtgctcagcatacttaagtttgttcaaaaaagtaattgaagataatgaaaggtccattagtacaatttgcctaaaatctaatacaaaatgagttatatatgacaaattcaatagataaaaaaaccatgtaatctaattttgatcacttataataataacaacacatgaaacataaatatggaaattacatttacatctatattaacaagttgccaatttattaaatttttactatttttttcaaattcaaaatgataaaatgttacttttatgaaatagaaaatattgctattcattataactagtaacatattttgagtaattcttttagttgttgaatctctctttgattgaccaatgtgtgtaataacactgtaaaccatatttttttattagacttaatactaatcggttaagaaaatttgtcaaattaattaacaacattgaaatataaaatttgtaaagtaactacattaattttacacttaattaacgaatttttagaaaaataaatatatgccaaccctaaaattgaaaaaagaaaaataaaccataaccttcacaaagggatccttcccatatatggtaaggttctgatcgatagagaaagctagagatactcgattgtattggcttgattttaggaagaatccttcaactttttttgtaaagcatatagaagatgtcagggagagtcgcgagaagaaaattttcaaatgattgagcactaagaaagaaaaaatgaaagagaatatgggaaggtggcaaattagagggaattaaatgctatgcctattgttgagaatcatggggttccatctcaaaaccaattggtaatgagtggagtagcccatgttcttatatatggctcaattctctaccattt

SEQ ID NO: 315864 - DNA, 1228 bp, Cannabis indica
aatgactccttaaatgcaattgaagcgttgaagactgatgttcgggaagttggaactctccattacagtgtccaagatcacgtggccaactttagattgaccgtgacacagttcactacatgggaagcctcctggataccgaggaattgcaatggtgtggcccattccgtggctaaatgggcgaatcaaaataatcgctttggttggattgatttgccttcagagattggcattcttacctctgcgtccgcaggggcggattgccctcaaaatctccctgctcataggttctagttttgtttgtactggtttagtagctacttctggtttttatttgtctttctttactgttagttttgtttttcgccttcagcttctgctaggctgctctgttgttcgttgtttgttgttcctgttgttcccctgttttcagggtctttaatcaaaaaaaaaaaaaaaaagtatttggtctcatatattttaatgtaataatttttagagaatattgtcagccaatcgcaaagcgacacgtctagaaggtgctagctagacactactagtatctaataacaatgctatctctctatatatattatatagaataattaataattttaccttctaaacttttgacactactaattttgccttctaaaatatacggcatgttaaaaatttcccttgaactattacatttaccactacaagaataagctcttttgccaacgaatttcattccaccaggttaaccttatgccgacaaattatctcgtcggtaaaagtatattttactggagaattatcattgttttgtcgacaaaaggtggtcaaccaaccgcctaaaggtgggaacttttggcggttcaatttcacttttactgacgaaggtaagtgcatcggtaaaagtgaattaatttttgacgatttaatttcacttttgccggtgaataaatgcgccagtaaaagtggtgaaaattttggcagttcatttctcgcgcattgaaaatgtgcgcggaaaagtaggtgaaaacttttgtcggcgcacttaattgcaccggcaaaagtttgcacaataaatgaaatgctgcgtttaatgttagggtttattgtgatatttttgccagcggaattaagtgcgccggtaaaagttttttccaaaattaacttttgccggtgcttctaaatgcgtctgaaaaaattgaggctgaataaaatggaaatctcgaac

SEQ ID NO: 315865 - DNA, 981 bp, Cannabis indica
agtaattgacttatgcataaatagaatccctcttattatatgacgccagctcgatatattccatcttctcaaatgaatcttactcaaacttcaagtactcgaactgccttcaatttgctttaagagtgtttgtttcctcccaaggtaagacttgaaacattttctttcaaaaatttgaagaaccttctcctgaaggcttgcccttttgttcttattgtttgttgggtttattacagacttaaaatagtaacaaagaaatatacacagagatggagtcgaactcactctcgtacaaaaagacactctttcttacaaaataagaatgaaaatacaaagagatgaaagaggtattaaacctagaagccaatatgagtatttatagatgatatactcattgtggatagcacatacacgaactacacacgtccacagcccaaagaaaatttttctaaaagaaatcttcaatcagggaagaaatttttttcttcggtacctatataatcatgagcaataagtaaaagtttcattttatagaaaaggaaacttcccatttgaatttctccattaaatatctaatcaaataacttagaatatcaatataagatcagaataatgtatgaatcttggctggaaagaaatggctctaaaataattaaacttaccatatttgtcttactttttcaaactataaaagttagacactaaatatttcttaaatgaataaattcaattatatatatatgtggaaagtaatatacaactcattcgagatatatgtaattattataaaatatttttatcaattaaatatgtcaaaaatagaattatcactcttcccctttggaactttgattagcaaataaaatagagagtataaaaatactaccattgcatgaaaacctcactaacacataaataaataaactttttaaatggaaaaaattcaacaaagtacaaacaaattgttggaattattttacc

SEQ ID NO: 315866 - DNA, 1029 bp, Cannabis indica
aatcacgtaatacgcctatgttagttagggtgttacatagtccttggagaactcacaagggccgacgaatcaaaatggtgttgggcatattggagccgccaaagatagctaagagcccaacttttaaccatatcataagaaatttgttttttatcatgcaccaaagtattgcgacaataccaaatttttcagcaaaggacgagaaattcttcaatttctgcgttggacaagttatccataaccccaaccagaaattcataaaaactagacaccatcttcaaactatccaaatccctcaaaccccacccataatgacacaactacaaagcatgaagagttgtttcattattctgtaaatagataagacatacattagaagcatattcattctgtgcctaacattacaagtcactaatcttagctatttttcagcttaatttcttgtactggttttaccagattcagttaggatctttaccttggttagttatttccaactaaccaagactctaaatacctgtttgtattaacttcaaattataataaaaagaatatacagagcaattctcttctattttttcctctgctctttctcatatggtatcagttgcaaccttggccagctcttcaatggcaaggcctaccacacgctctcaagatggcgtttccccatccactacagagcatcatcatcatcaataggctggtacaaaattcaggatagctttctatacaaaattctttatcattgggaaaagagagagcgtccaaagacattcctccacttaaaaggtctaaaagaagatatttaacctcacccaagtcgagcaaccgagctccaataacaacttttgacagtaaactagttattgtcaaaaaaattctatatcaatctatcctttctatcaaagctagaaaaaaaaaatagacaaagtgaaattaacttctgtaacatcaaacagatgttgaatgagagaaacaaatttacaaaggaaaatttacaaaaatactggaatttgggttaacttt

SEQ ID NO: 315867 - DNA, 644 bp, Cannabis indica
aaaaaaaagatttctagtacaggtatgttatttttcaatagaaaaattagggatatatcatgtttacattttaaaacccaaatcaaattaatatacattcctaattcacaagcaagaaaatcagggaaaagaaactttgagcgactaagaatatcaaaatgaaagaaaaactactgtaaaacgtccaacttgtttaaatccagaatgaaagtctcaaatgtatacaacttattattctacagttttattaaaagaaagaacaaaaaaaaaaacactaaaatagattggggagagaggaaaacataaaacaaaatagaaatggtaaaagagactactcatttcaaaataaaaggtacgtaccgagatccctttggtcacctgaagaagacagagagagataaggagatgagaggcgggcatgaaagaaacgaggaaatagatggtatcgagatcctgagcccaccccatcgcctccaccatcgatacatagatatatatatatggatgcactttttaaatgaatgcttagtattaaaaaaaatataaaatacttatttgaattttattttttttaatctaaaatagatatttaataaaataatttatgattttttaaaaattgttcttatttgaattttgttctt

SEQ ID NO: 315868 - DNA, 683 bp, Cannabis indica
agcattataaccattagattaaattaggagtcatatttttggtatcttaggactgatatttgtccaccaaaaagtaggggtaactaaagtttggaaacttgcaacctaccacattttacattttcatgtactattttaattcctttaaaaaaatgtactatttcaattaaaataatattatattttataatactctttattttctttagacataattaaaaaaatcaaaatatgttatatttattataatagtagcatagcaaatagcatgtctaaaatttaaatgttttctatttttaagttgaacttcacttacaaaaatataattgtcactgttatgttttagctacaacatattaatcactagtttaattataagaactattatattattagctaacctagtaaccaaattaaagtaaaattaaatatttatattattttgaattctatgttttcactaatttcgaatttacttttatttttttattttgaaaaattattttagattatatattcttgtaaaagattactattaagactttagtatcaaaatatttttaaatataacaaaaataccttacaattataataaactctacattttaggaccttatgtataaataatttttttccctagaaaataggttaaaattaagacattaaagtaagtttcgtaaata

SEQ ID NO: 315869 - DNA, 926 bp, Cannabis indica
aaatttcgaaaaaaggaaacaaagaaacaaagaaggaaaggaagaaagaaaatcgaaggaggtttgagataccttgtcaacctccatagctttcttcttcagtagattttgcttcatagttggaaggaagggtttagtgggttttttttttgaaagcaaatgtttgaaaagaggcggtcgtatgatccctctttaccgtttttttgaaacgagttgcgtttttaccgtaatacccctctttggaaaaatgaaaataaattaaaaaaggtaaagaaaagtggcccatgcaggtctcgaacctgcgaccttcgcgttattagcacgacgctctaaccagctgagctaataggccgaattgataacgttttgattaaagtaaaattagtatttatgatgtaaattgttttgattactaacagcacttaattagtgtcatataatctttttgtttaatttttttatcctttcgaaacacaaatgaaataatgaaatggcattggagtgtgatttgaactaacatgaactaataagaaaatagttttttttatttatttaaaaataatcattgtagtttagcagaaccaagtgaagtttttatgtataatgttttacattgataacaaagttgttgatcttaagtcacctaactcttaacacttactaaatggttcaatatgattgttagcagaggcggactcacatagagatgaggtgaggcagtcgcctccttaaataaaaataatctctataaacgtaaaataagctttatggtaaagtcattttatgcatataaagaaattataagttgtatttgcattttattttttgaacatctaccaataatacttatatttaatgtcttaattattgaactcaatatttttattgttatttttttttttactttatactatatttaatattaa

SEQ ID NO: 315870 - DNA, 1119 bp, Cannabis indica
tttagtaaaatttactatagttaaatttcagatactaacttatgagagcttgattctagtacggaccatgactccccactattacctgagataatatcatattgattactcaattattgattatatcactaattttaaaatattatgtcaaatttaagaattttaactaagattgggctatattgagaagaaaaaataaagagtggttttatctattaattatgacactttatggatcaaattaataaatatatttaaattatattttatttgataattatttataattattaaattaaaattggtataaatagtttagatttaattaatgctaaaattagaaaaggataaaaggttttattaaaggctttatttattgaaacaaaattggcaaaaatcaaaacatggaccacactatagtgttaggtcatgcattgatttttagcccaataatatcttttatttggtccatttaattaaacctaataaacataatgagaatagcataaaaggaaagatatgagagcctttgttagataactcaattcaagccaaaatttacaaaaaaataaaaataataagctctcctttctctccctactcggcctctctctctctctctctcactatttattaaggcacaatagagattatgtaatcagcccactctatttagggtgatactcaagtctttgtggaagattgtgttgataactattaccaagttagaagaaataaattctggttcattacttggcaataccctactatagaaaggtaatcgagggttaaagtgattgaacggaaggagtcacttttattttgctgcaaccaatataaggatctaaaactctaatatgtttatttcattgttttgtaaattatattttaggttgttagattattatgttaataatcaaacatatatggtagtaaattaaatcttagtaaaataagttctaataattagcctcagagacttggcaacatttactatcatattaaatatgttttaaaacgattttgcatattttggatggattcatgttaattgcttatgatttgatgattttatgtgaaaaacgtatgtgtttctaacaaaaaaaaaaaaatgtttta

SEQ ID NO: 315871 - DNA, 1847 bp, Cannabis indica
ggtaataccttgccttaaaaatacgtcataccaaggaggattcataagtgagaagatggcagccttgcttccccaacatagctatattgtgatcatgaaggctccgaaaacccatcccaccagagtgcttatgaaccaccatcctatcccaagattcccatgttatacctttgccttgattaggagaagaatgacaccaatacaaacataaaattctttccagctcacggtaaattttcagaggtaaaagaaacagacttattgcatagctaggcaaagcttgagccacaattttgattaaaatttccttaccggctcgagataacattttagcatcccaactttccaccctttttcgaaccctgtcctttaagaagcccagaaaagcggacttattccttcccatggtactcgaaagaccaagatatgtactattatcatcagcctgagccattcaagtaattctaataattcgatctctcataccttcatctgtattagtactgaagaaaattgatgatttagcaacattcaccttctgacctgaagctaactcaaatttactcaaaagatccataaagtaagaagcttccgcctcagaagcttgacaatacaagtagctatcgtccgcgaaaaacatatgagagatagttggagcactacgcgcaatcttacacccatgaatccatctgttagtttcgtacttctgaatgagggtcgagaaaccttcagcacaaagagtgaacaagtaaggagataaaggatctccttgacgaataccccgagaagccaaaatcgggccaaaccgctaaccatcatggacaatatgatactaaaccgatcgaccacaatccaaaataagattgatccacctctgatggaagcccattttaacaagaatcgcttctaaaaaaggccactcaaccctatcgtaagccttgctcatgtccaatttgagagccatatatcctttcttcccttgacttttccttttgagatagtgtacaacttcaaaggaaacaagaatattatcagatatcaaacgaccggggataaaaagtgctttggtaaggagatataatttgatcaagaagccccttcaatttattggcaaggacctttgaaacaattttgtacaagacattgcaaagcgcaatcggacggaggtccccccatcacaatcagattcttcttcttaggaatgaggacaagattccacataatataaattatttaaatatcatacaaattttgtaaaaaatattgaaaatttagaaaataattttaaaatatagaataaattacaaaaaaaataatattgtattttcttttttttgttttttcttctgtttttcttttgatttacttcttcttcctcgcacagaacctacacccacacccacacccacacccactcctccttcttctttctttcatcatctcattcttcttcttcttcatctcattctacttcttcatcattcattcttttgccatcaataacaccaaaatagctgagatctccctcacttcttcttcccctctcgcactcattgtgcactctctctaaggcagagatccccccactcactgtcattgtgctttctctctcatgcagtgatatgccgctgtcgactctgaagaaccccgagacgtgagaccccaaaccccagacccctaagaatccttctccctcttacgatttccccacttggcctcaatattctccctcactctctttctctcttgctctgtatctcgcccaggcagagatccatcatcgctttagtgtaagtcttttttgctcttggttttgggttttattttggttgtgatattggatatag

SEQ ID NO: 315872 - DNA, 1669 bp, Cannabis indica
ttttgaattttttaaaattttaccggatgtcttaaataactataatctaaacgaccatgaaaaaaaataaactaaaagtttacaatgcactaggagtccacagatgcaaccctatctatttcaccatatgagataattttttagtctaattttttcatggttatctacgttgttatttagaccatcctgcaaattttcaaaaatttagaaaaatttaacacgccgaaaatatagttcaaacagtctatttcacacacgtataaaataaaaaattttgcgtgcaacaaactgtttgaaccatgttgtcgacgtgttaaatttttttgaatttttcaaaatttttaatcttataaatacaaataataatatcactatatatataaatataaattaaacaataataattattaaaaaaagaaaaaagaggaatattatagttacagtgccacgacatatgtgacgtgcacggtaaagtaattttacttttatttttatattgtttaagatatatacttacttttataaatgatgtctacattatactcttaggttaatgtaaattacgtactctatttaagtggagaataatatattttaataagatataatatatatatatataagagtatttttgattaattgataaagaaaacaaatatttctcaatttatcctttgtatatatatatatatgctgtaaagtttagtgctatacattgtatcaattatatactaaatcaaaattttagtaacgttggagttacttttacatgtgacatgttactattttattcatagattgatccaagatactgtgattttttcttttaaaagaaaaaaatacaacgaaaagaaattgaaaatagtgaataccaaaaataaaagagataatgttggtacgtacgtaaagctgtatcttttgtagttttttcgttatagagagagagatagaaattaataaattcaattatatcgatcaagatcatccaaagtccaattacaaatttacaatgttattccacttccaaaacatagagtgatttcaaattcatattaaaatgatatttttcatatataatcttttaataccaagtcatgaaatatctattcatatataagatgaaatatatttaaattggaatatttgattttaaaatgaaacttaaataatatcataagaataaattttttaaaatttttattattagtatgtatatatctttattaattttaattagaattttaatcttttattattattatatataagtttacaagaatatttttaatgagatatgtaaaagttgtattatattttaagggtgttcatataatttgcaattcgtggttccaaaccccgactaatccagaccaaactatttgagactaaaccaaataaataaggtgtgaatgatttgatcaatccggaccgttataaattctctggttcattcacggttttaaaaatctcgatagaattcaaaacaaatcaatccgtacatataattattatatatatttaatattttttttttgacaaaatattaatatttgggaactactttatttaaatagaatattgatattaagtttatattgttaagataacaattttttattgttacttatatattatatgttaggaatactgtaaaacttaatttagccct

SEQ ID NO: 315873 - DNA, 1945 bp, Cannabis indica
ttttctcacatttatctgaccacccaaatcgctaaatctttttggttaactaggacaaggatagttgaaatcttagagaattcttccacaaaatgtcgatgataacccgctcagccgagtaaactacaatcctaaagttgatcaaatagatcatcaattctaggtaaagggtatttgtttttaatagttaacttggtctgctcccggtagtcaatacacagataaagagtcccatccttctcctttacaaacaaaattggagctccccagagcaacgcactaggttgagaaaaccttagatccagcatcctctgaagttgaatcttcagctcttttagttctgccggagccacatgataggggtgcctttgaaacaggttctgccccaggtaccagatcaataataatatctatctcctgttgtggtggtggtcctggtaattcctcgagaaacacatccaggaattccttaaccactttgatctcctcgggtccaactaactcaggtttaccagaaccaattacaaccgctagaaatcccacacatccattgcgtagtaaacccctagccttcaacactgaaactcttaggacatgagagccttgaaccgatccaacaaaacaaatcgttcctcattctctggttgaaaagttaccatttcccgttcgcaattaatactggcagagtatttggacaaaaagtccttttcgagtatgatattcaacataaccaaaggtaactttactaaatcgacacttagttctttgcctttaattctgattagcacagatttaatccgctttctcgatataatcaattccccattaggcaacagggttccaaaccccatttcaaaaacatcactaggagtaccaagctgactaagtaccctcattgctacatatgtgcgtgtagctcctgaatcaaattaacagtataagtaaagccattgaatatgagctgacctatgaccgctgaagggctggcggctgcatctgcctaaatagtagcaaatacccgcgctggagcaggcttagcttctagcttagattcctctttcttcaattggggacaatctttcttgagatttccaattgatccacattgaaaacaagctctctggttacacgtcccagggtgatgtttccaacaacgcgaacactctagataagtataatgtcttctaagaccacctcggccccgaattccctgaagtctcttgttatgtcttaagcctcccaatatcaatgtaggttcctttttctacccaaccagagagctactaccaccttcaccataattataaataaggggactggtgacccgaccttccatcgtaacctcttgaggttttagagtagattccttagggtcactagtctagaatgcgtttatcccatcagaattttccttaaagattggggattcttggacctaattttccccatacgaaagttccacccgatttccatccataccttactctactggtaattttggaacggatacaattggcatatgcggtaaaggtacctcaagagacctttgttatttcaacatcttaatttcctcatcatgtcgctggattatagcttccatctttgcaatcctctgctccaaatctaatggagcctgcgatgaattttcttggccatttctttaagcacgactgcgacctctgccgcgttcatgggggttttagggatttctaccaccccgaccacctccgatctcaaccatgtcaccttgtcctctaacatttcgctggacgtccataacttagggcttagcctagcgaacccataaggcatgtaggttagacagtggtcaacatatttccaagaacgcatttagggtttaaacaaaatttcacacataaacacaatacaacttgtacagtttgctaaaaggtaaaagcttgcagaaccgtgagttgagctcgac

SEQ ID NO: 315874 - DNA, 710 bp, Cannabis indica
ttctagttttgtttggagttggcaacaataaagacgttaagatttgactcaaattatttatttctttacttctttatctatatttgtaaagttgcaatttatttttgagtgttaaaaaggaaattcttggtgatcaagttttgacgagtcttctagaagaagctttgaaatgttttggtccttaagttgtcttggtgcttaagttttaatttgcaactttataaatgtgtattttgtgtgttaaagtatgtgtggagaaaaatatagtgagttgtgaaaaaagaagtgtgaatttattgtttgatgagagtgaagaaacaaatagtgtattgggatttaggtagagagatagagatatagaacatctatgtaattttaaagtgataagtgaactatatcttttttatgagtttggtaattttactagacagagtaaattattttacttcgtttttttattattttattgcgcttgaagtttattatcttttttccaataattataaatattttctctaaatttattaagggaaataatattaattacaatttccttagagaaatttgattttctatacttacatatacttaatatttttttttaaaacacataacatttaatatttgtgggatatgacacattttagaatatcccttaaatacccccatttacattaccgcctccccactctcttcttctctctttgtta

SEQ ID NO: 315875 - DNA, 1451 bp, Cannabis indica
tttagatttattaatcatactattataattaatgtatcatttatcttataattatgtttcatatattctctaatatattatccatgaatttactactagcaaaagggtatttagcttcggtttgaaagtgacacataaataattgaaatatttatgccagcaactattattattaaattatttaaggattttccctaatctatttaattgcttgtaatttcggtaattctttttggcaggtttaccaatgtatatttatgtcttctctctccaaagccttgcctacactctaacttcttctttttttttttttagacatatcattgtagcattttcttttaataacaatcttatttttttttttcagcaaaacagtagactagactaatcaaatattttttttacattcttttttattttctaatctaattaatagttttagaaagaaataattgcacatctaccgaaattaaaaattaaccatatatttttcttttatatacaatcatcttttatatatatatatataaaaacgacacacattgtaatcattttcacgttctttatttcttatttcttttttatttcaaaagttttttcaaccacacattttattatttaaacacaaaattatactattataattaactttttaaagtattattttgacatattagaagcatatatttttctgatactaaaaaaactgactaaaattaaaagttagattatggtttcttaaacacaaaatagagaaaattaaatcctatacctcttttaagttagtgtctctcatttatacatgctggtttaaattctttcatttacaccctttttttcaatttctattcccattatacccctcccctttcaccatctctatttatcctctaacctgtttttttcctgagaaagctttgcagccatttctatctatttgaggctccatgaggttcaacactatcttttgtatgttcgcatccctttccccactagttgaagctgttgagcttcatagctttacaaccatgatatttatatattctttatttcattatacattgatttccctcattccaaagtatacacactccattgacttttaagagtatcccaaatgttgtaattccagcggaaataactttgaggattcaatcataaacctgcaataatctcaacacttggacagtaataatgatcataaatcaataaatcaacacaacgaatcaaaccagaaatcaatcaaagaacaacacgagattttatcctagttccggtcctagagatcaacatgatccctggccatactcgagctgagaaacatcaccaattcttcattaatatgtgaataagagagcagcaacacaattacaataaccagagcaatcacagctcagatggcactcgacacacaccagagaaaacagtcacagttttctctctatcaaccc

SEQ ID NO: 315876 - DNA, 783 bp, Cannabis indica
gaggaatataataaggttggccaacatggataactttcagaaatacgacctgtaccctcctacttatggagttgtggggactgagggcccatcaggtggtgtagatggagctttagccactgaggaggttagccctagtggtgggcatgctcccaacatggatgatgatgtgcctctatcctgaataacccgagatttggagaagagagagagggccctctgccagtgcttagctcgtaagggcatcgttgaggatgttattctgtggatcaggccttgggccaaagttctgttgggcctactctccccttgcctatatctagaggcaagggcaaggcagccgttgaagattcagacaattcctcttctgaggatgatggtatttgatagttgattgcaccgtcttttatattcttatcgtgcattgaatatttgtaatttgtattttgactttgttactttcttcttgcagatatgtcttccaaattcagaggtttagttggtggacctttagatgagcctttgggtagcccgagggccaaggtggcccagaccacctattccggtgatgctataaggtcatctccctcctcttcctcctcttgggcctacgccagctgagcatcccatgatagatggcccttcattgaggaggcatctgcctttgggcaggggcacccaaaagcctagtcggggagcaagtttagcgaattggtcgactttaacgaacaaattgaagaacataaattatacaactaagttttcttggaaattattttacca

SEQ ID NO: 315877 - DNA, 979 bp, Cannabis indica
aactaagcggtctttacaggttgtctccaggttttccacctctttctgaagcgcttcccgctctacctgcccggacctgacactctcttccaaatcagtctcctcttgagttaacttagagagaatagtccgaagactttccctctcgtcctttaaggcattgccatctttggtcagtgagtcaacatccacttcaagttaggcagtagatggcatgtcctgaatctccttctgcagctcctcaaatcgcttgttggtggccaaaagttgtttgttcacctcacttagcttcgccctcatatcctcgacctccttcttggctgcatccacctctttctagaagttggtggtggtggttatagtccttaaggccatggacttagcttgggaataagtgtaggccatcttcaagttaacctgcgcggagaaaactcaaaacctacacgggtgaaagaatgaattaaaaaccaaaggagaagtgcttactcgggttgcctccttctgtagtccacccatcagcaactccacggacatatcatcccctctagacagttggtcgttcacctcagggagcaaccagtcctgttaaaattgaagcatttctttgcccttcttggtctcagggttcagcacggtaggagcacctgaagacttaagcaccccagatccgtccgtgcttcctcctttggcacttttggacttaaagttcttcttgaccagtggttccacctccgacaccacctcctcggaaagatcaatgggcaactcaatcaaactcttttccttgggcagtacctcatccacctttgatcttttggccggaggtacctggccttagttgtccctcgaactcttctttagagcttgaagcacattctgagacgtatctgtatacgagtaaaataagaaggttaaaaataagtacaatataagcaaatgcaaataaaatttgaaagtaagttaatgttgggttttatgc

SEQ ID NO: 315878 - DNA, 1506 bp, Cannabis indica
aagacaccaatagacgagatgattctaactttaaagacctgaaacataggctaattataacctaacagtaccacacccagcttctctatctcactatcagtggctagcttggccaggcagtccgcatgggcattcctttcttatggtatttactctactttatattccttaaactcttgtagcaattccctgacaactgatacgtaagcgaccatctttactcccggggtctgatactctccttacacctgtttgaccaccaactgtgaatcactgtacacctcaactctgtttgcccctattgccttggccaatcttaattctactattaaggcttcatatttggcctcgtttttggaggctagaaatgtgaatcgtacgacggcctagagtcgtaacgtgtcaggtgagatcattgctattctcgcccataacgcattttcattagatgctccatcatcatacactttccaagtgggcacatcctaaactggcataccggtgctggcctcagtctcattgcactctacaatgaagtgtgctaatgcttggcccttaatcgagatgcgcagaatgaactatttgtcgaactggctgaactccatagcccacttgaggagcctccctaaggcctcaggcttttgtaaaactggtcaaagcaggtgatttgtaaatactttgatggagtgggcctggaagtaaggcctgagctttcttgatgcgattaagaggcagaaagccagtttttcaattagaggataccaaatttcaacccttatcatgtgtttgctgacataatatatccggtgttgaacttttgttttctcccagagaaaagctgcggaccacattctcaaaaaatggctaaataaatataaatcctctccatgaactggttttgaaagtactggaggcctagccatttgttctttcaactttctgaatgcctcatcgcattcttcggtccattcaaatttttgacatttcttcaagatgttaaagaacgggatacacttgtcggtcgagcgggagatgaagcgactcaaggcagctaccttattggttaagctttgcatgtccttgtgtctctttagggaaggcatgctcagtacggcttgtattttatctaggtttgcctctatcccgtgttgactcactatgaatcctagaaattttcctaatttaacacaaaaagtgcattttcgggattaagcttcatcccatatctttggactaccttaaagcattcagttaggtcgtttgcatggcccaatcatgttttggatttgaccagcatgtcgtctaggtttgcctccatgctccgtcctaggaggcctttgaacatccggttgaccatgcacgaagaagttgctccaacatttttcaatccgaagggcatgactaggtaacagtataaccccttgtcagtcctgaagctggtacactcttgatcagcgacatgcattttgatctgattgtacccagagtagtgttggaaattatttt

SEQ ID NO: 315879 - DNA, 1157 bp, Cannabis indica
tgacataactataatcgaaagcgaaccctagctaagcaactcataatgtataataaaaccagcccaattaacgatatcttgtccataacttatagatagacttgaatattatttagatatttattcaagcccactaagtggggaaaagaaacgttatttagacaaaatgttgagattcttaactaagaattcaaacatatctaaccgtttgagcttaggtaggggcacttgtatgatatatatacatataatttatatgtatatatatatgaatattgactagaaattgacctttttttgtgtgaatgataagcttggtaaacaaagttctagctgcaataattgcatttattgaagaggagcaaaaaaaaggaatttttcccaccttcaaaatatcacaaatatatcttctctgaccagaaagacatgatcatcatgaacttgcatagatacgaataagcacaaaaataagtacccacttgatagttatgaaaacatgcaaaaagttaaatgataattaaatataaatatttttatttttattttcttatcatgggtttggttagacattttgttgactaagggagaggtctcaatgtcaatgatatttaactacgtcattggatgcggttcccaaaatctgtgctggttttttgcatgttcccgacaatgtcctatttttcaatggtatgatggcctttccttaggaggaatgaaatgttttggactgtacttagatagaactatgataccccaaactcttttccaaatatagattatatagattgcactatacactagactttaattagagtactcagacatcaataacctcatctagttattagtgtccttccaccttatttccatttttcattaaattacagctatatagttaatgactttcattggtccatcttgttgagcttgcttaagagcattgtattaggcacagtgcggccggtgctaagtattatttattatatttttttgaaagcttcttcaagagtattattgttgttagttttctgtataggcagttgattttattcttaatttgtaaaattatgaaatgtattttgttgtacggaattattacagatcctactcttgttgaatgaaatttacaacaccaaaaataaatactaataatgtta

SEQ ID NO: 315880 - DNA, 2128 bp, Cannabis indica
tatttattttgttgaaatgtttaaataaattttaaaattgaaaatttaaatcaatcaatatatatttatataaatgaggtatatgaggacataacattgtaaaatcactccaaacaactctatctcttttctctttaattttctcaatttttaatttttattcaatttataacttataaatattattaattaattaattaattaatttataaaaatattcttatacggcattcaaatttcatttatttagccaaattagtacactaaaaagatttaataaatccaacatgttcattttaagtctgactgccttagtgtggtaaataaccttcaataagaattaatgtcaagatacaaactccagtttgtaaattaaatggatgtaaaacaatacaacaaagatttttacaaaaatttgcactaagatcttgattaaccaacaaagattcaaatctaagtccccttagattcgaagacaagctctccttgcttcgattgagctgaaatcccttcaactatgaatcttaactcccttcaaatgaaatgacctccattatcacttcattactgaagcttgaacttttcaacaacggaagaacttggaagaaataaagaagaagaagaagaaaattatatcgtagcagagaaaaatctctatcaaagaatcaaatgagtgagcgttagttaggatctttaggaatcaagtatatataaccctcactctcactatatcaactttgacagctcacatgccaacacatgacagctgtccaacctgtcaaaaataaaaaataaatcagtagcatgcattggaactaccgagtgtccacataacacaaaactcataaattttccatacacaaaaatacggttcttataatctccccctagcttgaaaaattatgatgaatgaattaaccacaatgcatgaagaaaagcaacagaaactgcaacaatcaaaagcaacatacactgagtatgactacataaacaatcatgagatacacacataatttgccacacacaaagatatggttcctacattcttccccttgaaaaattatgatcaatgcaacaacaacataagaaagcatgactaatggttaatgaaaaactaacaaaaattagaaaaactagagatgttaaattgtcacataataatcaccaatacaaccaatatacaatatctccccctcattgagcataatgaaacagtcccatcatggaaactccccctaggtagatggcctgtaggtggaataacaacaggagcagtgtgttcactctgaacaacatcaataagttgctccctttggacctcactactttgtcttagtccaatccgtttttcaacaagtttgttgacgatccagggaacactcaaataaaaaggctctccctaaacactagcagatggaaatgaacctgacaaatcactagtagtgtgtgtagcagtagatacaaaaacaagcaccttagtcaaggcatgaagaacccaccatgtgacgatttgaatgcacctcagtgaatacatacttacaatcaaccaaggatattttgccaacaaccatagccatagaaaatacaaagagcataaaaagactctaacaattttagagagttaaaaccaacctctattcaagcacaaagagcaagaaaatgaattacaacatttgaagagattaaagtttctttaagaattgcagcgaaaagaatcttgattctgcgttcttgatcgattatcaagctttgattattggtaaaattaaaactaatggtgcaaaatcaaatcaactaaactttaaaaaatcaaacgattagcaatgacaagattaacaaacacaagaagaaatcagaggaaaaataagaatgaacagagtatgaacaaccataaacaatgaaaatagtaaagtaataaaatcaacaccaagatatatattggttcaagtctgataaattgatgtgatctatggctctactccagttctggaacaccaccaaattctctttattgattgagcaagaacacttacaatacagtcgagatcgattctctaatgagttctctcaaagtgtttcaaatctcacactcttacctaagaatcttctttatctacagaagattctt

SEQ ID NO: 315881 - DNA, 1030 bp, Cannabis indica
aaaaaaaaaaaaaaacactttctttctttttcttctctttccttttttggcttccactgtatctagctatattttgttatttttgtgggtcgtcccaacaccaacattaattacggagagaagaaaaaagtttaataataatttcaaaatgtagacaaaaaaaaaaatagtaatttttggttcatagttgttgtacatattataatattgtcgtttataataaatcagttataaaagaattttcatatatgctatatgatatatgtaatttatatattacaagccaactaggatatgaaaaaaatgatatatccaatctagaactcaaatcagcataataaattgggttttcagtattgtagaatgtgacagcattaaagttgtatatttttgccgaacacctgtgataaaaataatattattttaatttttatacaaagcactaatttatggtggaataaacctaacttgggtcaagctctcgtgtcacaatatctatcttttccagtgcattgaacatttcgtcaatgacaatctgggcataagtctattttttttttatcaataatatatattttttatgtttaatttataagaataatattactattattattaatgtgtcaggttaaataaatttgacgaatctgatattttttgtttttttatttttaaattttaaaagtagcttttagaatagttatagagttatgaaaaattaatgagttatgtttatatataaaaaaaattgtttttatatcatataatttgagatatattttaattactttaaaaattaaataattaattagtatttttaatttatactatgatagtttataatttaaaatatatttaataactttaaatattattttctagattaataaaatgccatgtaatataacaaattactagttttatatattaattattttatgtatttttttgttattttaaaagctcattaattattgtataatatagttgtaaagcccgcttagttaatttggaaattagcagttgttta

SEQ ID NO: 315882 - DNA, 982 bp, Cannabis indica
aaaagttgtacaaaaaataacagaaaaatatgtagaacacctaaacaacaacataaaataactataaaataacaaaaagaatagaacacctaaataacaacataaaaataactataaaataacaaaaagacaactataataacctaaaaaaataacaatacatcgatcttgttgcaatatacaaaaaaaaaaaaaaatatgaactccttagcaaattttttgtgttagttcttttttttttccttcttaattttgacaatttgattatctttttgtattacgatattatttttgtacaatttcatacatttaactcttctttttctattcttttttgagttagtaacaactaaaatgataatttattttttagaaattaaatgaatggttacattaataatagaaattataaagttttaataatttaaaaatgaggtaaataatttaatgagtaatatataattaaaataacaaaaaattaactagataacaatatgtttaccgagtttttcagaaattaaatattttgagagcttaaaaaagataaatgataatagataataaacagatagatttttacgtggttcaggtgttaatgattcttagtccacaagtctatattattggcctctatgggcaaagattttcaagattacaaaatattacaatgaagattgccctacttctcttgagagagaggcttcctagaatttcagcagagccgctatagataaagatttgttctctctttgcctcaagaaaaatgggactatttataagcacacatgggataaagggaacatctttcacctgcctagtgtttcataccccatacgccattaaggcctgtgtcgcgagaggataatctgaccattggctagtaggaacctgttgggttttatgccctaaataaaactcatttcaatataatcagatttaattattaatatagatcagaaataacatttaatgttgcatggtt

SEQ ID NO: 315883 - DNA, 812 bp, Cannabis indica
ggcataaaatcccaacaattaaacctatcccaaaattatagttaggcttgagaatcttctagaaggcttgtggtggaccccactttgttcgaccaatttggggctatctacacgagtaggcccgcagccctatttttagggtctgtccggcatgtctgtttgccttggccgaccaacccttatttgaggggttatctgtacaaccctttcctcacaaccctatcctcacttcttttccatatagctttgctgtacaacttctttgtacagttttttcatacgatttctccatacagcttgttgttcagctttgtcgaccatccttccttattcggacaaacctccttggccagccaactatggtctgacctgggtctaaacacttgtcttattcttgacttcgaagtagcatggagtgtacctgtctggttgttgacaaactgtattccacgtttcttctattttgattaagtggacatgccacatcagatggaaaaaaattggaataataatatcaataataaaacgtcaaaaaaactaaaaaaatataaaccctagaataaaatagtataaataaacacaaccaagaacagatatcatatttctaagttagggaaaaatgaaaatgaaactaaattgaaaccttaggaattttatctgcttgcttcttcttcttcttaatttcaaggaaagaactttttcagccttattcatctttgtttcttcttaagatggcaatgatccacgtttcatttacaggtggagcaaaataaaaatcaccatcctcagttgttatgtttggtcactaatag

SEQ ID NO: 315884 - DNA, 521 bp, Cannabis indica
aaatttttttgtagtgcctattaattaattatcttttatatatataggttaagaaaagattatatgatatgcacccattaaaggggtgttatttatttcattatttataaaaaaaaaattagttagcaagtatattataattatttaagacaaattttaagaaatttttttaaaaaaaattacacaccgaaaaactttaataacaatatatatgtatataaaaaataattggattcttaaggggtgtatgtatcgatatagttgtttaagctaattaattaataaggtagataacattttttattgtaatttaaggaatctaaacattgttattataattaatctaatgtaagtcataccatgcaaacatagccacgtgaaattaagtctttgctttaataataataataataattttaaatgactaattaatctccaacccacgtgaacagatctaggatgccatgcatctctcaatacaacctattaattaattattaaaaaaaaaaaatgaaaatata

SEQ ID NO: 315885 - DNA, 1850 bp, Cannabis indica
ttatttttgtaactcccttggggatgaattttgatgacaataactttataattacgtctgaagtgtgagacatgatatgatcgagcattgaattagcttttaaatgcaagttgaatcgcaccaatcgaatcaaaattgagtgagttatggttgtattactgaaggcagttcatgactcagcgaccaggtttacatatgacgtcaacctagacgttgggtaagtgtaaaaaattccaatggatgtactttaagattcttaagtaatactttgacatcacttatcttgattatgtgttctggcaaagctggtcaccagttctcgaagatgttgctcttctgcggaaatgagagatcgaaactctccatttttgagtgagccagaaaagaaacatgcaaagttgtgaattagagttctctgacttcatggatctttgttattgtgaaaaactagatgggcgatcgaaagggcatcagattcagataagcagaacccagcacaccaggccaattgtcaacctaggcgttgggtacttacttttgacctctcaatatttcatttttcatacttccaacgcttctaaacttgaggaagagatctcctaccctgtttttgaccattctggattcaatgtttgcataagatgtgtcatttgatcaattgaaggtagcatcccatgttgaatgttaacctgtgcattgtgtccctctcttggcccttcaaaaattccgtttggtccccaaaaatagttaaatacaatattttttagaaacaaaaaaagatgctcgaaagtgttcttgaaaaaatccaattaaaattgcccaggttgacaaaaatgtcaatctggtaacaaatcagccctaggtgtcaacttgcgcattgggccctatttttggcacccaaaaattgttgtttcttcttcaaaagaacctatttctctatttcctatgaagatgaagaagatgaaaaatttggatctctaatttgatacttggaaggttcctagattgacagattgtcaacctggtcgtagggtgctcggggcctgggtgctcaaaatcaacttgctctgaatctgattatgatgcctcaaatatgtctgtggtatgtctagtagatgtctcaatgtaggttttgacccttttacactaagacggtcctgaaaactaaaatattagttaaggaatgtcaacttaagtgccaggtgaaaccttaagtgcctaggttgggttctgggttgcaggttcttgtaatttcagctcccgggacttggattaggttgctccatatcttcacggtacaaaatactaaaaatagtgagttggattcaagttaattaagcttgaacttccattttggagttcccaaagtcaacctaggcgcagggctagggacccctcccaggttgacttactatgactcgggactactcaacttcgagatgttatctttcttatcatgtgtcaaacattgatgtccacatcatcaagactactcttggtgtaaacttttgcccgcaagttgttgtggtatttttacacatgcaagtgtacgtatcgtaacaagtagtaaactcaccaagagtgaggtcgatcccacgaggaatgtagctaagtaattttaaataaaatctttacttctatttggctatataaaatttaagaggagattgaaactagaaaacaataaaaatagtgaaagaaaaagcaattaaactaataaaggaaattaacagtgaataagagttaggactttcgatttcaattgtatctattgattatggcctaatatgattatcttcctattactaatttctatgcaatagcaggtttactaaggtaatttatagtct

SEQ ID NO: 315886 - DNA, 1059 bp, Cannabis indica
aatataaataaaactcacccatgaatttatcaataaactaagaattcagttatataggcacactttatatagaatagatataaattaattatttattataaatggttcggtccggtttaaccgtttattatttatttcgaattgcaaccgaaccattatgccttaaatagtctggattgaccaaaccaccaaaaacagtttctccggttacggtttacaatgattcagattgtagtggtccgaatttaaatcgcggtttttcagtttatataaacagccctattgcttactctaatgtcagttagcatcatgctctcaaagattgccaagttccagtcctatgaagacacgtttgctgcatttgaaaacatggagaacaaaatttttgttgggaggaaattcggtacagaggagttcaatgcacttcttcgagcgttttgcacacaaaggcagatgaaggaggcacggtcagtgttccttaagatgcacctgacaaaaagagtgaatatgttgctgttgggttttaaagaatcaagagatactactgctgtcgaattgttctatcatgagatgattgcaagaggttttaagcaaaatgttgtcacctataatattaagattgatgtctactgtaaaacaggctgctttggtgatggtttgagacttctcgaagagatggagcggtcaaatttgtccccatgctaggaacaataactactttattcatggagctggaattgctccgaatccaataatggcacaaaaattgtttgataaactctctgcgagaaacttatgacctgattttaggcttataatgcttttatgagtttgcttattaggtgtaaagatgcaaaggccgcaactaccttaatgggtgagatgaaagagaaacatataattcatgattagacgacctattattcgattagtttagttttggttaagtcagttatattagttaccttttactgtgccagtatatatatatgtacctcccctaatattcaatcagttgtaacaaatatttcacattcaatttgttcaataaagaaaaat

SEQ ID NO: 315887 - DNA, 823 bp, Cannabis indica
atgttcgggatttaataaaacttttaaattaaacatataatcatgaaataaacatgtgaaaaaagcatatgacaagatcaagatatgatttatgatctttattgattgtaaataagattacattgaagttgtgttttatttaggacataaaatcccaacagggtgccacccagtttggctttattccctacaaatcttctttcttcgtccttttcagaatcttgcctagaggagttatccctttgggtttcatttctcctagcccgattctctagcccatgttctaccccttcatttggaacatacagttcctggcagtgagggtcgtctctattgctagctggaacccaagcttgggtaccagtccttcattgagtatattgtatcaactttttaatgaattttgcatcttccctcgtgcggcaatttgcctctacttttcaagccctcatctcccgagtgctttattttatccaggcattaaactctctttgatgctcatcgaagcattcattcaccacgactcaggtagcctcctgctcatggtacatgccattagtatggccttgcatctgaccaatgatctctcacagatgctcgatctcgagattttggtatcttccttgttcaaggtgaggctccccttttctaagtacactaatactggtattgctctagctaaactcgaaaattttgagtgttattctagtagtcacccaaatagaggtagtacctcttatgccatggacagttttgttggaaattattttacgaaatcttaaggaagaagagagagagagaagtggcgaccaggtatagagag

SEQ ID NO: 315888 - DNA, 2829 bp, Cannabis indica
tccactgtgctgacgacacaataaacaagaacataaatgtgataagggtttggatgaatttataaatcaaatatacaagtaaatgataacatgaaccaaatgacacacaaataagtgatgaaatacttttgtttctttattgatattgaataatagagattacattgaaatggagttttatttagggcataaaacccaacactttattcttcaaggtttttttccctttccttttttctaagtatgaagattgagctttatgattaattaatttcgggcatagctggtgctatatacgtatatcaaaatatcatactatttaaaacaaaactaacactactacaaaaaggagtatccgtgacggtcttaagaatgtttttttagtaaacttttcgctaaaaaaattaagcaactgtttaaaaccgtcatgaaaaattaagtatttccaatagtttaaaacactagttacaaaaataggacacagttttaagtaaaaattgcaaaaaattacattcccctatacccaatagatttaaaccgtcaggtataaagcctatgaaaccctttatatcatccccacaaaggagctcaatctcccacctaaccccacgaaaaccagtgtagccataccctaacccctaaaacaccatttcctctctctcgaattagcaacgacgaccaccaccaccgcaacctaaccacccacacgcacaccccaatcaatctctctctcgtctatctcgtctatttcgacagccacatgaaactcacccactaccattcttctctctcggctatctcgacaaccacacaaaacccaccacaaccacggggaaaagattagagttctgggtgagggagcatctaagtctaacaaggttaagggtataaatttagactatgaggatgatcacattccaaaaataataggaaatgcacgatttgaatgaaatgtcaatccattataatttgaaagttttgtagaggatgtcaagaagcctatataccctaaatgtaattagtttactaaattaatgactcttattagactatacaatataaaatccaaacactataggtaaagaagacactttgttccttagcatacaatatatctcggtacatagttaaaaaaagtactattaacattattattatgttacacatcatattgatttacttttgctcattaatccacttgtatgtcgataggtatatgtggaaatatctgaatccctcagcaatgtatctaacacactactttgcatatcacgagtcattcgtgtaatgtactcaaataccaatcgtactatataattagtaatcaattatgcacccaagaccacgataaatctagaaaaacataaaatagtagtattatgatagttgctaagactttaagcctagttcaaaagataaaaatcttattgaatgtgacatgtctctctacagtgtaattcaagaaatttaggaattagattacagtagttttagatccctgttttcttttatgattgtgttaggagtgataatagggttaaagacgatgaatttggatccttgttacccaaattgaagcatgggtgtgagttaatgttctacttcaagatatatcgtggcctaaagtgagtgagtagattaaaaactaacataaaggcaacataaattttattatttgtgtttttttctattgattatgatttgtactttttattgattttaaaagcaagtaattaattgatatattagaaaatatatgaaatacatttataagatgaatgatatattaattataagagtataattattaaatatataaaaatttcttattcatatggagaaggtataatcttgtaaggatgtacaagagaattaagattatacgatatgaataaaagaagtcggtaatgtattagagtattgggaatctttaatatgaaactgctaagtatggtttactatatactatacttctaatgtgtgtgattttaatttggatcacatatgtagatgaacaagtagtaaatgtattgtgcataattagattatgcatgaatggaccgataggaataaacatcttttattaacttcacgtttaccatgaaatagttattcatatcacaataatgatcattagtagatcaacctgaatcctgagtatacatgagctcctatttgtattcattgagttctttgattcactcgttaaactttcacaaagaagatgattcttacagagcttaatacatgagtggctaggaacatattatgcaatagtgaaaattaagctttcctaactgatcaaatattagttctcttatagtgttaatcctaagagtgctaatagttggatctgaatctataataagttatagatagctattcatattgaaatagtggtacataagaaataaagaaataattagaaaggtaaaacagtattttgaccaactctaattatgaactaataatggaaggtgaactgcttatattgattatatcaatggattacaagtaagtattctgtaaatataattctatattgtcaaagaatacaattttatatttatagtggagcaataatagaataaataaaccaaattattctattgatgagatcgataataatcattggtgtattggagccttaaaatataggttcatagtccctaagtcacctctatataacactatataggggaaagtcttatttgatgaataaattttgagtgagagttaatttttatgggaaataaattcttaaggaaaaataataatttgtaatattattgttttgattaattatgataattatgaattgtataatta

SEQ ID NO: 315889 - DNA, 1028 bp, Cannabis indica
aggaatcaagggttagagatctgagtggaaggagacattaattccgctgcaatcactgtaagttattcttaacttttatgtgtttagttcatcgttttagaagttcaatattaggttgttaaatcaacatacttgcaaatagatctaagatcctgaatataataccaacaaccttaggcagcaagcctaacaatccaaccaaccctcaagccaatgttgcagctaaaaataatcctggatctcacacaactggtcgtggtcgaggttcaaataatcataacagaaacaatcaattccttggcagtggaggtcatttttcaggcactcgtggaagtcctgggaggtttcgtggaagaggacactccaatacaaatcgactaacatgccaagtttgtggcaaatatggccactctgctgcagtgtgctacaaccggtttgatgaaagctttatgggaacagatccaaatcaaacaaatggagggaacaaaccaactcagaacaaccataatgccttcattgctggtcctgaagtgcttgagagtgatgtgtggtttgctgacagtggtgccagcaaccacatcacctcagatggtactgccttaaaccagaaacgaccttatgtcggtaaggaatctgtcattgtgggtgatggtactaaaattagaatttcccatattggtaatggtgttcttgatactaatgatgggaaacacttccaactaaaagaaatgctacttgtccctcaaattgctaaaaatttaattagtgtctctaaactcaccaatgacaacaatgtactgatcgagtttcactctaatatttgtttggtgaaggacacgacaactcagaaggtggtgattcgaggagtgcttaaagatggactttacaggctggaaacaccatcatacacttcatctttcacaggttcaactcaaccgcatctcacaaataaaaccagctagagtcatcttgtttatctgcttgtttcctgccagtactgatgtaaaccagcataatgctgatgaaaa

SEQ ID NO: 315890 - DNA, 563 bp, Cannabis indica
tgaaaatagtatttttgtaaaataaggcaaaatatcagggcgttacatttacctttgttactttaaccttttatcgatttactcttaaaagatcgatttactcttaaaagatagttaaatgaaaccaaaccactctataagaataaattatttgctttgagatcatgtggtttgaattttattattattcttatatatatttttctttcaagtagttatattttttaatatttgctttttctatctaaataattaattatcaattgccttaattacattaataactacatagttagattacagtttttcattaaataattttagaccaacacaataattaattttaaaattattatcgaaccactttttataaaaatgtacggtctgtggataactaaactggtgtctgccaaattcttttggtataagttctgatagcttggtttgaatttgaatattgtatggttggattcagaacaatgaataaatgacaaatatattagaatatttttatttatggaaattattttctaattaaggaaatgattttctatttaaggaaa

SEQ ID NO: 315891 - DNA, 2794 bp, Cannabis indica
tccagaataagatggactcgtggagtataaaaaattaacttcaaaaacacgttaaaaaccttcttgccattattattattaataattatttattttagagtttatttattacttcaaggttcatttattggttaacaaaatttatgttaacagtttgatgctttcattgagagccttgtaagaaaaaacacaaaaaaataccctctctaaaccacagtagaaccttctatccctgacagacgacactcctcgaaatgaagatactcaacaaggagaaacaactcagtgtcctggaaaagaacatcagaattctcatcggaaaaatgtgactgagactcctcgctcgggggagcaaatggtggaggatttgaacaagttgggggtgaaatcccaaaaagactcaatgaggacgcttatgatcctaccagatataaccattagtggaattagaaaatagacaactctgacaaagattggctgaatcaaatcggaggaatgaccagttggaacgcgaggctgcgactacaagagttggacgcaatgattcacctcctaaccaaccgaacacatccgctaggcgacctcgaggaagacctagaggctcgaggaccagaacgcatagggaagcccctacatgtgataaccatggaaatcttacgaattcctaagatgatcaactagggaacataagggatatttcagtggacaagggggcccctaaaatccaagaaacactggcaatagagaaactcgacccaatgatccaagaacctcccgtggaaacacaaatagtgggaatgtacatgaaagcccagagtcatctcgcatgaacacagatgcgagataaacacaacttagggaccaagggttcactcaacatgatgtgatgggtgtaggcggtcgaccaccaacacactcgcgaagaccaaaccaaaatgacagagatagcatgtatacctacttgagaaggggacgtgtgtcaaatcttttttgaagacggaggtcaatgcgagaggaaccccaagagacaggatcgagcgctggtcctagtgggtcgagatcaaggatgcatggtcagagtagattgagcagaacccatgcacatgaaaggaaaacacggagtggggaagatacatgtcaccattatcaagatgaacaagtgagcatgagtaatactcaaagttatcagtttgaaagtcactctacaacaaggtcggttagcaattacgaccaaagaaatgaaaaatgacacgactctaatcttcgtgaacacttaaactgtagatagcccaacttgcacgagcatctcaaccgtaatgttcaaaatctctaagattgattaaattagaacacaatttgtcagcagcaagtcaagcaaccagtcatggatccaatttaactgagagtaattcaattggaggataagttcaagcaataacaagatggggaatatgagaaactgttagggtatgattcaaatgaggacatagagcctttacaccctgatatacttaattcccaattccctcaagaattcaagaatccacatgttgcacaatatgacggaataactgacccagttgcacatctaaataatttcaacacaataatgcgagcaagtaatgattccaaaaacttgtgttgcatattattcccaacatctctgactggggcaccaagcaattggtttgataaattcacttaccactccattacctcatgggagcagttatccaaagaatttaagaaatggttcgaggctgcaagagatagaaggccagaggcatcctcgttgacaaacatcaaacaatagccagaagagtctctaaaggcttatctaagtcgtttcaatacagcaacaatgaaagtaaggagcttgaatgataacattcagttaacgaccctctaagctggaataaccactgatttgtcaactatgggaggaaaattgtgggatgatctatacggtcacccagttagaaaaattaatgaatttaataatagagcattattcttcgtgcagaaagaagatgcatgaacgagatgaaaatgctcaaattaggctcgggagataaacccagctcaagtactgcaactgttagtactataacaataaaagtgggaaattcgagccggaatgggtaaaatggaaaaaggaaagatgaataaaagatttatcaaaggataagaagaagcaaatgaaacatgagaagtatgttccaacatactgagtttatacagagctaaacgagactcaagagaatattatctcgcaaacgagaatcgggtcgcttttttgaagacccaacctatgagacactcaagaaataagtgagatccaaacaaatattcccaattccataaagacattggacataccactgaggaatgtcgccaattaaaagaagagatcaaaggactcatttcccaaggctacctaaggcagtatgtcagaaacaaagggaatgaacaaaacttacccaacaactaaaatcaaaactaaggtgtacaacctcccccagttgagggcgaggaaatcctggttatttttagggggctgcatctcacaggaaacaacaatagtgcccaaaaaaggtatataaatcaagttaaaaaaacaagaatcaacctttgcaccacagcccctgaagcatacaaagcctgaggaatcaccaataattttcactgatgaaaatgcagcacatgtgcggttcccacatccaaactccctggttattacagtctagctcgcgaacaaaagaataaaaagagttctctgttgggttttgtgccc

SEQ ID NO: 315892 - DNA, 698 bp, Cannabis indica
ctagatacttttgtcctaaattagtttgtatccataacaatcatatcgtattcaaatttaactaattttgatttgaattcataaataataattataggtgatcagtcaataattgcaaaattaaaataaattgtatggaattgaaataagagaagaagataaaattgaataactacattaatccataaataaactcaagtggtttacataataattcttataagaaaattagctcataaaagtcattctcaaacaacaaaattcaaataagaacacagaaatttataatgattgatgagaataaagaacattgtttgaagtcctccaatggtgtcttctgctcctagcctttctcatatcctctaaattggtctctgattttgaatgataaaggaaacgtagctctaactttatagacaaaatttgagaagtttcccgttttttttcacaacagtcgcgacatttgatagagagtcgcgactctcttattttttttactttctactgcgatgatagatattattttggccataactctctccatgtaactaagaattggatgattcaagttgttttggaaatctgaaagagatatctaaaactttcattctgaaagtttttcttagaagtgaatagatcatagttaaaattagcttgaagcttcagactttatttcgatcacaaacggagcatgttga

SEQ ID NO: 315893 - DNA, 2147 bp, Cannabis indica
ggtaataaataaaagatttggacatccacataattattaatatttataacaaccttctatttttcttcaattaaaaaaattgttgccaaagacgtttttaatagctaccagtgtaatataaaattaataatttatttctatcattgtatattatcactcaaaaaaaaaaaaaaaagagaaaagcgaaaaggcaccagtggtgccaaataccctcctacgtattaatattgctattagtctagttaagtatcgggtcccatatagtttaatataataatttttagggagtataactagctaattacaaggcgacatgtcttaagggtgttaagcaccactcgttcaatacaaaaaaaagtccaagtatacctttcttatatgcctcgtaagtaacgaccaaggcaatgaaatcccatgactaaattatagcataataaatttcaaccaaaaaaaaaagccaaaaacctaacataataaataatacattaattatttcaatgtcaaacaaaaaaacggtatgtgtttttttttttttgaagcccccaaatttgttttaaaaacacatgttcgaccattgctttccttactttctttatttatataattttttttaggggagctctagagcttcatcaatggcggtttataatctatcaattaattgcagtccaagatttgttcatcatgtttacgttccacatttcacatgtaaatccaataagtcgttaagtcacgtacccatgagaataagcatgtccaaacagcatcatcattcttattttgcctccacaacagccgatgtagatgcccatctcaagcaatccatcactatcaagccaccactctcagttcacgaggccatgtacaatttcatcttttccacacctccgaatttagcaccgtcattgtgcgtggcggcgtgtgagcttgtcgggggccaccaggaccaggccatggcagcagcctccgccttgcgcgtcatccacgcagccatcttcactcatgaccacctccctttaacgggcaggcccaatccaacaagtcctgaggcagcgacccacaattcttacaacccaaatattcagctccttctcccggacgcaattgtaccttttgggttcgaattgttggccaattctgatgaccttacccataataaatcagaacggattttgcgggtcattgtagagttcacacgcacctttggatcacgaggaactattgatgctcaataccatgagaagctagccagtagatttgacgttgatagtcatgaagccaaaactgtcgggtggggccattatccctctttgaagaaggaaggtgcgatgcatgcatgcgctgctgcatgtggggccattcttggagaggcacatgaagaagaggttgagaagttgagaacttttggtctttatgtgggcatgattcaaggatatgccaatagatttataatgagcagcacagaagaaaagaaagaagcagacagaatcatcgaggagttaaccaatttggctcgccaggaactaaaatatttcgatgggagaaacttagagccattttcaacctttctttttcgtctatagaaattaagacgttttgttgtgaaattaaaaaaatgtatttaattatgttttatttgaaactagaaaactggctgcgcgttgcctacatagctagtctaattaagaatatatatataatagttaataaaataatttcattaattaatataataagtctgcgcttctcacaaataaaaaatatattcaatagataaaattataatttttatatataaatattcttactatgtacaaaccttataatttttaagaaattttttaattaaagtagcaaaaattaaacttttggtttgcatgattatttctaaagaatcatacttttctttttctagattaacaaaaactatttctatttttcttaaagcaataaggtggcatttggttggaggtaatgaaatagaatggaatgaaaaggaaataattttcatttcattcctttgttcgttgcattttaaagtattggaagtattggttggaggtaacaaatcgttttaagtccaaatttcttgcaagcaaatcaatttaccataactctgatacgagttgttggaattattataccag

SEQ ID NO: 315894 - DNA, 771 bp, Cannabis indica
taagtttttttaaaaaatgtcatatttagtgtaattaagtttttatgccatatatatcaaaacttatctttattttcccatatttttgtaaatagccctattaaaaatgcccatttggtgttcgaattatacgaacagcaacaataaccgtgatctaaagggacccagttggaactaggttttggtgggatcatccgtgaataggatccattcataaatacatcatttttcaaccaaattcatgtgtttttcccactatctttattaaattaataaatggttagaattcaaatttatcgtcttagttgatagtgacacagcttgttttaattcgatagagaaataaataaatatgatggggttgactatggtggagctctagtttaagattataattaacaatttaaaaacactattccagattaatggcggtggcagccactagaacatttccttggaacagcttaatgggagagtgacacgtggcgtacagaaaacgacttacaaggttcattcattcattgtgtttcatttgaagcttttattatcagttactttttcgatgcaaccacatcataattatgaggtcataattccagagacaaaaacgacaggtattaatattgaacgactcacagacttaagtaacaaaaacgacgatcaaattgtattagcgacaagctttgaaaaaccacattttttaccaacaaaactacatctatttcatttcaaaaaaaaaaaaacctaacatctattttttttttatttttt

SEQ ID NO: 315895 - DNA, 948 bp, Cannabis indica
ttttttattttttttaactaaatacgattttaagttgtcactaatttatttagtctattgtgattaaaaacacaatctttagccacaaactttataattacaatatagatttgatgacttataattagtcacaattttttcacttcttaatttttttttattattagtcacaatttaagtaagtaagattttttctagtatttttttactgtagttttaagtaatttttggcgaaaacattcatatacattagatattcttttagcttatttgatgaaaaaaacaattattatgttcttgaaatttacaggcacttcgtttacatttctatatacataaaattgtttgttagtgtagttttctgaagcatgacattgctcagagctgcttttgctaattataaacacattttcccccttattttggtaactaatttgaacaatgagcttattgggttttatgataaatttagtatatactttgttgataattaagaactttagaaaatgaaatcttatgaactacaatgaattacttatgtagtttatcacttaagacttttttgaagaaggttctcttactaactaacatgattaattcaattgtgaatactacatttgggttcagagccctatgctcatgtgaatttgattagcttgtgatatttatctgttgcttcaatgtttacagtagatattatcttattgtttctgtataatcttttgtaattcagaaaatcgagaaggagaagcttgagaagctcgcacgcaaggtatgactatggcttagcttacaatttacttgtatgtgttttcattttaaaatgtatgcatgttcaatttggaaaactttagggcaattattctgtctagattcttggaggaactatttttagtgcctgtatttataggtgtttcaaaattaaaccttgatcatgtgggcattctt

SEQ ID NO: 315896 - DNA, 1511 bp, Cannabis indica
tgtctattatttactattttattcctttcttaagccctaatttattagtttccaaaattctagatcaatattttggtgctttcattgagagctaaagaaagtttgctagctgtcgtaccacatcaaccatggtgctcacttgaaagaacgtaggcaagaaagctcctctggacgttgttatgaaggaagcggactcccccatccatgttctccaactaggtggtgtaagagaagagggtgctactcatgttgagaaccaaggagaagatgctaaaaacttatatgatgtcgtcgatgatgaccaaaaccatgaggagtgggaataggaggacgacgacaatggttacatgaaggacgtgtattataaagatagttattactatgaccatgaccctaacttgttgtgagtttttaaagaattagaagctactcaaacgtagctagaagaatagaaaaaaaaattacttagaaaatgaagagaataatggagcatctccaaaataagttcgaggacttggcagagttcgacgatgacccctcgatggaagttatggctaaagagcgtgctcctaggaaaactgaggtcgaaaccttgaattcccgaaaggataaaggtaaaggcgaggtaggtgagcccccatgaaagtagctcctaagcctccttagaaagacacaaatttgactggccagccctcaaggacgcagaaggccactagtgctttcgagcccggaagcccttcttttcctagaggaaaaactgtgccaaaaaggcaaagtacaaaagtacctaagcccaaagggcagagaaaccatcccagtgattatcaaccaagataaaaggatgactaacgaatgactgctggtcaaccatagaccttagtcagcggttggatgccaagtatgaaaggtacgaaagtgaaaaagcgaggccacgtggaggtgaccccagaaaccacctaagtgacaaaatgcgaggatgtgatcttcctaaaagcgacaaaaaaaggttagagtatcaaatagcagctcaaaccaaactagtcaaaaagcacagtggggccctctaagattctaaggatgaggacccagaaccttgcgtgagggggatcacagaaactccacttctaaaacacattaagatgccacacgttgagttgtatgagggaaggacagatccacatgcacatttggacaaatataataagatgatgcaagttgaacgtgtgagtgacgatgccaagtgcttgtatttttacctaacattgaccaagtctgtggaaggctggtggaagcgtctagcaccaggattgattgatagctggaaagatttacagtcagcctttcccaaatagttgattatcgtgcgtgatttggacatggaggttggctctctcaccaatctcaagcagcaacaaaatgaaagcttgaaggcttttatctagaggatgatggaggctgatgccaaaactaaagtcactcaagacatgaagttgatggcccttcagtctgga

SEQ ID NO: 315897 - DNA, 2046 bp, Cannabis indica
ttttttttgaataataatgaaattttattaaatcaaatcattcaaaactaaggatgcataagccataggtaacacatccccagaataattacaatcagcctcaacaagagaagatcgcgcaagagcgtgcacaaccttattagtcgatcgctttacaaaattaaaagaaacatcaccaataaccaaacacacagtcatacaatctgaaagtatatggccataaggagaagccatatatttaaacttttgtaaatccctaatgactctcaaacaatctgactccaccacaacatttatccatccattgtctttaatccaactcaaagcctcctttataccaatagcttccaccacatgaggcttcaaaacaccatctttgatcaaactcttggcttgtaagataaccccagcggccgttcttgctaccaaaccgatgccaaaatgcctttcattagagaagattgcaccatcaacattgactttaattataggaaattggggaggggtccaatgctctaaagatacatcacccgaaccattaacttcaagagtaggaacggtattcttttgagcattataccaatctataaagttcaatttagctaatgtcacaacctcactaacctcaggtcttttggagttccaaactagctcgtttcggtgcttccaaatagcccaaacaatcatagaagcctcaagcttttcggacatgttccacacccgtagcccctcttcgaaccaggctgcaaacgtcatcgctgcaacaaccacactaggaactcgggacaagccccaacaactttgagcaaaagagcatcgaacaagaacatgcagagatgttttgggggcagaggcacaaaaaggacattgagtattgattggcacgtgtttagttgaaagcggaaaccttgttggtaaacaattagaggtgactctccatagaaaattaagcaccttcggggggagttttagctgccaaagttctttccaaaagcccgaacttgccgccattacattgctacccttgattacttgctgcaacgcataagcactcttaactgtgaacaagccattgtcttccttcatctaataccaagtgtcattgcctacattccttgtaagaggaattttccaaactaaagcttgatctctaccacttagcacatccgaaacaatttctccatcccactccaaggagtcaatcttcatcaaagagctaacaacattccccacaagagctggatgccgagactcaatgaagggattcaactcatcagctagccaaggatccatcaaaatgttcgttgtagagccatcccccaccatctttcgaacccatgctcgaaccaattcctgggcttcaaggacactcctccaaatataacttggattagatccaagtgtagccgaaaggaaagagcctgtagagaagtatcgggctttaaagattttccccatcaagctatcgccacatgtgagaagcctccacatttgctttgccaacaaagcaagattaaagtccctaaaattccgaaatcccattccaccattagctttgtgagccgaaagcttatcccaattcatccaatgaatacccttcttagaagaagatctccactagaattgactaatagctcgctcaataacattgcagattccaacagggataaggaagacattcattgtgtaagcaggaagagctcgaaaaactgacttaataagcacttctttaccagctctagcgagaaacttgttgtcccaagtttgaattcgtttatgcaccttatccttcacataactaaagacaacatttttatttcttcctaccgtacttggtagacccaagtacttgctattctcagccgcctcttgaatacccattctagcacaaatgatttgccttgttgctgaagaggtattagtactaaaaaacactgaagacttttcaaagttcacttgctgaccagtagccatagaaaacagttgaagtagttgaagcacacgagtgacttccccatttgtagccttacagtagaggaagctatc

SEQ ID NO: 315898 - DNA, 2655 bp, Cannabis indica
gttaccaaacggcaccttaatgaatgtaattaaagggtagtagtagtgtgttggggctactgaggtctggtagtagttgccgagttgtagcttggttgtatattttgaataaagattttttcttttttaaaaaataaaataataattataaaaatatatataaataattataattttgtattataattaaatatactaataaaataataaaatagctatcatgaaaatttttatattatttactactcttaagtggtgttattataagaatatccatatttctttttataaataaattagttgaacgttctagagaagacaatttattcattaattaataaatcttcatttttggtttgtcctcaaaatgtttaatctaaaggttcttataaaaatatcatcatgttattaaaaaatgtgataatttaaaagtgataatagtatagaaaataatattagagttttctgccttaattaaaactccaattatatataactattttattattaatatatataaaaaattattttgacttcgttactaaaaaatactacttttatgaccaacacaataggtgctggacatgaagagtttcttttaacatttcatatccaacagtgtttgaaatgaaaaatattacaatatatgaaacaatgctcaacatgaaaaataataaaagatatgatatgtaataatatgaaaccattttcaatgagtaatatccattgatagttattaaaaaaaataacaataaatatcaattttagaaatttaaaattattggattttgatcaaatgactaataataaaagaaaatttaagttgttgtgcttgaaatttaatttagctatttaattaaaaaaaaaatatctctcattttatattatatcaaaaatatgtttttgttaaaaatatttaactcaaattcaatattttttattcctttaagccgaaaatcgattaatatgttcaaaatatttaaagtcctaagcttattagtacactgaatttgcacatactaactaattaatagaaatctacttatattagcaagtgttatgttctttccaaaatattggtagatagtagggagagtttttatttggtactacgcttatttgtttcgatatttaagtaagttttttaatttatttatttacttttataatcatgtactatttgagactacaggtacatcttactttcataatcgtgtacatcttatttgtttcgacattcgagagtatttatttatttatttacttttataattatgtacatcctaattacttgagactatcattcaaattttaaaaaaaaaaaatacatgtagtttatatttctaaaataagattaaaatatttttataattatttttttataggcaagttagttattatcattattttaaatttattttcagcactatatgtatataatatacaatttaaaattcttaaatttgatagtactcttttttttttattattattaaaatgtttagaccacagtcattacaaaatagattagtaaaaataaaagtagttgtaaacaatctaggtaaaaatcgactttacggcgttagtcttaaattgtcaaattttaaattgtcaaatttgacatgtagtcttaattcactaaaatgctctcttatataaatatatatatatttatatggatatgattttgtcccgttattatattttcacggattgtaatccgtgatgtacgacagctgtcagatgagaaagttatttgatctgacgactgagattgatctaggggtaattagggttaaaaagtagaaacgtaccttgacactcatttaatgtaccttgagacccatctaatgtactaaggaatacattccgtgaaagttcatcacgggacaaaatcatatccttatatttatatatatatgatatatgctaagatagtaccaaaacttacctcaattgttttttcgaagacgggatgatttattctaggataaatactactttcgacattatactttgcaaaagttattaattggattatttgttgttaaatgataaattagaccttatattttctaaaatgctaaaaatagaattttgagcttaattttcaatattttattttttaatataaccaactttaagattatttttaacataaacagatacagaaaatataactaatcttgtcataacatctttagatcaaattattattattaagttttgttttaataaaaaaaatagtttagagttctatttatacaattttaaaaaatatagagttcattttatcatttaacaaaataaaaatttaattaataaattttacaaaattaaaagtgaaaatagtatattttctcattatcccattcccaatatcatatttccaattccgtgtgccagattttgttgtttccaaagcaaaatgaaataatcaattttgataagacttttccatttcaataagaaagaaaaagaaataatacttttttattatcattatttgaattttatgacatataaatgcatgtgtaactagacctggctactaagagcatctctaaggagacataaaatttagtgctacactattatcaaatttggtgtcaaaaattatttctactccaaccacaataccaaaattacactaaa

SEQ ID NO: 315899 - DNA, 608 bp, Cannabis indica
tgttttttgtaactttgttttcagaaaactgtttttaagaaacaaggccaaacaagccaaattgtttttaaaaacaattttctgtttttaaaaacaaaaaacaggtttttagttttgatgccaaacatgcacttaattttcattatttttacgttgctgaacaagtgaaaaacttgtaaatttaaaaaaatttggaaaaaatgtaaaagaaaaattgattttttgtgcgttgggtaatttttttaaaaaaagagattaatgtaagcgggtataagttgaactcacccactattatctaagtatgtatggcgaaagataattcaggttttcaggtcaggtcgagaccgttctaacaggtgacccctgagccaatttactctgggtgtattccagtgaatctaaatgcacaacatcaaaatttacaattttattttctatttttcattcaatcttttacatagttattaaatttttctcatgtatgttatagttacactcgtgactattttattttatatgcatgtgaaataaactgtttgaacctttctatattataatttttttaaaattttataaaatatcttaaataattataacgtacacaaata

SEQ ID NO: 315900 - DNA, 633 bp, Cannabis indica
ttataattttttaaaattttataaaatatcttaaataattataacgtacacaaatatgaaaaaaaaaattaattaaaaaattattctaaatacctaaataagtaaatggtacatcacataccttttaaggagataactgtaaaaatatccaataaattataaatcacaaattaagatataaaacattatacatagtttttcatcaatacaaaatgattagcataagcaatttttttttcttttctaaaaaatgcatatataaaaatatacatttttgaaaagttgtttgatatcatatatgcttcgtgtttttgtaaaaatagcctttataaattttttattagcaaaataatgaatttactacgaccataattaattattattatcgcaaaacgaccatagatatagtattttagtgtacgcatatcatgatcacatagaataaattaaatgtagcttttttacaaattttaatattttacattgctagtttgacaaatatcatgtttttagcgcagaaagagatactttgcactgtaatgtcatcagggtcggcctaaacattttggggatcttgtacaaaattttaaaattgtgtttttttttatataaaaaaaccgtatacattaaaat

SEQ ID NO: 315901 - DNA, 1790 bp, Cannabis indica
tattaaaaacttcacaaaataaatattattttacttaaaaattttacattttttattatttatattaaaaatttaaaataactattttataataaagtatatcatgcatgcttgtaaagtaatttaaaaattttaaaaataatttaataaaataaaatatttactataatttttttaacaataaatttaatatttttttacttaaattattttttttaattttataacttagtgttatattatttttattttatttaatatagtatttttgttattattgtattatatttttagctagtgttttaaattaattaatatttttgtgataaattttaatttttaatatttgaggattaaaatgtaaaattatttttaaaattaaataaaataagagttagaatacaaagaaaatttcttacatcaaattagtataaatttaaaatccaataccattaatagtgtagaatttagtatataataatttagtgtattatttgatgtgttattaaagtaaaaaaatataaaaatttcacacctatttaataaaatagtgcatgatgctctcgattatgatattattaaattatatccgttatattataactataatatattgtataacatagaactataaaatatatcttcttgaaaaaaatataactaataaatatatatatgtggatataataattattttattttctatttattatatacatcacactacctagaatttatatctgcatgactattaactgttaatagattaatatctacgtacaattagttaaatataatttttaaaagttattgtcttaagttacatagaaattgatacctaattattatactaataacgatatgatgtcgaaaaaagtattagacacctctaatacttattaatatttctaaaattatatttttttttttcaaaaaaaacaaaaagtatacattgtctttcaaaacaaccaatttttcttttctttttcaaatgattaaccttattgaggtgaaagaaaatatactaagaaatatctctaaaaaatacttaattaaattatagaacctagaactacaaccaatttatttccggtcttagcttgttaataatttatttttatttatgtacttaatttatattttttttttgtgctataaagaaaataagatgagtgaatttttcaattaaagtctataaagcattattgtctagttctcataaaacatctttacataccgttaggatagacgaaaaaattttattataccttcaattttttcaaaccactacaatggtacaggaaaaaaaatcttagagcaaaaaacaattagattattactgttgaattaaatccacataaaagctaacatgtcataccaggtcacaacatttcagttaacaaagagtcgatacacatcaactaacctaacaaccttaactgactacaacaactataacagaatcagagtaacaactcgtggtgtaaagggacttactagatcatctatataaagtgctctcttcatcctttacaagacacacgaaagagaatcctagagagagaaaactctcagaaaaggagaagaagaacaagagtgagtagagagatagagagagagtgagagagagagagagagcaatagtttgagaagaaagagaagaaagtcaattaaaagaaagaaggtcaagaacgttcaccttattgttcttggagagattaccacgtcgagttgtgactggaatcatctcaaaccgatgaatcgaaggttgatcatagtggatttggctc

SEQ ID NO: 315902 - DNA, 999 bp, Cannabis indica
ggtgcaaaatcttcgtctatagcgtttactattgtcgaaggttttaaattgtcggtaaatttttcctcaactgttttaaattgtcgcctattctacccaattttgcgacggtcgaataggcgaaagtaatagataccaacattaatacattagctaaaggtttaaaacagtcgggaaaacgtaatttttagtagtgttaattagtttcctcgcaaatattattatcaataacgcctatgagagtctttttttttttggaaaacaaagagtagagagaataatctttacttttgctcaataagtaattgatgaaaataatgaagataaaatagagagaataattttgatttgatacatttgtctcacatgcatatctcttctctcctctcctctccttgtatcgaacatccaaaattataatatccatattataaactcgatccaatctcaatcccaacctgaatcctggatccaacctaggctttggatggggttcagagttcgagattcaggatcaggatcgaattcgtggttcgggtcgggtttggggctgaggtctgggtccagaattcaagttcagtgctgatttcgggttcaagttggggtctggggttcgcggccagagctagggtcctaagtctagggttggggctagggttggggtccgggtccacgttcgggtctagggtcggggtcagaactggggtcgggtctagggcggggtacaagatcaaggttcggatttggagtgtgggtctaggttcgaatccaggatcagatagtataaaaattatattgtatgaaataatacaattcacattgtattaaaatttaaagttataataattaatagaatacaaaattttatcaaaaatataatattcgttattatttaatacaatataatttatatactatatccaaaagagctcataacattgatttgtagtagttgttgcagtacatagagataagatatgaaattcatcatttattatt

SEQ ID NO: 315903 - DNA, 1065 bp, Cannabis indica
aatgaaagtaacaacttcattaaatagctaaatctactattacaaaagactaaagagaggaggaaatagtgctctcagtaaaactatgatcaaaccaattaataagagccacgagccaaataataggcagtcttattagcagatcgtttaacgagataaatattaatattattgaaagaagataataaaagatgacactctttaacaagctgaccaaaaatagaaggcatgtcaacaaaaatgtgtaaggcttgtaaagcaacaagacaatcaatctcaattacaacatttgaaagattatttactattatgcaacttaaagcctctttgatgctcatcatttcagccactggtgcatttgaaagaccaacagagtaggttgcagcaaccataatattgcgatatgaacagttgagagaatctaggcaatcgcagggaaaatttgggtgaatcaattgataaacatcacattcgctttgtttctcgcctaccgggacactgttgttatacaagtgatctcattgttggtgctggcaagagcccgaaactcagcctctgcagagctcttagaaacagtagtttgtttctttattttccatgatatgaggcagtcgcctacaaagatgcaaaagccggttacaaaatgtcttgttgtggggcaagcagcccagtcggagtctgagaagcctctgaggtgaagggacgagttggagttgtaaagaaggccctgccctgagcttcctttcaaatatatgagcaaatggtgcacgacttgcatatgtgtggttttaggagatgacataaattggctcaaggtgttaacagcgaatgtaatgtcaggacgtgaaagagtgaggtatagcagcctacctataagatgtctatagggagaggggtcatcaagttggtgtccttcttgatcatcaagcttagttctggggtccattggagttttggcaggtttacttcctgtgtagctggtgtcctcaaggagttggagagtgtatttgttggatatattttaccagcatctagatttactaacaagtatgtttcattaacatc

SEQ ID NO: 315904 - DNA, 1321 bp, Cannabis indica
ctccattttcatattctttaagatatacccacttttatagatgatatccccattaaaccccttagtttaatgcaaattatatactagactaaagtagagagtgagggtatgttggacaacccactcaaaaaagtgggtatattttaagtaaaatataatataaagatatttttgattaattgatacaaaatagaagtatttttcaacttattccttaaaaatcgcttgattgtatattggtacaattcctcttaaaaaccgcacaaaaacatgggcccaaatgaaatatatgtttagaggcccaacccaagtccaaaaggtgtaataggcagccacaccacaacctcacaaaacacaagtcatcaacctcatcttcatcacctatcaccagctccctctcttcatcatcaaaaatggcgcttaatctgaccaacacctttctccaaggaaccacctgtcttccatcactcccacccaagaaagtaagttccataccatcttccttcttcattcccaaaacctcatattttatctttgtctaggataaacacccaactcttttgtctttctcgattgttctttcacactttgaaatttttgtgctgtaggtttctggggtttcaaattaccgggcggtggtaacgtgcaggaagaaggagttacacccgcagttctatgaggacgcgaaggtgtactgcaatggtgagcaggttatgacgacgggtggtacccagaaggagtacgtggtggatgtgtggtcagggaatcatcccttttacctcggcagccgctcagcttcactcctcgacgacgaccaggtcgagaaattcagaaagaagttcggtgagctcacggagattatggaaatccctgtcctcaagggtgagatcattcttccacctaaacgtaaatctgcaaaaggaaagaagaagtagtggatttgattttgaagaaagagaaagatttggggtgtttttcttttcttttcttgtttggtttagtgagattgatttttcattacataattatctgaatggtatggaatgtcgactatgtatttgttaatatgcctcagttcaaccaagatagaacttcaaatttgatatctttttcagaaagtaaccattctttgttcaatttagcttagtaagttatggaatgtcgactgtgtatttgttaatatgcctcagattctaatgatagttgcttgtgacatctttttgtgagtcaatttctaactgtaattgtcagctgatgatgatgacatagttgcatttcagtacctttaatttagttagtgattaatttaagtgaatacaaa

SEQ ID NO: 315905 - DNA, 854 bp, Cannabis indica
ttttgctcggcgatgacgaaaaacgaggatggccatttgaatcacatggataagtctagaacatttttcttagtggaacaatattggagatagtttaaataccgagtttgagcgggattgtggttcttgactatattacccctagacttaaaatttcttaagtttaagcgccatgggcactttagtaatttggcaagtgggggaataggtggcagcctagggagttaacacctagctaatattaatttagcaaaagataaactcattaacatttattcatttatggaaaaaacaaagaaaaactaagaaaatcaagagaatttccatttctctttctccctatttgcttgaccaccaccaagctgagaagcaccagcaagttcatcttttattttctgggaatttagcttagattcaaggagttattggtgtaggtaagccctagcactgttaatcttatattgttaaagctttgttttttttttgggttgaatatgcaaattgatgatttaggggctgttaaggtttgagtgatgtgtagtttggtttttatgtttaatttaagttggaaataggttcttgcagctgtatttgaggttttttgtggtggatgaccaagtttgtgtttgaaaactcaaacttgggtcatcaatggcatgttttaattttgtgtaattttctggattctgttgattggattttgttgtgagaggtcaatataggtgtgacagtcagtagtcccgtgatccgtaaggggaaataccgggtaagctgtacaatcccgcattgcttgggaaggtcaagtgtgatgattatgagactgtgtaggtatgggactacacagttgaagagag

SEQ ID NO: 315906 - DNA, 1109 bp, Cannabis indica
cttccctttttataaattgggttgaaaaaagggaagctaaaggcttacattgtagtagtgaagggcaaattggtcattttaacttcctaaaaaaaatccccgaaacaaccaaagcttaacgataatgtcctactgccattaaaattctaaagcacacaaaacgtgactctttaatggcccaacgtccctttctatagctatcgaacacaatgacaaaaaatcaagaaattcacatatatagcataattaatataaactgaatctaaataattctccacaaatataaaatcataataataattaaatcacataaataaaccctaattatttgttaatttaacatattaacataggcagtctttacactattgatcttgaaattgagaaaacttggagacagaacaaaagaaggaaaaaaataggaaaaaactgcaatagagattgaacaagaagtatatataagttaacaacgttaacatcgacattaatggtaacaataaaggtgttgtagaagaccagactaatggttgcaaccatagtgaccgtagcctgagggactatttgatatagaacttgacaggggccagatcctgtataaggccacctgccgttgatgttaacaatttttaaatcaagccagtcgtactgcagatggtccaatcctcagtccagtttggggggctgtcaacaaatgacccaaacattcatcttgctaactttgaaaagctttgtcagacattcaagatggatggagttagtgatgatgccatcaaactgagggtgttcccattctcattaagggagcgagccaagagttggttgctatctttgccaccccattctatcaacacttgggaggaattggccgtgaaattcttttccaagttctttcctcctgcaaagattgccaagttaagatctaaaatcaacaacttcatccaacaagacaactaatctctttacaaagcttgagagaggttcaaggacttattaagaaagtgccctaatcgtttgattgaaaagtggacgcaagtgcacaacttctacaatgaattggttggcaatacccgtttggattatattttagaaggatctagatttactaccat

SEQ ID NO: 315907 - DNA, 3064 bp, Cannabis indica
tttttattgtattaaatttataatcgtaataattattatgatataaaattttatgtaaacttaatatttattataattttttttttgaataaaaatgtaaacttcattactttaaatcatccaaaatcaaagataaattacaaaaggtaaagtaaaactattaaacgtacgatcaacctcaagaagagaggatcgcgccaaacaatgcgctaccctattagcagatcgcttcacaaaactaagagagatgttatcaatctcggcacataaagccttacactctgaaattatatggccatacggagagaccatatttttattacgttgaatttcagaaataacccttaaacaatccgattccaaaatgactccattccatccattggtcttgatccaactcaaagcttctttgattcccatggcctcaacttcatgtggctgaagagaacccattttcaataaagtagcagcttgaatgaccaaacccgcagcacctcgagccaccaaacccaccccaaaacgaccctccaaagcaaagagcgctccgtcgacattaactttgatgctatgaaagcttgggggacaccatttctccggccaaccattgtgaagctctgaatgaggttctgactcgaactgctgtgcattgcaccagtacgagtaattcactttagccgtgtgaattacctcatcaattgaaggagaaactgaattccacaccacctcatttcgaaccttccataacgcccaaagagtcattgctgcttccacacaaccaacctcactccaccttgataacccttcttcaaaccagcaacccaatgtcattgcaacaggggccacaatcggaacactggtctgctgccaacagctttttgcaaagctacaacgcaccagcaaatgcaaggcagtctctggtgcagcagagcacaaagggcagctagtatcaacttgcacatgttttgtggacagcataaacttggttggaagacaattggtacacacacgccataaaaaattaaggactttagggggcagatttaacttccacaactttttccacagatctgaagaaacattgtggataggctgcccactttgcccatgttgcaatctataagcactcttcacagtaaacatgcctttactatctttcaaccagaaccaatcatcttttaaacttgcctcagatagaggaatcttccatacaagcgcttgatctctatcatttaagatatcagaaagaacctcattatcccactctatattgtcaacttgcatcagcgaattgaccattctcccttcaagactcgggttagtagtttcaataaaaggattagattcatccataagccaaggttcatgaagaatagaaatattagaaccattcccaaccagccttctcgcacccgctcgcaccaaagcttgagattctagtacactacgccaaatgtaacttggattgctaccaatagtagcagtaagaaaagtaccattggggtaatatctagctttgaagatcttggaagctaaattatccccacccaccagtaacctccttccttgttttgctaacaacgatagattaaaatcacgaaaatctcaaaatcccatccctccatcgaacttatgagtagcaagtttatcccaactcaaccaatgaattcccttggagttattagacttccaccaaaatctactaatagcactttccacctgttggcaaattcccaaagggagtaagaacatattcatagtataagccggcaaagcttgaactaccgctttaattagaatttccttgccagctctcgagagaaacttattatcccaagtctgaatcctcttttgcaccttgtccaccacataactaaacgcagcagtcttatttcttccaatagagctagggagcccaagatatttgttattttcctcagcctctctaattctcagcctatgacaaatagcttgcctcattcgactattcgtattagtactgaaaaaaacagaagatttgtcaaaattagctctttgccccaaagcatcagcaaagagatcaagcatatgctggatattagcaacttccctctctgtggctctacagtaaaggaaactatcgtcagcaaaaaacatatgtgatacaataggagcgccattggccactttacacccgtgtatgagcttcctttccttaaaactttgaataagagctgacagaccttccgcacagatgagaaaaaggtaaggcaatatagggtcgccttgacgaagccctctactaggaataataggccccaatgtaagcccactgctgacaatattataagtaaccgaagatagacatccattaatcaatcggatccatttatcattaaaacccagccgagccatcatagccctcaagaaattccaatccacacgatcataagctttgctaaggtccaacttcaaaagacaccattatattatccgtaatcaatctccccggaataaaagcactttgattcaaagaaataatgtccgcaagtaacacttttaatctattggcaagcactttagttataactttagcaacaacattacaaagggaaataggccttaactcactcatttgatccgatttcttcttcttcggaattaggacaatattggtatcgttcatcccagcaggaatcacctctgacacaaaaaaattcttaacacaagcaaccacatccggccccacaatatgcaaatacttttggaaaaactttggattcattccgtcaggcgctggagatttatcaggatgcatttggaacaacgcatctttaacttcttgatcttcaataggcctagttaacattaaattttggtcctcattaaccttgggatttacacaacttaaaacatcatcccaactacccggttcagcagtaaaaagattggcaaagtaatccaccattaactcccccaaaccattatcccaacctttagagttccccatagcatctttaaggcaaacaatattattattacgtctacgagaggatgcctttgagtgaaagaactgttgggttttatg

SEQ ID NO: 315908 - DNA, 1827 bp, Cannabis indica
ataatttaaaattatatattatatattttggtaacattgtacaatgatcaaaatgtaattaagtttttcatttaaaatggggtgtatttataattattattgtgcaaatataatttctctattgttaattaataaaaaaaattcaagaattacattattattttgatttggatatagattcatataattcataattaactaaaaatacaaaatgatcattaaacttttgaaccagatgaaaataatttttttttattgaaaataagtggatatgaataaaataaaatacatttacaataataataattaataaatcctagtataactctaatccatataatactccagcatgttttttcattacattttcatttctattaaaatatattctcttaattttataaaatgtaagacttatgagatgactatcagaacctgcttgctgacactgaattctatttcatgttttatttgtagagtaaccgcaattcttcttaaacctccatacaaacccgaacaaaatctagtcaaatacttcacatcataaacattactcccaaacaatttttccttaagagataaaaattctgataataaatttggaagtaaacatcgtgtgagaatcttcatcagataaccaaaatcataagcaccttgaaaagtaacccatgtgattttgttgttgcaaatgagtttgtaatgcatcataacttcagaaaaataagcagagtctatcccctcaaagcaatttctttcaaaatttatgccttggttcttcaaccaattaatagaatctggagcataagaatcacgtaatatattaaaatctctaaaattaaattgccatatgatgtagtgtttaccatcatttgagagaggcaagtttccttccgaatccgtgagtgtgaaaccgagctgaataatatttagtaagtctacattcatttttagtacgtggtatggaataattggcagaagtactttttctctttttacattaagattatgataaacacatcctggaaattcaacatcgataaatatggtagaatatcgagaaataagtttagctattgtttcaaattctatgtgcaagttatggtgccatacttctctaatcactatggattgttcaagtcggatactcattctctcaaataataataaattaagattttattaattagtattttacaagctgagattttatgaattagtattttacacgttgatatatatagatatacttacagatgtttttctaataggattagaatgaattataggttttcgaatatatataggattagaatttaaaatggattaatctttttaattaaattatttgaagtaatatttatatattttatttgtgttaacttaatcttttttaaataaaacgtaaattgaaattcgtctttttttttttttttaatttatatacatattttgcatttttttctttttactacgtaatatctctaaatatgagattaaataaattataaaacaactaatattttttttttattatatataataatataatatagtcatatcccagctaaatatatataaaatcagctcccattcctctttcacccattaatctatttttgttcgtaatttatgtttaataaattaataatacataatattcaacaaaaaagattatttgtctatttaatattttctcgaaaagaaataaaactaagaaaataaaaaaacaatagagaaagacataacttttcacaaaaggattattagataagacataaatttttataaaatgctttcattcaagtttttttatatataattttatga

SEQ ID NO: 315909 - DNA, 1066 bp, Cannabis indica
tttacaaaatatcttaaataactacaacgtataacagataaagatatatcgatacaccctttttaagtagtgcattataaattttcttataatatatataaaattataattaacaatgttatttgctaactaaataaatctaattaatatagttaaatacttatttggtgtattgtggtatcttatgctcaatcaatgaccttgtaatttaaaaccgtacatatatattaatttgtaagtgtaattttggatacattatttttattaacttcttattacatttgaaacatgagaatcctcaacttcttattaaatttattagtcaattttcgtatttaaaatatatgaagatttttttaaaaaaaaaaaaaaataataacggtgttcgttataattacaatattatttttataattttttgaaaattttcgaatagtttaaaaaaatttgaaaataagtttgaaattttttaaatacgcgtggtagattgaaatattaaaaatttatttttaatattgtaaactatttagaataaataatattataagtataataaaaatccttatacaaaaaaaaaaatatttcgattatatgacttcaaacgtaaaaattaactaaaaatttataataaatatcttaaccaggacagatctttgaaacatattacaaacatccttatctctcccaccattcatttccttctactctcttccatccatctctcctccacaccaaaaattccaacacacaaacacaaccttacaaaactaattatttcaaaaacaaaaaataaaagaaatagacaaatgacaaattgtagaagcaatcaaaaacatgaataaataattatctttacttccacaattcattttttacaaaaatatatatatatatttttttattttcactttaataaaatttagcacattctttcatattaattattaaaatatattataatttaatttatatttatttcggcatttaaaaaagaattttagtatattttttatttatgattacttatattacaagtttttaaaattacttataatttttttataaa

SEQ ID NO: 315910 - DNA, 1292 bp, Cannabis indica
attctccaagcttgcttagccaatagtgattggttaaaatggataaaagatctaaaccccatacctccttcaagttttgacttgcacaacagattccaattcttccaaggtattttgttgctattttgttcgagccccaccaaaagttagtcatcatagactcaaattgattttttttttttttggaattttgaaacaactcatcgcatatgttggtatggactaaaccactactttcaaaagcacttccttcccgcctatggaaaatagtttttctttccaagcattgagaaatttccatattcgttcctttatgttgctgaacatttcttttttctctctgcctaaataagcaggaaacccaagatatcgttcgtggcaatcacttataggcatgttcaatgtttgatggaaaaacatttgaatagttgcttcagtatttggtgagaaagacatgactgatttttgtgtgtttagcagttgaccggaagctctgggataagtctgaagaaccctttggatagctaaagccgatttttttgtagcatgacaaaacaagaggctgtcgtctgcaaacaaaaggtgtgagattgatggggcatgtcgtgttagacgaaggctttcaagattaccgatggcttcctcatgattcaacaagcgagataatccttcagaacaaataaaaaataaatagggtgataacggatcaccctgccttaatcctctccctgggttgacattgccaacgatttctccatttaaagaaaaggaaaagcttgttgataaaaggcatttcatgatgaatgaaatccatcggtttgcaaatcccattttttccatcactgcagctagataggcccattcaacacgatcaaaagccttactcatatctagcttgagtgcagagtagcctttctttccttgagttttatgctttaaattataaactaactcaaatgctaccaggatgttgtctatgacaagacggttcgataaaaaagccctctttctgagattacaaatggaagaacatctttgaatcgaaggacaagcacctttgaaatcagtttgtagattacattgcacaagctgatcagcctgtaatcactcataccagttggattacttattttcgggataagagtgataatagatttattcagcatatccatttcctgtccatcgttaagaactcccaacaccacatcagtcaccgaggatcctacaatatcccaatagttttgattagggttgtacatcggtcggtttgggcggtttatcctatatatttt

SEQ ID NO: 315911 - DNA, 1016 bp, Cannabis indica
ctcacatgctgcataccacgcaagacattgcgttgcactgtgcaattcaaatctgcaaagtcgagcatcttcggcaaacttaacaggcccagttcagtagcaccaaccaatgccactttgcgaagatttgggcaaccattggctagttcttgaagccctctatcaataaacctcgggaggaagcaaatgggcctggaaagcttgagcatccggcgaaaaatgagaaccaatttgaacagaaaacattttgtggttcaacaaaatatcagaattcagggtcgaaatcaaagacccagaaagcaaatcaacatgggtcagatttgggaacctaagagtcagcctacccgactgaagaaagccccaatcgagaagcttgagagaccgtaccagacgatcttgaagactgagccatcttttgcagacgagtgagttggtgttgcgatgagacaggggaagcttggcgagaatagtgaggaggatttcgtcggagaaaaggagggtacggtcgagttcagagaaattggggattaaagttttggttttggggtttttgggggaagagagggagtggagtttcatggcggagactacatgtttgagtggattggagtttctgagccagaggtctgaccatcttggtggtctcttcctaaaaggtgaggatggagtgtttggtttctctttctccgccgtatacgacatcgtttcaggcaatgatgctgtttcttcatcatcttcttctgcaggagctactactctgcaacccattttccaagagtttcttcttctctgcattttcacatggcgatggttaaggttatcacatggttttttcttcttcttcttctctctctctctatggtatctgaagattaagtctctaaggatatacagtgactttgtggcttaacggcatttggatatgattctgagaatttgaacattttctaatcagtaaaagaggccgttgagtcgctttttgttttctttttaaagttttattttttttttttttt

SEQ ID NO: 315912 - DNA, 653 bp, Cannabis indica
aaatcctttggttgcatttctctaatttttttaaaacagtttattgatgtatatatgaactactcatatacttagagtataaatatctatttaattaacttaaattagttagaaccatattcaataacattaagcattatttatacaattatttttttgtataaactttcgaattgcagtaaattagttatcaattcgtcctacaacatgagattgtctcaaaaaatgaggaaaatgcaaccgaaggaaaaagctaacaattatttctaaagtttgagagacgtgttttatgaaaaaaataaaataaaaaataattaatgaagtaaaattatataaggatcaaagtataagaatatttttattttaagaaatatatttctattcaaggaaataaatttctatttaaagaaataaaataaataattgattttgtgataaatgaatattttatattcattgaatctggacaaaatcatttacgtaatattctatatatggtcagatttaaatattcattacctaatttgatttcctgaattaattgtcaaaatattctgacaattaatgtggcacagatactgatggagtatctcacctataaatatagtgtaaagcccgcttagttaatttggaaattagcagttatttatgtt

SEQ ID NO: 315913 - DNA, 1256 bp, Cannabis indica
ttaaagaaatcccatcaagctaaattttattgagtgctacatggctcttgttcatggtcctacttgtcacttttctggattttatggcgcacctattgtgtctcaaaggtatgctacttagcatcttttaaaaagattgcatgatacaactcctttggttcattggattgtcatgggggatatcaatgagattttgtatcacaatgataaacttggcagtcttctgcatcttgagactcaaattgatgccttttgaaatgcaattgaccgctgtgatttgcaagaactaaattttattggtgatagatttacttagcccaatcaacatgtgaatggcaccaatgttaaaaagcgtttggattatggattcgttaacacgccctagattacaacattcaccctgccaacagtcactcatttggaattctttggtttagaccatagggccttgaaagtatccatttcttccttgaattcttgccctcttctgatgttcaaaatacgctttagatttgaacgactatggctgcaagaagaaagttgtctccaaatcatctctcaacattggaaaaattcaaacttagatccatttgctcaaattcaactcaatctgtcatcatgtgcatctcaccttcagccttggcatcgtgaaaaatttggagaacttcctaaaaaataaaactttcccagtacaaagtggcagctttaaataattcactagacacaagcatttctcatttcgaagagcttaagtctagtgaatttattcttgatcagctattagcacaagaagaagaatatcgaaggctaagatcacgtgtttcttggctacaatcaggagactccaatactcgttactttcaccaaaaagcttccagcaaacatgcaagtaataccatccataaactactggatgaacatggcgtggagcaatctacactagatggaatttccaatgttgtttaacgctattttcaaagtatttttacatcagttggtgttaatacacatgccttacagtaggttatttccaaggtcccttgtacaatctcaacacaagtcaatcaagctctcactcgtccatacacggctgttgatgtatttgaagcgctctcttgcatgaaatctgatggtagtcctgttacgaaaattatgatcactacgcaagtgcacgcaatcaagtagtatactcacgcaagtgaggtcgaaccacagggaattggattaattattactaaactatacttataattcta

SEQ ID NO: 315914 - DNA, 859 bp, Cannabis indica
gtttggattgtgaaccgttggataagttttactgaaatttcattggtgggaatttttgaagtgcgcgaattttgataaaatgtgccaaaagctttgtgaaagtgaaattaatctaccgcgtttggtgtggcgggatcttcgatttctttttctaatcattgctattattaatttaatttatttttatttttgttaaatgagtttaatttcattttttatatgattttttttttgaaaaaaaaaaaggtaaaaatcaaaattagacctaataatcattacaaaagatattgtcttgcaaaagtacatttgatcatattataaactgcaaaattacataatcaaggaataaaagaaaaattacaacataacaagttagtagagaggcttttacaatgccgcacatagttgtcaatcccctaactagaacaagtgaccttcaaagtcttgatcactatctcagaatcgctcttcaccagaacaaatgatgatgcaaagagacagtcgtctcaatagctaacaaacaagtctcaacttctccaatgaaggattagagaaattgaactggtttgtagccatccacaaaatagatttgttgtggttcgccacaatgcacatggtgttgcctctaattttaatatcacaatttatcttgccctaatcgagtagcagtggggaccaaagaggggacataacaacctcataaaataaaaataaacaggattcataatctaagtaacaaaaagatatagggccagtttggcacaactgtgctgtggcaaaaagcagttgtagctgtgctgtgagaaaaaacagctgtagctgtgctgtgagaaaaaactgctgagtgtttggtaaatat

SEQ ID NO: 315915 - DNA, 1500 bp, Cannabis indica
ttttcgtcttcttcttcctcggacgcctcttcaaatgggtcagtgccggaatctcggaatctcaaaaagatctcaaatggggcttttgggaagagcaaggtaattttatactgaattattcacttttcgagtaaatttgctaatatattatgtatttcgaacgtaggcggttataattttgtggttttgtctttgtttattttgcaattgcaatgtcgaaataagattttggggaagttttgattactcgttgaacgtgtatgtgaaaagtaggggcgattaacaaaacggaaaatgaatttagtgataattgtggatttagaatccaagtaccgaacatatgcttacaactagtagaattaccactaaagacatcactttcttaattttcgaattattttgataatgtatttttcatcgatcgtatgggttatagttcttttgtgggtctgttaatgtcttgatgcaatttcaataaagagatgagattttgggcaatttagttgaagggttttgttatgtatggttgttgagaaattagcctggaaaaccccgataattttgacttttggttctcatttgagattataattatagaggttgcctaataattttgaagacttattcgtttacagattggaaaatttagaattggcaattggctggtcatgctgcttgtaaactttttaagctatctgatctttgattcatttgattttctcctgttgaatcagaaataagttatatctaagaatctatactcatcgttgaggaattttagtgaagtatgatttgtgtttcattcttttctttgtaattattggttggtgagaatctttgtgaaaattaggggtaaactgtactttagctgaacaagacaatgatgaactttgtgataatggtggatttaaaccccaagtacctaatttatgctttcaactactatttgcagtacttttcaccttcttctttgaatgtttaggacatattgtttgctgacctatgggggtgagaaaaattcttgttgataggtttaatgtttgatgtgatcttcggttctttgtaccaggatttaactttctatgtgatcattgatccaactatgtgaaggtgctaaaacatttccatattgcaaacatgtttcaggccattactgtaggggcatacattatgctttctgcgctcattatgatcttaattcaaccaattttcgcacctgcagcttttgcaacttttcaaactgcagctaagacaggtgcccctgctgctgctgcagcagttggggggacactgattcggactgaactgctaagtagtgcatggactggtttctttgctggttgcttgcacactttatcagggcctgaccatctggctgctttggcccctctttctatcgggcgttcctggatggaaagtgcagctgttggagctctatggggctgtgggcatgatgctggtcaggttatttttggattaatatttctgttgctcaaggat

SEQ ID NO: 315916 - DNA, 1074 bp, Cannabis indica
aacagggacttagtcttttgattcatatgatcacaatcacattccactgtgttgacgatactgtaattgtgaataaacatatgatctggatttaactgattttgtgtgtaaatgtaataaacatattaaaccattagcatgtaaaattcatgcaaacataaatcacttcaaatttcttatattgataactaatcagattgtaaagagttttatttaggcacaaaacccaacaaccattacaacataaaaagtcaatctcaaaaactatactaatttctttatgattaaaaatttaaattatattataaaatacaatagtacttacctttttttcaagataatctcttggatctttcgacatatatatgtcgtattcttctgtttttataacatttttttgatttcataagtacttatatcaatcaataacaaacacaataaatataattgaaaattgagtaaagtttcttgtatttttataatatttcccaatttaataagtacctattatattacacataacaacaacaaatcataagtttcttccttatatctccgcagcacataaatttctcagaacttacttcactaaaacacataagttttcaccttctattatcactacaacacaaaattaatcttaaaactttcttcattatggattaatatttaaaaaaaaaaattaattcttctaaaattagcattattatatcacttaacaaagaaatgactaattgtacatgcctctaataatgaaccaccaagcaattttccgttcactttgtaaaattattccttcctaattaattcaattcaaaacttataatattaagtataatataaaatatgttaagaaaaataataagaacatatatattagtcatttaacactgtatacaaacactttacttgactactccactagtctcacatcttctatatactttactactgtgcatatcatttacttgaatcaaatatatatcaagttagaaattacaaaaaacttacaagatcattaatactatacaaatcttttagggctcgtttggaacgccgtattaggtcgtattg

SEQ ID NO: 315917 - DNA, 2812 bp, Cannabis indica
ggcttggttatggtctagttctttgtgccattccaggtccaagtcctggtcacagtgttcgtcctgttccagggtcttggtcacgttgttgtttaagttttgattttgggtccaatgtttgggtctgggtccaggtcctggtcaagcttcgagtccttgtctgagtcccagatcaagaaaccgactatgggtcttgtccaagcccagttcttggatcctaggataagatctggatcccaatcacgggtcccagtcttgtttccttcatgtcccaagtcctggtttgggtctccgtcaaggtcaaggaccgatagtagggtgcagttctgggtctcgatcccaattttgagtcctgagtcctattcaatgtttgggtccgagttcaagtctgggttcgggtcccgagtcctagttcgagtttggattcaggtttgggacccaatccctaggttggtctgtgttcgagttcgggtcctaatccagtaactgttttaggtctatgtcaaggtcctggtcctggtcctgatccgcttctggttttggttctagtttcaagtcatcgttttcgggtttgtgtcctaatttgggtcctgggagaggttcaggtccgggttttggtctcggttaaggtccgaggtttgttgcggttctggattcgggtctgagtcaaggtctcggtcccgttccaagatccaagttcggttacagttgaagtttccgttttgtttcccgagtgtgggttttggtctgggtatgtgtccgggtcctggtttgagttcgagtttgggttcgggttctggtttaagttccagatcaagacaatgactatgggtcgggtccaagcatcgagtcttggatcccagttcctgaggtgggtcctaggttaaggtttgggtctggggtcgggtcctgaatcccgatccaagttctgaggcctaagttctggtcccggtttagaggcccaattctcgagtttgggtcccccatctatgttcaggtcctaggtccctgtgcgggtccaagttcgtgttccggtttggattcgaatctcaggtcccggtctaagtccaggtcccggtacgggttcaagtctgagttcaggtcccagtgccagtgtgggtccgagttttgggtcccaggtctaagtctggttcttaggtcctgagcccaactcttgtttttgggtctgggtgccggttttggtccatgtcccagtctttgtttaggtccccaagtcacagctcccagtccgggtccaagtcccagtatgggttctcgcctgagtttgggtttaggtttgggtcctattacagtcccagttctgggttctcatcccaatcctggttcgattttgactctaggtccaggatcgggtctggatcccagttcgggtctgggtccgggttcgggtcttggtcttggatctcggtcttgttctatatcaaatctcgggtcttgggctcggacctaagtttgggtttgggtctagttcagggttgtgcgctggtagttaggtccggagttttggatccagggtcgggtcccatgtctcgggtctggggtcgagttttgggtctcggtctcgattccaaggcctagtttcaggtctatatcccccatctaggtccggatctttggtctaggtctgggtctaggttcgggtttagggcccaggtcccccatctaggtctggatcctaggtcccagtctaggtccgagttcaggtttggatcccgagtttgggtccgagtctaggtcccaatatgggttcaggttagagtctgggtcggggtcccagtctgggtccaggtccctattcgggtgcgggtcgaggtcccaatcagaatcgaagtcaatgtctgggtcccggaccaggttctgttcttggtttgggttttggttcaggtcttgagtctggatctaggtttgggtcttgatccgagtcggggtttgggtcctgggttccgatcttggtatgggtaagggtctgggccagtgtccaggttagggtttagggttttgggtttagtggttagggatttagggttgagggtttagggcttagggtttatgggtaagagtaatgagtttaggatttagggtttacggtttaagggttcgcttccactttgagttcgggtcacagggtacgatttaaggtttttggtatgggtctgggttcgagtcctagtctaggtctaggtgcgtgtttgggttcaggtccgagtcttggtcccaaatccacacacaaaccacatgtcgagtctagttcgagttcttgtatgggttcgggttctggtccgggtctgggtctgggtccaggtccaatttcaaaatttagacacccactatgagtcgggtccaagccttgggtattgggtcccgggtcccgagtccaaatccatatcctggtccggttctagctcatgtgttttgtcctagttcgagtctcaggtccaagtttgggtctaggtttgggtcttggaacctgagtcatgggttcaggtccccgattcaggtcagggtcctaagtcctggtctgggttacgttccaagtttgagtgtaggtcttgggccgtgtttggtactggtccttgtcttgggtccttgccatgtctgggtttgggtcactgctcaattctcaggttcagatctaggaccgagtatcgggtactgggtgttggtcctagtcccagttagggttctagtcctagtctaggttcaggtctcgctcctagtccgtgtatggatcccagtcgtgatctcaattcaggtctgagtcgtggattcgagtctgagttttggtacgagt

SEQ ID NO: 315918 - DNA, 666 bp, Cannabis indica
gggagtaccttgtactccgggtgcctcctccgggacctaagcccagggtgcttccttgtggcatacaaagacttatcacatatttacaagttatctgatccacgtgtccctacttgactggtccacgtattttgggcgaatttaggggcaacacttatgattaactaataaataatataagaattaatttgttaaatacatataggaaaacaaatgtgttatgctagtactaatactattaaatttgttaaaataagtattaaacaattaacacaataattctacgtttcaataattaatatataaaaattaaataatttgaacatttcaattaaaagatctatgtgtaactatatatataaaaattatatgattctgataatagtataaataaagattttaatacacataaattttgtcaatcttttttttcgatatggttaagtacttaggctcaattaagcttacttaattacgaaagtaactcgaatttatttagatattttcataaagcaaatagagttttggaatcatatttgaatctcatgatttataatttgagattgagaggaatcatgtattcatgtattgtttctgaaactaaattgaaataaatggaagattaaaccaaatttgtcttccttatgagtatttgttttcattttt

SEQ ID NO: 315919 - DNA, 1370 bp, Cannabis indica
attattttggtttttatgggtagtctttagtttatttatgattattattagatgattgtacaactaaagttgacttatgacatattagatctgatgatgaactaacacttaactcttttgatgttatttagtatgtatgaaaatttatggattgtgtttgacccattatacttacttttgatattgttatatatattatgtggcatgcttattttataaatggactttttttaattttaactaaaaaaaggtaacaatattataaaaatacttacagttggccaaataaactaatatacagctcaaataaaaaaaaattacacaaataccacttacacacatcttcaacccaggatccatgcttccgggacaactattgcgcaaccacacagtaacccaacacaaccaaaacaaaaatttaaccagaaagagaaccaccattaattctggcgaccacctaagaagacgaccagaatcaatcaaaataggagctgttttaaatttatgaaaaataagtgttaaaaaactactatgaaactaaaattcaaccagaaatccaatttaatttgcataaaactaatgtcctgagttcaattttcaaatccaagaaatacagatctcaagaagttgaactggagttcccaaacaatccaactcaagtataatccaaaaaaaattatatcaatattatagtaaaatatttatcctagtgtatttttgttgttttcaaaatttctaatggtgaatttgttcatattgaatcatgaagagacatgtagatagagttacgtacgtgaaaacactgttctgatttttaatatttcataacagttgtattacagttgcataaatattttgctaacagttattttgtcttattgaaacttttattggtgcaaccttcagccaaccacccaacaaccttcgtctgatgcaaccttcgacaaccacccagcaaccatcatctaattgtgtaagtgatagtgtaataggtattttggtaattaaaagcatataaaaagtataaatattgttcacaccttatggaagtatttttgtaaataaagtttcaatttgtattttacatgtaataattcatttatgaattttgtgattttatgtgcatatgtagacttagcttgattttgttgatatttagatagctagaacttatgtgattaatttatcgaggcatcctaaatcttggttgcgtggagatgattaaggtaatttttttataatcgtttgggccaaaaaagctaccattaattcattatcttttgttgtcctactttgagcctaatttttcttatttttattctttgttaataaatgcatatttatctttgattatgagccatgaacttaaa

SEQ ID NO: 315920 - DNA, 1906 bp, Cannabis indica
tgttccacgttccagtagttctttatcagtgaggcatttgtacaactatgcatgccttttatcagtagtacagtcgagccaatttataaagctcggttcctactaccgcttcaattaagctttgattttcccaggatttgcttcaatgcccctcgcgttgactatgaatcccagaaaatttcctaaagaaaacaatatttaatataccaaagcactccacgaggtccgaggtatggaaaacaatccttcaggtacgccgcttgagtacctcttatctctcggaatccaagggtctcttttctatctctttgctaggtaatttgtattgacatttaaatgatggcaggtaatgttagggtcaatcccaatcatatctccatggctccaggcgagctgatcctggttttcccttgaaagacttattagctgctatttcagttgttcatccaggttcttcccaatgtaagcacactttgtggaatttcctaggtctagaacaattttttccaatttttcaattggttttagtaagcttctttcatctaggattcgaggaacgaggtcttcacccttcttctcgctctggcaaccgacttttttgttctgcaactctatacgatagccttcgcgagccaacatctaattacctcgcactattcccacacctactgctgtctaaaattcaagtactaaaatatctattgcaagtgtatgtgattaattacaagaattatggatcaaatatataatttaatcaagttctcgcgcggctaaacagttgtcagagtgtacagaaatggtttccaataagatgctaaatagtatgaattggtgttctcgttttactctcggaatagggaatatctagatctgagaacagttcagcaaactagtaagactacaaaggagattaagactagagtatttgcttctcaacacagacactaaaagtcatattaatttaaaactcaacattacagaattcccaagtaggggaaatatcttggggataaggatgacatatgccctaagtttctaaggattttagattttttagagaaacatcaggataataagaatgtgtttagccttacaagtagcatttgcggtataccagatgtttcatattgtatattgggaatttggctcacatatgtagttatggaactccaaaacttcagttaaacctatatctatagtgagaaataggttatgattcttgataagaaaagtaaagtcatctaaaacagacttttggtagtatttaagacattttaataagacaataaggcgaaggaaatcacctagagattaaaatctgacgtgtgggctcatgacccaaattattcaaatttgatttcgaggacgaaatccttttaattggggataattgtagtgaccgtatagttaaatcatgggaattagcagaaaattaagaagttcaataattattatgtaattttgtgtttctgagtagaagttagggcttattgttaaaaataagccttaggaaaatattttctcaattacggagatacatttgaatactagatgcattaattaggacatatgtgaatttttataaattgcatgttttatgtccggtaaaagtggaatgtgatgtttagcctacgaagttacttaggattgagttagtatcttagaaatagtggggcaagttagtcagacatttggaatgtcaagagtgttcgaggttatggctttggaccataatacccctcggtttcaagttacctttagtgtagaggggtatttaggtcattctttcttgttggtatttatattaactattggattaggaatagaaatccctaatttgtcttctagtgatttcagtatatgctatgtttttgataacaaagtctagtgcttttttagcagttat

SEQ ID NO: 315921 - DNA, 912 bp, Cannabis indica
gaatctttagagttcgtgcggttgacatgatctctcatttcttctgtttgagtttccggatctttgtcagcagcaacagaaaaatccaattcattcttggtgcatttgttcgttggtttcgcattgaacacatgcaagtttgggaaagttttttgatctgcaatagagttgtttttgtaagaatcaagttgacaaggcaggcatagtacgttgaaaaagagatgaaatagtaaaaataaaataatgactagacctttttcactgatttctcattgtcagcaatagaattcccttgcaaattcagatttttcaggctaacaaaagaattaaggacctgcaattttagcatggaaagtaattccagcgtaagatgtcttttccaaaaactaaaccatataagggaaaatacataaattgtatgtatatcaagaaagaatgttccagcttcaaatgtgaaccttaacatctgaccatgttgtgatagcattatatttatatcccaaatctaagttctgtatatccttgtggtacgtaagagataggaagagtacaggaaatgaagtgaaggatatatgcaaagaggcatcgaagcactgtttccaccatatatacattataccaaaacttggtctgagagaccatcaatctcacccaacccacttatgcattgtcatatcatcaatgatactctactctatcaacatcatttgacaccacaaaaaccagttgacttgttttagcacttagaacgcaaaggcgaacacaaagttcttaaccaaataaaggatgcttctaaaatgttttcagggttcaaattttgtcattaactacagattgattttgctatcattacagtagctatttaatgttttactctcatttcaagaataagcagagagagagagagagaga

SEQ ID NO: 315922 - DNA, 2097 bp, Cannabis indica
ttttttatcttttcaaattatgcatgaaaatagtattttgtaaaataaggcaaaatatcggggcgttacaaagaaccacttgtgatcagagatagtgagctaaaaaagagttgcttatgatcaaattgtccaagatagtgacttagtgagtatataaaatagctaacatcttgaaggaggatgttagattaatagagagtaccacattaattactatgtgtagaaagataataaaatatacaagataaataaattattcttcttattaccaattaattttaaaataaaaccccgtatgtttcccttatttcgaaattcttacactaacaaaatcacaatgaattcacagttatatataatataccccttaaaaattcccaacaatatatatatatataatatatatatagatattggaagagaaagatgtaaagaaaaactagagcatgatgcatgcatgcagctttaagcatgcacattaatcatatacccatgtgttatatattgtatatatgtatatatatgtatatatattgtttgcatatatatatatatatatgaatggtttgggattgaatagccgtctacctttatctgcagctattatgttgtccttgaagtctctccctctctttcattttctctacccataatttattatatatatctaataaatattacacaaacatcaatgttcattataaatatatatacatatattaaatatatctctatctggtgctatatatctttgcagacagtactattttttatttgattcgtatagggaaggctatgtattcagtaaaaatctctctatatatatgaacagttccattattcttaaaaatgaattatatattgtacaaaataatatatgatctccaatattgttggcacgagccatgttataattatatttaagaaaattatatttaagaaaattaattcatatatctttttttttatttttttttttaaatttaaattgttatgtgagttgcgatgtatattgtaatttaaattgggttgcaatttaaattactcttatgaattgcattgtatagtctataaaatacaaaaagaaaatactttaaagtgtataaatttatgtataaccatccatttattattaatcagccaaaatgattaataaatatctattagggttttttttttaataaattagagaatttattaattaataaactcattcaaaacaatagctagaacgcattttagatgaacaatcctccaactgaagcacacaacctgtagagaaacaagagtctcttgttaagaaatgagtcaacttgtttgaagatcgtttaacaaaacataactcaacaaaagataaagccaaaagtaaattcctaacatcttgaacaataagaccaaattgtgaggacataaaaattatctattaggattttgacaactaggaacactttaaaatacagttacttttagttataatttttagttacaatataaattttttgtgactaaattattttaagctacaataaaaagttacttgtgactaaaatataatatttaactataagttgtcactaatttagttttaatcacgacaaatattgtgactaaaaatacatttaatcacaataaattgtaattttcgtgactaattaatatttttatagctatggacgttttagtcacaacatatgaataataatttataattagtcataacttttttacttttatagtgatcacaagttttgttgtgactaaaagtaaaaaattttataatgaaattaatgaataaatatcaaatatattatgatatgtatgattgaaattaatattggatcttatttatattaattaatttttttaaaggtttcttaagcaataaaatctcatttaccaaaaagatattataaaaaattaggttaattaggatttttgctccctgaactttgacatgtaccaaatcatgtcttttgaacttttaaggtcgttaaaaatgcctcctgaactattgagattattggatttaaggacttttgtctaattttattcaattttactatttcagtgattgtatgtactaaatcatgctcctca

SEQ ID NO: 315923 - DNA, 1675 bp, Cannabis indica
ttgtgactaaaaatattttttttgtagtgatccttctaaggaaaaacctatatcatctcgagctaccatctcaatcccctagttcttaatattattgaccatgcatgtcaggaaaagattggtcaataaattataattaacaacacacttacatcatatttactacgcatatattacattaatctcatttatttatttttgtaatgaccaaagcatacttaagtattgacatggcttcaaattctaagccccccaaatatcttcttattattcttctaattttctttttcttttaaaaaaataataaattgtaataaaaatagaccaatcatgtaataaaattgtaatttagcccctactaaaatttaaacatcataaatatttatatatttttatatatataaatagagagatagtataaaaaaaatgtgcattaattaataagcatagtggagtgcatgcatgcatcacaacacaacattctcatcaattttcaaatataattaattacatgtctcactcaaaaacaaaacaaacaaaataaattaataaaggtcactattctattgtactaataatacatctacatcaataagaatattcacaagctcattccctccatccaattattattattaattacaattatttttctttccccaaagtcatatatatattaattaatagattattttgtagatattttaattaatttttctttttagtatagaaagaaagataaaacttgttctcattgtatatatagcagcttaattattaaccgttgaaggtggatgatggaatattattactattaatccatatatcttaacatataaatattattttataaatatatatatattgactattcattttctttaacaactatcataatgtctcatatatggatatttttactcattctccttccttttaaagagtcacattttgtataaactttactataacatgacaagatagacaagactatctctttttcttatatatcatgtttatatatatatatatacatatatagatatttgagagtacttgggccgattataggtataagtgggttacatactttttgaaggctaaaataaaaagttaaaaattttattaaatttttatgtaagtaaaattaaatgtattatacataataaatatttatatagtttagttaattagagtttatggcatattatacaatatatatatatatatattttttatatatatttctaaaagtgaaagtttcaaaatctaatttaccttaagtttatttagtcaattatatactaatctcacatcacctatattgatatatgttagagattttataacatagacaagaaaatcaaaatttattacaactctattgtaaaataatacaatgattaaaataagagattgattaaatatatgttacaatacatatatatacactatatattatatatatatgaaaggtagaagagaagattacaacacatgtaatataatatatgtatatatataacaagagaataatatatatataaatactcactcacaaccttgagtgtagattagtggggatcactatgacttgaacaagggaactctctaggaaattaataactttgggaattatcaagtcatttagggttttttagcaatgtgctttctt

SEQ ID NO: 315924 - DNA, 1269 bp, Cannabis indica
atatatatatatattgataaatttgtgaaatgttttatttttttattcttttttgaagagagaagatgacaggaagagaggtagtttggttagtttgcgtgcagagttggtttgggttcggcagttttcgaagttgattgtcttcacttccattcactctcctctcctatataatatatgtatttttttttcaatttaaaatataggtgcttgtagacaatgcaccctacttaaattaaatgtatatggatgatgtaacttttaactcttttggtatataggaataaaaatattagaccatttttttttaataatattgtactttatcattgtttaagagattttgtaaaattttgatgaattcaaaataatttactagaagtcaattttcaaatcgactatttgaagggtataaaataaaaaggtcactcgtgtaatagattctttaaactatattttcaacatgttaatttttttttttcaaatttcttaaaattttataagatatcttcaataacaacaacacatacactcataaaaaaaaaaaaaatctgactttttttagatcttgaaataaataaaagtgtatcgatacctctttcaagaagtgcattgtaaaattttcttaaaatatataatcaatttatgtgaatatataatatgttaggggtagttttgtaataatagctcaaaattaaggggtatatttgcatctagtattaatcactcttattattttttttataaaaaaaattatcttattattttgtattaatttcaatacttattttaattttatttttatatattttttaaaaaatcatatataattttttatttttttaataaaattgtataatttctttgtcattataattaaaatatataattttgaaaaattctacaatgcacctttaaaaaggatgtgctaatacatctctatccattttagtatccgaaataattttttagtcaatttttttctcatgctcatgtaaattatagttatttaagacattctgcaaaattttaagaaattcaaaaaagtttaacacgccaaaacttgcattcaaatagtgtattgcacgcatgactattttattttatacgcgtgtaaaatagactgtttgaacattattctctatattgtaaattattctaaatttctcaaaattttgtaggatatcttaaataactataacgtacatgaatatatataaaaaaaaaatcaaaattaaaaaattctcttggatgctgaaacaagtagaa

SEQ ID NO: 315925 - DNA, 1925 bp, Cannabis indica
agaaattggagcgttgaaatcaaatatacaacaaaatctctaagtttcttggtattttcattcaaatcgtctcaagatttgtttggccaagaatccatggtttcttaacaatggcaccttaattcttgagaaattcgaaggaatcccacaagattgggacaaagtgctcaccaaatttccactcagtggacgcattctgaacctccccatccgatcaattactcagggaaatagggaatgattggcgggctttgagggacacattatccatgttcaaaatgcagatatccccaagatcgcatccaagggttactttaccttcaaagcgtggcatgacattgcaaatccgctctgcctaggctttctatttccatgtgaaggtcgaaagatttggctcccatataggtacgatcgattaccctttatgtgttttaattgtggttttgtgggacatgatactcgggcttgtgcagaactaattaaactctttgaagatggatcggggaagcagcagtcaggatacggttcttggctaaaagttaatgaacgacaagagttctctacctcattcagtcaagatccgtgtggtaatacaacacagattaaggccccctggatatcctgaaaaaacgcctacttcattgatgatgctacctacgggtcatgttccgaatgctagtggtgattcttcactcgaattcaattcgcatctaactatggtgccacgggttagttcctctctttccctaaataaagttcctgaaaaattggggaagggtaaggaagttgagaaaggccataattcgaatttgattcttactgaaatggaagcccctaatcacttaaagaacaattgtttcagattggataggggaatgatgaatgctggacaaggaagttcgaagagagatggttcttggagggaagagagcttcattaattttgttggggaattgatacaacaccaaagtaattatgcttctagatctcaacagaatctgatggacaacaacttggctgcaatgtcgattctaatggacattcccataagttatgatactagctttgcttctttgaaaaagatggagggaccatctaaaaggagaaaggtgattcctaaaaggtcgaaaaacaaagggggcaatggcactaaggaggtgatagtggaggatgtgaatgtagcaggtcggggttgtgatataaagggcatttcggggtattctgatttgacctttggcacggaattaaaagcggcgaactcagtggaactgagtcgccgagagcaatgatagccttattttggaatgtccaagggcttgggaacccttggactttaaacaccctcaaatcccatgtcaaagactatcatcccgggatgattttcttatcggaaacacggctgaatagtgttcggatggagtatattagaatccaattgggttatgttggttgtttctcggttgatgctaagggtaaaagtggaggtttggcgcttctttggtcggatctcatattgatgctcttgttgaaaattacttgggttttacttggcgatttacaggcttttatggcagccccgacccgggaggaagattagaaagttggaagcttttgaaacggcttaagtcaatgttcaatggagcttgggtgtgtggcggagacttcaatgagattgttaatagcaaagaaaaaaagggagggggacctaaacccgattatctcatgaggaattttcgaaatgcactttcggattgttggttgcgagaaatcaagccggaagacgatggttttacttggtgcaatgggaggaccgcaaatttgatttttgagaaacttgacagaatagtgtgcaatcctggttggaaagagagatttcgaaagaataccgtatcgctcttaaattggtggaattcggatcataggcc

SEQ ID NO: 315926 - DNA, 665 bp, Cannabis indica
tgggtgtgggttcgtgagggttcgtgggtttgggagagggaaagaagagagagaatgtagttagagggaatatgggaagtttgaaatgacaagggtatttttggaagaaaaatgaaagattggtatgttttttctatgtgttataattaggtataattaaacaccatgtctaattttttagcatggattatcaaatttcccattaaaaaaaaactcaaacactatcattcgttattcagaaaaaaaaaagtttcataatcaattcaaacaaagtacaaatcaatgttcattccacagccccactcacaccaaaaactcaagccaaaaattaaatcagcaaaaatgcttcattaccaaaaaaatcaataaccaatatgaactctgattagacaaaaaaaaaaaaaaagaagatactaattgagagggatcaccaagtgggcgcacaggtctctagctttaatttttgtctctgaactacacttttgtcttcgtattatcaaaccaaatctcagaaccaaaacccaaaatttctagctttgaagctccgatcctcccacaaaccagatttggaccctccatagctggctgccgcccaagctttgatccttagtccatgtctgtaacgccttaatctatagggacgccacgtgtgtgattttataaac

SEQ ID NO: 315927 - DNA, 1111 bp, Cannabis indica
cattggactacatcaccttcatctgggttagcatttctgaaaagttttttgtttctaaactcccaaatagaccagagtgtgcacataagtaaagagaaatcatcacttgtcaaatcagtatgtgcagataacattaaatctttaacatcagaattcctatgcaaaagataaaaatgatataaaggagaaagtttccaaacctctctcgccctggaacagtctaaaagtgcatgtgttacagtttctagagagcaaccacagaaggagcaagaaggagagggaacaactttcctcctaaaaagattaaatgcagtaggcgaaatgtggtaaaaggtttgccagccaaaatttttaactttaggaggaataccttgatgccagaagaatttccaccatcgattataaaggttgtattagaagaagatggtggtaaagtggaagtattgatgagatgataggcagatttgacagtgagaagaccagaaggatctcctttccaaataaggcaatcagctttctcatgacctccaatgggaactttaacaatattaacaactatgtcatgatcaaagtaaatagccaaccggtttaaatcccaagagccattagagttaataaaaaagctgactttgtcagaaggaggagaggagtcacccttaaacctaagagttctaagatcagggatccaggaattctgcagagtacgaatattctgaccatttctcactttccaaataagcccatccttgagaagatccctaccccagagaagactagaccaggaaaaggagggagagtgacctttactagcttcaagaaaggaggaatatcgaaagtacctggccttaaggatttgagaggcaatggagtcaggggtggttaggaccctccaagcttgcttggccagcaacgcttggttatgatgaactaaggatcgaaaacccagccccccaaagaacttggattggcaaagtgaagaccaagacttccaatgagctttagaacgattcccaaaagagccccaccaaaactgtgccataagtttctcaattttgtgacaaatggaggtaggaagtttatagcaggacatggcataggagggtatagcttg

SEQ ID NO: 315928 - DNA, 985 bp, Cannabis indica
acaagatttgttgattattgttgaaatgaaagctctcataacattttacgtgagacacgtgtgggtcacatgagaattactaaacaaaccacaagtactgttgggtggtcatgtagtatagggtttgattaattatttcatatatgaataatttcattttcatagctagaggagaataggaaatgagatagtacttatctctaaacaaaatagacagcgtgctatatagtatatatagaaaaatagtaaaaggcaccatatatttatattagtatcttcttgtatattaatattactattagtataattaaatatcgagtttaattttatataataatttttaaagagtatcattaattaattataaaacgacacgtttaataagtattagattagtgcctaataataatactccactatataatataagagcagagccacaaatattggtctgtttttgttgggtggccaactgtagggcaccacataattaaacagtgcatggtgcactactactttagctgtataaattgtaattatatatatatatgtaacatttgtatatatataaggtaggaccctaaattatacacatgacaagtactttcaatatatattaagcaaaatgcatgatactttagaatgagtgactggcttgtcttatagatatatacaattatataaatctacatccaatatgtgtgtgttaataattttatgcatgcatggctatatttatagccaatgaatgtaaatgttagctgatcgtgatctttagtgaattatcactacttgtgttgtgatactaaagaaatattcctcatgcacgagagtcaatatatatatataaaggaatgcacaagaagagtttaggtggcattttactattttttcttcctatttttcctattttttagtatattctcttattttatttaaaaaataaactacacatacaaagttaaaagtcccacattgtttagag

SEQ ID NO: 315929 - DNA, 1140 bp, Cannabis indica
tatgttcttcgtgctcttttcaaagagtcaagaatcacaacagagcctaaaatcaaatctttttcatcaggaaatcatacattatacatcctaaaactatcttgcggatcaaaataccaaaatgattacaatctaacgtagaaatcaaaaaatattcaaagcaaataaaagctttaaacaaccatggaaaaatcaaatgaaccagtgaataatgggatttgaaagcttacccgctactagaaactgttgataaagaagataggaagcttgaattgtcaaaatagtacgaaaatcctaggagatggagcactatgggcgtcgggctccagagagaaggaagagctttcaagagttactttttgtagagagagactaaaatgttggaaatgagaagtgatttccctcccataagcttatatagtttctgtgcgaccctttctcacttgacatgcagcatgtatctaaaaatacgtgtagaagagtaatgcagttaacttactggtaaggaatgtgatcagacagtcaagagcaaacatttcaaaggctaattgtactgcaatatttgttcagttaaggcttcatcagtcccaactaagctggaaagtccttatctgcacagacattcgcatagagacttgggaggaaaatattatccaaatttttgcccacctgacatggcatgtccacgtggccagtgtcagtgccacgtgagaatatagctcgccaacagaaagtcaagccatctacttagcactgcaagcatcagtagcatcagtattatattcgactactccgctgtcggttggccaaatttgaggtcaacaaaaaatataatggggtcctttttctttataaaagattaaatgttgtaaattaaaaatgaattaggtactaataataaaaatataaaatacaaatttttgaaaaataatttgtgatgtaaatacttaagtttaactctcggttgcagatgaatacttaagtttaattttgacggtaataatatctaagttatatttttgaaactttaataggtatttgattatatagtatactaggtaacaatgtcgcgcttcgcgcagctcttcaaatatttttaaactatattattttttaaaatacgacaaactaaaaactaac

SEQ ID NO: 315930 - DNA, 2409 bp, Cannabis indica
aacataaaatgttatttctgatctttattaataagtaaatctgattatattgaaagaggttttatttagggcacataacccaacagatccttcatcaactccatcaacaacgtactttcttgagttactattgctactactctatattcgacttttgtggttgataatgatacttttggttgccttttactacaccaaaatactatttcagatccaagcatgaagacatatctagttgttgatcgtcgtgtgtcatgatttctagcataatcaacatcgcagtagccaatgatcttaacctcatcacttttcttacaaaagagaccatagttaatggtatctttcacgtacctcaatattcatcttactacttctaaatgcgatttttttggttgctgcatatatcgacttaggagatgcttcatcttgttaatgtaaggtagattaaactacctactagttgtcgatacattgctccatcttgcaagtcttgcccaacatgagcacatagcttagcattagcttccataggtgttgatgtgggtttgcactcgagcattccaaatctttagcgtacttttgctagcagagaaataaaccttcctcagctcgatcaacttctaattcaagtaagtgtttaattctccaagctctttcatttggaagcaaactgataagttctcatttgtttgacgaatctctgcttcatcatcgccagtaatgattaggtcatcgacatatactagaacaactacaatcttttcttccattactttgaggaataaacttgaatctgcgtgtgtcatgacgtaaccactgtctactaagaactcagcaatcttaccgtaccatgctctcggagcctgcttcaaatcatagagtgtctttttcagtttataaatatagtttggatgagctctatcctcaaatcctcttggttgtaccatgtatatctatcaatctagttctccatgtagaaatgcgttcttcacatccatcttccatagccttcagtctttactgagttgcaagtgctaacaaaacccgtactattgtaatcttaatgactgggctaaatgcctcgtcataatctcgtccatactgttgagagaatcctcaagctactaatcgagccttgtatctctcaattgaaccgtcaggatgagtttttaccttgtagacctattttcacaaaatgggtttcacttccttcggctttggaaccaactcctaagtctgattcttttctagcgcgcttatttcttctttcatagcttctagccacttcgagttctagtatgcctcttcatatgacttcgactctctaaacttctcttctttggctacaactgcattggcatatttaggatttgactttcgcgctcgtgttgatctttaaagttctggttggccatcatttacattattttttgctctttgatgcacacctgtttgccatggattctgaggtgcctcatccttggtgttttcttcttaatctatatcttgagttggaggtaatttaacaatttgctcccccattttcttctacaattcgtcttccatttctttagaatctggtaatgctttcttttgcaatgactaccatgatggtgtctcatcaaagaccacattccttgatgtattacgctttccagttgtagggtcccaacatttccatcctttctgttagctgtcgtatcctacaaagatacattatattgcctttttatcgaatttgttatgtaagtgacttggcacgaatacatagcacacacagctaaatactcgaaagtgacttactgtaggtatacaacccatagttttccaaagagtaaaacaaactctaactttgcttgaggaagtctattgatgacatgagctactattttttttccttctgcctaaaatctctctggaacgttctttgcatgtagcatgctttgacatgtctctacaaggttgcaattcttcctcttagctactccattatgttgtggcgtatttgcacatgtgaattgatggcatatgtggcattgttggagatacttagaaaattcatcagaggtatattcgccactgttgtctattcggaggtgttatcccaaattttgcactctgacgtgacatcacgagaatggtgacacgtggagtccacttggagcatttgcttgggaataatagaccgagcaggatgcctcgctggcacatccagaataagatattcagcgatccgtgcagagcactcaacacttagcgaattcagctttcgcatcatgagtcatcagctcaatccctataacttagggatcaacttatgtggatatggcatacacacgatcccactatcagtgtactcagcctcaatcccacgatccttgcattcagcattgatcacacgatctttct

SEQ ID NO: 315931 - DNA, 728 bp, Cannabis indica
ccctctagcgaaaccaccttgtgctgccactattactaatagaattcgttgcctgactgtaatattccaaaaacctaatgatagataattaggatttatattatataattataggttaattatggtataatgagtaggaacatgatcctactaatctaattcaacgtgaattaggaatatgatcctacacttaacaattgagttttgcacttgttaaatctatttatatgatcattaacatcatctccttcaattatcttcgaatcatttaattatttcttcaaatataatctatttgttagggatttttacatatataacttttctcactttttccataactcagggaggcatgtttcattcaatacactatactttaatttaggagccaaatttaaacgaatagtgcttatcgctttctcttgcaactcctcccaatcttcatcagtccttagtcttctttcctagtagtgcctttatgagctcttgttgtaccaatacatctttcaccatgctttgccataaactcaaattgttcttcctatcaaaaagctcgatctcaaattttgtagaacacgccatctttgacattttcggcgaatacaacatctctgatactagttgttgggctgcgacctcaccttaactctcacatagtatgatatttatccgctttgggcttaagtcctcacggttttgtttttaggcaccttcccaaaaggcctcat

SEQ ID NO: 315932 - DNA, 1034 bp, Cannabis indica
gcatcaataatggtcctagtagtaagacataagcccgtataaaaattttgaaccaccatccactgctccatacaatggtgagggcacttccttagaagatctttaaactgctcacaagcatcatatagagattcaccatcattctgacaaaagttattaatttcttccttcaatttagcagctttagaagtaggaaaaaatttagataagaacttttgagttagatcctgccaagtgacaattgaatttgattgtagagaattcagccaactttctgctctttcctttagggagaatgaaaaacgcctctgtttgatagaatcattaattactccattgtatttgaaagtgccacaaagctctagaaaattcgccaagtgagtgtgaggatcttcagaagacaatccactaaattggagagtggactgcaccatttgtaagatagttggcttgatctcaaagttgttggcctccactcctggtggtctgatactgttttgtacccccttcagagaagatagtacatgcaaaatcacgcaggctcctttcagcattagggtcagcctgacctccttgtaaaattaacgccaagaattatatcttcattgagctctaccttctctgctttcctggtctccctcttgttctttttattctacttacaagatttctcaatctcaggatttaaggaacaaggctatctgcacctcttctgatgcgcatataataatttcacatgagataagaaaaattggcaactaaacaggttagaaacaagaaaaaataaaataaaattagaataaaaattaattaaactgatattgataattttcaatccccaacaatggtgccaaaaatttgttcatagtaaaattgatacgaaagtatacgcatataattataaataaaatatcattcacacgagaattgattatcaattaccaatcaattaattttttagttctatttgatgaataaaaattgttcgatataaaataaataaatcaagccaaaaattaaaattttaaaaaata

SEQ ID NO: 315933 - DNA, 1739 bp, Cannabis indica
ccgcttagaaaagagatacaaaactagatgcatctggtctataatgaccgtatgattagacatggaaattaatatttaattcctatattatagtaaattatgaataatatgtgaaatttaggaataaggcctattattagaaaatacgtaatatgttaatatttctcaattatggagattttattaaattatgtgtgtaccatatatgtataatatgtgatttatcattctttatgttcaaaaatagtaaaaacttgatggattggccaaaaatgttatattggtatagattaatattttagaggtactaagaatattatggcccattggaaattatgtgttatgtggggtagtttgaatttgaccattttacccttaagtttattttatatatgtttttctgtgaaggggtaattttgtaattaccatagaatgggaaagatattataagagtttatctgttattattgagttgtgtagaaatagaattagaaattagaaattaaaaataaaaaaattagataaatcaaaagctcattttcttctcttgcattctctccctttcggccatattaagaactaaagaaaaaaaaacttatcaacttgttctctctgattttgaaagaaaatcttagtttttggagaaatttacaatggggaattgaaggaaagaattaaggtatgatttgtgtttttttcccttttaaatttgatgaatagtatgatagtttagtgtgctaattagagtaattgtattctatttgtaattgataggttaagaagtgttttcttaaagttctaaattagaattcatgcttgttttggggagatagaaaagttgtaaatattttaatcagaattttgagttttgaaactcaaagcctgttctttaatggtgaattttgattcattaggtaattttgtgttatgatctttatgtttagaactcataaatatatggttctggagagttacaattgatttggaacaggtttggctgaataaaaaacctaaatttgagtttgttgatttttgcaacaaactgagtgcccgattggaggaaccaggctaccgattattttggttgtgcccagattttaagcacaccgttgtaaatctagttgcgagattgtcttgttcttgcacattaaactttaatgttgcagcattttggtcggcaaccgcctggtccaaggcttcagcagccgttcttgcatgtttttcagcatcctctgtagcttactagagagaacaaaagttcaaacatccttctagctcacttcaacccatatatgagtagtctgctaggggggtttttcttccagaatttgtaaaagaaaatgaagcctatcatttcatacttggcattgtcaacttcatgtttactattctcagcttcaagttcttccttctccttggccaaaccatctttgagctcattaacctcattggccaaacatgtatgcaccaccctgacaacctctctttcatcttctaagttttggactgagtcgtttgcttctctaagttatccagcttatcctattggttagtttcttctctaggccaacgatcttagccttaatagtgcttagctctcaccctagctcagctactcaattatctttgagttcaacttgcttgaaaaattagataactccttcaaaaggttatccgtttgagcaactgctgacttgatgtgaccataggcataaccgaacttagaatggaattgaaaa

SEQ ID NO: 315934 - DNA, 522 bp, Cannabis indica
ccataaagctcttcaagagcagcccataaactagaggcagattggcatcccatgacttcagaggctattccctcagtcatggagccataaagccaccccatcaataactggtcatgcacaagccagttttcatagtctggattaacagaaatctgagattcagatgagtttggtatacctgtagtgatgaattgttcaggacatggtctctgtccattgatgaagccttctagccgatgtcctctgatgatggtgaacaccatagtcttccacaaggggaagttgtttctgtcgagccttagggaaaatggttggctgagagtgctgctaaagggagatgcaaacgaatttggtgaagctgtctgcgatgttgcagcagctgatatagcaggtgtggctggattctgttgagacgcctctgatgtaggcattcctccgccattatcgggttgttgagctgtagttgaagcatttggatcagccatggcaatcgccttttaatggctctgataccaagtcaaa

SEQ ID NO: 315935 - DNA, 677 bp, Cannabis indica
tacagaggcaacgaatcgggttgagcatggaacccaccatcggcccaaaacaaccaggccgaaaagcccattaaagatgacgagcccaacgatgcgaggtgtatgaaccacaacggtgggaaccaaaagggctttgcaaaggcccggtaacgttgacccgacccgaaaaagaaaatgatggatgctgtcagtgaaagtggcaccgaaaccgctattaggagagagcgaagggctctcttggtcttggccttggctttgtcttctcgttttggcatcttggaattgatggtggtttggtcgagaacgaaagtagcagaatggagagattgggatggcattgtgggatttttgttgggtaataaaccataaaaggagaatatatgggatgagaagaaattgttaaatcgaaggaagagaaaatatggtgaagggaatttgtattggggttgaaatgaaatgaacgttttggagcaagtttaggagttttttttgagaatgttttggcattttgtttgtacgagagagacttatgtctttctttctttctttatttttttatcttattaattgtgaatatattgcttttaataattgccaaaaatataaaactcaatcaattgatttcatttagaggtaatttatttttacattgatatatatatatgtaatggtcataa

SEQ ID NO: 315936 - DNA, 939 bp, Cannabis indica
ttactgaaataatttttgagaaaaaatatggagtaacagatcacaagagacatcaaaaatacaaagttttgaccctaaaatattccaaatcagagaataatatcttcataaaagttttagaaaattgaattccttttcgaatgacacaaaaatctttaaaatcagaattataaagtaggagatatagatattttaccgaaacaattttttagaaatcttgaagtaaacgaatttcagactacatcaataaaatgataattttaacttacaaaaataaataattggtgaatggtttcaacataacacatttacaaaatcaaattatcttttcaatcgtaccaaaattgctagaatcaaatcagtattcagagagatattcaggttttactgtgacaatttttatagaaaatatgaaaaaaacgatttacaacaaacagcgtataaataataatttttgacatagataaactctaattaagtaaaactcttcataaaaattatgggaaattcaataagctttctataggcaccaagattacgagaatcgaatgagtatttaaagagatacaatagttttactgagacatgtttactttctaaaaaaaaataagaaaatgagaactgcgaatattctcctattgtgatcaataaatgagtaaatgtagagtttcttacctcaaatacttcaagctgcttggattataacttgaagacttttagggttaatcttgctcacataggtgggaataattgaaccatataatgttagggttgaatgaaacctgtactatcctgactctattaagtttagttttatgaataataataataataataataataataataataataataatatgataaattattaaataaaaaaatatataacttttaaatttaaaattgtaaagttctccatctcgtaattttagggct

SEQ ID NO: 315937 - DNA, 844 bp, Cannabis indica
ctccagcacctgcagcatgcagcaagaaagcgacatcttgtccccatgggaccactttgtacaccgggtcattagagcctataattaccctccatctcagatgtgagaggggggttggaaaatcattttgtgtaacttaaatattgaattcaatatggagagagaggaatatccaaaaatcttttcaccttcatctttatcttatctttatcacattttttggtaaccttgcattttccgaccactaacttagttgatgagttctcaccgtcaacacaagcgagactggatataatgactcctggagaaagtcattggcagttagcttgtcaacttctatttttaccgcatcaactctgacaggatccaaagttcttcctttcttacttaccggagctgcatcctcgtggatattcaaggcatgtgaaatggtgtttcgatcaattccagtcatgtcagaatgactctaggccagtacatcttgattttccttaaccctattaattacatcttcttttacggtcggggaaagatgctttcccaccctcatggttttggtggggtcttctttgcatattctcacttcctcaatctcctctattggttctaaatttttctcgagttcaactcttggatctacctcatcttcatatccctctagtaccacctccgtgtccattgggtcctctaacacaagtgcttcgggtgcttcttccctaaccatatacacggttatggttgatacattctaaatttttcttgcgctcaactggttccccttaatggtactgatgcacccattattacatgggaacttcagacacaagtgtcggatggaggtcac

SEQ ID NO: 315938 - DNA, 813 bp, Cannabis indica
gcggaagcttagcccacacgtcacaggctacaaacccaatgatagggcattttcgtgtacaatgttagatcaggttgtctcccacgccacgctaccatgcagaacatgcatgttcttgtgtactgaaccaaaaaatccaatgcctaggaacgagggaaattcaaatgagagtcgctctgaggtgacacgcatcaaaaacccagctattacaatctgatttccataaaagccacatgagaattatgccacctacctatcctacggtggaaattcatctctatgaaaatccatccaagatagctcatgctatggagtcggcctataaatacctccgaagaagcacaaaggggggatctttttcctgggatttggtggaggctttcaatctttttttagacctccatctcaaagttgaagacttattcctcatcaaactcattattgtaatcccattattaactccaaaatattcttactaagcttcctcttcttcaagaggaacacggtggaaaggagtaaaagtccattgtttttattgtataaacaatcattggccaaagagcctaataaaatagactcgtaaactaaggatagttaacgcctgaaccaagaaaaaatctattgtttgttattgcattatttataccttcattactttcttaagatctaaaattattcggttgccaaaaaactcgataaatattttggtgctttcattgagagctgaagaaagagatatgcaccgcggttaccgacgcaagacagtcaggaagaaggtttgtggaaaagaagaaggaagtgttggaaattatt

SEQ ID NO: 315939 - DNA, 1076 bp, Cannabis indica
agagagagagagaaagagaaagagatgatgattgaatgtgattatggtggtgaaaatagttgtgagggtggtaaaagtagtggtgggcagtggtgaatcgcggagagaagaagaaagagaaagagaaaaagaagagaaagagaaaatgggtgggggttcggggttccattttttcagcctcaacttaagtgcactgacaaaagtatcacaatcaatcctaaaatgaaacatagggtttcattaattgcagaaacttttgccggcgtaactaagtacaccggtaaaagtttttacctaatttcacatacttttttgcacacattttcactgcgcgagaaataaagcgccaaaatttttaccacatttgccgatgcatttatttgctaggaaaagtgaaattaaactgtcaaaaattaattcacttttgccatgtacttaccttcgctagtaaaattaaaatttaactgtcagaagttccctccttttggcggttggttgaccatattttgccagcgagataaagatagtttaccatttaccggcaagttaacttgtcaacataaggttaacctggtggaataataccttttactggcaaagtgttttaagttcgtcggtaaaagtacacttttgccggcacatttcattaaatgcatcgacaaaagagcttattcttgtagtgaatagttttttaaatcatgtggaatttttttacgaaagaacttgctatgagtcgaagaattatataataaaaaaaattaaataattagaaaaatttagaaaatagaaactataaaataaagctcatgtgtatcacatcacctatccatgatcattctcatttgtatatatagtagagcctctatattaaaatacacttggaacaatgtaaatagaattctaattaagtggttataactaaatacgggtatataagaaaaaaaatgccaaaaaacatcaaatataatgacatgtttaccacacagtactcaaaatcggaataacttaatggaaaaaatgtaacgggataaataaaaaataatcataatcaatatttgtaatatgttgtttactaa

SEQ ID NO: 315940 - DNA, 773 bp, Cannabis indica
gaacacccaaacacgaagaagacaaaagtatcaaaccacaaaatgacaagaactgctggagaccgatgcaaagaggtcagggaaggggtgggagcttgatggacgatgaccgtcaccataaaagaggccagatgcaccctcacgctccgacgcgtgagagttggggcgacggagatgggcggctcgtggggcccatgcgcggtgatactggccgccaaactttgggattttgcagattggtggctaggcaatctgtctatatgggcggtgagaaagaacttgcactgtaactagggtttccaaaaaaataaccttaaacttaaaaccctaatcttatttttttatgaactctaatttcgaattttgaatttagaatcacaattttaagtatgactctgataccatgtaaataatggtgaatagaattgtgtgttgtattccataaaatagtatacaaagctaagagactaaatgggaaactactaaatacatgttataaagggagtactagattgatttcttctcactgtaacagcatgtttgatttgatgtaatgaggaattataatggaaccattacattatttgctttaacttttaaaactttgtaatgaccattacatcatgtattgtattataaaatcaatgtaaagatgattacattgttagaaattattttttttgtcatttttttacttttatttaaattttaaatattaaaaataataaaactaagaatattttgttaatatattttatttgattacaatgttc

SEQ ID NO: 315941 - DNA, 763 bp, Cannabis indica
ttataaaaataccgatatatatatttatatgagggagttcattaatatacattaattgtaacttattttatggggttgtaaactttgtcatattataaaaagatacatctcggttatctttgcaatcgttccacttcgattgatgagatgattattaattattgaaaacctaagtacatctataaaaaaaaaaataattatattctatcaaaagaattttgtatattaataatctcaacgttgaaatgaaatcaaatatatgagattttaataaacacaaaaagaaatatatatatatatatatttaatacgtaagcacaataatatggatcctttgatatatctttttataagaataatttttatcaactatatcacgtgattaatattcttgaccattaattgaaataagtttcaacggaatgagatttaaaatattttttatgaaatatataaatttttgatacaatgatatatatatacatctacatattatcttttacgtggtcatatataattaactgaattattatatataaaagtttaaacatcacatcaaaaattctaaaactaccccgatcatatatacatataattaagtcaaaataataataataataataataataataataaagggtacactacaccctattaatttagaatgagtgtacacaattgtatatatgttggtaattaattattataagaagaaaaccaaaaaaaactaatatattgttctactttttttgacttagtacaa

SEQ ID NO: 315942 - DNA, 1407 bp, Cannabis indica
acttatccacagtaagtgagcccacaagtaagtcacgggccttaggttcagccgaacatttcttggaaggccaactcaccaactgggcctgggtaccaagtagtgacacactgtagggtgtattagggcccttagacgtagcaatatgaatagttggattgacggattggttattagcatcagaatcgattggggttggaagggacctgtttgcaagcttcttcttatttgagccaatatcccttagaatcaaattactagctttcgatgtttcaccaaaaaaggaactcccgtcataagtctcaatcaccttcggattcgtaagcctgttgtacgagtcattatgcttataggacgtattggagctgaaaatattattggatgaagtccctgtatcaatgggtgtagcatctttcaggtcttgggtgtatgtcgtttttgaattattactaaaaggggcaaattctccaatgcccgtgacacaaaccaaaggaagttaggtaataacctgtcgagacaagggatccttggcaccaccatcatcatctatgacgactcttcattttgccaaaaactgcatatgacattctcggagttcatcagaatcgctattttgaattttcatttgattgcagaggatgagatcctttcccagacgcatttggagaacccagtcctgcaatcatttggccaaaggtgtggaaaatgtggatttttcttgggcatcacttcttagccatacgccatacatagggtgaaaattacctttgctgtctttaactaaagttggagattcaaagaaaattctttgaccatgggttagcaagccccatttaaagcataactttgagaatctctgataagtgtatcgaagccatagatatttgaggtgttgccgtcaaagaaagaagccatagaagatgggtttgttgaggtcagaaaatcccttgcaatagtggacaaagcagaccgtgatctaactgaaccactatacttccttgtgttcattattttcaatacttttctattgtgtaggcagcctcatttgagtactcgctattttaggttgagtactcgttgttttttagttaaatatcaactctttattttatatttggtgttgtcaaaattcgtccgacaacagcaggctactattattgttatgtagagaatttttccctgattgttatgcctttgacaaagctgacatggaataaagtaaagttgtgtgggatgagagtggtgaaggagatttctatgaattgaagtgaagattgaacacaaaatttgttctccctatgcttaatagtgaggaaccatatattgcatccactaatgtttcaagtacaagataggaggaactctctaggggaatgacaagtttgttgcctatgcttctcaaaaatt

SEQ ID NO: 315943 - DNA, 1591 bp, Cannabis indica
tttagaaagttcatattagggtgtaatcaacatactgtgagtagatctaagatcctggtaaaataatttccaacaaaaagaaggaccaacttctgctttcgtggcttcggtcttccatgtccgaagtgattcttgcttccgttgctaatcatacctcttcccatactctttggcgtgctttagaacaaaagttctctagtcaaaccaaagctcgactcctctagttaaaaggccagttctctcatgtttataaagcaaatctttcaattgcagagtatgtcgaaaaagtccaaaccattgctgatgcacttactgtggctgaagctcccattcaagatcaggatcttgttcttcaagttctaaatgggttaggacctgaatttgattctgttgtacccggtattacttcaagaagtgacaatctcaccattgatgaggttcaagctcttttactctctcacgaaagccgattggaacaccatcaacacatgaatgatctgtccgtgaaaatgcaggccaatcttgcatttggctcaggcagatcaggaggttctagaccatattcctccaacagatttggcaatcaagaaggaaactctcacaatcaatatcggggaagaggatactccagatttcctcctaacagagtaatctgtcaagtgtgtttaaagagtggtcacactgcacctgtttgccactacaggtttgataaaaattggcaagttcctaaaccagcaaccaccaatccgagggcctatctcacagaacaagaactggaatatgatcctatggcctacagctctacaatggtgcaagattttggcgatgactgtcaatggtttgcggatacaggggctactcatcatgtcacatcagatggcactcaacttgatcaatccactccttataatggcactgagggcttagctgttggagatgataagaaattaatcatttcccacacaggttcaaccttcttacccaattcttccttagctttaaagtccattcttcatgttccccaaatcacaaaaaatttagttagtatttccaaattaactgatgacaatgatgttttccttgaatttcataaacactgttgctttgtgaaggacaagcaaacggggggtgtgcttctcaaagggaaatgtaaaaatggtctctactctcttggtgatacttcttgttcatcaaaagactctgctgaatgtcttcttgcccagtccgagatgtgttcatctcaattttcttgtactgcctttaatcattgtaataaagagattcacaaatctctaaattgctgtaattctgatttcagtaataaaaatacatgcttgtctcctgttttgccttctgtttttactacttacaaacacaatgatgttaacaattggcaccaaaaactaggacatccatctaaagctattcttagcaaattgttatccaaagtctctcacaatggcaccattcaaaacttacatttttgcaatgcgtgtcaattagggaaagtcacactttgccctttcctatgtctaatggtcgtgccaatcaaccccttgctttgatccatacggatctatggggaccatct

SEQ ID NO: 315944 - DNA, 2660 bp, Cannabis indica
actaacactactatatataaagcagtaaagcactacatattaattaataaaaaaaaaacaggtccagccaatgttaaaaataaaaaaaatggtatttttaaaaattaaattttatttcaacccataaattaaacattcgggctcagcccaataggacccgaacccgacgacacccaacccgaaaagacccgaccggatacttggagcacccgtacacccgaaaatcgggtttggttatgcatttccaagacccgaagcccaaaaacccgaacccaaaaccccaaaaactcgaaaacccgacccgtgttcacccctacaaaccatacctaagtgactctataggccaaacatcgcattccactgttatcggacataaaatataaaaaatataaaatgtcaaattaacatatataatgcatttagaattcaaataaatctacgtgattgagaaattattctcctaaggcctatttctaactataagccctaacttctactaagaagcacaaaatcacataataataattaaacctctaaattatctagtgatttccatgatttaactatgcggtcatttctattatccctctgttaaaaggattttgtcctcaaaatctaatgaggataactctggacagtgagttctcatgatggcttttccacctcattgtctctccaagtatcttgaccaatactataattatactccaaagaactttatctttcctatcaagaatcttaacttgttttccctcataagataggtgaccgcacctacaatctttgtaaggtgcacccgagatggggaagacataacccccatattggataaattactttaggtgttggtcacttccttaattgaccaaagaacgaccaatgactactacaacacattattgacagtttccaagaagacctcctccactgcaaagccgaggggatgactaaggcctctttcgctataaagttgagggggtgatgaaggcctcctttccagcaaagtcgagggatgatgaaggcctcctattctgtaaagtaagttgaaaaaggccttctttgctatcaaatcgaggagatgaacaagagcacctttgctgaaacacaaccaagggaatgctaaagaacttcaagactacatccatattcacataaacacacagtgtgacaaaagagtcaatgctaagataacaaccgaagatgagagtaaatgttgacattaaaatgtcggcatgatttcacaatatctccactcaaagaaaatcactcaaggtgtcatctaaatttaaagttaaaaaggataaggtacatgataagaaaagaagatcatctcttctcttctccttctatacttagaattttgaatcctactattcaacagggaatgggaatttgaactcttactctcagtgggaatgcttgaagaacataatttttttttccaagattgttaaaattaatgcccacctggtagtttaaagagaaatgggcttagttcgcctcattaagtcaacctcacataattgtaaagttaacttgggggcaaatatttacaccaagagtattcctgatgatgtgggcatcaatttttgacacgttgaaagaaagatgaaatcttgaagttaagtagtcctgagtcataacaggtcgacctgggaggggtccttaggcctgcgcccaggttgactttaagaactccagaattgaagtttggacttcaataacacatttccaactcaatatctttcaatattctctaccataaagacatggagcaaccaaatcaacgccccgagagctgagattacataaacatgcactccgagagtcaacctgggtacctagggtttcacccaatgcccaagttgacatcctcaactaaggttgtagtttctaggactatcttagttcaactgggtcaaaatttgcattgggacatgaactagacatgtcacagactatttgaggcattagaaacaaattgaaagaaagttcatttttgagcactcgaagcacccaatgcctgggcacccagtgcccaagttagcaatttctcaatctgggctccttccaagtattagggaagagacagtactttttgggtgtcaaaagcatggcctagcgcccaagttgtcacatggggctaacccaacgcccaggttgaaattttgtcaaattgggccaattctgatggtgtttttcgagaactcttcaaaccatcttctctatttttagaaaatattaagattcaaatatttttggggacaaaatagaatttttgaagggccataattgagaccctacacctaggttgacacctgtcactggacccaacgcccaggttaacatattgtcaacctggtctgtttctaatcaagttctcaaaaaagtgttctaggcattttttctgtcaacataaataatgtagattcaagcaaacttagggagaaaaccacaaacctaaatgcttggaagtagagcccaacgcctaggtgacctggtgctaagcctagtgcccaggttgaatttagaatgggcaaaaccatggtgggagacctcgtcctcatggtcaagaatcttggaagtatcaaaacaacaactgggagctcgaaaataggatacccaatgcccaggttgacaaatggcctggtgcgctgggt

SEQ ID NO: 315945 - DNA, 638 bp, Cannabis indica
tatatagatgtggttaatttaattaccttgagaaagaagataatggaatgaaggcttcacttgtactcgtcaaaatacacttgttgaaaagcaaaggatcgacctggaatggcatccattctttctatgcaaaatactgtatttgagtgaatacgacaatatcaatcgcaatactgttgaacaagaaaggtgactgagtgaatctgaaaagagaaaagaatttgttatttttatttggagaaattgcaattctattgaagaagaaaggtttcatagccactatcctacaaccactatttatacatatcctgaaaaaaaaaatcggttcaaaatataaaaaaaaaataagaaaggagaccaagcgaagaactgattgagagaatcagatttacagaatcttgttttcttggtcgactatctttgggaggctttgttttgagtttcttgtttctcatttcatattggccttcagattcacaatcgctctcgttctgggcagctttaatttcttcttttccttgaatttcatgatcgttctcgtttgggcatcttcaatcgcaatataaatttgagtttgagagataaccatctaatataggtcaatggaaatacagagagagaaatagcaatattattat

SEQ ID NO: 315946 - DNA, 3212 bp, Cannabis indica
aagaataaattttttttaaaaaaatagtttaatattgttaatgaatgcatcaaaaaaaaaatatttttaatgaatggggtgttcttataatatttgtggggtgcaattgaaataaaatcacccttttataaaccaaaatcaacaagagcattattcctattaaaaagaaacaagagtgcattgttaaaaaaacgtacaatatattacatcaaacatataaataatatattagttagtggcactactattacttttagtaataatattttagttacaatataaattttttgtgattaaatgtgacttttagttacaacaaaaagttacttgtgactaatacatagtatttagttacaagttgtcactaatttagttttagtcacaacaaatatattgtgactaaaaatacatttagtcacaacaaattgtaatttttatgactaatatttttatttacgaaccttttactcacaacacaatgatgataatttataattagcaacaatttttttttatctttaattacaaattttattgtgactaaaagtaaatttgtttgtagtgtggaaatattaacttaacacatttatttattaaaatataaaatattttacataaatatataaaattattattattatattattttacacgttttgaggtttatgaaatattattattattatataatttatgaaatattatttttgtcttaataaatattatgtatttatattaaaaaaaataaagaattaatcaatacttttaatatgttttactaatattttgtatttaattaaatatttatctatttaattaaattatatataatattatttattgtaatatttgaaagataatatatataacttaatataaaactaaacattcacattttgtaataagaataaatatataacgtaatattaatttagtagatgaagaaatattgatatgtaaaggaagagaaaaaaaaaaaatatttatcaatcaagttttacttaatttggttaatcccaaaaaactaatttttatgacaactggtttgtttgtggaggcatattgattattgatctcaaattatggtttttgatttgttatttgggcaaaaatgtttttacttttcttacaatcaaagcttaaccactagtcactaattattgaacaactttttctttactttagttaggtacttgtgactactatctagagtctagctagactataagtaaaatatttaattatgatagaaaattgtaatattagtttcttcattcttgatcacgtcactaaagttattagaaattaataatgcaaaaaaggaaaagaaaaaattgtggcactaattaatcatgcaaattaatagtaatggagaattcttgaaatccaattggacatggtataaatcttattaagtggtcatcccattttgtagtaacaaagtgagatgggtaactctcaaatgtcatatcattctgctcagtcagattcaacttatttttaatgcatgtgttttgtaatttgtttaatttcaccacaaaattatatttttgcatgtattgtctagcataacatagcatgaacatcatgtttcttaaaaatatttagtaatatatttaatttttgataaaacaaattatttctaaaagatctaaatttcttaatcattaattatgcaagaagttgacagtaggataagatgagataaaattattgtctcaatttcttttaattaggattaagttatcctatagtaaatatgttaatattagataatagatataatttttttttgagaaaattaattagatatttttagattaggttagtatttgagataaggtgaatagggttccatctcatggctgatcaataataaatttaccattttctgtacagtagagcaccagtcagcccaagcacaacaagacagtataaataataatatgcataataattagaaatcacataattactgatgtcactgcacctatcgtctatttgacatagacctatgtgttaccttcacacgtctatttacaataaggccttagaatggtttatctcggttttaattattgagtctaacctaattatgtcttacgcgcataattctttatctcaacatatacagtataatattgcattcataatcacttaaatactagagtaataaccctagatcgcataattgcttaatttaggataataaccctaattttgatttctcacatatcatacacataataacatacatgggcgccacaacgctaatctctatgtgttagtttactgtcttacctgataatcctagtatgtggagattccaaatcctcaagtgttcctgagcaagcactgataatcctagtcacacgttcttaggatttcacaaatagagataatctcaaattcaatttcacatatacacataatttgaattccatttatagattaacatatagagcccaaaacaacctttctaacgatatcaaaaacatccaaaatggagtctcgagtcaaaagttatgacaaaaacgaaaaaataataaaaattcccaagaaaatagggcctcgccgcggcatgcccaacctgctgggccacgccgcggcgagggcctggaaccccaaaaattactaattttcatacttctgattttaccttaaattcatgccaaaacttatacaaaaccaaagcataatccaatattaaattaaaactgaaccaaatcaaactaaactttgtaatcaattgagcattacacaaagctcaatataaccaactcactaacacacaaaacatgctataaggaatttacattaaacaattcttcaaactttggtacctaattattcaaacacaaaccccaaaaattcaagtatgtttctagattttgaacaacaaaattccactccaaaacctcacaaaaccttcaagatgcattaagtataacactaaagcataaataaactaaaaacaccctttattcccttaattttcataaacatgcatccatacaacaagagcattcaaaaacacaactcaaagctttgaataccagaaattaaatcaagtgaaatggactaaagtaattacccaaagtccttaagctccaagcataagaatctccacacacctataccaaaatcaagccttttcttcaaaattggttgaaatcacgaatagagagggtgaaagagagagagagagagag

SEQ ID NO: 315947 - DNA, 1930 bp, Cannabis indica
tctgattatattgaattgggtttatttagagcacaaaatccaacaagatccccactagcacagatgttatgcgtagaagtgttcaaatggaacttgaacaaggaacagagtctcaaaaccaaactcctacttcaagtcagagaaagaaactgagacagcaggcaacttagatgactatcaacttgctagggacagaacaaggagagaaatcagagcacctaagaagtttggcgatgccgatttttcagcatatgccttgtctgtcatagatgaagttgacaacacagtgcccaaatcatatcaagaagaagtgaataacaaggatgttaaaaaatggctgcaggccattgaagaggaaaaacaatcactaattaagaataagacatggaagatagttagaagaccacttggataaaggttattcagatgcaaatggatctttcagggtcaaagatggctttccagggtttgaacaggttaggttcaaggccagattggtagcaaagggcttcactcaaaaggaagggattgattatactgacatattctcacatgtagtgaaacaagcacccataagaatcataatggccaaggctgcaaaatttgatcttgaggtggatcaaatggatgtgaaaacaaccttccttcatggtagcttagaagaagacatctacatgactattcctgagggttttgaaagcaatgaccttgaagaattatgcttgctacaaaaatctctatatggtttgaaacaagctccagggcaatggaacttgaggtttaatgaaaccatggagaaactagggtacactagaagcaactatgatcagtgtgtctacacatatgaaaacctgtacctgttgttttatgttgatgacatactgattgttggccaagacagaatagagatcaacaaattaaaggcaaaactcaatgctgaatttgacatgaaggaccttagggaagtcaaaaagatcctaggcattaatttacaaagacaaaggccaaatacaatcaccctatctcagaaaaaatacctcgaaaaggtaattgagaagtatggaattagtgattccaaaccagtgtagacaccaattgctccacaattcaaactgaccaaagatcagtctcccaccactgatgaagaaagagcattcatggacactataccctatgctaaaggggtttatagtctaatgtatgccatggtgtgtactaggcctgacttggcctattcactaagtgtagttagcagatttattgcagatcctagataagaacattggccagctttgaaatggattctaaggtatgtcaaaggctcaattgacataggactcacttttggaaatgagtcacacacttaagaagaagtatcagggttttgtagactcagattatgctggcaacattgacaccagaaaatcactcacaagatatgcattcacagttctagggagttttgtaagttggaaatccaaccttcaaaaggttgtggctctctcatcgactgagactgcatacatggcagcaactgaggctgtcaaggaagccatttggctcaagggactcaccaaagacctgggatttaactcagatgatgtcacagtatattgtgacaaccaaagggccctgcacctaatgagaaatctcatgttccatgagagatccaagcacatagacatcaagctccactttattagatatgttatcacaagagaagaagtgatcatgaagaaaatcaacactgcccacaacccagctgacatgctaaccatgtgtgtcacttaggccaagtttagacactgtctaaacttgttgaatgtcaatggctgctgaacacccgttctatcaagtcattaccactgctgagttatatcttcccccacttttcaaagtgatcaaaacaaggtggaattgttggtgtttt

SEQ ID NO: 315948 - DNA, 1552 bp, Cannabis indica
tcaacaagaaggagattcaacactaaaagaaggagagaaagagatccaggttcagatcttgataatactctgcgatagtttggatacaagggttagagatctgattagaaggagacattttattccgctgcacccaatgtaaggtttctcatactttatatgagtttaatttattatcgttttagaagtcatacttagggtgttaatcaacatacttgtgagtagatctaagatcatggtaaaataatttccaaattaacagtcatcccattagtaatggttttaatagtttccttgctcagcaagcccattgcatttttgctcttaagacttggaataaaaatagtaatcatttgtctcactccagaatccagtatttgacgcaggaaatcaattacctgcaaaataaggatacgctcactagggaggataattttaaacttacccagttgtagtctatgttagattccttgctttacaaagatgaaatctattggaagcaaagggttagaatttgatggcttaaggctggagatcgaaacacaaattttttttctacaaacatgcttcttcacgtaggaaatttaatcgaataaaatatctcaaaaatgaggagggtgttgtggttaacactcaagatggcattgctgagcttgtcatctcttatttttctgatcttttctcctctcaaggtagtgatattgaagctgctgcctctatttttgagtccttgggtctagaattagatgatcctgagattaatttccttgctcaagattttactgctgatgaagtcaaaaaagctgtcttccaacttttgggggacaaagtcgttggtttagatggtcttaatgcttttttctaccaaaaaaaattggtctgttttagggactgacttcactaaggctattcttgcttgtcttaaccaaggcagtgatttcactgagattaattctaccctcattgtcctcatccctaaaaaacaacatgcaaatactcttaaagattttagacccattagcctttgcaccactttttataaagtcatctcaaaaattctggctaatcgtcttaaaaaggtcttggataaaatcatttccccttgtcaaagtgcttttgtgtcgggtcgtattatctaagataatattcttattgccaatgagcttgtgcatgcggttacaaatcggactatgggtaagcggcggtgggctgccctgaagctagacatggctaaggcatttgaccgggttgaatgggacttttagcgacaccttatgtttcatttcaactttcctgttcattttgtttccctcatctttagttgtttgaccactacttccatttctttttctattaatggtcatgttcatgggtcccttaagcccactcgtggtcttaggcagggtgatcctctctcatcttatctgtaacgccctaaatatttaggtacactacccaaaatatttatgaaaaccctaatcccctaagcgggattactaatcaaaatagtgcagaatttaaacttttgtaataaatggaatgaaaataaaac

SEQ ID NO: 315949 - DNA, 1754 bp, Cannabis indica
agagagcgagaggagagagagagagagagattttaatgttttagtaatagaatgtgtatggatagattttatatatgataggggatgcgttcataattgacttagcctttaattacttagcttcatatttaggtacgaactatctcactgagttaattactttggttttggcaaacatacaaatttcatctctatcttatactactactactactatactaccactctttgtattatttttgcctttttacattttttctattaaatttttatttgagtaagtttgtggtataaatatttaagtttaactcatgtttataaataaatacttaaatttaatatcctaaattataattttgaaatttctgtaagtacatgtttaagtcaattatggtgtgataatttttaattggtctaagttattaaatttttatttttgaaaagaaatagtttaaatataccaataaaaaaaataatagtgtataatgacttcatatttaacaaacaggtatacagaattccagaaatataacttaatgttttattaccgttaaaaattataattaagtaattatttacaattgagagttgaatttaagtatttatagtacaaattacttatttttattatatataaaggtagacgacaaacatagatatttgtgataattgaagatatttattaaagatatatttatgagattttttttattgcatatatatatttattaaattttttaataaattatatagggtaattttataatatattttcttattttaatgtattgataccctcttcacttgttttggcatctaaaaataatataaaaaataatgttcgaaaagtctattttgcacccgtataaaataaaatagtcacgcgtgtaatgcagtatttgaacgcaattttcggcatgttaaacttttctaaattttttaaaattttgcagggtgtcttaaataactacaatttcatgattatgagaaaaaatttgattaaaaaattatttcgaatacaaaaacagataaaaatatattgatgcatcccttttaagggggtgcattataaattttttcaattatatatatatgttaaaaataatataaaataaggagggacatttgccaatattagcttattatagttaaggcttacattatatataataatatataaggccatttacttgtcactattttattttgtatcaccttcttcttcttttttcttcatgtgtacatttcatctccaattgtcaatatttctagatcttcaataaataaataatttaattaataaatatataaattaatgttttataaatgacaaattatatagattgataattaatatagaaatactatacatttggacttgatttacattggtagtagtattagtgtttttttttgggtaagggttatatattattgttgtttgtttttattttaatgttgttagtttaattttgtaatttaaattttatttgataatgttagtgggtttttttttttttgttattgattttttgttgtatatttaacattataatcataataataaaactaaaaattaaatatataatattttatttagagaaaactaaacgttcttaaacaaaatacgttctaggtatttattattgtctttgtataaatagtgttgcctttattattaaaaggaaatagttttttatttaaattaaagacgaagataaaaagtggatcattgagggattttcgttaaataa

SEQ ID NO: 315950 - DNA, 824 bp, Cannabis indica
aagttaacatatgaaaagatggggctccaactcaccgacctagcgccctgcaaccaagtgatgtatgacttctttagccaaggcattgtacttgtcaagtatataaggttaccactcacagttggagaaactacaaccaccacaactctaatggcacattttgtcatgatcaacgttccctcgaccttcaacgccatgataggccgaccaagcctcaatgaccggaaggcggtcacatccatctaccatttatgcccaaatttccaagaaacgcatatggtggcatgtgtgattggagaccaacagtcttcctatcactattacaacttggccctatccaaagccaagaaagaaaagatgcctacaaagggccctgaaaaagagcccagtaaagggcaatgaagtccagcccgaagcgaggacacaacatagatcctcacttaggggatcctataagaagctttaggcttgtagaagagttggaagaagtggaggttgatcccacttttcaaccaagaagactgaagattgggaaaggtttagctccagaaattaaatcaaaattgataagatttctaagggcaaacacttgacctttttgcatggtcacatggagatatggtcagaattgactccactgtgatgacccatgcactcaacatcaatccaagcatccagcctgttcaacaaaaaaggcagttactggacaaggagcattgtaacaccctgaacctcaggaacgccacgtgtgtgcttttataatcttattatcaataatctattagtttaggaaaagtgtggtttaaattcaaaaaaaaaatatt

SEQ ID NO: 315951 - DNA, 1381 bp, Cannabis indica
aaaaagtcctttaccgaccaagcttcccagataagctttgctggcgcacaactgcgccggcaaagctttaccggcgcagtcagtgtacttttgccggcgcaataatgcgccggtaaaagctggatttcttgtagtgccacttgattatccttaagttggataattttatcaaaccttttgttctaagaacgagaagcttgcttaagtccataaatggacctgttgagcttgcaaactttttcttcttatcctagaagtttataaccttctggttgctccatataaactgtcacgtcaagaattctattaaggaaagttgtcttgatatccatttgcaaaatttcataatctaaagtgacagctatggagagaagtattttgatggatttgagcatggcgaccgtactaaaagcatcctcatagttcacacattctctttgggtataaccctttacaacaagtctagctttaaaagtttggacttcttcaccagcacctcttttcttcctgtaaacccatttacatccaattggatgataacaatcaggtacatctacgtattctcagactttatttcttttcatggaatccatcctggctgaccattgtttccattctggacttgtcattgcctgttaataggttaatggatcgtcatcaatatcgttgccaatgaccatattaattttatcatccaagacataacgagctagttttctagaaaccctctcactacgatgatctcttttaaaatcccttaaacattatagctgcctagcatttgtaaatcaccattgtcaaacataaaaactagcaaatcaaaactcttgttgtaacataaaaaaagaacttataagctagctttacaaacttttagtccatagcattaattatagtttgtggattaagtctcattaacatccaattctcattacaagcacctcgtttaattaactaattaattatcttaataatcatctctcatgtttctcatcaacgaaaaacttgcatcgatagcattaaaaagtttttcaaaaactatcttgacaaaacaaaaatattttgtaataaaccaacattatccttagttggtattaatagctatttttatttatgtatatttatatataattaatttttatagatatgctattcaaagaaaaaaaaatacataaaacactttttgaaaatacactaacttatagcctggtgatacatcattccctttaacgtattttaaagggtttctttttctattttatatgtacaagtggtttttttaatatttttacctaattcacataaaattcatataatattaacagagcaatttaaattggtaccaaaaattacacacagcaatccacgtaaaaattaacgg

SEQ ID NO: 315952 - DNA, 1048 bp, Cannabis indica
agaagagatgcagtctcttaggaagaatataacctagattattatgaagaaactatagttatacaagctggtaggatgtaaatagcttttcaagcataaagaaggttcatggaatgagcttaccagattcaaggcaaggttagttgccaaggggttcacttcgaaggaaatcgattacaatgagatttcctctttagcggtcatgcaagcttcaatcagagacatgatggcaaaggcaacaatcatggatctaaagattgaacagatggatgtaaggataactttcttacatgcagaatcaaaagaggaaatctatatgcaacaacctggggctttgacaatgggaacccagatgaggtatgcctgctcaagaagtctcttcatggcttcaagcaggcacctaagcaatggaacttgaggtttgacacctatatacagaatattggatacactaaaagaaagtatcactcatgtgtgtatttcaacaatcaaacctacttgctactctatgttaatgatatattgatctatagcaaagcaaagtcaaagattgacaagctgaacaggaaactcagtgatgagtttgagatgaaagatatgggcaaagcaaaaagaattcttgggatagacataaaaagacctaagcctggcatgataatactttctcaagctacctacctatataaagtattgaacaagtttggcatggtcaagtgcaaaccagttgcaacaccacttcctcaacacttcaagttttctgcatctatgtcaccaaaaatagatggagaaagagccaagacgagtaaggttccccatgcaagttgtgttgggagtctcatgtactctattgtgtgttctagacatgacttagctcatgctatgagggtggtcagcaggtacattttcgatgccgtccttgaacattgggaagcactgaaatgaacaatgaggtacctgaaaggtactctggacactagtattgtgttcagtaaagaaaccactggttatgtggactcagattttgcagctaacgtagacactagaagga

SEQ ID NO: 315953 - DNA, 627 bp, Cannabis indica
aaattataagaaattaaaaaaataaaattacctcaccgaaaataagtttcaaacaatgtattctatgtataattctgttaatttatacgtgtgtgaaatagactgtttgaatataattttttatacggtatgtaattctgaatttcttaaaattttacaagatttcttaaataactataatcttaacgactatgaaaagaaattagactaaaagttatcttgaatgttaaaacaaataaagaatgcatcaatgtgcaccataggagcttccaattaaaatttttaaaaaaatttaattcataataatttgtataggaaaattctataatacactcccttgaaagagatgcaccaatatacccttatctattttggtatcaaaaataagtcagctattctctcatggtcatgtgtgttatatttattaaaaatatcctgcaaaattttaaaaaattcaaaaaatttaacaccccaaaaacatagtttaaacaacaagtgtgactattttattttataacatgtaaaatagattgtttgaatattattttttatattataaattatttcgaatttctcaaaattttataaaatatcttaagtaacaataacgtacacgaatatgaaaaa

SEQ ID NO: 315954 - DNA, 1064 bp, Cannabis indica
taggctaattatattagtttaccgagttttttggaaactaagtattcttagagcttaagaaagaaaaagtaatttaaataacagaataacaaatatgagatttttacgtggattaggcattaattattattagtccacgagtccattttattaggctcatcggtcggtaaccgcttttagaagtagagatacaatggactgaaattccttttcttcctgtgttccttttgaagaagaggaagcttagtaggaatattctggagttttttaggtgtaatactatctggtcttataaaagtgtgtttgcaaagtctggcaaagagtgagtcttgccctcaaaaaatatgtccctcccctcctcttgtgatttacaggggtatttataagcaaacttctcttcatgtgctggcttggattgatcatccttaggcgaaatcaaatcgttggattggtaggtggtatttttcccatatggcatttaagggtgtcagatcgtacaagttggacctcatacgtgtttcatcctagggcctttccttttagaatttcccttagccctggtcattggatcattcaatcagttacaatgagacacacatgctttgtacgatagcatgttgtgggagacaacctctgacatcgtacttgaaaaatcctggtcactaggtccgtagtctgacacgtacggagagagtctctgcgggctaaaggcatagcccggtttggcgcctctaaaaatgccaattatcaagtatctattaaatggggaacttcctacaaataaaactgaggtatacaaactcttatattggatacctcgctatacaatggttgaggagaaattgtagaggagaggttattcttgcctcttttgcgatctgtgttaccaacaaaagccaatgaaataatcaaagagattcatgaagacttctgtggagatcattcagtctggcagagcttatccaaaaagataattatacaacgatactattggccaactatcatcaaagacacacacaaatttgtcaagagatgtgataaatgccaaaggttttcacatatac

SEQ ID NO: 315955 - DNA, 1013 bp, Cannabis indica
cgtgggtctacgtcatgtagatttaaatagatgtgtgagcgcaacacataggtttacaccatgtagacataaataggcatgtcagtgtgatatgtaggtctgtgtcatacagacataggtgaatgacatatttgtgtaaatagtatgatgagcatattgtatttgttatgatttatactgtcttgctgggcttggctcacgggtgctctactgtgcaggaaagggtaaggcattagctgatcagccatgagtttcaggagctgggcgaagaatgtacatgttcacatccaagcaggttaagggtctaccagcgatgaacttttgaattctattttgccgcttaggtcggctagaaaagaaaagacttgtaataaagtttgtaaatatttttgggatcccaactgtttaaaagtttaaatttattgcaagttttattttcattctgtttaatataaaagtttaaattctgcgctattttgattggtaatcccgattaggggagttagggtttcataagcattttgggtagcgtgcctaattgtttagggcgttacaagttcatcagaaaagaagacccttattcccggtaagagaagaagcagtaaaaatgaaagttgagaagctaacttccattaagtttttgagagaagcattatatcccatgtgtttggccaactgggtcctagtctcaaagcccaaagacacctagaggatgtgtattgacttcacagatcttaacaaggcatgcccaaaagaccgcttccctttttcgcaaattaatcaaatggtggacgcaacatcagggtacaaattggtaagctttatggatgcgtattctgactacaatcagagtaagatgccacaacaacctatcatcggtggtaaacaaaatgttcaaagactaacttgggagaaacatggaggtatatgtagacgacatgctcgtcaaatccaaagcatgcaacagccatgcaagcgacttagaagaatgtttcgaagtcgtccggagatac

SEQ ID NO: 315956 - DNA, 1318 bp, Cannabis indica
cactaaaaatttgccatgtgtacaagtgtgtacaactggacagttcattgtggcacttaagtgtgatttttagacggaggtgtgcagagtaaaatggaaccagggtttaggtagtttagccgccaaaaattcggtgtttgtggttaagtgttacaaaccgtaaagttcaagtggtttagccggcaatattccttttctcatgtgaaagtttatcctttttattaaataatctttacagggtgagtgaagaagtttacctggagttaacctcaattttattgttgcattagagaaaatttgttgtcgtgaaaatttgtagagttggctatgtgaaaaataagagaaatttgataatatgtaataatatattcattgttaaatttatgactttttttgtcaaaaaaaaaaattatgggatttaaaagagaagttgttgtagatatgttaaattaatgatgtgatattgaatttatttttgactggaattgttttgttttaattttttttaatgtttttgcgtcagttcataactgaagcaaaaaacaattagcgtcgatgcactagttttttgcttcagttatgacctgaagtaaaaatcttttttcttttgcttcagttcataactaaagcaaaaaacgaattagcgtcggttcatagtcgaagtaaaaaagttagtatttgcgtctatgttatagcgtcggttacacaaatcgaagcaaatactttatatgtcacttaataaccgaagcaaaaaaactctttttgtagtagtgggtgctagatcgtcatcacgttgtcccgagactcagaataacgacgacaatagaattacctgtctttaggaccatagatattttataattaatattttactttaccacttttatttagttactaactttacatctcgaacatatttttatagtaatttgatcgggattccatttaatgatatatgtgaatactatttttttatttgattatatttctttcaaatataatttagtattcaaaattaattataataccattgaccgaggttttcggcaactaatataataataataattaagaaagctttaaggaattaagagagagatttttacggggttggggcgttaatgagccttagtccacgagtctatgtatttatgatagtatttattacagagaatgttcttggtggatttttcctcttctagttcttatgaaacccagaattctcgacccctgctttaatgagtttgggggtagtttatagtatttttgttggagtgatccctagaattgaggtacatgtctttctgtatctatcagt

SEQ ID NO: 315957 - DNA, 2867 bp, Cannabis indica
ctaaaaatgcatttggggcaacccccaatcctgtcaaagccaatacctggagaagttttatccatttaccttgtggtatccgaatatgcgattagctcagtactaatccgcgagggccaaggtaggcaatacccggtgtactatgtcagtaaacgtttgctagacgccgagactcgttaccctcaaatggagaaactggcgtttgctttggtaatagcgtcaagaaaattgcgaccttatttcaaggcccataacattgaagttttaactaattaacctttgagacaagttttagcaaaaccagaagcatcgagaaggttgttgaaatggtcagtagagctaagcagtttgatatcaagtacaaaccaagatctgcgattaaggggcaggccttggcagatttcattctcgagttcccgagcatcgaagtggcactcgtagaagaaaaaattgatactgacgtagcaaatggcaaaggatggactttatacgtcgatggagcctctaacagcgaaggctctagcagcggcataatactcattagtcccaacaatttcaaggtacacgctgccctacgatttgaattttctgcatctaccaatgaagccaaatatgaggctttgatcgcaggattaaagctcgcccttgagatgaagatcgaatacttacaggcttttagcgactcccaaatcgtcgtatgccaggtaaacggagaatatcttgctagaggcgggcatttggctaagtacctcgccgtaacatgcgagttgctacagaaattcaagaaagtgattgtctctcgagtaccgcgtgctcataactctcacgcagacgctttggcccacttgccctccacaagggaaggtgaattgctcaatgtaattccagtcgatgtattagctcacccaacggtgagccgaggtgaagtaatgggaatatatactgcagtaaaagttacatggatgactccaatagtaaattacttggagaaagaaatcttacctgaaaacaaaatagaagcaagaaaaatgcgatatcgagctgctcgatatgtcatttatgatggcagactttatcgcagaagcttcagccaaccgctgctcaaatgtattgacggggaggagtacagttacatcctccgtgaagtacatagtggtgtctgcggcaaccataccaggggtaattctcttgccttaaaaatcatgaggctagggtattactagccgacactgcgacaagacactttcaacttcgccaggaaatgcgacaagtgttagcggatagtgacatatgtcaaccaacctccgagccacttgcactccatcacgagtccttggcccttcgcggtttggggcatcgacctaataggggagttacccaaaggaaaaggcgaagccaaatacgccgtggtagcggttgactacttcaccaagtgggccgaggcaaacgcacttacaactattatagtagccaaactttgcgagtttgtctataactccataatctgtcgatttggaatcccttacaaactcatctcggacaatgaaaagcaattcgattgtaaggaaatgcgacaattgtgcgatgagttaggaattaaaaaggcgttttcagccgtcgcctatccacagagcaatgggcagacagaagccgtcaacaagataatcaagcatactatcaaaggaaaactcgaagagtgtaagggggtatggcaagaagaactttcgtaagttttatggtcatataacacaaccccccgatccacggctggtgaaactcctttctcgctctcctatggatgcgaagctatggtaccagtcgaggttggggcaggctccctacgaagagatgttttcaacattatccagaacgaagaaataattgaaccaccttgaccttttagagaaaagcgtaggggattttcggagagaattctgcgagtagggggatttggttcttcgaaaagtcatgccaaacacatatcgacttgcaaaactcgatagaactgtaattcaaagagcctggaatggggaaagcttgaagttttattatcaatagtactcgcagtgtatcatttgtactcggtatgaattcatacttagtcaatttatctacattaatattctaagtatagggggtatataacccactcactttgtactattgattaatctgtttcttatgataagagttatgaattttctcgcactttcaaaaaaatttcctatcttagtatttttttacaccaagctgtaattaaaccgcaatcaagatgataaacaaacaacgcgagtacccgtgtactgcgaaatgattatataatagcataagtaactatccccgaagggatatttgttgttcaaaaggcaataaaaataaatttgtcttagtacaaactgcgagtacccgtataccacttaaaaagtttggcaaaagtaatattaatgtaaaaagctaagcattgggagcagtaggggcagttggagtagtggattcatctgcgactttactagcaggctcctcagcgacttcttcagtattcgcagcttcaacgtcctcgggaaaaagatttcccccacctccttcggtctgcgtgggtgcatagctcgaaaagcttcagccatcttagccgcctctgccccaaggatcgacaagctgaagtctggaatcttgcaaagagttatgtatatgtagttagagaccgcttggtcgtacaacttcttttcattctccttctcggcctccaagtcccgagaaatttcctcaatcttcgcctgagtttttggcttcaagtttgacttgctccttagacttacggagttcctcgagactctttgtccttggtaatcgcatcctgctttagcttc

SEQ ID NO: 315958 - DNA, 1260 bp, Cannabis indica
gataagtacaaaattatgtgtgcaatttgtagtgctttgtactcaccgaagcatggacaacagcatcatgtttcattaccttacttgacatatatataatttaattttcattactattagatgcaaaatatgtttctcaaacacaataagaatagcacacaacactgaagcaaataatttgtgccaaataaatagtactggccatataattaatgaaactcaaagctatatatattatcaatatgaaatcaaacactttaactaataaaacttcattcaggagttttatcaaacaggtggtaggtacatttcttataaagaatattattttcaataattataagattttagtaactttaattacatgtgtctatattaactactcctattgtactaacttatctcgaaattatcacatcataaacaaagaaagcattacaataagaatagcacacaacataaatagtattgtattggacatataattaatgcaactcaaagctatatatatatattatgaataccaaatcaaacactttaacaaataaaacttcattcaaacaaacctgtgatacggtgaggatgctatttgggagaattgagacaagaaggttgtttttgaggagggcagagaagaagtcaaaacccaattctctaacattagattcaaataacaaagattggacacgaccctactttatacaaaattacaaactgtgtatgttgtacaagttgtatggaattaatataaaccattttgtaattatcgtgaatgttaagggcatttgggagttttgcattgaataaattctgaaactttccaacaataaagattgtacacctaagaaatctggaggtgcgtgtgtattggaggtcctgggttcgagtcccaggttatgctgatgtaatatataaaacgcttaaatcaaaaaaagtacacctaagaaatcgacccccgattatccaactgtgtaatttcacaaaaatacatttcaaaaagttaccaaaagagtataacaattgtctttgaggagggcccaacagaaatgtaacttttttatttgcttaaaatatataaatatgttatagtgagaatttcctcctagtgatactggtccctttcttgaaaagtgacatgtgtacttattcctcaaaagaaagtgatgatatgtcaataatatgatttggataagatgtctgagacaatgatctaattgcatgactggcgtgatcgaagaacaagcataattttttaatttc

SEQ ID NO: 315959 - DNA, 4125 bp, Cannabis indica
taaagataatttaaaggtcgattctatggtactccggtacgcttccgctaatctatattctattgtttgattctcatgaattaattagggctatatacagatttacagtatttctaacaaaatacccaaaatgacaaaaaaaaaatacatttttatataattttatagtttttttagttttaagtaattttgtgtaaacttccctattatagatagacacaaatcttatatttaaggacgaaccgaccgagttagaaaattattaggaggtggccatggcttctttagcttttaaaatctaaaacaaaaattaatatataaagaaaattttgaaagaaatacatgttataaaagttttcgtataatgtttattaacaacggtaaatactatctatatcttggatcaagtattttgtaaaagttactaattggatcttctatttgttaaatgataaatagaccattatgtatttttctaaaattgtacaaatggactgattttttgtcaaaataaaaaacaaaaataatctgatctagagtatgttatgataaaactaggttatattttctgtcgtaataggttatattaaaaataaccaatgttaaaaattgagttcagtgtcgtattttactattttgaaaaatatagggtaaattttatcatttaataaaatagaaattctaattaattaattttataaaacacatggtccaaaattatatttaccatattaacaaataaataaaaaagttgagcctccacttctcattagattaattataatgaataaaataaaaataaaccaaataaagagagataaggaaagagaaaaacatacaagaaaggaagaaattaaaggtaatacatctaaatataatataatataatataatataatataatatattgttcatcggttttaaataaggtttttttgtaaggttataatatatataatacattgtttatgtgttttaaatttagatgtatgtaaacgcacaatataatagagtatctacaaagttatatactcgttctaactttgtatgttctctatgtttgttcctaattatgaaaccttaattaagattattctctccttcaatttataacttctatctatttttatttggaggatagctgctctttttgtagaaaaggtatatatataatagtgctaaaattgttcttatgtatgaatagtataaaatataatgattgcaaattgcaattataaaaaatatgagcttgcaaaaaatgttttgttgtataaattacttatgtaatcattacattctaaaagaagaaaatcatgtactttataatttacaagtcatcccgatgtatccaattagtacatgtaaaaattattaattaattgttttgtttatttagtggattcaagagaagatttagaaataaaaatacattagtggtgactactaacccattatattaatattggtgtgattaagtattaggctccacatattgtaattttagagcattgttattggacactaatagtatccatcaccttctagaggtacgtagcgccctacgattggttagtgatattctttaaaggatattataggactcgatacttaattgtacctgttatgaccatattttgagccataaatatggacataacacgtggaaaattagacacagaaattataaaaaactcggtgatatatgaattgtctcggagagataattcataatgagtaatatcaatctcgcattacgcattagcagtaagatccagcgagatgataaagatagaagtcgtcccatgtgtaacagatcgaaattgtatcactagaaaaggtagataatgagttctttaagagcttcaacttattgacctacatacctgtgagtgtgttgaaagattaagggaaataagcaaagtgtaacttattttagaatcttaaaagattaagtccaaaagttttcgtgaaaagctatagcaagaataaatatcttaactagcgtctcgcaaaatgcgacttgctatttttgaacactgttgagagatgcgagtagtctcgacctctactgctagacgaataagtattggctcttagagtagtctcgatctcttctcaattaccactctttatatttgggtgtaagagagtgttttgtatcttgaatttttttcaactttttgacgtgttgttaccatttccttgagggagtattattctttacattcatatgcacacttttaaatatttatttgtacctaacgactaaggacacatcgaccctatgggccagccatcctcttattttttagtatggctaaggacgtattggccctatatatgggccagccatcctcatatttgttggtatggctaaggacgtatcggccctatttgctagtcatcctcttattagtttataatttttgattgagaaacatccttctcatttttaggcatagtactatctttgcaagtgtctctttaagaccctttttggctagctgactcaagttgttctaggcttattttcatgaggttgctttggtgccacctcgttgttactctcttggactgtaagggtatctaatttttacagaagatatttttttttgtagatacttatcatttgtgtttgtgttgctcaacacttttgatcgttccaccatttttattactttgcaatgaaaatctaacattttattaataaagatatattcacaggtaagtttctaggtacactcgctactattagaggtcaacttaagtgtcctctttgatttaacgagacatactaaacgagtaaaagacataagataggctcgctattacttctggaagccaacctagagaatattttcttattggttgtggtaaatgtggtagttccccttcttaggatttcttggatgatggatgtccatggattcatagatgaaggtgtcttttaggcgtatcaatcggcgagtcctagggtatgtcgcctaacagaccttgtagaggtccaatgagttgtcacccatgtcatcttctaagtgtctgttaccttcttccacatggatatacttctccgctctttcgtataagtcatcaagactgttcaactcatctttaaacatgtttctccatagttagctttcggggcatattcctatggctatggccatcttgagttcatcttttgatgccttcttaattttttgcaatttcagtgttgaagcatcgaatgtagcttctcaaactttcttatttgccttgcttcacattggtaattattatgatgtgcatgatgtaatttcatgcatcttgatgttgttggaggaactcttctgagaattgcttgttcccggttctagttgtttgaactacttgtatgcatctccttttaacgtggtcgtgaagcatcggcatcttgccttgttagagactttttttatcttcattagttcattaaaagcactgagattgtactttgggtcagtagtaccatcatatgttgtcatttgtagctctttaaaattgggtggaagtggttctacttgaatctctcttgagaaaagggattcttcatcaatttcatcatcatcatccaagcctgcttttgaggcaattgtaattcttcaacgtatgtctagcatctttgcttctacttccttaatcttttccctcattctacctctgaggttagcgggtgaaactttaaatttcttcattgttttcatgggaggtgtgtgaggtacctctctcgttctgtctttctttgacttctcaacatagtttggggatacggccttacattttcttctttcttggaagtaagccataggtgaggtgtcacctaccatgaaactttttggataaagtttcttctcaagtttatggggtgttcccctcggtgagaccttctaatagagaattagctctagttgcctctactaacccgtaggaggtccatctagcgacgtgttttttctacagctatcttaagggatatcattagttgagatcgtagagttcactctattaacacgtgcaatgaattctccattcttcttattttctttcgcacttagagagcaatacttgagttttcccccgagtatgccctcaataagttttccatac

SEQ ID NO: 315960 - DNA, 1081 bp, Cannabis indica
taagtaaataaaaacaaaaaaaactcgttggatttgtagagtactatacaaaacattgaacattattattaatttgcattttattattatttcgagtgtttttgcattatatcaaatgggccttgcgtatgatttatttatttatttatttattttgagaggtgttacttcgagcaagtcaaatcaagattgaagctagagtgcattattaaatctgcatatatataaattaagacaaatgtggaagatagaagatcgtatgtatagctggtacggtggtcctaggctttgaggataattattatcccacacacatggaaatgttgtaaattaatcacacttctgttttatggtatatgccactgaattctgtttggttggtgagaaacataccctaccaatacttacgtaatcatacctgtatatatacatttcaaataatatacaggtgctttatatatctatatagcactaacaatctcgagatagctagcttggatgtaatttaggattaatggatatttctgttaggaaaatactagtataggatattgtttataagtgaaaataaataaacttaaaagatacttaaaataaaatagagagaatgtagaattatagaataattaaaattaaaaatcaaaatatttaaaatatagctgttgatgctaaactgagtcctcacatatctttgaaagaattaatgaacacatttcgaacaagagagagacaaaaaaaattgcttgatgtgattttgcttcacttgatatttgcaaagatttttatatatacacatttgaaaaagtaccatctttttcatttggaaatactatgagtctcgtttttcatttaactatttttaggtgataatttctcattcactattataattattttgagaattttaacaatattcatgacatagaagaatacaaacttttaaaacagctcattgataacaagttagtcttaatactttgaaattatagtatatatataatactatttcttccaacattttgtagctttctttctcccaccaatagttgaatatttagcttcgtgtaatttttattcaagt

SEQ ID NO: 315961 - DNA, 1517 bp, Cannabis indica
ttaatattaaattatttaaatttagaacacaccaacaaataaaataaaatgaaatttcttttatattttttaataatccctcaaaaaagctagctacattaggtgatgtaaaatgtgtatgtttattacatttgtaggagtgcttagttacatttataacataatatagcttctttaaataatttttcaatagtttattttttctctatatatttttatttaattagttttataaatttaaatattaaaattatagtatttaaatgatataaagataaaaataaaaataaaaaatgtaatataatgtaaatatgtatggtaaaataataaaaaaaaaattgataagacattttaaagaatagcgtaaagaagcttatatgagtgctcttaagtgttaaaactattccaacatgattttagtaatcaaataaatattatatgagtaattaaatctatcaaaaaaaaattgttaattagttctactcatgtattatttggtggtttaggagtttatttttaggtggtttaagagtttggtttcacaataaggaagaaaaaatctagggtttaacattaattaaatgatgatatcttattttttctttattttttttttaagtaatgctaagttttgttttgtttttattattatttctaaatttagtaagtctggtaactgtttataacgataattagtttgtcttttattctattttataacggataatgaataaatatttataatttttgtatgaataagttattcaattggacaaatgaatctctatttttggagtggtgtattaattgagcaacaaggttaatgtatatccatgattaaaattattttaaatcaaatctaaaagagattctaacactcacaaatgaaatatattgtcaagaagtggaatataagagaagaagatgaactaatttatggaggtcacttcctcaatgcattattgggatcttgtttctatgatttttatactaatagcaagacaacaaaaaatagatttgagaagcttttccaaagaaatacaaacttgaggataaaggtataaaaaaatgcatggagtttaagttttatagcaataaactattgatttcataaatgcatgaattataaatagggtcggcccgagaatatatgagcctaaagtgatttaaatttagagtttttacaaaatattaaattttagacaaaagtttacaattttactgtcactaagaactttttacaaaaaatactatctttttataaaacaaccgtaaaacaacaaaatagaataattaaaacaacagcaaaataactaaaaaatagccatggaacaaccgtgaaaacttaacacgatacacagtataaaacttacacagtatttttgaaaaaaaaattctgtcccacaataaaaaaaatagaaatttcagtatctttatatattaagagtgtctatctaacggcatttcttgtttaacattcttagtttaacagaatatacttaaaaataaaagaatat

SEQ ID NO: 315962 - DNA, 699 bp, Cannabis indica
ccaaatgcaaccaaactcttcagaacacctgtatacacattctaacatggtttccacaccaaaatagcaagagaaacacaataaaatttaacatgccattgttgagtcaaacttgctcaacctcaaaattaatcattaaaagcagtgcaaacaatcttagaatatcaattgagacctaaagaaactaaccctaaatgaaattgacccaacacataactaaactcatcaaaatcaaccctaaacctaacaaaacttaagcatcacatagtataggccgtttcctagggcataccttagcttagaacacttcaacctttgctgaaaaaccaagctttacactgaaaatttggctgctcctacccctggtttccatcgtacctcagctacctctccagtcatactctccccactcctcctcttgttcaacaactagtttactatttgccaaatcatcaaccattcctaatcatcctacagttgccataaaaaatcaccaagaaaaaaaaaataaaaataacaaacaaacaaacaaacaaacatgaacatagaacgtacttagggtcctttagattatttttttagaagggattattttacaaatacacaaaaataataaaaaattacaaaaatacggtttcacagaattttaaatatttttacgatttttttttattttatttacagaaaatacaatatttt

SEQ ID NO: 315963 - DNA, 1594 bp, Cannabis indica
gaaacggaaagaaatgtaatcatcaccgtcatcatcattagatgaaaattatatttaataaatagacaataagtgacagaggtagtgtaattatgtttattaaattatatatatagatgtatgggattaaaaggttattaagagaaattaaaggtagtgagttcccaccacgaggaatgtgttgtttggtgtaattaatatataatgagagatattgagattgcgatgatcgtcaatcacgccatgctcttcgcagcaactcctgcatttgacccattctgaccctatccagcctcttgtctctcttttaaattttgttatatatatattttttgggtttatataaaatgggaatttgttgtcttcattatcaccgattcttgtatttttggaccaacaaacacccatgtgttgtggcttatggctgccttttgtcgttttataccgatcagatattagattagatcgattagatgtggatcaaacacagttcacaggagaagaatgttgggagttactttaattttgacgttgtgttttgagttttaggatcagatcattttacttttaatttgatttttagagaggtacataatcgagagtttgtctatttgctacagcagctaaactgacttataatgccataatcggtgggtttccgagttcattcaaaagaaacatgtatatacattgggggttcgtttggaatgtcgtattaggtcgtattgtattgtattgtattatattaaattgtattttgtgcaatatttttatgtaaaacgtattgatttttatggacacctaactatataataatttagaatttagtataaattaaagtttaacataatattatataaaaatatgatatataatcaaattcaatataatataatacaatacaatacgacctaatacaacgttccaaacgagccgggatcaattgttatggacatctttgtaccagtctcaaatcttatacattttaatttaataaataatatagatattattgggtcatttataatatccattgtaaaattatcattaccaataataaaactaggcattgataaaatcgaaacatcattattaaaaataaatgaggatcattatgttatattatttattataatataaaatattacatatatatatatataagattaatagtgtcgaaaattagttatattatatcatatatatagtataataatacacaataaaattgtaacatatgaggagttacaaatctgaaaaatagattgtaacataaggatcaaaattgataaatatgcaattatgtgagttgttacatatgtgagttatggaattaatgggataagtttctagctgttagaaactattacaatactcaattatatcatttaaatgggtattgggacgttgggaaaagatttaactcggagaggagttacattttgagttctctagaaacagttgtttaatagttgtttttatgttgttttacgaacacctggaataagtttttgaaaacgttcataaacgtacataaattaattgagcatgtttccagctctcttgtctaacatttttatcccattaaacacaa

SEQ ID NO: 315964 - DNA, 887 bp, Cannabis indica
tctttttgttgtattgtatgatagtgtttggagtgttgagggattttattgggtgtataaaagggaaggaagtatgatgttaatggttgaaactgacacaaccttacaaaaaatgcgtaacattttatatgaagagttagaggttgacccattagagtatgatttgaaattagtgataaaatagtaacacaatctcaaaattgaggcaactatggcggttcgggccacaacaaaaccacatgaaaagcccatgtttgaggcatagctcaatgttacttggggtccaaaaatatttaggttatatttaacgctaataaaaattgctatggtaaaatttttaatatattctcgatgtttttttcagcacttttaataatttagctgaaatgcattttttgatggcttctctatggaaaattgatgtattctcgatgattttttgataatatttcatgtgaaggctctagatgctatctttgcaattttaaaatttaacgatggtgtattaatatgctcttgatgctttgtcgatgatttgtgcggtcctttacaaaatttaataaatgcattctatgatgttttttcgatggaaatttgatgtgttctcgatggtgtttcgataatatttcatatggaggcttcagatgctattattacattttttaaaatttaactatgataataagaaaaagttacactaattgtctctaagtgtataaaataatacgaaatattttctaatacaaggatgttgttattttaatttattctactacttttttagtctaacttttgaaaacattagggtcttgggtatcatattaaggatgcatctcatcgacacccatttcaatcactatctcaacatcattgtaagtgatttttct

SEQ ID NO: 315965 - DNA, 1911 bp, Cannabis indica
aataaaataaaatattaattaagtcaatttaaacattactcatttaatttaagaaaaaaaaccttaaataaattcaaacttaatgtttattaaattattattttacttattaattatttttattttatgttgctctttttaattttataacaatttagtattatgttatttttattttatttaatatttataattttgttattgttattttgtactttttagtatgttagtgttttaaattaactattatttttatgataaattttaatttaagcactaaaacgtaagattaattattaaagtaaattaaaatacacgctagaatgcaaaaaaaaaaaatgtttaacaccaaatttgtagactcaaaatctaatactatttttattttgatcaagacgaaaattttattaatcaaaccaactaaatacaccctcaagcctcttcaatagagaagacccaacctcacaactcaaagattaattacatgtcaatctctttagtaaattaagctccacaactttggaaccttttctattcttaagtaaatacaatccatattaaacatcttttttaattttgttaactatacaagtaattgtattagagaaattcaagaaaacacaattatttctatttcttcataaatgatagactgtagtagccaataataccactaagatccttccaaccaggcttgaatgattagtaccaagccaattgttcctgctatagataactgaccaccttttaaaacccaatcaatcgaaaactcttcctaatagtaaagaatttggtgtatattaatttggtgcataatttgatgtgctattagagtgaaatgtaaaaattccaaactgatttagtgaaatgacaaattattagagatggtctataatgagatgagtataaatagtagtggctatgtaatctttggccacattacacagtagcatgcatggttggtgacatagatattttaattttgatttcacttattacaccatttacattttttttttcttaaagaaaagtaattttgaaagttatcctataggttttcttcatagtgatgattcctatatatctagtagatattcatctagcaaaaattaactaatttactttaattttttttatatgaccattttgttactgttttacaaaacctgtagttcttgaaagaaaaagagttcagacaaacaatctctggcattaaaatagaagatggtgaagatatctcatatgaaaagaccacaacaacattaaagaggtcagtccaattcttttcagctttacaggcaagtgatggacattggcccgctgaaaattcaggcgcattattcttccttccacctttggtaggcccattttttatttttttttacattattattatcttttgttagttttctaatttatctatttataaaaaactgagacaatcagacaatgatatgttattctaaaattattctaaaccattaaataattattttaatatttttttcaataaattataggaatttttcattatacaataaaaattaatatattacaaaaaatataaaaaaaacttaattataaaaactcatacactttaataatatatatactaatatttgcatcattcaatataatatttattaaacttacgataaatatatatgtatacataataaaattaaggtgtagtcattaacattatatgacctttaattttattatttatgattattaaattgatagttactaatatatgtatagtataagtacatgatggaaaattgaaatttaagaaaaaaattaattgtaataatttaatcaaaagaataaaattatataaatttattatactaacaaaatattttatttataataatatcattactaatgtttaaattattataattt

SEQ ID NO: 315966 - DNA, 3115 bp, Cannabis indica
aaagatagctaatatacaaacacttagagtaacgtaactatgtatttatttaacttttcaaattaatttttatttaggcttattatttataatttatacttaatttaattgtattaataataaaataatatatatatgaagaaatatattttaataaaaattatggtaaaacacaaaattgtaaagctgaaaaaaataatatagtaagaccttatggagtcgattatttcataataaccaactccataagatcttatggcgtcggttattgcataataacacgccataagatcttttgacatcagttattttttacaccctataacgtcgatagtgaatttcatcaaaaccgatgctgaaagctcttaaaatctgcctctaaagtctaattttttagtagtgaagacctcttctgaaagttgatgaacatacccagtgtgtattcaacctacaattaacataaggaaaacaatacacaacacactacaaaaaaaatatgaagaactgtctggaatcaagttcttcacacaagaaaccctctctacaaaacatagaaatgaagcttttgaaaaaatgatcaacaagaaagatgataagaactcacgacttaaggatacaccttaggaacaccttagatcttggaaaagagaaaatgaaacaatcagaaaataaatgagaaatatttttgaaaagaaaagtcaaaatctattcaaatatctttaagattccttagaatagattcaatgaatcaggacagtttttaattaatgttgcttttttttttttttgaaaattaatcaatgttttcttaaataaataagaaaataatatttacttttaatttgaaagattcatatagcttacaatattaaatgacaattaatcaaataaaaaataaaggggaattaccccttttatggggctttttataaacatataatttctataaatataaatataattttttttttgaataataataaaaacttcattacttcaaatcatccaagagaatagaagaaattacaaaaagtaaaggaagactattaaaaatatgaccagcctcaaaaagagaggatcgcgccaaacaatgcgccaccctattagcagatcgcttcacaaaactcaaagagatattaccaacctcagcacataaagccttacattctaaaataatattgccataaggagagaccatatttttattactttgaatattagaaatcacccttaaacaatccgactccaatatgacccccatccaaccattggactttatccaactcaaagcctccttaatcccaatggtctccacctcgtgcggctgcaacaagcccatttttagcacagtccgagcttgtagaacattcccagcagcacacctagccaccagccccacccaaaccgtccttcctaggagaagatagcaccgtcaacgtttactttgatgcaaggaaaattcggacgacaccatttctcaggcacaacaattgaatgaacgggaagagactcctttttgaactgttgtgcattgcaccagtccgaataattcacagttgcaacgtgaattacctcttcactagaaggagaaatagaactccaaacaacatcattttgcatcttccacacggcccaaagagtcatggccgcttcaatgctttcaacctcactccacttagtcaatccttcctcaaaccaacacctgaaggtcatggcaacaggagccacaaccggcactttagtttgcctccagcaagatcgagcaaagctacaacggaccaacaaatggagagcaatttcaggggtagcagagcaaaatggacacaaggtatcgacttgtacatgtttagtggacaaaagaaaccttgtaggaaggcaattagcacacactctccaaagaaaattaagaaccttagggaggcactttgatataccacatctttctccacaaatcagtagaaacaatgtggttgatatggctattaatgtcgtgttgtagcctataagcgctttttactgagaacacgcctttgctatctttcaaccagttatccttcctacttgctgcagtaagagggatacgccacaccatctctttgtctctttcgtacacatcagaaataacttcactatcccactcaagtctatcaatttgcatcaaagcattaaccaatttcccttgaaggctcgagctaaaagtctcaatgtacgggttaatatcatcaataagccatggttcatgaagaatactaattcgagaaccatcaccaccaaatgcctcgctccagcacgaaccaactcctgagattccaacacactacgccatatgtaactaggattactttcgagtgtagcagtgagaaaattaccagatgcaaaatatctagctttaaagactattgtagctagcatttcctcacatgacaacagtcgccacccttgtttggcaagtaaggagagattaaagtcccgaaaatcatgaaagcccataccaccgtcaaccttatgtgccgtgagcttgtcccaactcaaccaatgaatcccttttgagttatttgacttccaccaaaatctacttatggcactctccatttggtgacaagttcccaacggaagaaaaaacaaattcatagtataagccgacaaatcctggaccaccgctttaatgagaacttccttactagctctagaaagtaatttattatcccaagtttgaatccttttttgtaccttgtccaccacaaaactgaaaaccccagtcttattccttccaatcgaactaggaagcccaagatattttctattctcttcagcctctctgattctcaatctattacaaatagtctctctcttttgactagtcgtattagaactgaaaaaacccgaagagtttccaaagtttacccgtcgcccagaagcattagaaaaaaacctgaagcatctgttggacattagcaacttctctcttagtagctttacaatataagaaacaatcgtccgccaaaagcatatgagacacaataggagcgccatttgccacttttcacccatggataaacttcctttcctcataatgttgaataagagctgacaaaccttccgcacatataagaaa

SEQ ID NO: 315967 - DNA, 1363 bp, Cannabis indica
aagatctttgatctaagatcaactaagatctttgatctttgatcatcttgtaacaataaatgaaggcttgtaaataaattagctatttataattaaatatatatcaaacactaagaggtttttacgttggttttatagttaaaatcaacatactaagtcaatgagttgcaagcttttgaagaactcgttatctacccttttcactcaacctattctttcctgcttttcacctgcctcattcatcttagtcaagttctgaggattttacttgtaatctagttatccttgtgaatcattgtattgatagttccacgcgaggttatcacatcttttaaccgtaacttatcccgaggcggggcatttattctttcctcatatttataattcacttcattcttttagactttaatttattgacacgtgtcatgtccttatttaatgctcgaaatacgggtgtaagtgggatcgacctcactcttgtgagtattacttggaaatgatatgtgcacttgcgtgttagaatttttgcaatagtcgcatggcataggaataaacttgagaatagcttcttttaattattttatactccttggtgtttgagaaacatatttacacaagtctttcttggaattttaaatgtggtgacatgtgccatctttttgtgccaaaagatggcacatgtcacccaagccatatgggaagagattcttgtgcaattttgactttatgttcaagtattagcctctttataccataatgagtcaagttcttactaatttccttctcgaattgaggtctttaggatgaaaactcttgcgtgaaaccatgaaaccctaggctatgcacccttgggtgtgggtcgtggtaccaaatggattggctagtgttttcatagttttcctaaatgtgtcatggtgcccttaagtaggatatctcaactccatttggttctcttaagtcttggtcaaattcttaggcgtaacttttttgattcctcgaaaatcgggtataacaattcactttcaagatttatcctcacgggagcaagagtgcaaagatggagcttctaactatgatgaatgcattaactatagatatgatgccagaaatagacaattttatatcacccttcgattcgaattactaaaagcaatgtcttcttgcataatatggatacattcataatttagatgtgaataagtcaaattacttatccctaatttattagtgaactatctcactagagattgtgttggttaaaatccacttataaccagtccctttacaatatatatccacatcagcaaagcaaaaataaaaacaagtaaacaaaacagtcctagggtggcttcgcctctagtgg

SEQ ID NO: 315968 - DNA, 1572 bp, Cannabis indica
aatggagctcagtccacatttcagcagcggtgtcaaggaacatgatgctccttttgatctcaggggttgcggaatggaggatccaggacatgaccatctggttgcagcgagtccaatggttgtgaaggggatctatttcaggtggagaaggaagagtgcctttaagaaaggcaatcttgtttctggcacttacagataactaaaaatcacgacgccatggttgaaagttgtgatcggatagaggcagagtgaccaagatcaacccagagtgatcaccgaagctgaggtaataggggctggagctgtcttcgtacgcagggcgatgaacaggggatgattctatagaaaagattctccaagatgagttgtagctggaggaacgatgggtgtttcaatcgacggagcatctggaatcgaagaggaagtatgcggcggaggaatttggccggaatgtcttcaaccagcagcccgtgttctgaccatggtgaatcaatggtgtgaaaacttggtcgagagaaagaagaagaaggtttaaacgtctgataccatattacagagtaaacaatatgaaaagttgtattattgatttgttatgataagaaaaataggtatttatacacctaactcacatagagttagttacaaccaggaataggaaaaataacaaacctaacaaccaagactaactgcctaataacaaacataatcgactaagaaacacaactaataccctctaatattcacgatgttatactgttattaatgtaattaagtataggatctcacataacttgagaaaataatttttaagtaatattgcttaccaatcgtgaggcataaggtgttagaaagtaatgatatccaacaatcatttttctaaataatgatattaatatcttagtacaaggagtaaagattgtcagacatttgtttctatgcctattgtatctaggtttcattccaagtttggttgaagagaaaatggcaaattcacacattaatgctatttagattcgattgaataattctaattgtgttcttcgtggagttttgttattcatttataattattttagtcacatactattttattaattattatttattattgaatgatttaaacaaattaatttaaaacttgattggtcattgccgccaattgaaccattcggggaaacaatctcgctctgcctcccaactgcttgagaagcaacaagcaattttttttattattttctatgttattttttaaaaattacaacagttcatctaagtattatacatactattattcaaaaaatttagaattcttagttattgatattaaaaattattgaagttacgagtatttaattatttgtataatcagtgctcaaagtaatatattttatatagataattttttttagagtctctaaattattttatgtgaacatagtgagattattaatacatatatattgttattttgcttcactgcaatgtcaaatctctatttcaattttctctacttcaagagatgttgtacttctctcttctaatcttaaagttctacaagatattttttttctt

SEQ ID NO: 315969 - DNA, 927 bp, Cannabis indica
ttataaatttttggagtgtaaataaaatttttaaacccttaaaagatccaaaattttgtataaaaagtatcaaaaatgaatattttgtttgggagaaaattccaaagatgataagaaaaaacaaaggagaagcagttatatattgtaatatatgttcccaaaaaaaagaaaagaaatagaaatgtgatcctatagttttggatcgtgtaacgcaattgttggttaaggaaagaaataatattagaaaagtatttaaggtaaggtaagagtaagaggaagatctaacacatttcatcacctaatcattttacgccacgtggactacaaaaagacgacaacgattccttggcttttgttttgggccgccgacacaacacaaatcatataaaatacaaatgcactgctcactcagtgactgagtcacactgaattaatgctcacaaaattattttagaaaagaaaattgttaaaaggtatccactattctcagtgtaacaggtcgcacataatttaagaaaataatttttagaaaatattattaatcaattatgaaacgtcacttatagaatatattgaaataagttgaggaatacctctttttttatccattaataaaaaatacactcgtattataaaaagtaagtatatcttaaagaatatgaaaataaaggtaaaaattaaaaacaaataaaataaaatgaatatacaatacaatttcctcaaaaatactagacactactagtgtctaataataattttatttgaaaaaatatatattataccctaaacaccatttatctattttttttattatacaccatttgtttattttggtatttaaaaaaaatagtttttttttttaaattgataattgcaatactataaattattataaaattttttaaaaaatttataaacaattttaaa

SEQ ID NO: 315970 - DNA, 1549 bp, Cannabis indica
gtgtgtgtatgttttagttgaccctgcaaaaaagtatataatgtgttagttgagattttaattaataaattaactaaacaagattcaaggagaactccaactcatagtctcattgaaaatcaatataattatataattcttgaattagtgattatttagtttgtctatcaccacattaataagtttaatactagaatagtttaaataagttttttaagtattttagttgtatatttgggctggccttgacaggataatatagattaaataattaagtgtaacatcctaatcacaagtggcatgttaaaactagtttcctagcatttcagattaagatagttggcttagatggttcaaatgtgaggaaaataggcatggagacatgcagtttcacttattcttagagggtgctgtaataatatttgaaaatttttgaaagaaaaaaaacatcatccatgatggcaagcctaccctaattaaagtattaattcatcagatcaatagcaggctaattgaacttgttgagattcattctcccacaggtattgcaatgaccaattggcttccccttggctggctggctcatgtgtaacactgatgtcgctattgggaaacgacaatttgttggggcagcaattttcaggaataaagaaggggttgtcacgagcatacacactactcatatttgccacaatgaccccttaggtggtgaaattgtagccctctgctggggtgctgaggttgctaccattcaaggcctcaaaaacgtcattttccaatgcgacttatttggtgcagtgttggcagtgcgtcagaaaggccatcacatccctgccttgcaacacaatatctaggcccaagtggccaagttcctcaatttaactaacaaacttaacctttgggaggctagttggattcctacaaaatttaattgtgtggcccatagcgtggctaaatgggcaattcgttccaagcagttcgggaacattgatttgtccaattttaacagctccctgctcgatggaggcagatggctgacgcaaatttttagcttttcttttctatttttttatcttttgtagttcatttggcttttctcttgtttagagttagtcccttctgttagtcgtgtttgttttcttgcctgtgtctcgtttgtgttgttctggttactcagttgaggtaccttctatataataaaaataataactaagtgtaacaaaataatatttttgtcaaatagtaacatacaaataagaggttaggatattattttcggccctttttctttcttgtttttgctttgcgcttgtgttcgattgtgatgatgattcaaaggagattattgaagcaaatatcgagaaagctttttcagaggtggctaatgatagcgtgacctaaacgttagttggtaagatgattttcgaccaaaaatattttgttatatgacattctctatcacttcattgaacactattttgttatattatctaattatttaatattttataattctatcaaaaatatttttgggattatttcataaata

SEQ ID NO: 315971 - DNA, 1009 bp, Cannabis indica
gttgtcttctcggacatggatgagagcaaccaagaaaccagtaagttgtcttgttgctcccagtcttcgaaggcagagttcacaatattggtgtcttcatcatctgtgctgagaaatttaggaggaattttggtggcgtctaagaacatttgtaggcgactccctttgattgatgcaagaacttgatgtttccatggcaggtaattgtgttcatcaagtttaatcgataaagaatgtgagaacgaaactggattggaacgagggaggaaggcatggttcaatcttgatgctcctccattgccgattgctgaagcttccattgttgaacgaattacagctctgataccatgttatgtttaatagaaagagagagaatgagagagacaagaactgaaaacaaaggaattgaatctattgattgattttgagaagagtacaaggtatatatatacaaagttgtcataagccacacaagacagcaaggaaacaaatcataacagaaatataactaacacaactaactagttctaacaacctaactgtcattctccttaacattataattatttttattattattatttttaaaaaatattatttgttctcttgaaatacctcacaaatttaagaaaagcattatcattttctaaaagttattattgtttaaaaatcatgataatttgttacttaagatttatcatttttcaaattaaaaaatatgaaaaaaagaaaaataataaatatatataaattaaaaatggcatgaattaaattcaaatttagattgaaacatgaattacatgttgaatatatgtatatacatagtgtatttttttaagaaaaaaaaggaaaaaaaaaagaagaaaaaaaaaagaagaaaaataaacaaataaagtatatgatttcagtgatgttggaaaatagtaaatatatcctctctcaatcttggtagatgtgggaactctatggggtattgaaaaaagtaagaagcttgtgggttctgtttgtg

SEQ ID NO: 315972 - DNA, 399 bp, Cannabis indica
agaaaaaaaaggaaaaaaaaagtgctatattaagattaagacctccttaaattcaaaatacatagttctaattatctaagttaaaaattaaaaatatgatgatttaaatttaaattgaaatctattatgaattgaattatattatgagttgatgataacatgaactacacatacaaaaataatgaatatatatagtgtgtgtgattaaaaaaatgatatataacatgaaaacctttttagattgagaatgcataatgatcttggtatctgtcaatgttgttgattctcttgctaagcttgctctttttgttaccgcaagcatagtttggtggtctggctactcaagttgtattaaagactttattttggctgatgctttgaattaatgaattctcctag

SEQ ID NO: 315973 - DNA, 687 bp, Cannabis indica
aagatagacacctcactagagacggtgggggcatgctgcgccgcctcctcgcctccaccaaaaattcgttcaaacgtgactgccacttcgatacaattacccagtatttcttccaaatttccagttgcaaccatttattggtaatttgccatattgcatttcttctgtccactccgagttttgactcttgcagatcttcgtgtcgagtaggacttactctttccccttgtcttccttccacggattctaggctgagagcacgacccttcattgcccacaccaatacagaaagtatccttggaagcctcatctttatcactggcattaacaaagtttgcagggctagaaggcgaggagaagtttgaaacaggagggaaaggttaataccaagtgtgggccttcctcttcctactattacccaagagatgattaatcatctcagataagttgggtgggttggataaaagggattgttgggccttatagagattcaggtaatctagtttgtaaagctagaggaaaagtttttgagcctccatatcatcattgggccaggtaattggggtagcttcaggaaatgaatgtggtttttgagataaacacaacaactcatggggtacatcaatgctttgggcaagggtaaggcccaaatcagggataagatccttgttggattttgtgccctaa

SEQ ID NO: 315974 - DNA, 681 bp, Cannabis indica
gtatacattcttgtagtgtcagatgcttttaggattatgtgaagaccttggaggcttcccttgaagcaaaagacaaagccgattccaagctagaggcccttctagcagagaggcatagaatggtttccggattggacaccatgttttgagccaagaatacaaagaacaccacctaggtcgcccttaattgtaggttgcaaactgaacttgaggatcataagaagaagttttaggaggcttttgatggtcagcaggccactaaggagaattatattcacatgtcctccaaacttacctatgagtttcatttgcataaacctcgagctaaattgtcgtacttaggcagtatcaattttgtggagaggacattgacccatggaaaggcactgtttgagagtcgaatggagatataccatgttgttggttattgagaggggtcatcatcacggacacacgacgaggagttggccgacccacctgtgaaggaggtggcaggccaagacactgaccaccaggccagccagcacggtgatgatggggttgggctgcactttgtggatctcaatcttgtggctcagaattctgctctgtcagcccctgcacacatgtagacagtgtttgtaatatccgctaactctgaaagggtatttttgtaattttatttagaattattgtgaatta

SEQ ID NO: 315975 - DNA, 641 bp, Cannabis indica
aaaacaaaaaacagttttttaattatgatgccaaacatgcacttattcgcctaaactattttttcaaaaacttatatggctaggcaaggttctcaactttttctttcatggaactatttgctcaccttttccaacaccttcaaccaaaagttcaacatattctaaggctggctcacaaatattctcatgaaacattacatgcccatatcttgcagcagcataacccatatctcttgcgagctcagtatgtatccactaaaaaaaatcacattaaagaaaaatttcatacatcattgctcatggaaaagtagaaaaatgtaaaagacaaaatggtgtctaatctatcactctcaactaacaatggaataaatatgcttatatgctcttataaatcgaaatatatttcaagagtcaagatcaaagtaatacttcaatcatgccatcctgatatatattatgagaccataacaataatttgaatgttttgatgtgttacagagccaacaaattagtgttatgagatttgaaccatgatcttggacattatgtcatttacctcaaccaattaaatatgaatatttgttgcttataatacatttaaattttacttaaataaaagcctaataattttttttattttt

SEQ ID NO: 315976 - DNA, 1011 bp, Cannabis indica
ggcgacggcctgtgttggcgactgttcgtggtggtttccacgagcacgggtcgaattcaagaccgagatagatagagagagagagggaaaaatcgagtgggaagaagagggttgttgggttcggcgtctgcgtggtcgtcgtcgtcgggttagatttcgttgttcggttgttttgtttttgggcagggacgaagaggaaaagtcggagagagagtgggaaagacagagagagagggaaagacagagtgggaaagagagagtgggaaaattaaatggaaggggtattttgggtagaatttgaaaatagtggaattgttttgtataaattagtaaggggtataaaatttgatataagatatattattaagggcaaaaattgaaatttcccaattaataataatattaatacaaaagacatattaagaactactagtatattgtaacatttctcttttttatatcatttctgtattaaaaagaagagatgtagagaaggaaacacttgtttctttcgaagtactagtgtgggactgttggatgtgttttgtcaatatattttttttcttattattaatatttattgagataattgtcctttttttcaagagttacattggagtttggtcacgaacaaaacaactttgtctattaaaatgggtaaatttgatgctttcattttcaatagctcttggtgaaagggccacatttgtagtgttgagtactgtttatgtagggttaattacactaaatattattttttttttaattttatatttatattttttacgagaaaatttttatatttatatttttcatacttaatttctttttattattttttacttattaaagttttaaagtattttttctattccttatatcttttctttaattaattttggctgacattttttaagtcaactgtttattttttatttatttctcttttctcttcaccctccatttttctttttcattttttttttcaattctctctctttatttttaaac

SEQ ID NO: 315977 - DNA, 1237 bp, Cannabis indica
acaacaagaatacagtcaacccactattgtagaaagataggtccactcaagccctagggctagaccgtccagtcaatcgtggagcagagtcgactaaaatgaaaggcatcatactgaggttctggggcctgacgtttagggaaggaaaaactaccccaataattctgttaaacagagcattgaaatagaagacttagatcctgaagacaacatgtcgacaacaaacctcagggactgtctgaatgttaaaagagaaaaaagtaagatgtgagaaagctaagcctagcgaaggagacctcggaaataatataaatgattgaatttgtggatgtgaagttctagacgataacactagaaggttggaggatcaaatcaccaccttaaccaaaatcatgaaccgactggtctacaagcaaagtggcatcgtgtctaatttggatgatgaagacctggagccatgcagaaggattttagatgcaacactaccagaacactttcacatggctcgaatagaattgtatgaaggttagacaaatcccatagaccacatgtccttggtataatagcttgatgatggtggtgcaagttagtgatgatgaaaggtgtttgtgtttccttctcactttaactaagtatactgaagactggtggaaaagatttcctttcaaatccatgcaaaactatcgagatttgcaatccatgttcagaaagcaatttgtggttgctaaggactttgacatggaggttattatgctaaaaaatgttaagcagcagcctagcgagagtcccaaaacctatgtccaatggatgatggaagtagtggcgaaaactaaagtcaaagataatatgaagttagtggccctacaatcagggatagcacctggatccctgctttggaatgacatgtagagaaagaggtttgatactttgttagacttcttgttaagggcccaaagattcatcaatttagaagaggcttatactcaagcctttagagtagctccaaaaccatcaggagaagccagtgcattgggatacactacttaactcccgactccagtaatcacacctcccaaaatccatctctgagctactcaattccacacatgatatatagatttcatgcactttgattgtgtgtggtatttcatcttttggttgtttccactttcttctggaaatatttgagtagtaaataatgtcatcgattatttaaaatcattacattcacttcagg

SEQ ID NO: 315978 - DNA, 1528 bp, Cannabis indica
ttgtcccctcactcgcgtttgtcgctaagttatggcactctgattttgggagcctcatccatcaataagaatgtcccttgtttcccttggttactgttctatggggtgagtgtgattgtttggttcatgtttctcaatgtttggtccttgtgaccttctggttcgcaaacaacggggcctccctcgcaatcatcgcgcggtctgctcctcctatacaggtggtgtatctttttgagtagctctagcagcagccatggccttttccaactattcattccttcaattaaactctctaagcctttgatggagttgtcaatattctaattcaataatgggaacatatcttgtgggatcatatgtatttgactcccttctctcaggaatttcttcctcagggtcacttttctcagagttttgtttagtaggaccccttccttggttggtttgaatatgtgcctcttagggctcttttcttggtcgtcgcgttgtttcttcttccacaacaggctcatcatactgagtgttttccatgatgtgatgaaacaaaagagatatgtgtttcgggttctgttttttacaaaggctttaatgaaagcaccaacttaaacccaaatttttgttaacaatatatgaagccaatgcttatactttaataaatatatagatattgaatgcaatagattttatgtggtttttagttatctctacatactccatgagtcatttttatttctaaataattctagaaaatgtacttaaattacaaagaaataaatatgaatatacactctatctcacaaggtttctccttctaaaaaatatttcatccctttctcttaggttctattcctatttttaaggattctaggaatgatagttatttttttattttatctaagtaaccatttgtttcatatttacaatatggagataaaatcaaataactgctagtaacaatccttttgttcttatctgcaaactattagcctttactgagtggacatgttctcagttatggctcacattactcgactgtgctcaaggatagctgattgtactttgcgagatgcttgtttaaggattgatccttgctatagcctttttagggcaaccctcagacttagtcttttttaaaataatttgtattatgcttatttcctttagtttttcaacatactcacgagtatgtgggttgataaattataattccttaatgaacacattatctatcatttccacttaactcattcttccttgctgtttacttgtctccttcatctcagccaagccacaaagatttaacttgtgatcttctcatattatataaagggaaatttgcggcaaaagtctccaaaaagttcagtttgatacagctaagtccccaacctccaaaaatagcgacaatagtcctcaaggtcatgttttttatttgtccgttggtctccaagttaatagatctgttaaacccaattcaaatgtcacgtgtcgacatattattggtgggtattattattttaatttaaaaaaa

SEQ ID NO: 315979 - DNA, 737 bp, Cannabis indica
tatatataacatattctctccctcaatataaattagctgaataaaaacaattatatatagcatagtcaataacctaatccttcattaaaatctgtaattctatttctttggttcccatgtgatgtgcattacctaatgctttactcaacaaaatcaaactccttaaactaaaaaatttaaggctacaacaaatagagtttcctctctttttagcttgaaacaaacaaagctcttctgcttttaaaagatctgtaatgcaagcccagatgtgtaaaaggctttattgttctttcttatggtatgaccattattcacaattagaaacatgttgacattacaatgatctagttgatgaaagaatagtacttacttttctttgttcaacttggatttctctagtaacttgttgagaaggggggatgatttgaatcttgcatcattctcagcatactttttctggttttcttctgcaaaagaaaccaacttgtatttcatatcaatcgtaaactgattatcttgttaaaaagaaaaatacataaatcatatcacttttttttattctttctttctaaagttggtaccattgaagcgctcaagaaattcaatttggggtaacttaggaccaggaacagactctatcccagaggacccagatagaaacccagctttagctgcaaaattaagaaaaagcatacattaaaaaaaaaaaaaaaaaaaaaaacaaaaaaaaactaaac

SEQ ID NO: 315980 - DNA, 2257 bp, Cannabis indica
aaaaaattgaccaaatcgaccgatagctcagttctaattgaacacaaaaagagaattgttgagactgttaccagcatgaaatagctatagacaaaggggggtgacccccacaattcaccattttcatgaacaaactggtgaggttttgatgtaattgatcataaaactttttcaagcagtttgccattgtggggtttcaagaacaagatattttgccattgtggtctagcaaggtagaaattcaaaaaaggaaaatatgcttctcaaaatgtactacatttgtggtcatagtcttagtttgatatggaatctccttactccaatttatatatatataatatatctataaagtgtgctgggtttatcttataatttttgtttgttttatatcatgtggtatatatatataaatatatatatagttgtgacaaagggatcaagtcaaggacttagtcaagcaggttgctttgcaacagttttgagatgattagtcatttttctcaaaagttgaatagaaagaatatatatatagaaaaatgtcaccatgaccactggactgggcctgttactgtagcacatgccacaccaccctctgcactgcaccattggttttagttacagaaagaaactggaaaatcctaatgtaacgagaataattgaatttctttgtctaccaagtcaataaaacaaaataaataaataaatagacataaatatattttatgtatagaagaagcaatattctaaatacaatgatgggtttgtcttgaatgcaataatgttagcataccaagagaaaaaaaaggttagtctatcttcttcacactctgaacatggtgcagtgcaggataataagcaaagcaaatgggaccactctactctaaacactatatagattcctagactagactgaccactttctaccctcacttcatgcatttatttaaacatattacacctaaaaataaataaaaataaatctcacaaccatacgaaggagctagctagggttaaaatgaacttttatttttcaatttttttttgaaataaagcgttcatatattagataaagtaataattagaccttgcggtcattagaaaaaggtgttcagggattgagagaataagaatacatccaaacctttggtcggtaaacactcacttaaccacattatggacagcaaaattacaatttctaatattagagaaaatacaagtgaaaaaaaagggagaggatctaatacaatatgaaacatagttctcaagctcacacctggactcagtccgattaagagcgttgataactactctcgaagcactttcaacaataataaacttaaagccataagtcttcgcaacgtccagcgcagtgcagcaagctgccgcttcaccacataactcgttagcaaaatccaatttagaagtatgaacccaaagcaccttgccaagatgatcccttgcaacaacaacagtacacataatgtccaaccccaccttaacatcacagttcagttttattttatctagtcttgggggagggcgctaggtttcgccaaactcggaatcgagcaagggagcaacgaagcatgatgaacaacaaaagaagagcggatactatcaatactcttaatcacatcaaccgaacagttattatgtacattttcattcctggcccgccagatggtgtcgtcagttaaagaagcataaagaaacacctcatcagaattgatgcctttgttattaaagtcccagatgaatttgacccagtccgacatccggatatcattaccacaaataggaaagatgccccacgaagaggacctccacaaatggaaagccacattacaagataagagcagatgttcaatagattcatcctctatcccacacagagggcatatcacatccttaataggaaatcttttgcagatctcgtaccgaacagggatagccttggacaagatgcaccaccaaatagtcttcaatctttcagagattttactattccatagtcggttccagagagacggggaaacctcacaattgggcactctttcaagtgcttgggcaagatagatcgattttctcgagaaccgaccattactttccaaagtccaaatccatttatcactgcctaggccagacggaagacccccttttaagatagctgtgacagtttccttgtcgaaaagactgtttagcttggggatattccaacctccattatccaacagaagctcagcaactctgttcaccc

SEQ ID NO: 315981 - DNA, 736 bp, Cannabis indica
tttgggtacaatacatataaaaagatgtatgtttcaattaaatataaaattagaggtaaatttgattaattgattaatgaaagtggtatttttcaacttacccctataaaaaataacaaaaatgaaggtgggtcaatattatacactccaataatcaaataatacctcaagtaaacacaaaacccactaaaattgttagagtggaagaaaacatagagaaataaaaatcctaaagtacaatgcaaaataaactaaagaaaaaaaaaaaaactaattaggctagaaacaaaacatgaaatatgaatttggatattaaatttacaaaattgtgatttatcaaataccataaaaaatcttaatgccatgtttatttaaagggaatgaaaattaacggtatgttattgattcctatacaattgtttactaaattttggagagggagaaagtagtggggcgtacaaattatgaagaaaataaaaggaaagattctcctctcatttttatagggaatacattccccttttctaatttaatttattttaattttaattttattaattaaaaatgaaaatgacaaatatatcctttaaaaatctataaacagaaaaataattacatgtcttcaaattaaaacattttgattacttttttaattatgtaaacaaaataaattttctttcgagatagtttagtatatagcataataaaatattatttctaattattttatatttta

SEQ ID NO: 315982 - DNA, 1081 bp, Cannabis indica
taataggaagataatcatattaggccataatcaataaaaacaattgaaatcgaagccatagttcttattaatcgttaatttcatatgtgcacttgcgtgtgcaaaatatcacaacatgcactatataagctggccaaccatggtgcttcttacatgtggctgattggccttggacatctgtgtaggggtctggctagccaaagcagtccaatgaggggagtggtcaggcagagttgtaatgtttgacattaatattgttttgctttgtttttaggccctgataaaattgagctcggcttgtgatggttctagggggcctttagacacttttcaagagcgtgtgaaggttttggaggcttcccttgctgcaaaagacaaagccaatttttagctggaggtccttctggcagagaggtagagaatagtttctggatcggaaatcatgcttagtgtcaggaataccgagaacaccacccaggctaccctcatcttttggttgcaaacttatctcgaggatcacaagaagaagttgcaggaggttcttgatggccaacagttcagtaaggaagattacaatgatctatcctctgaacttacttacgagtttcatttgcacaaacctcaagtcgaattattgtacatgggcagtgcaacctttatggagagaacattggcctatgggaaggcactatttgagagatggatggagacagatcagactgctgcttatcgagagggttcatcatttggattttgggacacacgaagaggtgttggccgaccgaccagtggaggggtggccggccagcatggtaatgatggggtcggcgtagactctgtggatcttaacatggcgcctccaaattcagctcttgtacacatgtatatggacttttcattagtaattagcatcatgtatgtatcatatagacaatgttttcatgttccgcatagcctgtggcattttagctttagaacattactcacttttgtgttccatgtggcctatggcctttttgaaacattatgtcctatgtgacctgaggcctttttagaacattactttcatgtcctatgtggc

SEQ ID NO: 315983 - DNA, 1365 bp, Cannabis indica
ccatctccaagaggaggatctccccctctcttgtttttctagctatagcaactctgttggaaccaatagtgatggcacctgctgctattacattctcaacccctgtcttagtaatagaattgacagtctcaaaattatcagccaaaacttgataggaattagctatttgagtttcccctgattccactttaccttttgctttactccctttaccaacttgttgaaaaccttcattatccattattttcttgcttcctacaccagcaccagcattcctactgtcatctttaaccacccaatgctgttatttcccttccttctttttacagtcctcagttgagtgtcctaagcctttacaatggttacattgtattggcttccactcatagttaatagcagcaaatacattaaaaccatgctcatcctcaaatgaaactcgctcaggaaaatcttgctgaattgagacttctatgagaaccctcgggtaactcagtttgtttctttcttttgtcatagcatccacctccaatggagagccaaattgtcctactattttaaacaaagatctctcacccccagtatttgagttcaagatctggtaattaaatccaaatatgaactgatctgatatcttctttcttgaagttaacatcaggatcccaagctttcatcaccaccagtcgattattaaagaacacataaccaccattaagtatttcattcctggtatctactgaatcaaatcgcactagaaacactccataagatagggatcccactttgtctaccttatccttccatattctccggataaaaccttcaatgactaataacggtgggttaccaccaaggacatagcatactatagaagagatccataaatgaatttcatgctcaatatcttctaaagtaattttgaccttattagagttctcaattcttgaagaaggtatctaagttcctcaccacattaccagaacgtaaaatgggaagagttataggagtaccttgtcgcacactgcagagcattgtcgattagcctgaagaaagaattcaaaatccttactaacttcttcttgcctcttaatttcctgtagagatgatttaggagataatggaactggaaacaaattagcatccttcgatcgcacagtctgctccatatcaccatcaccttcttcctccgagaaatcaattggctcgacaccaatgattgaacccatcgtcttcatcttgcgtacatcagcagtagaggttggacctcattttttaggtttctagagctctgatttcagcttcccttgcctcgccctagtcttcgccataacaccagcccttgagctgcacgagagagagagagagaga

SEQ ID NO: 315984 - DNA, 1290 bp, Cannabis indica
tttactaatcaattttttctccatccttcccacctcacacttaataccaaacaatacaaagaagcttaacaatcctttctatccctcttactctccatcctctctaacctctccatccatcctactctccctccctcccaccaaacatagccttagggaaagggtaaataccaagtgaagattgttcaatcaactgatctgtttgaagacataattaggaaaagagtttttgaggtgtgtcatttcattattttgttttaatgtttttttatgcttgttttttatgttctttattatttttatttttttgtgttgttttagtattgtattcttatgttttttataagattgggaatcctatggagataacataatggcattcttcattattgtagtgacaacgtttatgccgtcggattccaaggtaacatttgaccatcctttttgcttaatccaactcaatgcttccttcataccaatagcttccaccatgtctgagttgaatctcccttttgtgctcgattgcaccgcgtcacttaaatcgccatcactatcccgagccacaatttcatatccataataacccacattgtcaaatatggctccatcaacattgaccttaatcattcccctttgtggtttcgtccactgctctcgactcccctcattaacttcattgtttgatggagagtcaacactctttgcttgagcagccttgtattgattaagtgtagcttttgttaaaaaaaaccatattatgaacacttggatctttcttattccacacaagttcattccttgccttccatattacccaacataaaacagcccccacctccacctcttccagcttccacagttggacactattctgccaccaacttggaaaactttcctctgcactagcacggcctgatcccaacagcaatcgccaacaatctttgaccctcggacagtcgactagtatatgcacgagtgttttaggcatacttttgcacatcagactttttctggagagtcataccaatttccatgctcatcctcacactacaacattttaagtcaatagcggcggaccccctccgccgctattaacataggtattagcggcggagagtgggtttcgccgctattgttggccgtgtttattttttttttttggaaatcatattagcggcgggcagtccgccgcaactgctccgccgctaatactaatagcggcggacccgccgctattgctccgacgctaatagtattagcggcgggctccgccggtaatagtccgccgct

SEQ ID NO: 315985 - DNA, 1062 bp, Cannabis indica
tagtcgcaatttttttacttttaatcacaaaaaatattttttgtagtgcttccccaattttcaaatttagactatgctttgatttggtccttttatataggcataccatggtataattcctttaaaagtattagatggtaaaaagggatctttcagtatgtttaatatatactctcaaaattgagacctcttatctccttaagaatatgatctatgtacgtaggttcatgaataggaaaacaattcacactttaatattgctagtagaggctttgttctaacttgcaatggggatgttgaaatggaagcaagtattagggatggaaacacaaagaactgtgaagttgtttctggcctcaaaactgttgttaataccctgtcggtaataaaatattgttattaattattgatagttgccaattgacacgccactgctattaataattaatactagcgagtcaatagcggtaagaaccgtaggactatgtttcgtcagatgtgtaatctttttaaaggtgctttagacaatgttaaatttaaattgcgttttgattctagtttggaatttcttaagttaggaagaggacttttcttactttggaacaatgatgtgttcttatctttattatctcaatccgtgaactattttgactgttatgtttcgtccactgctaatattttcatttctttctatcttacttgttttcaattacgactctcccaatgagaacatgtcaaggagaaccaactgtcaaaggagttagttaattctgttactgattagttaggactataactgattcttgttgttgttatagtcgattatgattgttatataaaagccatgtactgtagtattcttctcaattaacactactacaaaaactagtttttacgtcggtcaacgctactgttcatatggttgaccgacgtgaatagtgtacaaaaaatagaggtgtcgtttataaaacgacgttaaaaagatatttattgcgtcgtttagataaatgacgctaaaagagaaactgacgaaaaaaaaataaggaaaaattaaagttggag

SEQ ID NO: 315986 - DNA, 1933 bp, Cannabis indica
ggaagtttagcaagaggaataatgactttgagaaaaacaactcgaggtggacatgaagtgctaattggaaatggtagtagcaaatggaaacttggtttcatcaaaaatacatctcgagagatgtagagtctaccatttgcatcaaggcacttatagcctttgtgattgagactataccctaaaaaagtgcatggtgaggatctaaagtcaagcttgtgtttattgtagggtcggatattgggataacactaaacaaccaaagactttaaagctagaatattctggtttaatctggaacagtatgtctattggtgactgttggtttaagacaggtgtggggagtcgattatgcaaaaacacagcacacctaaaagcttcatcccaaaatttcaatggcattgaagcttgggcaagtaagcttaagccatgttcaataatttgtctatgtttcctctcaactaatccattttgttcgtgagtggtaggacaaggatgcctatgtattatgccagcttgttttaaaggttcagtgaaattcctaaactcaccccaatcagattgaaaaactttgattttctttcccatgaagttcagtttctgccttaaaggtttgaaagttttaagagcttcatacttgtttttcagcaagtaaatccatgtaaaacgactatatgcatcaacaaaactcatgtaatatctatagccattgtgagatacaatgtaagagggtccccacaaatcagagacaacaagttgtaaaggctcagaatagacagttggtgaagatttgggaaatggaaacttatgtattttgcctaaacaacaagcttcacacacagtttttgaaatttcattacaaggaatattacatgtctttagaacagatttaacaaccttacttgagggatggcctaaccgattgtgccatagctcaaactcagtttgagatgactgaacactggtgctggaatttgaaccagaaatgaagtaaaggcagacttggaagttgacagtgggcttgggatagtgggagattgggatagcatcttgaattggccaggatcaaaaatatataggccattgtggagagtcccagtcaggaggacattcttggtaacctgatccttcacaaaacaaacatgagcatgaaactcaaaaaagacattattgtctagagcaaatttagagacacttagcaagttctttgtgatctcagggacatgtaggagattattcagacacaaaggtttagttggatcattagaaataacatgactgtgcccagagtgtttgattaacaaacctgtcccattgccaacatagagctggtctgagccattgtattctgcagctgtcatgagattttggaggtctggtgtgcaatgactcgttgcaacagagtcagggtaccacgttccatcatcggcagtggtgttttgagctacatttacttgcatcgaaggagcatcagttggtgtagtgacaccagcaaaactcttgtcaaaacgatagaaacattcaatgactgtgtgtcccagcttatggcacagttggcattgaggccgattctgagtttgtggcatgatcctcttgcaacattgaaaggcataggtgatcctcgagaaaaggtgccagaatatgagtttcgattagaattcatgaaattcgagtgagaagaaggaaagttatggtgagttggatagtactgacctcttgaagtgccaggacttctaaagtttctgttaaagtgagcgatgttggcttcagattgctgcaaattctcagattgagaggccgtgtccacctttgttgtgttagcacttagatcaaaatccttgtcagtcttctcgatcctcgattctgaagctagcaacaaggcttcaatttctgctacagtatactcttcgatccgagtattggatgaaataacaaa

SEQ ID NO: 315987 - DNA, 1788 bp, Cannabis indica
ttttttttaattttatatttatagcaagaaaatgcagtagagggacatagtgtatatgggcaatggttggggtggatgatggctgctatatatatgggtggtcgaatccctcagatatggttaaacgtaagtactcttcttctacataattatggttatttttcaatataattctacaaaagtaatatttttgacaaataaattttaaaatatgaaacctgagcccacaacatagtaaccatctttaattcaagtgtgattaatttgtgttagaactcttataatttacattttgtttcattgaatttaatttcttatttttatttttcattacagattaaaagaggaagcgtggaggtatatatatatcatttgttttgataatcatcatcttattaatttatttgatttttgatactacttcataatacatatatatgtacattaattcaggggttgaatccactcatgttcatcttcgcactaatcgcaaataccacatacgtgggaaggttattatcattgcttaatttccttaatataaattcaatgaattaattagtcctaactaattaattaattaattaattatatattaataattgtatattttttgcagcattcttgtaagaagcactgaatggggtaaaatcaaagccaacatgccttggttactggatgctatagtctgcgtggcactagacttatttgtatcctcctcctcattattattattattaatattagttgctaataagcttaattaattattcttaattaatgagctataattaatattaattaaacagtaattttccttaacacaacaaaattacagataatcctacagtacatgtattacagatattggcggaagactagaagcacttgcagggatgatgactactaccaagaatcaagaaaagtcactgtttcttgattatatatataggtttttctagatattatatttatatgttaattctgtgttaattaattaaatgcttataactttgaagaaaatcattttggatatgtatttgttgtttaactttattagtcttatattgattataattaaataattgtcttgtattggtagttggtgaaaattattaactagttaaggagtaatgtgtgtcaaagtagttttagaaaatgaagagtttaattacaaaaaaaaagcaaatttcggtctattaagcattccaataattaagtttccttttaaaatttattttttttagaaaattacattctacatttactttattttatttattttaggcttaagtggatggtgagaatatattagacaactcacctataaaaatcggtatattttaaggatattttttatttattaccattggcaatattgaaaactttcgatattatatgaaggaattagcttaatcatgtgccttgtttggtaacagataataagtagagttatgaaaagagatgatacattattaatatgtcaatatatatacatatacatatattcatgatgatagacaaattgatctaaatttgttacaaccaaacaatatagaagaatttgttacatttgtaaatataatgagggagtgtttgtttagttctctgagatttttttttttctaaaataaaaataatccaagagtttgcattaatcgacatcaaataaatatttttaaggcctaaagtacgcgaaaagcatatatgtctcggattatttcacaaaaacataaaaacaacaaaaaaaaaattacaaaaatacggtttcacggaattttaaatatt

SEQ ID NO: 315988 - DNA, 790 bp, Cannabis indica
aataaaaaattacataaaagtaatataaaaataacatttaaataacatcaaaacaacaacaaaaaataatatacagataacaaaaatcaacaacaaattaacaattgatgaccctaagaatgcaagtgattataggttgatcgcttgctgcaacactctttacaagtgtatctctaaaatgatttgtgctcggttctcagaagtgcttcctagcctgattcatgataaccagggagcctttatcaagaataggcagcgggctcataatatcctgatctttcaagatcttttaaaatggtacaccaggacgaatgtctcagctcgaagcatcttcaaaattaatctcagcaaggcgtatgacactgttgattggagatttatctctgatcttttaaagggcctttgtttcccggccaagttcattgattgggttttaggttgcctccatggtgtttcctattccctaatgatgaatggtcgcacctataggtcttttaaaggggagaaaggtcttcgtcaagggaatccaatgtctccgcttctctttgtgctaaccatggaatacttgacaagattactaattcagagatctagcttgaaaggatttgagtttcaccctctttgtaagtccttaaatcttgtgaatctttgatttgtggatgacttgattattttttgtaaaggaaatgaaaattcggccaagcatgttgaggaagcttttaaaacttttagtgaaactacgggccttacaactaacgagaaataagtctctggcttattttggtggtgt

SEQ ID NO: 315989 - DNA, 893 bp, Cannabis indica
gaaatcgacaccatctcttcagtcgaccatcactttaacggtatttcttctctctccctctctctctctctctcatattttagtcagtgttgacattttttctaatgaaccgtagtccaagcttatgttttctctgttttgctagtttcctattgctcttgttttaggtgttaagctattgttctctgtttattgaaagaaatattcgattatgtgcttggtatatttatttaagataattttatgctttcgatgtaaaagaaatgatctacccctatcgcgttcaaaaactctgtttattatgcttttgatgtctttctttccttttacttttggattttgttgattgatggtaacctgttgtattattggtacaaacataattgcagtttgtgtgattgtataacctagagtacgagtagttatctcttgctcattctcatcatagtttaatatattgatcaaatatcacagtctcacttaattaatgtttcctttttgttattatgttgttatttttaatgattcatcttttcttgtactcgtgtcattattctaccatagttatggctttgctttgctttgttctttcctttttttatctatgtgttcttaagtgattttgaaatagcctgaatctgtataaacataaaaaacaaagaggtgtttttcacatgctaatcttgcctttcagtccttgaaaatggattaggcacaacaagaatttacattatctattatcatacaaaaattatatctcatctataaatacacacatgtatttcatttttgtcaaatgaaaaagaaataattctttttgcattgcaattggaaattacgcatttaacaaaaagaaaaaatcattacgattcttcattttgtcttacactttt

SEQ ID NO: 315990 - DNA, 1427 bp, Cannabis indica
taataattagtttttgaataaagtaattgaacaacttgctatacgtaaaacgagttaataattacgaccattaggtgagatggttatttttgggtacagccgcctaatcaggttttatttttttaggttataatatataggaaatttgattcatgcaagttaaatgggtttaaattaaactttaattcatatgaagaaaaaaaaatgataatgtttattatgtggacaagttaggatttggtataatgttttgttgagtttttaaatagctctaataatgtttgctttatctaataaatctactacatgcatatatattgaaggtaaagatgatacatcatatatatatatatatatatatatagaatgcaaaaaaaataaaatgtatagactattcatttaaatgccattgccagtactttctaattctatgactcgtcatttttattttacctatattgatacatatatataaatacatctttttgttaatagtacccacgagtgttcgtcagtaaattattgatgattattattcacaaaactattaagtacttgatacatattacatatgtacatataaagccatgcacatgcacgaaatctatacatgggacctatatattgagttgctacaaattaaacctgcctttactaattaaattaataaatagaaataaattacaatatataaaaaataaattgtaaggacaggataataataattaataataataatatataaggtacatacaataattaattaactagtagtacttcttgctaataatactaattactaatagttattataatataattaataacacaaataattatcatatatatataaataccacgtccactactccacttattatgctgttttaattactcgatcatcatagctgccttaattcatgatttcaatatcacactctatatatattatatattattacatttttttcttttgaaacccatcatcatgttttcttgatttgtttgtagaaaatcattaccaataaaaaagactcattaccattaaaagacaaaacttaaaacgaaataaaaattgtaatcatattagctaattataaggagaaggagaaggttgaaccagatcaatataattaattaatttgcttgtaaactactgtttgtgtggtgtacaatatcttttttatgagagggtttaaagcttgctctgacaaatctcatacatccttaattaatgagataaagaattctcatacgtaaaaaaaaatctaattgagtttttttatataaatttttttataaatatagtggcaaaaaatttaaatataattagatatttattgttagtaaaatattaaatatagtattttaaaaaataaattaactattttttttagaaaatagttatattattaattaattaataa

SEQ ID NO: 315991 - DNA, 1227 bp, Cannabis indica
aataataataaataaaaataaaagaatgagaaaaaggttgagacaattagttcaaagccaaaaaaaaaccttgtaatttcttgagaaaatcatgaccatttttaaagcctcatttttgtatagacacattttcaaattatttatatttattcaaattaaaatgttagattctcacttaaaatattaaatggttgataataatgacacattttagtatttaaaaataacttgcaatttgaatttaggtttattattactctatatataaaacctcatctaaataccaatagatattttatagagtaaaatagaatcatactaactaaatcttattatggaaaaatatcatattatttcatttttagattgtcccaaaaaaatattagaattaactttcattttcttaatttatatagtataaatcccaaatatatttttaataggatattaacattaaaaataaaaaaaaatcccatagtcttatgtcacaaaaagggaacttatttcttcttaaaagaaaagaataaataaatacctttatctttagggggcgtttggtacgaggtgttcaaaataatttgattatagggaatattatgaaggagaatatgattgtagagaaatgtgtaaacagtgtttggctgtgtagggtaatatgtaatcatattcctgttaattaaataacactgtttggttgagtacagtaatcttatatattaatttaaaaaattaaattaaaaataatttttattatatctatttaatgttaattatacttaaaaataaaataattattcattaaagaaatttaattattaattaataaatattaaattttattgtaacttttattaattaaaataaatatttttatatattttgtcactatgttatttatttttattctctatgtcacttatgtacactatccgcataaaattatgtataatgaatatatatatatatatatgttattgctaataatataaaaataacttagttaaaaaaaaaaactgatctcattgactaaatatatgttctttttaggtttgtcggcttgaagattgttcgttgcgtgaaatatggagaaaaaagtcgcttgttaaaatagatggatctatatatttgaatattgtttttaagttttttttttttaatttattttattataattactatggtaaatatatgacattttgattgtttttaattaagtttaatgttata

SEQ ID NO: 315992 - DNA, 1029 bp, Cannabis indica
acacaaaatctaaaataatattacccatatataaatgaattagccttttcacaatttcatctccataactcaattctcgtttcttcttcactttttttttatcaaagctttctagcttcaacttatcataataagtgaaaaagatgagaatagacactagtaacaataaacgggtaatattaattaatttaattaaggaaatttataaatattgtaattagtataattaagtataactattataatttataacaatctcattatcatattttgtaatatttacttactatatcctatataagtataggttaactggtcatttctaagttgaacaatcataaggaaaaaaaaatagtactcattttacagtaatgtgttttaaattaaactattatatataatttatgccttttaatcaattatttacattctcaatcacatgtatttttgttattttctttgaaaaatcattaattattctaattaaacactcatagattcaatctttatctaaatttcttccacaacaatttatatacacgaattcatttataagaaccttcttgataatttcacgtgaaaaaccccattggataaagtatatatttatatatatatatatatatatttatgcatttatggagtacatttcaaacaaaacattattaacatggtcccatacatttgacaaattaatattgactatatatatataggaacacgattttatcccgtgatactttcacggaatatattctgtgatgtacagcagccgttagatgtgagatttattagatctgagggttgaggttaatcttgaggtaattagtgttaaaaaatggcaacgtaccctgagacccatctattgttacattctgtgaaaatacaggaacaaaatcatatccctatatatatatatatattgaaacagatactatttgttttgttttttttttaacaaattaatgtaccagttctagactcaataattaaactttttttttaatttattattattatgtattaaca

SEQ ID NO: 315993 - DNA, 1698 bp, Cannabis indica
taaaataatttccaacaggtagctctaacattcttgatgccaaatgacataactttgtagtagtatagaccaacatctgttcaaaaactagtatgctcttggtcagatggatgcattcttatctgattatactccgaataggtgtccataaaaatcaagattaatggccgactattgcatccacaagctgatcgattcttggaaatacaaaatagtcttttggacacaccttattgaggtcggtgaagtcaatacagactcacctttttttgtttggcttgggtacttatatgggattagccacccatgccaggtaaaaggcttcaataatgaatctatttgtgcaaagccattctacttcttcttttaatgcttgtgcttgttctttgtctaacaacccccttttttgttggacttgacaaaagtctggatctatattgagggcatgagacatgacagttggatcgatcttgaccatgttttcatgcgatcaggcaaaaatttggaggtttgctcttagaaattttattaaagctaattttatttcaagcaacaaacctttgccaattttgagttttctggtcgtcatagtgggatcaatttcaatttcttctagttcttccatcgacctaacatttgtgtttggttccccaaggtaggggtccatatctttgtcctcgtcttgggcaaattcttattgggcaatgcttttacccttctctaaactgtggccggatttgtcttccattttggccttagatagagtaaggttataacattcccgtgcagttctttgatttcatttcagatagcccactccattcttcgttagaaattttacacatagatgaaatactaaggtgatgactcttaagtcatacagggctggacgacctaacatgacattaaaataagaaggcacattgaccaccaagaatcgggccatcactgttgtgcttgttggagcttatcctactgtaagtggtaggcggatctgtccgagtggtgcaacacgtgggccggagaaaccatacactagttgaatgcaaggaaccagatctttgagttgtagccctatattttcatatgttattttaaataaaatatttggggaagcttcattatcaaccattgtccgagccaccattttatttacaatttgtgctttaacaaccagagggtcgttgtgaggataaatgatgtgatcggaatttgcttcgctaaaagatatgtctggttcccatacacgtggttgcttaggctttctttcttctacgattagaattgcatttgtttgttcatactgtagggcccgagtgtgcttttctttagctctgtccgagtctccagcaaggtgggagcctccaacgataacctgaagatgtccgtccactggtggaggcattaattattttttagtgttatctggttgggtgaccctttgctcttggtctgtcttgacatatttcttcaagtgcgagttatttttcctaatgaggaattctatttcctgcttaaagttattgcattcatttgtgtcgtgactgtagtccgcatgaaaatgacagaacttggtagtactcttttttctcatgtctttcaaaaggataaatcacactctaatggacatggttagaaccatgatgagtagatcaaatcttcaagagttcttatgggatgaagcactcatgactgcta

SEQ ID NO: 315994 - DNA, 3170 bp, Cannabis indica
tgattacttttcactgtgctgacgacacaatataacaagaatatcaatgtgataacgatttagatgaatttataaatcaaataaacatacaaatgatcacatgaaccaaataatatactaaataagtaatgaaaataaatctatttctttattgataattgaatagaaaagattacattgaaatagagttttatttagggtacaaagcccaacacctataccatatgggaagactagttgttgtagatatccctgatcttaaggaggctattttgattgaggcccataaatccaagtttgatgtacatcctggaagtacaaagatgtaccaagatttgaagagacaatattggtgggaaggtatgaaaagtgatgtgactagatttgtagataattgtatagtttgtcagcaagttaaggctgagcatcagagaccttcaagtttacttcaatctctacctataccagaatggaagtgcgacaagattacagtagaatttgttactggattgccattgaaacctttgaagcatgacgttgtttgggtgattgttgatactttaactaagtctgctcattctattccaatcagaaaggattataagcttaccaggctagctcaactttatgtagataaattatagttcgactacatggaatgccttcaagtattgtttttgatagagatcctcgatttacatcaaggtcttaaaaggccttgcaacaagccttagaaattggacttcacttgagtattgccgatcatccatagataaatggacagtctgataggaccttacagatttttgaagacatgcttcactcttgtgttttggattttggaggtggttgaagataacacttgtcacagatggaattcacatacaagaatagctaccaagcaagtatagacatggctccttatgaggccttatatgggagaccatgcagattgccattgtgttgggtagaaccagatgagcatgtcactattagacaccagattatcactagtaccactaaaaagattaagggaatctaagaaagacctaagacagttcggagtcatcagaaaagctatgccgatctccatcgacgggaagttgagtttaatgttggtgattatgtcttcttgaaggttactcctaggcatggcgttacaagatttggagtgaagggtaagctagcctcgaggtatgttggacctttcgaggttatcgagaggattggggaggtcacttaccgattaaacttaccagcgtggttggcccatgttcataatatgttacatatgtctatgttgaggaagtataccccaaatttgtcacatgtcattgagtatgaggctatccctcttcaagatgtgacttatgaagaacaacctatcaaaatcttagcaaaagagctaaaagtgtcagggtcttatggaaaaatcacaaagacgacgaggctacttgggagtcagagtctaagatttatatgaagtatcctcacatgtttaattttcaacttgaggttgtactttaaaattttgggatgaaatttcttttaggaagggagaatgtaaagactcggtttgaccgagtcaaaaaaaaaagaagaaatatatatatatgtgtataataataattaataaatatatctttatatataaaaagtggctatctaacaacaattcttggcttaatggtgtttttttaatttttgttaacgttatcactaacgccgttaacttattattataccatccatttgtaatccttctataactttacgattagtttcaaaagccctaagcctaaccaatatctcactcccaccccactcccacccccaatcgactgtaagccttttctccacacctaaattccaatctgattcattgatggatgcccattaagccactcgtattattgaagccaatgccaacatcatgatcccaaattctaggcggcctggtctcatcaccatcaaatgtggtatgacgattcaggacaaatggggtgctaggattcccattttatttctctaggtctatgacaatatcggctctcaggttaaagctctagaaaaagaaggcctcatttctttacaggtttcttcttcttctaaattattattattattactcaatggaattttttgcttaaattaccgatggaaaattaaaaagaaataaaaaaagtcttttttttcttattctaatgaagcttgtttggatagtcctctgagaaaggacttagtttgatatttacaaagtattcttcatttggttttagtcgctattttctaatttagattccaatcgcggatggaggtaaaaaagcaattgaaggaaaggcataaagaacgatttgggttttcaatcgctactttccaattgaaatttgcaatttaagtcgttgagtgcagaagtttcagccaagtttgattaatcacaaaatgtcacaataagaaaagaaaaaataatcagatctttaagggaaaaggtgcataattaggcagttgtcttcttaagaatttttttttttgtaattacattaatttatttctgatatttcatgagaaagttatttagtattcgggacaaacaagtcatttctattagcaaatgatttttaccctggatgttgcttcaccttttatactgttgaacattaaacaaatatgttattgtttaattatttatttattcgtgttcaatgacttttttaatgctcatctaatgttacatgtcacagaatcatatttgtgcttatcacagtatctctgatttaacttctttcaatttaaagttgggatgttggatttgattatttacatgctctctttcaggttagaatgcatcttcgacctctcaccaaacatcctaggaagagaatacaaactcttgcaaccgacctgattgagatatggaagaacattgtcataaaagaaacaagcaaagatatacaaaatggaaagttagcaaataaaccttctttcaaactcgaatctccaaaagctgagagtcacaggccttccaaatttcaaaaaacttcctctgggaagattgagaaaggcttcaaggcaaaatctattaaggttgagaaagttgagcgcaatgtagtagaaagtgtaacaccctggaattttgaatggattagcaaaaccctaattagataattatg

SEQ ID NO: 315995 - DNA, 538 bp, Cannabis indica
agacccatgacccttatttatactactcaaaagaaaccaactataatattctagataattctaactaattgtgttactaaaatattcttgaaacttctaatgactattactctctatgattctagaaaattctataatagtaccaaaatgatagaaagttctagatactttgtagagtaggtgttgatctttaacaaagatggcatgggtgctggttttatcagaaattgtaggatgttgtgagttcggatgtgtgttgtacctgccttggtttcattaatgattctggttcggcagtgtctattaatgagactatcatcacgctaattcccaaggtcaagtcaccaactttgactagtgattttaggcttattagtctatgtaatttgctatacaaaattattgctaagatgattactaataggctatgtgaagttttgaatgatattatgtctgaagaacaaagtgcctttattcttgagaggcttatttctgacaatgctatgattgggtttgagtgtcttaatgctatcaaaag

SEQ ID NO: 315996 - DNA, 726 bp, Cannabis indica
ggttttgagatggatttaaacattggaaaagctcaaaagattgaacccttttaactttggtggattagactaaggctagctaacgatggttacaaagaaggagcattgttgtttgttacaaatgacagtgaaatttgagtaaaacgacaacgttttgtgctattatatctaagtaatccagctaatcataataaatttagaagaagtgaaatttgttttccagtgatttgtaagtctggctttcgaggacttttttgtctttttcttgtctgttggtgttggatatgaagaatatgaagaaattggcagttttaacggaataaactataagaaattttggagggaaacgacgtcgtttgtcaacatcaatggaaaataaagacgagagtagttgaaagagtatgtaatcgttgtactagtcaaagtcattttatttatttcattttattattttgtattttagttatcattgttgatactttcatggaaaaaataagtagaaagaaaaatgttggcaaaatataagcaaaataatgatgattgcattcaatgtatagacacccctgtaatcaaatcaagatattttattataattttgatgaaataaagtctgaactgctcacaaacttaactattttgacatgtgttcgttattataaggtatcccctttaaataattagtaatgttataaaataatataaagtagatgagaagaaagaagaaga

SEQ ID NO: 315997 - DNA, 4230 bp, Cannabis indica
atgtttaaaatcacgttaacacgcctatgctagttagggtgttacttattgtctcagaatatattgtatatactatatatatcatatgtatatcaactttatatgccaagaactataatgttatacttttaaattcactctagggttcggtttaaaattaaatcagctaaataaaatactataatgagctttaaaacaacctcagggttgaaccctcactaaggcccatgagtttaaattttgtcattattttgttttcttattgatgttttattcaaaaatgccatttatctattctaattatttaaatgccaaatttttttatttaataattaaaactaattatttaataaaattaccatataaatatatttattgattaaaccctataaggtctcttaattaataaataaatcctaaattctctttttttttttttttctcaaatatgtcattccttagtaaaatttataaataagacacattcttagttgtaatcttaattgattaattgaaacaaattaattgagactacaaagtaatattatctcagttagtgtgggaaccatgggcctatataatcaagctcctaataagtacatctaaaatttattgagtaaatttcctaacttattaattcctcttggcattacaatagatttgtaattgcactcctaattacatagaatgctctatatgcaaaatttagatactctatgaattatctattatttcaatcacaataatcattgatcctctattgacggtttacaatgagtagggacaaaattactattttacccttcaatatttttatcctaaaaatacatagctacatgtaaatgatactttgagaaactaatataattaccaaaataagtgctcaatcatttatcacgttaagaaaagctctaaggaaaccatagttttacttctaaatagttgtagaagatatagatttcatatctatgattagcgctcccactcaattttactaccgtattgccaagatgtaaatatcggacaaatcatactggtaaggtgtaacaaacaagtcaaagaacacgtataatacaattgagctagaacctaaccatcttaagaatgagatcaaatgacctatgatcaactaaatgatattgacatagaaaagtgttaacattaaattttgccaaccgacagtagagtcgtatttataattgaaattaccacgtgtacactattagaactggaaaacaaaaaggacacaatatttttatagaggttaagcctcattagttagcgggtaatgacctactccccttgtagttatattgctactagagataataccactcagatcataagtgttgtggattctagagtggctctcttaagattacaatagtgagaataagtagaaaatctcaagtagaagagatgagagagacttagtcttttctacactgcaaggggcctgtagaagtgaaaatgagttagggtttcaagacttaagggctttgagcttaagacatagcatgtagcacttagagcgtaagacttagacttcaaagcataaagagtttaggtttagtttagtgccctttatgtaggagagcatacaagtgatgataggttgatatcccttaaaaagagcagatataacctatttgatacacattaaattaagaagtaaagaacatgttgaatagtccccaataagaggtaaataactgaagttaatctcttaattttgtgggttgttgaagcccaatttgtagcttgaaatattgtctaggctaaaagctacagaggcataaaaaatgcctaccagaagagaggctggtaggccctccctttactggaggttggctagcctatgctggcaatagggccgacaaggggtggtctggccagatcctcttggtgggccagcttgctgtctctttatcatgcttcagcatttggacttctatcaactgatacgttgtgcatggtgacttggtcttcttcctgtaagttgtactccacgtggcatcattcttgcctatgtggacattccacatcatttgaacaaaaattgggataataaaatgatataatggtaagtttataatatcttctccactgttaatatcagtctagtgcaatgtatagccaatacatcctatattagttccctttactaatgttgtagaaaaggcattccactaagctaagtgtaactaaatcttattaattatattatcacgtcagtgtaaatctagtgcactgataaataatataactaaataatttaaagcatataatcacaatcgctttctactatgatgacatcattgtaattgtaaataaaaatatgtttaggatttggtagaacttatacattaaacctatgatcacgtatgaaacatgtgaacaaagcatatgactaggtcatggtatgatttctggtcgttattgaaagtaaataagaatatactgaattgggtttgtttaaggcataaatcccacaaacttagtcttcattaatcatgagatcatcatctttaaggctagtgcactcaacaatgaagtctggtaatgcatgtcctttcattgatgtgttaggctggtaaatgatctcaaactgacctagttcaactacccacttcagtaggcacccttatacttcaagcttcatttgaacttgcctaagtggttggaagtaaggacttagtgttttagaggccagtaccaagtagtaggttagcttctcaatggggggaataccttgactcgaccccaatgagacacttactgatgtagtagaccatgtgttgtatcccttcttccttacgcatcacagcagtattagttgcatgctcgatgatagcaaaatagatgaataattcttcgccatctattggtgtagataagatgggagggctggccaggtgatgtttgagagcttggaaggcttgctagcattcatcaatctattcaaacctcttgttgcttccttttagtaaattaaataaaggaacaaacatatcggttaattttgagacaaatctactaagtgtagtaattttttcatttaggatttgcatgtctttgacttatgatggtgacttcatgtcttgcaaaaccatgatctttttagattcacttcaattcctcttgatttgacaatgaatccatgacattttcgtgattggatgttgaaggcacatttcaaaggattgagcttcatttgatattccaacaagatgtttaagcattcctctaagtctctgatgtggtcttcgaatctctctgacttaaccagcatatcatcaacatagacttccaaattatttccaattaagtcatgaaacatacattttactagcctccgctaagtagcacctacattcttgaggctgaaggacattattttgtagtaataaagcccaatgtcagtttagaaactacattgctcttcatcttgtgtacctgattcagtaccataaaacaaacattgagtgggagtgttaatcaaagaaatagaatctatatcttccataattatttagaagtgaaagatagtttctttagatcttagcttaacgataaaaatggaaaagctcctatttctataattatgttggtttattgaaatgccatttataagtaggcaagtattttaaggataaaatatatcgaagcgtaaaataataaatttctccctaatcgatataaaccatctatagatgatcattaattatttagattaaaataatggataattcacatcgtatctgtacttggtgtacaaatcgttctatgtaatcaagagtgtaattctaaatctataatggagtcagaaagaattaataagtaacgaaatctattcataaattttgagaactgtttattaggatcttgattacttaggcccatggtccccacactatctagaataatattgtcttgtagacatttcttaaaccaattagaattctaaagaagactttgacttatctaggaatttcactaagggtttatttgagaagaaaagtgaagagagggttttctttttgttaattaagaaccttagagggtctaattgataaacatatttaataataattttgtttaataattattaaatagattaaattagcatttaaataataagaatagaaaaaatagtaattttgaagaaagatatggatgtttcatcaagtaaacaaaatgataaaattcaaacccatggccctatatata

SEQ ID NO: 315998 - DNA, 1431 bp, Cannabis indica
ggtttgagaagaagaaaaaaggttattgaaataattaaccataagcagatctaggccactattccaatccacccaaacaccatattgacccttaagctttgtaacaaaattattccgtcttctattagtagcttaagcatgaaaaaactttctattattgtccccttcttgcaaccataattgcttcgatcttgatgccaaaatacctcccgttgaatataagcttcagataagttcttatttgcttgtttataatttgcaacttagacatcatctcgacccaacttccatctttgtacctcatcttgacactttttaattctatctttgaagttgcccgtgaactccattgcccacacacgtaactgtcgtccacaaaaactcactttattcgtaacctcatcattcccacaaagctcccagctgtccttaataacttgaaagcaaagaggcccccttaactacgcattctcaaaccaaaaccgtttagcaaaatggtagctagcagtaggaaccagctccataagaatcgagtcatgattcgaagtagatatttcaaggttgtgaagtttagcatatgagaacatattcaaccaagctagattagctaaccccctatccaatcaaactttaaagtgttctctatgttcgatggtggtttttggagtcaagcgagacaagggaggctcgtgggtagaacttgggtgttcgacgatgatttttggaaggttattggaagttgccgtttcaattgagggaagagagcgagagagaaaagagggagagagtgactagagggtgcatactcaaaataaaaagagtattttttggctttaataaaaggttgacatattctaacaatgttcatacacttaagttgggtgtatcaattaagcacaaaagaattttgaatattgttatggaaatggctctctctagatccttcaggaggtatgttctcccgtcttcgtttggtacccgaaatgggtttctggtctgcccacatgagttgtgtggtggtgttgggcatcgatccctctttcttgtttgtcaacctttcttttccttcattaattggagcatttattgctctgacgatgattatgctccaaatctcctcccagatgcgtttttcaactccattaattgcttcttgccctttcgaaatcccctaaagtcgtcttatctggcctctaatttatttctcctctctaatgactctgacgatcaaatctctaatcagcttccaaatcctttgatttccctaaatatggcggccaggagctggatttgtgatgatgaagcttgggagattgaaatcgtgatgatggctagcatatccccattgcaggctacggtcagaaacttcccgagaactgcctctcgcaagctggtattttttctatttaaagtaagatttaggttcttttt

SEQ ID NO: 315999 - DNA, 1090 bp, Cannabis indica
gttagcacattttttgttggtaaaaataacttatactgtgaattagtatgtggagctatatgtaaaagagatagtacgtcttcatggagtcccaaaatctattgtttcagacagagatcgaaagtttacatcaaagttctagataagtcttcgaaaagctatgggtataaagctgaagttcagtaaagattttcacccttaaacttatgggcagtgagagaacaatacagatattaaaatacttattgcgatcttgtgtaatggactttgaacgttcatggagaaaatacttgccattgatagaattttcttacaatgacagctatcagggtacaataaggatggctacttacaaaatgatgtatggtaggaaatctcaatccccaattgattaagacaaaactagagaaaggaagtatataggtcctaaattagttcaaagcaccgatgaggcaatagacaaaatcaaggttcagatgcttacattgcaaagatggcagaaaagttacgccaatctgaagcttagagacattgcatttcagataggagaacatgttttcttgcaatttcattgatgaaaggtatcaggcgctttcgaaagaggggaagttaagccctaggtttatagggtcgttcaagatacgcgagaaggtcaggcaggtagcgtataaggctagccttaccaccagcattgtcagttgttcataatgtattccatatttcaatgtttaggaaatatgtgtcagacccaactaatatcttgagttatgaagccctataactacagtcgaacttatcctaagaggacaactagtgcaaatcctcgataggttagagaaagttcttcgaaacaagaccatagctttggtaaagtactctagaaaaatagcaggacgaaggaatcctagagtctagtatgaggactcaatatccagagttattcatgttagattttgaggacaaaatctttttaatggagggataattgttatgactgttagacatttattatgtataaactgaaatatatatgtttatgtataaaatgcggaattaaatcaaacatatatacactatgaataaggatcga

SEQ ID NO: 316000 - DNA, 853 bp, Cannabis indica
tttttttttttttcttgtagaagatgaaggattttgggttaactaaagaaaaaatttatacgtgggtaataccgcgcccaaaaataaaacaccaaaaactgccacaagattaaatgacacacatatagattgacagttgaaataggaaaatcctatgtgaaaaatcctatcataagcaaatagatcaaaatctttaaatttaaaatcaacggctaaaaaaaagctttcatatgtgagagcaagagtgatattctcaggtaaggagtaccctatatatattgttttattttttattaagtctcacaccacacccactttatttgcttagtacgtacctcattatttctcatttgacacgcattcaaatgcatgcaaatcattttaaagttaaaattaaaattatttataacattgtatttagtattaccaaaattcattagtacatgactaaaattgaaagtgttaatttgttagtagaattaacaaattataccattcttaaataaatataaaattatattggtttgggcaatattaatttgaacttctaacactttaaagtaggttagatatctaattacaattagattgaatgttaaaagtaaaatttaattggattggattagttattaaatgaatatctcaaaatctaattaaaaattgataatcatctaatctaattatattagattgaattctcaggtttaattaaattagatcagaggataattttttaaatttaattactaattagatttaataagattaggagaaaaattattggattagataccgaaccctacttgaaagtagggactttttttttattattttacatttcaaaacaggtttt

SEQ ID NO: 316001 - DNA, 962 bp, Cannabis indica
agacatgctcagccctaatcttgtaacaaaagatccaaaaaacgtctagcacaggcaaatgaagcctcggtttctaccaaagaacctaaaagaataaaaacaactgcaaaccaactcaccatcgagcctgcaaagtctccaaaaaaggctgcacctactgtggcgagcgctagtgaacaaccccttgggtttgtacaccaggtgaaattctctggttctcgcctagagattgtcttcctcgagccctcctgccccttgtccattgaagctggcacagaaggctcgcaactctgctcgctacatgctaccaatagttggcggcgctatcaaaacttcgagtctagtgattgggaattactaaataaaggaacttttgaaagccttctacagaggagttataatctcaagcagtaggttagtcctttttttttttgtcctgttttcttacactcccattatttttatactttctggtttccttcctcacatgcatctcttttgtcctttgatgctcaacatagggggcttcaacgagtggagatgctcgagacagaactttgtctgaccggaaagcatcatgatgtcatggacaagaagtggaatgattcagaatctgagctccctcaggttaaggaggaagatgagaagcaacaaagggctgactagaagaaaataaaagagcttaaggatgctaacaaggctatccaggttgaggctgatagaaagcttgaggaggccaaggttgacactaaaaatagggtgaatagaattgccaggtggtctatctatcaagcctcgtagccaatcttgagattgatttcagttttctgggcaaaggggccgaagaaatgtttgcatactgcgagaagaccaagaaagaggagactgaagatgcagacgagattgaaaaagatcaagaagagccaactaaaccccctattatgtaggcttggtctttttat

SEQ ID NO: 316002 - DNA, 2806 bp, Cannabis indica
aaagagttttatttagggcataaaacccaacatgatttggtagatatcaaaatctaaggaacatagtttagtacataagcaatcactgaaatagtaaaattgaatgaaattagacaaaagtccttaaatccaacaatctcaatagttcagcggatattttcaacaaccttaaaagttcagggggcatgatttggtacatgtcaaagttgagggggcaaaaatcctaattagcccttaaatttttataaaagaaaaacaccttattttaaatttcgcctcaaacctctaagacaaccctaatatcatcttcttcacttcacattactcaactcaataatctactaacaagtagcatgactggaaaagtcatttttccggtttataaccttcataaacttgtaggatatacttaaaatttgctaactaggtcaattatgaagtctctgtcgattttttgaaaccttcaaagataatttcttcatacatgtccaagcttcttgctttgtttttacgtttttctattatttgtgttctatatgcatttattttatcgttcgtcaccttgataaatgtatattctcctatttagttcaatttatatatcttgtgtattattgcattgagaaaatacagaacctaaattgttattgatgtattgatcaagtgaatagtttaagtataatagttgtgtgagaattggcttacaagaacatctttgatctattttaaatttgaatgcaaaatcaaattaaaatagtaagaactcataattggaaagtgttaaaccgaaattaaaaacaataaaattggaacgaattatcgatagaataatctggctgagtcgcggacaatgtcgatctctttaagatgtttcgcggctctgcccgaagtgtgcacggcagtttagcaaccacggcgtccccaggataatatgttttgcaccgaactatatccctctgttacacccaaaagtttgctctgagaaaaatcgtaaggaagaaagaaaagattttattaatgttggaaaatatacgttcttacgttattctgatacgacttatatagaagtcgatccaagaataaacggtaagaaaacggtaatgttatggttcgtggaagagttggatcatgggagtaaaaagcggatcattgactgatcatattcaaataagcccgtgcgttaatggccatgcatgtctatcccagcatagtgaacgctctagacatttttccccaaattccataggaagcggccccactcccacattcacataggtgagtctatcaatagtactcctgtagctcggtactccactccacatagagtatagatctcattaagagtttctattaactcatcctcttatcactttaggacttcatgcttctcatatatcaatagcatgatcaacacatatcacctcataacttgttattacccgttgaacctaattcttgggatctccagtcattaggttgggttaccattatgagtgactcatctttctaagggcaatagtcccattccttttgaagttttatagactttctctctagctagtcctttcgtcaaaggatctactaaattgtcatcagtgcgtacatgatccactctaacagctcctgttgaaatgaactctctaacaatgttgtgcttacgacagatttgtcgtttcttaccgttgtaataacggttttggacttttgcaatagtcgcgatactatcgcaatggatcaacacagctggtatcggtttttcccataaagggatctcagctagtagtcttctaagccaacctgcttcttcactagcagaggctagtgctatcatttcagactccttggtggactgtgctaaaatagtctgtttctttaacttccaagaaacagcgccaccagctatgttaaaaatatagtcatttgacaaagtgttccagtctgcatcactgtatccttcaaggacagatggaaacctttgatagtgtaatccaaggttcatggttctcttaaggtatctcattaccctctcaatagcatgctaatgctctatactaggcctactggtaaacccgcacaataatcccacgacataggcaatgtcgggtctcgtacaatcagtggcatatcgaagactgccaatgatactcgcatagtcagattgtctcacaccgtcaccagtgttattgaatagctttacgcttggatcatatggtgtacaagcaggtttacagtcaaagtaattatatttcttgaggatcttctcaatgtaatgagattgatccaaagaaattcccttttcaaacctagtaatcttaataccaaggattacatcaccttctccgaggtccttcatatcaaagttaggacataatagtgatttcgcagcattcacagcatggatatttgaaccaaatataagcagatcattcacatataggcatataatagtgcaaatgtcattatcagatttatagtaaacacatttgtcactttcattcactttgaagccatctgagataactaaattgtcgaatttctcatgacattgcttaggtgcctgcttaagaccatacacagatttatctaacttgcaaaccttatgttcctggtctgggatcatgaacccttcaggttgatccatgtatatttcttcttctaattcaccattaaggaatgttgtcctaacatccatttggtgcacaactaaattgtgtatagcagctagtgagattaaaactctaatggatgttattctagtgacaagtgaaaaagtgtcaaagaaatctacattctctctttgtctaaa

SEQ ID NO: 316003 - DNA, 1942 bp, Cannabis indica
tatttttatttaatttttataatatgtagtacggccttgaccagctggctaccatcatatataattaatttcatggttaattaaaaattttgatcctttccacacactatgataaatgggagagctttactttgtttggtgcagttttggaagactgaaattgaagaaatgaaaagatcaacagaaactttggaaggaaatttaaggtacaaatacatgatcaaccaatatctatatatataaatatatagagttcctatattttatatataataatgtgtaggaacttagctggtgaagatctatcaaatttgggtatgaaagagttaagacaactggaacgacagcttaagattggggttgaacgagttcgctgcaagaaggtaggtatattattacattttctaataatgaattaataaagaaaaaaaaattatatgtataattagttataaaccataaacttatttacatataagaaagatagctaggaatttgttttactttttatgttattaattattgaattaattagcttatataataattatgaccgattgacagagaaggatcgtatctgaacacatcaacttcctcaaaagacgggtaagatatataactaattttattactatatcatattgcttatcaaataattatattaatataatatcacaaaagttaatttcttaaattgataatatatatagttacttatagttataatttgtgttaacatgtactatatatgattccatataatatatgtttgacgaattattattatcttgagagaataatattcattaaagttgtgataatatataatttttattaatattttttttgaacagtaatctttattaatatttgatggatataataagaatacatttcatgagtttttaacgagctaaaggaaacaatatttagggagagtatggtttgataatacttttattttttatttttgtgttctgtaattacttttaattttaaattttaaaaataaaaataaaaaagttttgtaaattttattttttgtttttgtttttattttagttaagtgtgggtccaaatcaggatttggagttgagtttaagtctagggtcggggctgaagtttgggttcaggtttcaaactccaaaatattgatgaaaagaaaataattttaaactatataattaaaaaaaaaatgtgtttaaaaaaatttaaaaagtaatttttttttattttcaaaatttttaaaattatgattctcatgtgaaaaatgtatagaaaataaaaaattaattaaaaaaagtattacaaaatgcatcctaattaccaattaagtttgtatatattaatttcaacttattatagtctaataattttagctagaatcttactcataatacatataaatatatatttagattaagcaataaatcttaaaataataacaaaaatgaccgtttatttcatctaaaaaggtttattgtctaacctataattcctaaaggcatgtacagaaattagacaatgtaaccttaattttataaaagaaaagttctatcttgtgattttccgtccctccaataaagtatctacataatgataaaaaaaaattagatacttagtatcaaatatatatttaataaatctcgtggttagaaacttaaccaatgaatctatctgctattcttttagccttattaattcaaaactgatacgttgcagccaaaatgcaaactcaccatactaactatacaaagcccaaaaaactacaatacaacctaatagatatatacatatgttggagttacatatatttaaattgttagtatatttgaattgtttgggtaagactttctggttttttgagatggggtttcctagtggcattctcttatgttaatggtagatttgctctccctatcacctaatgtggtaattgaac

SEQ ID NO: 316004 - DNA, 2622 bp, Cannabis indica
aaaatattccaatatgtattttcgggcatagaagttgactaagaaattgtaacaggaggttaaagttagcactcctgttagacattattaatgttttttttagcacttcttcttaagggtccaatccaacgaatgagagatgaagatgatccacacaaaagaatgcaattaaggcaaactttaagtgatattagaattttgattggtatatatagcctaaattaattagaaaaatgcatgtaaaaaataggaatgtgtcacacttgagatagatgtatatttctaatagccaaaaagctatatgtaattccaagctaccaacaatattagtgtacgtagcttagtagttggctcgtgcataaatgtatacacatatacaccgcaactatattgttcattatattattgaattttacatattttaatttaacttaataaaagaaactccaaacaattagaattttactacaataaaattataaggattaacttattgagtaaataatgttacaacacaaatcaaaataagtaaataaaaaaatgtatatgaagagaatatatacaacacaaagtaacataaaattaggaaagaacacaaataagaagaagaaggatataatacactttcattacttacatcttaatggggtgtttggtatatatgggtttgaattcttggatatgggaatgtaaaatcaaatatatgtggcatttttaaaaattaccaaaaaatatatgtctttttaaaatgattctttttttcttttggcgcttaggttaggcggatcttaggcgcagatctagctcactttaactcacagtcagccctacgtggggtccacttaattataagctcacacaaaagatttttttttcaataatatccaaacactttggaaaggatgtatttttataaaataaattaaagtttttactcactactacaatgtaggcttttagagactgttttttcaacttattttataaaaagagaagctaaagggtgtgaaaatacccgcctgatttgaaattgacaattagaggtaattttttggtaaaaaccgtaggtatagaatttatttataccctatgccgttggttgggggttgggcaatattcagggttttttattatccctatggcgtcggttattaggtattaaccgacgccatagggtaccattcagggtcggttgttttcaaccctacagtgtcgcttggattagcgtcaatagcaaattttgtcaaaaccgacgctgaaaggccttaaaaaccgtctctaaacagtatttttgtagtagtgactagttgactctgtttaacttaacttctactataaactttcttagcttataatagaattataaagttattatacgttcaattataatcaaaagtaaatatttaactaaaggatgttaatgaattattggattgcagttggcttatacgtaccaagataatactaaaagacaccaatgacaaagatgtaacttttagtcacaataaaatttgtgattaaaaataaaaaaattgtgactaattatatataataattcttatatattgtgactaaaaactctgcggctaaaagtattagtcacaaaaatcacaatttgttgtaactaaatgtggttttagtcacaatattgtatttaaaaactatatattttagtcacgagtaattttattgtaactaaaagttacatttagtcacaaatttttatattataatgaaaaatttattactaaagatatatattttttttgtatatatataaagtatcatatctttattggtttaattaaataaaattattgatgaaggattttcagtactaatcatgagcacttaatttctataatacggaaagcaattatatatataaagacatataaatagttttaacatatatgctagctataataagaaaaaagagaaaggtaaaaaacaaaaaagaaaactagctattatataacattgattcatgatacactattatattagggttcaaaacttataagcatatatatttagatatatataacacatattttagttaattatacatattacccttttatatatagggatattatatatatatgacatcatttatttagattctacaaactggtcacatatatatgatgatatatgtttgtttaattaattagttgggaatgagcttgaaaggaggcttaacaagagctggagctggatcatatctgccataatctctagtgttagacctcagaaccctctcatgaaccaatcttatcttcttcatcattaacatctcatcatcaccctcctatacattacaacaattcataatcaaacaaaccatatatatatgtgcatgttgctatatatcttattaattattaacttataatttttctaatacttaatctcaaataactaataattaatatttgaaattgtaatttttatttgtcctaatagaaattaattaacctctgcttcatgagtcattaccactttgctaaactggtctcctgagttcatcaactgtcgacctgtcagttaacaccaaattcttcataaagcttatatatagatatacattaattatatctatatatatatatatatata

SEQ ID NO: 316005 - DNA, 1376 bp, Cannabis indica
ttaattttttttttttggtttttcattacaattttacatatgaatttgttctaacttcacacctagaaaactatgtgtacttcaagacgtattatgtacgtccatataataaactttttttttgttcaaataaaaaacaattaattaaccaattacttgttattattttttataaggctaattaaactttgtttggagagaagatacatagataaatagcttctgagaaaaataattatatcacaactcgatcactacttttggtcaggtttttgcttctttaatttcttcatcatatatgatgatctcttaattatatacattaataatgatcacatttcttaaatatctaattaattgggaggatctattatcaattatccaaaatgattaattttaagaatatctttttacatctctcatcagcccctctaaaaggagtcgcccccctcctcctccctctatttcttttactagatccctctcatctgcccaaagatctcgctgtcctcaacccgttcgatcctccgtggaagcccaaatgtctgccatggaagctcgtcctccgtctccagtcctctgtgaaagctcgtcaaagacccgaaatgtcccaccacaaagttcggatgtcgaagctcgtggactaatagataagtatttttttaaataattgtaaaagtatactctattttcagtatatctatgtggttgttatttgtatttaggctaattatgatttttgccccctatactaaatcatgccccctgaatttttaaagtcgttaaaaatgccccctaaactattgagattgttagatttaaggactttttttcaattaactctctctaactatagagaaataagttaatattaggggttatttgaaaatattaagggttatttctctatagttcagagagagttaattgaataataaaaacttatttctctcttttaactctttttaggataaaatggtataaatttattaggggttattttttgtaatagagttttttaaggaataataaattaaatttccttttcttaaaatgatgcatcataacccttttatctattttgatatttaagagaattttttcatctaatttttttacgtaattttgtacgtagtagttatttaggatcacatacaaattttcaaaaagatagttatttaagatcacatataaattttcaaaaagatctttattagtttaccatgtcaaaaataaagtttaactatgtacttactacttgtataaaaaacagtcacatatgcaacaacatatttgaaacttattttcaatattataaattatttaaaaaaatttaaaaatttacaagtactaaattactaaaacgtaaacgatca

SEQ ID NO: 316006 - DNA, 1052 bp, Cannabis indica
aatttaattatttttttttaatatttatttatgtggatctctaaaaatgtgccatgtgtaaattttgtacattgtggcatgtcctacttggcacttaatagagccttgtgagcagaagtgtaaaaagcaaaactgaatgtgagtttggtaagttttactgctaaaaaatcaatttatgtggttaagtgtcacaaatcgtataatttaagtagttttactgccaaaatacaagaattgtaacataagagtggttacaaaaattgaaaattattttgtaacctaaggatcacatttgattatatgtaatgaagtaagttattacatatggaagttataaaatcaataggataagtttctagttgttagaaactgttacaaaacagtacttatttatatcatttaaataagtgttaaaatgttggagaaatatttggcttggagagaagttacaaaaacttaatattgggttatcaaaaaacagttgttttatggttgatgacatgttattttatggttgttttctttcgttttgagccaattttaaaataatattcataaacgtacatgaatttattgagcatgttttcaactctcttctataacgtttttttttaataaacaccaattaaagtgttgttatagtcatgtgtgaagggattttaattttcataatccctcaaacactataagtagaggtattttgctcatttgtgaagatactaatttctatcaagaaaggatcttgctagaaaaatctagaaagctattttcattcttttcttttccctaagtgttgtggtaggggaaaattaataagctttttgacaaatgtgtaaaattttgttcacgtttggtgatttctctattatacacttatggtgtatgtgatgtgagattacttagttctcttatatatatctatatatttaaactatttactttatagttatatatataagttatttatgttattgtgttttgtgtgtagtttattattttgagttgtaattctttttattatttttatatttttttattttatgtgtatattt

SEQ ID NO: 316007 - DNA, 525 bp, Cannabis indica
agagagagagagagagagaatgcgtgtttctttagggtttttagggtttttttttatggttgaggcggtctgcttttcgttaggtttttataaaggttcttagggttttcttatgggttgaagcccatttataagtttgcaacccctttagaggcggttatttcctattaaccacctcgcctctaaagggttccaagacactttttttttccttttagctatagcaatgctttttttttttagtgattgaaaaaatctgtagctgaagctctattttgtagtagtgagtccaacttttttttcctaaaccgattcaatccaattaataattagatttgaacatccaatttaggggtgagcataaaatctaaaaaaccaaaaaaaccgttcaaaccgacctatcgaacaccgttggaaccgaaatcgacgaaactaaaaactaaaaaaaccgctaacagttaaaactgccattgaatggtcaattttttttttgggtaataaaccgatcgaaaaaaccgaaaccga

SEQ ID NO: 316008 - DNA, 1215 bp, Cannabis indica
agtattctaatgctgactcatatgtgtgcgctaaatgaaatagaattttagggattgaatatattgaaaaaagggcaaacccaaacgtaggttgttttcccattggaacgtaactttatatggctctcaattatcagtttcttcccataaatattacaacatggggccttttattttcaaccgtggaacatgcgtctataacaatattatgcatgtgtcaatatacatatacatatataaatatgttactttgatcatcaacgtgtgtcatcgcatctctagtccacagataaatgagagaaatagatatatgtcattactaattagggccaccttccataaagtatacataataatattgctttattgagttgtacatgacatgtacagatatatacaacttgttattcttaaattacacacgtgcatggtaacatacaaataggttcgaatatatgactcgttgaaatactacttagctaatagtcatcaattaattttatatatcccacaaaatttattatatgtatgaacttaagtttataacgttgttaattatttaatttctttctcaccaccaattatttaagacttttcttaaattacattgtaggtggtcaaaaattgcaaagcatttaccaggaaggacagataacgaaataaagaactactggaggactagaattcaaaagcatatgaagcaagctgatcatcatcatcataatcaaaacaacaacaatactcaaaatcatcagtaccatcaccatccccatcatcagatcaacgttaataatagtaatgataataataataataatcagatgatgatgatgatgatgaacgatcagggaagcactagttcaagtcaagtatcgagcagtactatagatgccatggagagttactctcctcctccattgatatcttcatcatcttcatcaatatcataccaaggaataaattatatggataatcatcacaccaataataatcttgttaataattatcctatgcctatggctttacctcatcatccggttgtctcttcaaatattgatcagacatataattggagcatggatgatttctggtctatgcaattactcaattctgattaaatacaacctatacatacatacatatatatgcaccatataacattgatttcagttatatatatatatatataatcatatatatcttgccgtctgcatt

SEQ ID NO: 316009 - DNA, 1052 bp, Cannabis indica
atgtttataaatatttttattttttatttacagtaaaacctctatctaagaatattctattcaagaataatttctaatttattataaaaaattaggtcccaattcgagctagttataaataagaataactctaaattgtaattagttatatattttctaagtcacgtattaacaaatgtatatttctatataagaacaattacatctcaataaaataataaaatatatacatatattttataaatttattaacataattttcttggtttcaactgtattcttgaatagatgttctactgtataaggaagtaaataaaattaggtaatatatgatattataagtaattcattattatttttatttaatttttaaattaatcacaaccttttaacaataatctaacaactaaaataaataaaaccaccgtaattatatatttgatatagctaatgaaacctttttctatatattatatactttaaataataaatgtaaaatccttgtgcacaaagttagacatgggtggaaagataaattctctctcataaatttgatgtgtaaaattataacctgtgtctttaaatttctaatgttgttgttgcataagtacttagagctgaatatcatataggttgaccgagtttcaacttcacgggtttcgggcctaaaaaataaaacctaaacctgcccgtttaaaagattcttcaggtttgcgggtttacgccaactcagtcaatattttttttatcacacaaattctttaaagtaaaagaaaaatatttcaaatccaaggtatatagaaatgtaaatccaataatccaaaaccaaataaatcgttcgtcaaattgatgttcattgttcttgaaaatcatgaatgatgaacatcaattaacatgataataaaaactaaaagtatcaaaataaattgtgactaagaatttaaagttcatgctccatagtctatccatacatttcgtattgtccaccatagttcatacatatgatatatccatatccataaaaatgtctaatttaaaaaggtatttataaa

SEQ ID NO: 316010 - DNA, 807 bp, Cannabis indica
gagagaacgattgagacttaaatagtatagttttggaggtaagttttgtgtaatctgatccgagggacagggaaatgtgggcgattagcttttatagggatgagtgaaatgtttttggagttttgttgagtttgatcagatagtgatattgttattgtatatgcaaataaaattagtcacataaatataaatatttatttaaatcatatactgtgggattggcttacgattttctaacggccacaaaaaatgggatttggcttggtgatgatgtagttggtgaggtcgacatatacttacttatattaacttgtacaaacaaacggaggcttctaggaacttggttttgaggttggagtttaagctagtctcttctccactcaaaagtaagtaatttcgttaaatagttaccacaaaaacttaaaatatgtaaacgtatatcatttaatgttccatcaaaaattttgtttactaagaaaagaaacatttggtacacttcatgttccttcaacttatagcaatttccagactactattaatttgtctgtttttcattgtttgtcatattctaatgtgtagagaactctattcatattatttataaaattatttaacactcgtgctacttttaaaactttggtgtggtctgtttgttattccttatgtttatgtctccatatatttcttattgtatatcgcttatttaatattgttaggtctaatagtggtttttctgttagttgcaataagaatttttttatgtgaaatttaataaaaatacaaaataaaaataaattagttttggta

SEQ ID NO: 316011 - DNA, 462 bp, Cannabis indica
ttttttttttccctttaataacactaataatttaatatttgtgggtaaattttacctaaggaattattttgtttaactcttgtttaatcttttaccgctaatttgtattttgtttggaggttgatagtgtcaattttggtggctgcttgtgctttatttggtgattgttttttgttttataatttaaaactcaatttattgtttaaggatcaatatataatatataagatcttttaaaataaattttaagttcaatgactttgttgatttgtactattttttgatagtttttatactttttattatgttgatttcgcttttagtcaacaacaatgagtcttaattgtaagcgataagtggaataattaagatataatatgaaaaagtaaataaagaacacagagtttttaaagaggttcgacctcgagcagttcagtaaaagtctatgttggaaattatttt

SEQ ID NO: 316012 - DNA, 1380 bp, Cannabis indica
ctttttttaaggaatttaaacaatgaatgattatcatttatcaaactgaactcattgttatcgtattttcacaacaaataataggagtatttttcaaaaatataacttttataataatagtttacaaaaatatgacatactaattgtttaataaaaatattgatttttatagtgattgtttacaaaagtattaagagtttaaactttttcctttcttttatacttttttatttgaattttttttaatagatgtttcatttaatttttctttctatttgttatttctttattttttttcttttttatttttctcctgtcttttttcagtattattattttactattcattttattttttatatatattttttcatatgtatttttcctcgttatttttctttttatttttttcctgtccttttatatttttttagtatttttgttgttaatcatccactctttgtcgtttatttatttatttatttttcttttatttgtgttcaaaatttgataatattacatagttatattaatatttattttttattactttttttttcttatatttgcttaattttcattagagatgcctttgacgctattctaaagattcactcattataaaagtttcaccgttcagtattagtagctggttattcaaaatataaataattgattacttaaaatattatagttacccaaaatatgagtatcttgttaattaaaatataagtaactaattacttaaaatataagtaatcgattacttatgatagtataattattcaaaataaaagtatcttgttatccaaattataagtacctagttaccgaaaataagagtacttggttacacaaaatataagtacctaattagtcaaagtataagtacctagttactcaaaatataagtaattgattatccaagatagcacttaaaaaaagtacttagttaccaaaacatataagtacctatgtaatgccctattttttagacacgctacagtgactttctaattactgtgctcacttttgctaattaaaaagtttctcaaaaaacgtatcaaatttaaactttttacttaaacttcaaacttttataactatatacttatattcgtgtacaaagtcaggatcttgtttttaaaacatttattcatatttagaatactctttacaaaaatgttgcttagcgactacatatagaaacctaagtcgtcccaagattgaactctccaggtcaaccatcttgacatgtacaatcatcgtcgagctctggactcactgctgcttagccttagtctttcctttaccaacacatgtaaacaatatctgttagtcgacagacttagtaagaaaagcatataacacataatatat

SEQ ID NO: 316013 - DNA, 599 bp, Cannabis indica
aaaaatgtaaaaaaaatattctttgaatttaaaaatataaatattttacaaaaaatagtgcattatgtaattattccaataattgagaaaaacttctatccatgggcgattgcccaattttattttatttgttaattctttcttcaacttatcttttgagcattaggcattcctaacacgatgtacacataataaggaatttatataatttgtggaatttatataatttgtggaatttaataattaattgcaacaatgacaaaatcaagttgtggtatttgatattttatttaagagtaagtataaaatccaaataattgaaaaaatcgtttaaatcgacttactgaatactgttagaaccgaaatcgaaaaaactaaaaatcggaaaaactgctaacggttaaaatcatcattgaacgatcggttttatttagtaataaacagactgaaaaaactgaaaccggctgttatatattaatttattaagttttttttacatatattatagttactaataatatattattttttattaatattaaagtataaagaataagataattagttttttaacaattaatttatatgtttgtagttgt

SEQ ID NO: 316014 - DNA, 1025 bp, Cannabis indica
atagaaatacatatatatatatacatgttaaaaagaataataatgatgttttgaataatagtaatgatatattaatttttataataaaatttatgatgggattgtgaaataaagtaattaaaaaattgtaatgataatgagacaagatttttctcaaaaaaaaataaataaataatgggaagattatttagagtcgatcaaattcaagctaaataaatcgaaatgtaggaacaaagtgagtattaatttcctattcattcacattttaaatataaataagggataattatataatacaaaaatttttgtaaaaaaaattatttttttaagtttaaagagttttttttatatttttacgattttttatagaaataacacgaaaataacaagaaactacataaaaataacatcaaaacaacaacaaaaataatatacagataacaaaaaaataataataaattaataagaatacaacataaaaaagtcgtattttttctataataaaattaaaaaaaaaattagtaaacatgtttaaaatttcataaaattatatttttgtaattttttttattatttttgtgtatttgtgaaataatccttataaataaaagtggaaatgtgataattaaacatttcatatggatcattatttagtttatttgtgcaaatatagtcattatttattaataggtaataattgggtgtggagtgtggcctgattttgtaccggtatgtatgttgttttcttcaaatacttttttttttttttgtaaaaatctatatacagtagaaccactatatccaataatacacttgggagtaagcaaattatattctaattgagaggttttaactaaatagagttacacaagaaaaaaaaaattgaaaatatcaaaaaatatcaatgtaacaacaatgaaattaaacaatcctcaatattatatcataatagaattatttttgtagtaaatataatatttatactatgtataacaatttggaataaaattactaattctacataa

SEQ ID NO: 316015 - DNA, 1264 bp, Cannabis indica
aaagggttttatttagggcacaaaacccaacaaggttgacacctaacctggctcgatgggttctgctctttagaatgtgattacgtttcgaccattcaactatgttttcatagtaaaagtgtgttataacttgtgacaggcccaattcacactttgatatttcaccctttcaacaaggtggaatatcgacaaaatcaaagagtttcgagtcttcacaatttaacaaatagtgacatcttcgagaactggtgaacaacttcatcaaaacactaaaactgactatgtgttgtcaaaacattacttttgcatcaaaagatacaagtctgggatgctttagcacttacctggcatctaggttgaggtcagaatgtcaacttgggggctgggtgtcaagctgaacgctcaactgtcaacctagccgcaggttactaaacaactttcaaagctatttcaaagatgtatcaattcatgtctcatactaacatcataattctaatgattttgagtctaaaattcgtccccaataaagttgcaatttttcgagcaaataacacgaaaacgatctaatgaacgagattcaaagtccaaaaattaacgattttcaccaagagttaatttttaccattggatcatcatgaatcatcatcaattgccaagatcaacccaaagtactttttcatattttttgtatttttttaattattatttttataggacctccatccctataaaaggaaagctcctctagcttatttttcacattctgctaagtccccataaggtcagagcatctctctctactttctgtctccagaattttgagcctcacacttagccaattctttgtaagtgtcatgagaaataaaaactcgaagtagacgtagctccaatactgtcgcatcacgggaagtgagctactataaatttgttgcgtctctcttacttatacttaacactcattacattctttccagtccagtgagcgtgtgtggctagatatctgtgtccaaatttctttgacaacaatattgctattgaatgtctagtcaactttgtttgtggagcgaatgagatttttgagaacaagtatttaatatgaccgaatggcgaagaaattcgtcgcttacttcacatgggtgaggtttgggctttcttaggaataatgtaaggaagcattgattatatgcataggtaattgaaaaattttccagttgcatgaaaaggtcaattcaattgtggtgatcatggcacgccaacaatcatg

SEQ ID NO: 316016 - DNA, 1865 bp, Cannabis indica
tttttttaataaccattaagagtaatatccattaagaagtgttacatatatataaatggacgtctcaatgggtaattaattaatcattattttgaatataaatcttaatttaaatttgaattagacgttaattcaattaattaatcataatgtataataaatgtattagttatattgtttaaaatatataaacgtaattacttattttattatttaataaaattaagtagatattttttataaataaatttaaaactagattaacttttatatatttaaaaaatatcgtcaaattgtattaaatttaatttttattattattatttaaattaataattaagtcataacaactttatacaactattttgaaattttaatcacacaagtgtacgtatatatgaggtcgagcccacaagaactacggttaagtactaaacaattaaattcttaattctatctagtgacaataatttttaaagaatatttgaaattaaaaattaatttgaaaacaataaaagaataagcaaataataataattagagtctaggacaataaatttcaattgtatcaattttatatggccttatacaattttgattcttattctaatttcatgtgatagcagattagctacttcaatctatattcttatattatgatatatagtatttaaattataggtaaaagtcatacatttttgtggtaaattaaacatataattttcattaagcatagaaattacagtagttacacagaccatacaagtactttcgtcaaatatcaaaatctatgtctattttttttaaacgaatttatgtctatttcactatagcataatcaacactcacttttcaaattttatattgaaatcatatacaaataattggtgattaagcaattataagcataaaacataaaatgaaatagatgaacataagaaattagggaaaaattaaaattacattaaaatagaaaaaatctcaaacaatatccattaacactctaattagaaatttagctactcataaataattgactaaaactatattagctagaaacatatataaaattaaaaatagaagaaagaaattctttgaagatcaatagttgtagcctccaactatgttgagacgcgggtagacacgaccgataatgttttggtcataactcctttgatattaattgcttagaattaaatgattcaagatgttttgaaaaggtgaaagagagatctcatacttttattcacaatatttttcttgaaaaagtgaatgcaccatagtcaaaaattatcttgaatcttcaaatttaattttcgattacaaacaaaacgtgttaaacattcaaaacttaaaaattgtcacccattatatcttaacttcaaattctatgatacattcatcttattcatattatttaacacatatcttctcattttcaattcatattataaattttattatttaaacctgaaacaagtatagaaaacaaacgtaattctgcacaatataataatcaactaaaacacacatctaaaatactttataaaatgcacctaaaaaactaacacatcaaacaactcttaagaaagcatgcaattttactactacttagcatatatataattaaatagttatcattgacttgatcatgagacaaaaagccaaatcaatcatatataaatgttaaggcacatataattaacaaggatatatatacataaaatttgtttgcaggaaaatgtctaaacaaatttagattaattaattatacaaatttaaattaaatgtgccaaaggaggacggcaagaaaactacacattttaatatgtttttgccacaattttttaattaattatatatat

SEQ ID NO: 316017 - DNA, 561 bp, Cannabis indica
tataatttatatatatatagagatatgctagttccattggcctgtctagattcatatattatatgaatatatatccgacttgaagactaacatctttcatctcaataaaaagaaaatatgacaaattgagagaataaagaccacatcaattaaaatacaaagcaacatatatattaaaaaaaaacatcattatttaaaagaggataaaaatcatgtgtagcatgactacaaaaatctatcttattatatatatatatgtatctaccctacgtaaatgcgattacgtatatacataaataaatgatggaaagttttaactgctatggctggttttattatagctaaaaaattatatatatatatatgacaaaatattatctcaaaaaaatatatatttcaatataaatatatattataataattaatatttttactattaaattttttacactattgagttgtactgttattcgggacggacccattcacaataatgagcccccactaacaaaaatattgtcttttaaaaaattaaatgtaaatttttcaatttaataatta

SEQ ID NO: 316018 - DNA, 880 bp, Cannabis indica
ttaaaattcactattcatgctctacatttataaaacattattcattaatctaaacatatttagtaattgtttgagagttttaattttaattttatataggaatatgtgtaagtattaatattatatgtttcaaatgaaatataattaaaaaaaaatttacaaaaaaagtagattgatgtattttgaaaatttgatgtatagtgtactataaaagtttgaagtaaaataaagaaagcgaaattttggcaataagagtgcttttacatcatacatcaatttttttaaaatacatctaaaatttttttaaaaaatttaatatattttagtcatttcaactatataatatcaatatttatacatattcttatataaaaagcaaaattaaaactctaaataattaataaaatatacttagaataataatgttttataaatgtagcacataaatagtaaattttagagaaacttttaaatagcgaatgagtttttatttttattttttaacaaaatagtaaatgaatttagagcatatgatgtagcatatttttagtttagttcattaaatatcttaaataatttctattttagagtatgttatatgagtgctctaatcttgcaaaaagcactattcatttccttgcatactacaacaaccgaaattaaatagaagttgtaataaatttaataattatgaaaaattattaataatacaaattagtaaagtgttataattataattaatttactaaactgaaaaaggaaaaaacagaaatattaatataacttataaaacgttagaattataaatagaactatatttattttggaaaatttacacagtttactgtgttttcccattttctttcttttatactgttac

SEQ ID NO: 316019 - DNA, 734 bp, Cannabis indica
gtaaaataattccaacacttactaacacccttagcactatgactataccagtattagtagtgtaaacaattaataacacgcattcattcattcacatttatactttatgctaatcttaccttgcttcatgctcaggtgtgccggtcagcccgagtagaacagtagctcgacgctttacaaggccctatatcacaatatccataattcttatgagagacacgctaaaacacttatcgaggacttaaaatcaaaactaaagatttccctatcgatgaattccatggcagtatcacaaaaacaagaaaattagggttggcaaaactgatccaactggtagactgaatccccaactggaatttgggttcggtgggatttcttggggaccggttgatacaggccccctgaaccagaattccaattcaatgcagggaaccccaaaaatgtcccaagcacctcaaaacaatcccaaactctccaataatctccagaactcctgtatataccttaaataatctaaaacaagcaacaaacctcaacaatttactcagaaaaccaaaacaccattaaagatccaagttgagttctctaaccttaaatttgcccaacccacaccaaaaccttaccaattcagcttaaaacaactctcataaacttaaactaactctaaaacacaaaatcaaacaagcttctgttggaagttattttaccaggaacttagatctactcacaagtat

SEQ ID NO: 316020 - DNA, 2942 bp, Cannabis indica
cgacatcgttcaattattccatagagatagataagttttggcctctacttatttttcggtttgatagatgtacatgtccatagtcgacacaacggaaaattgttttatgataatggctttcacatagataattagcgtgaaacttttatatcatttcagtttcataacacactaaattattgactaaattagtatgtattaaattttatattattactagtgatagattttgaatctacactaatttagtgtagaattttttttttacatttaattcttattttaaaaaataatattacattttttaaaaaatataaaatataaatccttcatttagtattttaaatgtctataaataattgcacgcaatgcgggacctctttattagtttgaaataaaagaaaaagaaaatgtgggatttcttttttcttgagaaaataaagttgggcttctagcaaacacctctttagtagtgtaatatgagtttcatttggtaagtcgtattatgctgtatcgtattattagtatcgagcctagagctaggtccacgcctaggatccacccagcctagggacccaaataaagaaaaagttcttttaagaaatacacatatctcttttaataattttttaaaattacaatctattcttatagtatgggcccaaaaaattagtttttctatgacccaatacaactatagagtcgatcttgtattatatagtattagattaaattgtattttatgtaaaattatatgtggtattgacttttatgggcatataaatgggtaaatactattttagattttgtattttgcaaaaattactttttgagccctttattttgttaaatgataaattggaccatgtattttttaaaatagtactaaatagtactctgaattgattgttttgtcaaaataaaacttaataataacttgatgtaaaagtattatgacaaaacaagttacattttttgcatttgttattgttatgaattattttcaagttagttgtatttaaaaaaattgttgaaaatttaactcatggcctctttatattattttgaaaaatatatgatatattttatcatttaataaaatacatggttcaattactaatttttgcaaaacacaaagtataaaataatattaacccacataacttaaaagttcaagggcataattggagggagcaaaaatcttaattagcctaataaatattttgagaagcataacttagatagcaatatacctctccattatttatacctatgcatggagttttttttttatttcgtgcaatgacaaagctcgatcgatcgaattaatacagtataaaaataaatatttatacaaccaaacaaggaatcgttggacagtatctgatctgcgctaaaaggcataaatgaacaacattaatatagcatcatccctaaaaataaataataaataagtaatattgaaaagcttatataaatggattaataaattaataatacagaaaaaaaaatggagtagtcgtacttatctgatacgaagttggatcaatgaccacttattttataagtgggcggagagagtgtaaataacaccattgcattgacttgaccatatatttgactcccaataaaccttcgcatatgcccaaaatggtaaaaaattatcacatcccattggaccaacaacacaacatcacactttttcttttacagaggttttaattatttattattttattttattaacgttttctgatcattacacaaagtatagaggaaaaaggccacggattgagaatcttcttgattggtgtgagaaatttttggtcgactttcaaacggagaatggaagaagaaaacaatctaatgagccatgcagcacaagacaacatgaacgtaaaattaatgtagacgctgggattgttaaaggcaagggacaatttggtattggggttgctgtgagggttgcacatggatattatgctgcggcaacagtcgaataacaagagttgcgaccacttacagctgaattatatggattagagattgggattcagagagggcttctgaagttcactgtggaatcagattgccagcaagccattaatcttataaagcaaacggaggaagcttgccatggggaagatggattgatattccatattcgaaggttgttagatcatagtcaagtgggtgaattgtactttgtatatggggaggctaatactgtagctcacaatagccaattatgctttgtcttttaaagctagttccagtttggattagggttataccctcatgtgttaatcaagctatgagatttgattatccaaatcctatgtaatttcttttactaatgagaatacattttcaaatatatatatttatatacatatatatatatataatacaaatgaataattatgtaaccattcaaacaaacaatcctttttctttgtggcttcctttgtcttataatatatacatatatttatatagagcttgtttgttacgcgagattagattggattgaattagattatcttaagtcaattttttttgtcaaattagttgtcaaaatattatttaatttaatttgcatatttaagaaaattaaatattatgtttattgtgtcaatttataattatgtctaatttgtatttatttagtatgttttgcataattgattgatatcttcagctttactatgtgcatatcaaattttgtggtatttttatggcatgtattggagctaaaattatagctttggttatatgtggagagtttgttgattttgttggagcggtcattgcagattacgattttgtcgctgcaaattaggatttattttaggaacgtatcttacagttgtaaaaacatattgtgactactgtctctaggatttcaatattttataaataagacctagagagcagccaaa

SEQ ID NO: 316021 - DNA, 1387 bp, Cannabis indica
ctagctagtccaaaaccttcagaacttgagctagacaggttaagaggatcaccatttcttgacataaatccaagcctttacccttgcccaaattgaagatgccgacttggaggatgtaagaagatgtactagtacacctgaagtactttgagatccaaatagatctccgataagtatgtagagatgtgcgatgccgaatatttttggcaactctagctgaaatagcccaacaatggtattttaagctggccctaggaagatttaattcttgagaagagctctcgcgagagttctatgttcagttctttgcgtcaagacaaataccttctcaactggaggaccttgtaaaaataaagcaaagacaagatgaacctttgaaggactgcattcaatggttgatggctgaggccaccaacgtcaaaggcctgatagaggaaggttgatatatggccatactcggaggcatcctatcgttcaatgaattctggaaagatatcaagaggatctcaacgaacaacatggagtagtttcttgagcgagcttatggcttcataaagttcgaagaagttgttcagtaagcctagacaacagggcaggttaatgatggacaaacacaaggcctcatatctcccaagcacagtcggacatgccgaccagcatagacgatctctgttaattctcaaacaatgaaaattgtggaggcaagcacaacaatgatggctctaaccaacaaaattgaaaaagaaagaaatccaacgattcctttatgccatgaagcccaagggggaacgaggggaagtgtgcatgcttcactctcctacaaaaacatctaaagcaaatcatgtccagacatccccagtaggggaagccagtagtctgagggctggcctccatctacgaattttggccttcatcttgaaaggctagtgttatacccaaaattctgctgtatttcaaaaggttacacgtgtcagtcttagggaatatgaatcgacaaatatattgataacaatttcattaaataaaaaatggaatagctcatttaatgtggagttaataaagtatctttataacgcactgattgcacagtcttaagggagacaaggatgtacaaactattgattcatatattgacgagaaaccattttgcattcgaaggcataatcccaaggaggacatatataacgcatagtgagaaatccatctttctatgtatacgaaggcagtgacgaggcgagtcagttattaaaatacttagcgtataatatacattataataactaagtttaataacttgaaggacatgattgtccagtctgcaaggccttatggtcaaagtgaagttcttaaatttgcttagtcactgatgctcatgccattgctggaa

SEQ ID NO: 316022 - DNA, 1075 bp, Cannabis indica
aaaatcccaaaactcatccaattcaattccaaactttacccaaagctctaacacctaattagaccataacaaacatattccaactggaaaattcatcatcaagctactaaaactaaatcaccaataaaaggtcatttttgagcttaaaagctcaatacatgcttaaacacatccatgactaacataatcagttcaagattatacaaacatcaataaagaaactgtagaagcaagacaatccaccccaatctgaatagcaaccaaaaccctaaatttaaagcttaaaacctaactttctaaccatgaacttcaaaggaaacttggaagagatacttacctagaatggacactacagaaactagctaaaagtccttgatttgatctgaattttgatgaaaaccacatggttttcccttggtgttcttggtgaccgacccaaagagagagagaaagggaacctccaattttctagttctttcctaagtgtaataaatgaataatcaacctgattcagcatttaactaatttaattaagcttgagtttaattaaaaactcactaatttaactaaaggcaaaaagggtaaaataacaaatctaccccttgcataagcataaagtaaccttgtaacctagcgatattttggtcaatcctaataaccccaaataatcctgacataccaaatctctatctataatgcttcgctatttctaatgtactaaactataaaaaaagtgactctacatgccatacgtcttattccactatggccaggcataaaaatatagaaaatataaaatttatatataacataattagcacacctagaattccaatatatctccacaattgcataaataataattaaaaatctaattctgaatttaaccataattatctactaattctcatattaaagctaagtggtcatttgtaatgaccgctttattaatttggattagtaaaggcaattagcactaatttctgttatttttataattatttatgaatttaattatttttggacccagatatttgaaatgggcattagagttataatttctcaattccagaga

SEQ ID NO: 316023 - DNA, 898 bp, Cannabis indica
ttgttgggttatttttaataatcaaatatgtgagcttacaaattaagacaaatatttatttgagctaatattctaaattgggctaaataagtaatctaattaaatgagctcaataagatgtttattcggtatgggcttttgtaatttgtaatacgcaatagtaatcctaattagggtttaaaggctctaattagtttgctatataaagaacataagggtttagtccccaatgttaattttaactattcttcttctccattcccatcaattgagtgagaaaactcacatagaaaagattagtctgtggaagatcatatacctatcatctcatctaatgtccaatattatggaatcaggtatgtctttcatcttattgattcataaagtaatcttaataatctgacatgagtttaaaattcatgtgtatttttagatctaatctttaacataattgtgatgctgcaatttttttcatctgttttttttttttgtctctgaaagttagacggctaattatttgacttattttaataaattttaattctaaacatatctccaatataaagatgtcccaattaaattgttgcaaactattattttacttgattgtgattaataatagaattacattattatttttctcttttgtagttatatggcatattgatcaattcattttaaatgttttttttattattattttgaatagtaacatacatatataataactagggttgtacatcggtcggtttagtcggtttatactacatattttttaactcaacgtaaagatcagtttgtaaaattctgcatacgacctaacccaatttaaaaaaaaaaaactcttaacccgaccgacggtttgggcagtttggtcgggttaactcgcccaaaccga

SEQ ID NO: 316024 - DNA, 1179 bp, Cannabis indica
aaaaaattaaatgccaaaataagaatgaagttaaaattagttattatgtatttatataaaatttatatgttcgaaaataatttttaaatttagtatcgtttttaaagtttgattattaggcattgttgtgcacttaagcactaatcaagaatacaaaaacaagaaagaataaaaacttgaaacataaactgaaaataacaaaaatgaaaatggacggaaactaacgaggttcaatcataaattttggataaaacttggacctaatccctgagtaaaaaacaactttgttggctgtgttgatctttgctattgaatggaacgaatgaatattacaaacacttagatcaagaacacaaatacacaagtagtgataatccaatcaaacacatgggaatgcctaaatactaagagaattcatctcatttacaagctgagttttcttttttgtttcaaaattgatcacatctcaaaatgagtcataagactcctatttataaaactcagctagcttaggacaaagcctaaccaacttaactaccaattgtcaaagtagttaagagtttgtctaagtgagctaaacctcacaatttctacctggtttagtacacttagataacagagtaatccattccaaataaagtagctaacagaactgaatctaaatttcaataaaagtgagtctcagatgagactttaggtagaaccaatgttgagtaagtctagacaaagtctaaacttgtctattgtcaaactctttgtaaaagcatccgcataattttcttgagtgttgatctttctcatagagacttgtttggattgtatcacatctctaataaagtgcattttgatatcaatatattttgtcctctcatgaaacataggatttttcatgagatggagagcaatttggttatcatagtgaactgtgatatcttctaagttgatattgagttcacttgttaatcctttaagccatattgtttcttttatagcctttgcagcagccatgtatttagcctctgtagaagacaaaaccactactttttgtagattagattttcaactgacacaaccaccataaactgtgaacacaaaccctctcaatggttttctagtgtccaaacaacctgcataatctgaatccatattagggctgtacatcggtcggtttgggcggtt

SEQ ID NO: 316025 - DNA, 846 bp, Cannabis indica
ggattgaatacgtccgagcatagacaatacgacaagagctattacgatgatcaatttttgtttttgtttatactgtactataaccagttacttttatataattaacgattaagtaagttagagtatgtagtttgtatatattttaatttttgttcattttcaatttatagttatattttaccttaattaattagtgacattatataaattagtcaaaattaattaatgtaggaaaaaatagcagattttttttcctttctttactacaaaatgactggcaaaaaccatcgctgaaaaatataaaatttataattaaactgaaaattttactacaggcgactatttaaaatcgtgcctataccactataggtaacggtttaaaaccgtgacctatagtataggccacgtttttaaattgtagcctatactataggccacggttttaaaaccgtgcttataccactatagacgacagtttaaaactgtggcctatagtataggctacgattttaaactgtagcctataataggctacggtattaaaccgtcgcctatagtgttcactataggcgacagttttaaacttggcccatactagctatttccttgactatttttaaccgtcgtctaatctacccagtattcacgacgcttgtataggcgacaattttatagactctcgggaattccttacccgacagtgtaaaaccaacatgaatttagggttttttagtagtgacagtaacaatgtccaagaaatacaattcagaactaaaaccaaaacttaaacttaattgaaaatagacaaagaaaacttagcttgataatggatgaatgatggatctt

SEQ ID NO: 316026 - DNA, 963 bp, Cannabis indica
atcatacgggaaaatataaacaggactagcataagaaaactgaaagatcaaatatatttagacataaattgtttgagttaatcttaaaaagaaaaggcctgggatgggccataaaagtatccccttaaaaaaagaagaaattgtcttagaagtaaggggaaggacaggataaaaaacattaacaataacataggaagagatataaaataaatttcttagtcagcccaaggaggaatatgagggcccctgcgctcctccagcactgcatccagcctcttcttcttctcccggaagcgagccaaaacctcttcagtctaagggtaaaagttaagacaaagattctggccattagtctgccaagacatgaaaacctcatcatcgaagcgtttcttgctgtgctgacaggtgattggggccaggagagcatccctctttgctttagctgcatccttttgagcttgctccttttactcaagaagccccttcacctcaacagtcaaagttagttgttgtctgcaagttttcacctagtgcaaatcctttaaagacttcagcttagcggtcagttcttgaactgcttcattggaatcccaaaggtccctcctcgtcgcagccacgacctcatccttggccttcagcgcctcgtccttagccttgagcgccttccgctggctctgctccataagggactccttcttttgggcttcctctcggatggctttcttttgctcctccaactcccaaatactctgttggaattattttaccaggatctagatttactaccatgtttgttatttaacatcctaaatatgaatcacaaaaacaatgtaaataaacacatataaagtttaagaaaccttacagtgggtccagcgaaattaaatgactccttccgcttagaactctgacccttgtatccttttggtagcagagtatcaccaagatctgagcccgattctc

SEQ ID NO: 316027 - DNA, 598 bp, Cannabis indica
aagtgtggcaagtgtggacaaaagggacataacaaaaaaatgtccagaagaattacaaacaactattcagcaactgaaaaacaactataatgaaacatttagataaacattcatactattttttattggttgtttcgttatttttaactaaaactttttatcttgtgagagttttccaaacatattgttgagagagaatggatattattatcattaatatacaaatgacataaatattatagttaaatgattaaatctttggatgatcaattaaaagcaagttgtaattaagttgtaccaaaaaatattacataaaagtgtttaaaatgcaaggattgttgtttatatgatggttgtaatttggttgataataagatgctttcgtgggttaaaatgaatatataaactaaaaaataaaaagttgttacaaaataaaatattagcatataaaaacacattatagaaacaacaaattgtcttatgattgtcaacataatctgattataataataacaaaaactaaacaattagccctttcgccaaaaacaacaaagacataactaaaactaattcttttttggaccctttggaggagcct

SEQ ID NO: 316028 - DNA, 786 bp, Cannabis indica
gatactaattcgccattcctaacctagcttcaactcccctggatttaagtaatcccgagtttcaagcagcttcaatgaagagcaaacatggttagtaagtctagaatcaacaatctaaatagatttgtcattctctaaaacacatgattcaaaaataaaagtgttacctttgttcttatggttcaaaagtcagggacatcttgctttaaaatgtcccttctctccatagtgagaacatagaagaatacgtctacgtagttgttctttcattgtctctattactggttcaatttgaattttagctcttaaaattgaactcaaagaagcagaattgtcagaggtatcatcctcaatatcttcaactttcttctttcccttatctgcaactctagagcaagccctccttgcaagtgacaatgtccgctcataagcacgcgattcaacttctagtttatccatgttggacgagttaaagttattgatcacgtatgatacaacaaatttgttatactcaggtgaaaggctaatgagaataaactgaacccattgctcttttaataaaataatacccagcaagtttgctttctggaactttaagtccatcaaaagtaagtgtgaagtgacgctctgaccagcaaacatcttctcactatagagttcatttgcaaaggtatatagtagttgatgattggggtgagggttgttcattttgatactacaaatatcaataaacagaaataaattacttggttcaaataaattcatacacaaattcaaaaaaaaaaa

SEQ ID NO: 316029 - DNA, 1207 bp, Cannabis indica
ataataaaaataaaatttattaataaaaataccataaatttacttttttatattttaaagttataagtataattacctaacatgctaataaaatagttcgtgaaagaaatagacactacatataaacacaactactaactcagtcttccaccatcagaatgatcagattgttgaggtggattctgcgatcttggagtgacacaatttgtcctaaccaattccttcagctgtttaatccgctcttgcatatcaactatgacatcagctccaacatatgcaccagtctgaggtggaggaggttgggtaaatgtaggtggtccgccggaggtgagagagacgccgcggaacgaagaaaatgtcgaggacgatctccaattttgggttttttggcgagggttttctggtctgaaatgggaatttcatgttatatatgagagtttggagaatacaaagcaactgaaaaaataaaaggaaataaaaatgtcctcggtagaactaataccgtggacatgtccacggtacagaaacttaacacaaaaaaaaaaaattgcaaatttttcccgctggtgcgaaaatagcaataacgatgacatgtcctcgatataggtgtcctcgttagagacctagttttttttagtagtcatgcgtagccatgtttgtaccgagaatattagagaatatggcgttggacaaaaaagtagtcttcttttggtggtgcacgtattccctaggtcttacgtaggggtaataactctaacattgtggggccttatgtctagagggctctgtgtaagatgacatcccactactacaaaaaggggtattcgcgacagttctaaaaatactttaattttggagaaatgtcgttaaaaaattaagcaagtgtttaaaacttttagaaaaaataaggtattcccgacgattttaaactgtcaaaattagagagctaggtcaaaattagaggttattaatagtcggggaatacctgacggttttaattaaacgatcgggtattccccaattaaaaaatccacattaaactcttaaaaatcgtcacgatagcctcacaaatgttctaaacccgtcaggaatacctaatttttctcaacagtttaaaatattattttgaaccctgtgttttgcaaaagttactgatttgaccctctgttttgttaaatgacaaaataaaccttgtattttctaaaat

SEQ ID NO: 316030 - DNA, 3277 bp, Cannabis indica
gttgagtcctcttgtcgaccttgttcattacaatctcttctgtacgcccaagttttgcgtcttccagcttaccctgtttatcaaaacgagactcaagtactaagcattgatatagttggaaaaattcatcagttctttgaagaagtaattcaagaaatgtatgaagaatgtaccactagtttagtgttctcaagcctcagcttctccgagttctctgttaatcgatttaattctactttaagtgcttcgttctcagaagtcaacgattcaactttgcgtgcaagatcttcagtctcagcctgagcatgaaaaatgaaaaaattgagtccggtaaaacagaagaagttgtatctttctttcaataaagaaacaatttatcttttttatatttggccctggcagttcgacctggcaaactcccagtggagacgctgtttatgtctttcacgaaaaacaatagtcatagaagactacaacatataatcatcaaacaagccaatttcacattatctcatacctgcttcctcaaccttgacctcctagcagattctcggttagactgtttccttctttcacgcttcagctcccgatcattctgaaaacatattccagtaaccccaattaagatttttcttgaaaatgtgagtagaacaataaatatattgtgacaacagaaaagcatatcaaggcaatacctgcacccaggagtccgaaggcagaactgtacaggcttggttgaagccagaaggacttgtcttggggctcaagttagtagggtttctgagatcaaatgccgtggtcataccaggagaaactataggtccaaccaactttgctggtacgccagcagcagagagagatgcacccattgtcttatcagaaactgagttgacccgcttctcagttttctcatctcctattgttgtatattaacggatacaggtattagagcataatccaacacaaaaagataccaatttcgtacaaggttcaagtactagtataaaaaaaaccatccttgtggacttgggtataaccaactaaatccccattataatgccgcgggttcagaaggacaaaaatttgataaaaactaccactcaaatgcaaggtgtgattctataaaaaaaaaaaaaatggaaggtatgataataagttttgccattgcaccaagtggtaattcgtcttactggttagaaagtagtgataaaagaccctttatgtcattattaataaagatataactgcttaggggaagaaaaaaatacctgtagttggtgtctcctcacgacttctttttcttctgattcgatttgcctgctgaacacaacacaaaaattaattagtgtaaaaaaactcaatccatcaccaaagtatatatgttctacaacaattgataaagtcaacatgacagagatgttaataaaaggggaaatccctcaccccagaagtatgcccatcactgccatcacttgaaccttctgtctccgtactgcaaattattcataatttcaaattagcagagtaagatagaagaaaaacatcctacaaagtgccatttgaaaacgaaaaatctcccggacatgtgaagtattctagtacattgaacgccaatagattagtccacaacaaatcatttaggctatcaatgattagggaataaatactttttgaacaaacctttgtgacagcatctcttcagccctactctcgacattaccattgcctatcgacatggaaagtgaatcaaaacctttcatctttttctccaactctttctctgaatttccagacgattttgtaggcatttccacactcacagtcacaggagtaacacccagctgcatcatataacaagtaattgcacatttactaagaatgcattcaatgtacagacatgaaggaactaaaagatgaggatatacttacagcaggcgatgatggaaccccatgaccatgtgctccctaaatggaaaggaaaattgctaagtaagaggaacttgggatacaaatgcttgaagtttattaggcggaaaagaaaccaaaggaacaaaaaaaatggagtgaatcaacaatgagggaaccaagcatatatctatttagtacagcaaccaaaagacttctggtagataatagatatgctagttttgagatagagaaggtgaaagttacagacttttatactcaaactatgaacacccgggggatagtgtctcacccttaattaaagaaagaaaacagaagtctgatatcattttttttcttctttatcaaaaactctgtttattagaagagcataaacacttacaagagggactcgaggatgtgcatagacattgccatgtgggtagattgccgcataaggcgtcccaaaagagggcatcataggctggaaaaattattgaagaagtcagatgataatcacaacacaaagaaaaaatgagaaacacaacattcaaggagagaacttcttaatgctttgatgctatggaaattacctgtggtggaccccatagatagggatgaggagcatggccagaagctacagctgagttgtagtattgggggagagcaactcttggaccataatatgcctgaaaatgcaataaatgttattgaaatgattacaaggaccaatccacataaaatctgcatttgattaagcgaaacatgaagggtagataggtaacctgcatagcagcccaatcagggtatacgtgaacattggcctgattagtaggagtcgtctgatcctggagatacaaaaagatataccaacagtaagaaaaagtctcaattaatggtgcacctagaataaaagaaacctacataataattaagcaaacaagactgatgctttttgtaaatcagaaaagaaaatttctgccctcatcttaccggagttgcaggcggagaagttttctcgaatttagcagactttccctcttcgtcatttcccatagtccagtaccgacctggattgtttcaaatacaattcaagggtatgctggagatttcttgatagatgaatcacactattatacagatattttgaaggccaacttagcttcctacatcaaattgtacacaagccaaattgtaagaaagaacaaaaccaaaaacaaatgatattagagactagagttacatttttttaaactgatttattgatcaatattaattcatatgctaaattactgttaatttatgtttcgaaaccaaacgaccggaccaacataataataagctcaataataccgtgacaagcttagaaatg

SEQ ID NO: 316031 - DNA, 3169 bp, Cannabis indica
atacttgtgagtagatctaagttcctggtaaaataacttccaacaactacatcagagtagggtacttctgccatttcatcttgctctagtttggttttagggcacattgtcttggacatgtggtactggttggtgattggttgtgtaacagtctttgcatctttcatagaaaatttttctatgatcttgatgatgtaatcttcttcatgtagcattagtttccctttgtctctgtccctttgaatgttgatccccaatatcttagttgccacccctatgcgtttcatctcaaattctaatttgagtagccctttaaccttgtcaacatttgtcctttctttgctaattattagcatattatccacatatagtagcaagtatagatgacttgtttacttcagttcctttgaagtataaagaatgattataatagcttctattgaaaccttgtttggtcataaacgtgtcaaaacttttgttctattatcttagggattgctttagtcgatacaaagacttgtcaagcttgctcacatatccgttcttgcctttaaccacaaagcctttaggttgctccatataaatgtcttcttctaagtccccatgtagaaaggttgtggttacatctatttagtctatctccatgtcaaactgagtagcgagggataatattaattttatggttttatacttcaccattggtgagaatatctttgtcaagtctaccctttctttctgtgtaaatccttttaccactaatctagccttaaatctcactggttcatccttagtccttccttctttaactttgaaaagccatttgtaagatactacactcttgccttctggtctaagcaccactttttagatttcgttctttatgagaaagtatatctcttctttcatagcttcaaagcaggctttgtagtttctgtctttgagagcttcttcataggactgtggttcctagatttttgcttctaatttgcatatgtagacatatgcaatgctctcatcccataaattatagttgtatttcttattaggcttaggtattattctggccctgtccttaacaagctggtactcttcaaatcctctatgtttctatctttttcatcctaaatctcatgttccacctgatctggttctgcctgagattccacctgaactccacctaatctggatgaggttctatttcaggttctgtctcattttgggccatcccaataggtgtacctgcagggttagtttctgtaggacctacattgagctcattagtatttttacaaggaaaattattttcttgaaaaattacattcctacttatacgagttttaaaacttcctttcccttttacccataacatatagcctttaacaccttctagatatcccaagaatacacattttagagctctaggctctaatttccttatgctttgatgtgcatatgatgcacatccaaagattttcaaattagataggtcaaatggtttacgtgtccacctttcctcaggggtctttccttctatggcactggatggacttctgttgattaggtatgttgcattcactactacttcaccccagaatccatttgagagtcttacattgaaaagcatgcacttagcttttttcagtattatcttgttcatcctctcagcaacaccattttgctgaggggctttcctcactgtcctatgcctttagattccattgttttggcagtaacctataaactcatcattacataattctaatccattgtctgtccttaggatttttagctttctgttagttagatttttaacaagtaatttccaatgaacaaacttttgaaaaccttcatttttgtgtattaacaaatagatccacacctttctagaataatcatcaacaatagataagaaataggcactacccccaaaatttaggattttcacaggtccccatagatcaaagtgaacataatccaggattccttgtgatttgtgtgtgccagtttagaatttaagcctatgatggtttcttagtacacaaaattcatacaaatcaactttagttatcttatccttgccaagaaatttctattcactcatgagttgtaagccccttttactaatatgtcctagtcttctatgccatagaacaactttagtgtcttctgtaacatgttcttggtaaaacaattgtgattcttcatgtttggctccatctcgacatgacaccatgtgggccaaattacctcccccatggtcgaggtcctcatagctgaaccacgatgttaaaacatctccctcatggtggagtcctcatggttgaaccacgttgtcctatcacctcgagattcgcctgacttcatcacgtcgaacccattccaaggtgctccgttgcaccaagatgtctcacctcacaagtatgacgtgaccaacatgacatgagcaacatgatgtgaccaacataccaatttgacatgaccaacctttcgagctagacactttagatatttgttttgaaatattattttataatttaaacttaatccaaccatagttggaaaaagatatatgttgggttaagggactttaaaacctactgtgtaaacctatataaagggggagtggggaagttacttgtcaaagggactaaaattcattcttactctctcattctaaaaacttacttgaggattgaattcttggagaacataactttggaaaactcttgtcaagccttaagatcaataatactctaaatgggctagcctatgactgctaaaagggggtgaaccactataacattgcttgttcgtcattaccaaattgcattccataaactggtttactttgatcgacgtttatttgtgttcatcttgctcgtttacaattttttcagatttgttgacgaaaaaccgcgttaacaaggtccatataagaattacaaaatataaatgtgagaatttccatcagaagtgtcaggtgatatattgtatagcaattcgatagaaaatgttcaattgtattaaatgttgtgctcagatccagctcttccgtaacatttaattcaccctaatatatcatattaacactaggtggtgttttgttggaggtaatgaaatacaatagaatggaaaggaaataatttttattctatttctttgtttggtt

SEQ ID NO: 316032 - DNA, 737 bp, Cannabis indica
agatggagtaatcggtcccatgacatgaccatcgtggaaaatagagtaccggacactagtaacacaaaccataatcaatttgacccatatgtgatcatcaaaacccatttgaagcataatagcttttaagtaaccccattcgacacgatcgtagattttactcaatacagtgtctcatatagttaaagagattaaaagtttaatgatttatagattacaaattattaaatacaagaatgtttctagagtgaaaatattatactaacataattcatttgtaatagggtgactgttaggcttggagccgtattttttgtagtgttttaattgattgtaattgtttatcgattaaagaatgttattccatttttgataaataataataatttattcaaaataaataaataataataataataaattttaatgggactattttaacttatccttgtgtggatccctggacattcaattaaaattaatagtaccacaagagaggtccttttagtattcaacgaacaaaactgttctagaaaaaaaaaatatattaaatcttagtattatattatcccatccttttatagcaaaataatacatcacacatagtttaacaacaaaataatccaatccaaaacttttgtccgaagtctaaacatgtccttaaggaaagataatttttcgaaaagagcattcaatattgagaattagtggtactaaatatttttttttaagtgaca

SEQ ID NO: 316033 - DNA, 3732 bp, Cannabis indica
tgtgtgatatggctgcctcataaaatagtctcagacaacggaaagcagtttaactacgaagaattcacatatttctgcaaccaccacggagtcgtcaaaagcttctccccagttgcaagacctcaaacaaatggacaggcagaggttgtcaacaaaatactaaaagtcaccctaaagaaaaagctactggcttgcaaaaataactggcccgaagaactgccacgattattatgggcctaccggaccactccaagaaccacaactggacactccccattctcgatggtgtacgaatgcgaagctatggtaccagtggaaaccttgttcccatcccacagaagggcaacatatgatccgacaacaaacaaagccttactacaagaagcgctggatcaaatatacgagctccgggatgagtctcaggtacgaatggcagcttaccaaagaaaggtggctaaatacatcaatgccaaggtcaaagatagaaaattcaccattggcgaattagtcctacaacgggtctttccagccactcaagaacccggagtgggggtacttaggccaaattgggaaggactgtatgaaattgaggatgaaatcagctctgagacctataagctaaagagaatggacagatccagagtgtctagggcctggaatgctgaccacctccgaaaatactatcaatagttaaaagaaaagtttatattctgtaaaagaacctgtgccggacaaatgtatgcaacctcttatgtgatttttaaagactaagtgacctaaatttttttttgcatgtcacttagaggggtattaaggcatatcatatgggcaagaaacaggataaatataaacaggatgagcataagaaaagtaaaaggctaaataatccaaagatataccaattgtttagaagacaaataaatccaaaaaagaaaagggcctggggccgggacataaaatgtctccccttaaaaagaaaatagaattgttttataagaaaggggaaggataaaataaagaaataagtgaatcacttagtcaacccggggaggaagacgaggacccctaagttcctccaaaaaagcctcaagtttcttgttcttctcccagaaacgggccaatacttccacaggattagggtagaaagggagatgaggttcgaagttgttagctttccagcacatgaacacaccgtcatcaaaacgctttagacagtgttgacaagtgacttgggccaacagagcatccctctttactttagctgcttccttgtgagcctgctccctgaactcatggagctcctatacttcaacagtcaagctagatgttgtttccaaatcagcccagtgcagctcctccaaatattttagctcggcagtgagttctttaacttcttccttggaatctcgaagattcctccttgctgcagcaacaacctcatccctggccttcaattcctctggtggttcttctccataagggcctcctttttttgggcttcatcacagattgccttcttctacttctccgactcccagagactattcatcgcctcctccataccaccaaattcagacatagtatgtccatgatcaattaacgtcatagagagacgactagcctctactgcaatctagcagtcaacaaaaaaaataacatatcattagaaccttggatttggtacatggggttagtagaagcgcaggtcgcatatctcttcatgggcagttgggtcaggctggcaacaaagtggctcatcatcttcggggcaaaaggagccaggctaggtcccacaaagcgtttaaaccagtcggtcaagggatctaaattcaaatcccagaaatttccggcgtattcactttggacagatccatcctgggcatcctttagtaatttcttcagagcctccgcctccgcattccccttggtatgctcctccaagtcatagttgtacttagtaatccggagctgaaccatttcctcatcaggataaacaggagtacagataatacccggaggcacatgatactcatccacatcggaaggaatccccgagtcagcgctgggagctaaagtatccactcgcctcgatttcttaacaacctttgtctccaccattttacctttacatttgcggtcctttgaagggatgatctttccttcttcctcttcctcatcaacaaggatgacttggtcctcgagaacgctgtcagaatatctcctgggagtcaccactacgttgcatgactcgggcagaccagcctcagaactataggtataggcaagagcgtcgaggaggtcctccattggcttcgttgcttaaggaataaacgaagaagtctaaacattgccaaaaaaaccatgcgttcaagaataacataatgagactaattctaccgtggtgatctaattctttcatagcaaaggtatatattaaaaggctggtgtcgtcgtcccatagaaagctatccggggggaggaaccaactggatgtcaggtaagcggaatgatccaagaggataggtacaggaggaccgaaacccatccaggactggcctatgaaatgattaaggttggaaaaataaaaacttttggcgttataaccccatcgtgaatggggcatttgaaatttatgcaaccgatcatcaaattccactggcctacaaccaaagtaatcttgaacagaaggaacgtgatgaatagtcaatggagactaacaagttaaggaagtgctgacatcaggagccccagagttaggaactgggaaagggaatttaggctgggaggacgcttgttctttcccagcttccacccggaggatcctgcttgaggcagcttgggcattgatgtaggccaactcttgttccttcttgaataggtatttactgtatttgtcttccgcagaggatcaagatgatatcctctcgaagcaccttctcggtctcggggttgcggacattagggcaaagaactttggataagttgaaatcttctactgactggccttcggaaatcaacttagccctcctgcagttagcagacgtgaccaagtccccaacattcaactcatccttatcataattggcgaaaactttcgcacgttgaaggaagagttgggtaggagcagtacggtgcatagaaggggccctaacccactcggtgagaaactctagaagctcgacgactttgaagctggaagagaagaagaatcagtggcggtactcttttacattcttctaaaagttgtaaggcaccagaccttcattggcagaatgggcctggagcttgaaaaatccatctttaagtttgtcccccttcttgggggcagataaaagttcataaaagtataaaatttcagccggactgggcggggcccagttcttggcaacgtaaaaaatgtacaagcctgaaagtaggcggtaaccttggggaataagttgggcgtctcttcgtccctcaggaggcgatgaaaaacctcagccgcggaaggcttgatcccgacgacagtaacaatcttctccaattgatgagcgcatgtcgaagtcgagtgtaactcgtctgcctcccacctagtggacgggcaagtgtatttctcgtggactaccggacctttcattacttcctccaaggtggccagtttcttgggtaccttatttgaagattttgcttcgattgaagtaggggaagacatggtctgggtttgatgaagttctaaaatctcttggtcaaagc

SEQ ID NO: 316034 - DNA, 1402 bp, Cannabis indica
ctctctctctctctcaatatgtttcgtttagtgattgacaattttccacacaattcaagacaatactcagatcagtatgaaagattgcgtagaaagatgtttttgctattaataaggagaatccaagttcagttcgtgttattactctgcaacagaaagtatgaagggtaagagtattgaatggaaggagtcatattatttctgctacaaccaatgtaagagttcttatacttttacatgtttatttatctttttaggattattcatatttaggatgttagattataaactataattaacatacatgtttagtaaatctagatcctgataaaataagtcccaacaagctattcttgcataagagaggtgtttgctaacccaagtatgcacatttaattggatcttgtgaataattcgaccatagtcgaaagctttctatttggttggccttaagttgttgatgagatatttgatgggaaaggacaattcttccatgtgaacaaggttctgaatagacatcttagagtcctttgagacacccccaaaatatatatgagatttaattctgttttcagaaagccctcttgcggcacagaaatcatcaaaaactagttggatcataatgacagaagaaatcatacccttctacagaatatgagtaaagtaaagatttataagcttcaaggacatgcacattggattaaataattaattatacattattgtgtgtatataaatatgtgtaatttgaaccagttaattaatgtatctatttaattataattgagctagaactctaataaatacttaccctaattaggattttttttcccacgaactttgacaagtaccaaattgtacttcgaaaattttcaggacgttaaaaattctacctaaactattgagatgttggattcaaggacttctgtcaaattttgtttaattttacttacgtggtgattgtccatgtaccagatcgtcccctgaactttgacttatatcaaatcgtgcccttgaactttcatccactttaagcattcattaataaaatttaatggaagtccttaaatctaacaatttcaatatttcggggaaaatttttaaagacctgaaaaatttggaaggcacgatttaatgcatgtcaaaatatgagagacaaaatttgtaattagttttttatttgtaagaaaaaaaaaaacagtttgaatgagtagcaaatatatatacatataaatatatatttgtttactttatatttatttcagtccttgatcgcattcaaccttccttatttttttttttttgagtaaatattattttggatcctatgttttgtaaaagttactgattggaccttctattttgttaaatgacaacaggaaccctgtattttctaaaatgg

SEQ ID NO: 316035 - DNA, 2445 bp, Cannabis indica
  modified_base (2274)..(2274): a, c, t, g, unknown or other
  modified_base (2436)..(2436): a, c, t, g, unknown or other
cttaactaaactggttaacatattgaaagttaatccttacactaaattttttagaagcttaagagatttttctaatttagagaattataggattagaataaaattaaatgttgatctagatcaaagagtgtacaataattcttcagtgtctcaagttgctactgtatggatgaatgatgagtcattaggagaacaaagaaggcgagatattactgttaccactgaggcaggattctcatataaggtagactattattatggctgctatgatccactacaatatcctttattgttcccatatggagaaagtggagggtgtcaaggaatcaaaaagattaattatagctcaaaatcctacctcaaacaaagtatgatgaattagttgctttatctcgtatagggtcactcactgagttattacaaaaaaaattgttaaaaagcaaagaaaagatgaagtttgttgtagagaatattattgttacaaattacaaattagagatggagaaaaaacaatgatcttacgagcaggccgacttttgcaacagtatattattgatatgtatgtcaagcttgaaacatctaagctagactatttttctctaaagcaagatgatataagagctaatttatatcaaggaatcattgatagcttagagatgggtgagaatcaagaatctaaagttggacatataattgttctaccatcatcatttattggaggtcctagaaataggaggaaaagatatatggatgcaatgacattagtacaacgattcgaaaacttgatatattcttgactatgacgtgcaattcgagctggttagaaataataaaaaaaagaattacaagaaaatgatgaagctcaaaaccgtccaaatttagttgcaagaatatttagagcaaaattagaagaattaaaatcagagttattgaaaaaataaatatttggatattatagtattaatgtgttactatcatttatcttctataaaaattacatgcccttattccttccttcaaaaatgtcattggctacaaatccacaaagctctattcttcttgaacttgaattgcctgaagtagatactttaaagcctttacagaaatggtacaatatctatttaactatttttcttctcattttcataagcttttctgaaaactatacaaaactattgaaaacatgtataattaaatgtacattatatatttacaggttcattgacaatcattatacttcccaacttcttcaaagtggaaaaatccttccatcttttgtttatattgccaaaccaccaccaaatgaagaaatagaacaaatcaacttcatacagaatgctgaagaaaagataatttacaaacatatacaaactaaacaacaaatagcctttacaattgacaacaaacattttaataatgatttattatattttcagaagtcacactattggattaaaggcaccatctcaatggacaatcatcaccaaaaattttggtatatggcatgtgaaaaatgtaatagatctacatgtgctgactttgatgcttatttcgcatgcaactattgttggaatgataatgaaaaggcaaaaagaaaatagaaatcaaacaaaaagcagtagcaaggcattaaacacacttaactggcaaaaaaaatattttcttatacatttaccaacttttttttcctattctagatgttgcatctagatcaatatacatgactcaactgacacattacctgctacaatatttggaaagattactgaaactttcttagaatgcaccgcagaaaagctaatggatgaaactactgaggtattactatatattactatatagtgcttgttttttaatttattacctttactaagtgaacgtccaaattatactaacatttataatctactttataaaaggatggaatattgagtgttgaaaatcttatcaatatatatatatccaccataaagaagtatattattgagataaagatttctaaatatgaatttcgtcacaaaatagagcagaagtatattgtcgaacaactccttgatgacatccaagtgcttccaccaatttagttctatgactcttccacttctaaaacatttgcttctcttaatatactttgggaatgtatatattataggaactatcaatctgtagaagtttttttgtatggagcatatttttggatctttggtgactctttttttttggctcactatcctcgaataacaagtgattttttttttttgaatttttggctcnctttggattagttttttttttattttttggtttgtctcctttttattttggtctctacttcgatcgatttttattttttggtctggacttagaggttttttttgttttgttttgggttcgggactttagtttaggttttttttttttttagttttttttttnttttttttt

SEQ ID NO: 316036 - DNA, 737 bp, Cannabis indica
agtaagttggttgtggcccatgcttggaagtcagtttcccacccatggcccccgcccgagtgttcaaaaagttaagagcgtactcgggtagctctgcttcactggcacataactcaatttggaaagttgaactttctatttaaaaacctggagaaagatcttgactttctgcaaggctaatctgctggcgctcaggatcgggaagccgagcgcaaactccggagatctctaaatgaatccttagaaagaaaagctctgtactgaaaacagagggcaaggatctcttggattaaggaaggggataaatgctctaaatttttcttcctctctgctactattagaggaaggagaaatgctatagaaagtattttgaataaagaagacaaatggatctcttctcgtcacctcatcgatcaggaattcattgaattcttccaagaaatattctctagttcggatggtgcgcagatcctaaattgtaaccattatttccatgagagaatctcttcgaaagacaaggagacgatccttaggatcccgtactctgttctctataagcaaccacaaatccccgggtcctgatgggatttgtaatgaccactttagtaaattggattagaaaaggcaattagcactaatttctgtcattttataattatttatgaatttatttaattgtgaaccccaatgtttagaaataaatattagagttataatttctcaatttcggagatttt

SEQ ID NO: 316037 - DNA, 1880 bp, Cannabis indica
tgttgtatttatgttatctgcttatgcacttttctcaaagtatgtggctgcactgcctccttcaacatcttctcccagaagatgttgccaagaagccagcttaaggtataacatacccagtcaatatatacacatgatttccttaaggttatagagccagtactgagattggcttctttggattataatactagcgaatttaggagatacatatactaattcatgtcaatcagattcttttattatgatgccttaatttacagttgtgttattaactttctgtcattggagtaattagtttggaatatctcatcatgccttagtttattatgatgactttctctgaaatttgtatgagacatttatggactcttttatggattatttatttattgtgtgggactttggagattttagatttgtatgtatgtatataattatcatcatgccttttgcttgttaattttccaccatctcttatttattttttgatggaatcaccatccgttttttattgcatggtaacagaaccaaaagatctttcgctactatcaaatatttgcttccccatatttttctcaattttcttttagggttcccttcctccacactacatcatttgttttagggttccgcccttttggaccattcgatcattccttcaagaatgtgctgaaatcgaagaataccatcctgaaggcatgcccgtttggtgtacgcttcttgttcttgaaatcagaagcctcattgtccctgtatacaccattgaagaagacgtcaaaccctctttactaacatattcggtttttctgttattttgaagattttagtgtactgattttgttggtttgtttattcagctcatttgtttcttatctcatcctctgagaatttagatactatacattattttaaacccaaaactatgatcatttgtgtattgttatttggaatttgacaaagtcaaattttagagtggtgtttctgcaattgtagacgtcaatgggggcttcttggccacctcatgatgatattattttttatatgtttctcatggctgcccgctctcaatgcttagaccatttatccatatagctattcgcactcataaacatatcactttctatctctctataatttcacccactgctctcttattttcacctgcaaattggttggtggagttagcccacttaacaattttgagagctgccccattatagtttctaagaatccagtgcacctcccaaagataagggttgaaaggaataactcttagaattttttttaacaagaaagagtctcttccaatcacgcctgttggtttcaattttctaacgttaatataattagtatttatgtgaaaaaattaaattatttattagaccgtttgagccgattaaaatgtttatataactgattatattttgatagctagtaaagttatattaaatgcaaccacacaataacaaaaatgattatgtaagggaaatttgaaattctatacataataaaccttaatattatttccctaaacctaaatattataccataggccatatatgactacatttcctttatccccataatacccctcacatttgaaccaaacaaatccaaagcttctctctctctcgtccaaacgaccacccacaacctccacagctcaaccaaagagcacggctctaacgacctccatgaccactgacgacctccacgaccttcgacgaccaccgaggaccacccaacccccctctctcttcctctctctcaacccgtgagcgttaacccactcaaaaccccaacattttgcccacggtgacggcgcacggtgttgaggctttcgacccacccaatcgactgttgggttttgtgcccta

SEQ ID NO: 316038 - DNA, 855 bp, Cannabis indica
accagacatatgatggtcgcgactactgggtttaaaaacccataaaatctagtttcagcttcgaaaaatacatcataactcacccaaactccaaccccaaactactccatataatctaacaaaatcattttccacattatataactaacataacagagggttaaaacacaaatttcatgcatcaaaatcagatttaacaacatccaaactaagctccaaacctagagcaaaattcacatacccacacataaagaagctacacaaggaagtcactaaaataaatcaaaattcagcatacttttccaaccaaccaacccaaattcaacaactagaaattcccaaattcacaatccaaagcatacacaaagtaacccctttaattcacaacacaaccatggccacaactccataatcaatctaaaactcataaacatgcaatttcaagaatataacccatgatttcatatatactcactatgaattacaacaataaactcaatatccaaatggtagaaacactacctttaaatccttccaaagatcaagcacaaaactccacaacaccaagcttgaatccaagcaaagcacaaccaagattcaataactaaaatgagttaagagagaagaaggggaggtcggttctggaaagaggaaactagaaataagtctatttctcaaccaaaagtcccattttgattaaacataaaccaaattgccaaattacataaatgccctcaaggccatacttacacataacacacaaacaaggttactatagtcattttcatcacataccacatatttaattaattttcaggttaatcacatattaataaaataccaataaataatccc

SEQ ID NO: 316039 - DNA, 1018 bp, Cannabis indica
gatccacttaaggcggagcaatggatgagtatgataatatcaattttggtctcatgtgggttaagagtattgattgggttaaatgtatcgtttacatgttgcgttgagatgcccgcatttggtgggacattgtatcatagggctataatctgaataatatgatctgggatactttctagactttgttctattaaaagtactacaacaaatttattcaagctgctaaatcggaaagaatttatatggctaatgtggggtaatgtggcggtgatagagtatgccaccaaatttgattggttagcacagattactttagatgaaatggccactgaggcagctagagaggccaagtttctttgaggattgaaagaacatattgtttgagatgtaattgtagctgccaaataactaggagttgtccgcacttatgctcaagtagttgagctaacccttgctgctaagggtgtagaagatcaaattcaaaagagaaacagtatgcggagagattcatggaaacaagcatctgatgtttttttcggtaagggtgctgaccctaacaatgataagaaaggcctaatgatccgtcaactatgggaccaaacaagagattccaaggtcaccaaggttttcgacaaggtgaaatgaaaattggcgaacctatccaaagtgcctgaggtgcaagagatgctatcaggacaaatgttaagctagagcctgcttccagtggggctagtgggccatttgaatataaattatccacaattacagtgatcagaatagaagaaagatgacactttgattcctgctcgggtgtttacttgaacacaggaagaggccgatgttggtccttctatcgtgacaagtcagcttttattgatggtaccttgttggttgttttaaattaattctagtacaatgcattcattgttgggttttgtgccctaaataaaacccatttcaatataattagatttacttattaataaagatcacaaataacattttatgttgcatggtt

SEQ ID NO: 316040 - DNA, 1341 bp, Cannabis indica
aaaaaaaaaatactaaaattaattaacaagccaatgtttaaatcaatatcaatagattttatatatttatttgagaaatttaaaataattaattatacataaattcatgtatttatttatcttttaaactacctaattatttattattatttaaaaaattcaaaaaaccaataaaatatttattataattataatatgcatagttaaattataatttatttatgttttgataaacaaaatgataccctactatgaaattcctataattttattttttgagaaataatttgctattataaattaactgtgtactccgtttacaattacaaataaaatgggggagagaaaataaaaaattcctataatttatcaatgttcatgattttttttaatacaatagtgtgattaaggaaaatcttgtaatttttgttaaatttacatgcacaacaatttagattaacaagtaataaaaaaataatttaattttaaaaaagaattaatactagggatacactttttttttcatgggggtgtggctcgcgggaacccgcccctaatagggcgaggatttccagttgaaatagaaaacaaacggggatggaaattattttttgtccttaaatattaaacgggacagggacaggatgatacaaaatattttattttatatttttaataatattttataatttatagtttatgtttgtatttttttaatatattagtattatttttataaattttaaattatgttttggataagattgttatcataataattagtttattgaataataattaatgtgtagtattttaatttttatgtaacttaatatttttatatatttgaattttcattataaactttattgtttttttttgtattagggggtttcttgttctgtttcttctcccattgggggattttttgccccggaataagcgggatggggatcaaaatccttgacggggatagagacgatggagcactctcactctgccaatttctcgctccgtgtgcatccctagttaatactattttgaatctaatcttttgcaaaaattatactgacaaaatagactatgtattttttaaaattatataaataagtttttgagttaaattttggataatttttataatataatcaacttgaagataattcttaacacgaataaatacaataaatgtaataaattttttaataacacctctagattaaaagttttattttaactaaaatttaatttagagtactattttaaaaaatattaaatttaatttatcatttattaaaatataaagtgtaattaataacttttaaaaaataaaaaaaaaaa

SEQ ID NO: 316041 - DNA, 1952 bp, Cannabis indica
tttttttttttaattttacttagctgtgattggttctttaattgacaatttatatatgtttaatgcaattgattcatctaattatgaaaccttgcaaataacattaagaggtacaaaagaaaattaccaaatgagaattctatcatcttatggcacaaatgcttaggataaatctccaaaaggagaatagagagatttgtgtcaaacagaaaactaacacccttgattatattgaccttaatctttatgtcgaatgtatcaaagggaaaccggcaaacattaagaagttaagtgacaacaggagttctggcatcttaaatagatacatactgaaatatgtggtccattctctacagcttcttggaatgacaaacaatattttatcacttttatagacgactattctcattatgtgtacttatacttgatacatgaaagttcacaatccttagacgtttattaaggtcttcaaagcttaagttgaaaatcaactaggtgagaagattaaagttgtcaattttaactacagtggtgaatactgttatagatatgacagatcaagtaaacaacgtccatgaccttttgccaaattcttaaaggaatacagaatcgtcttctaatacataatgccagggcaatctcgcatgaatggtgttgatgagagataaaatagaatgcttaaggacatggtaagaaacatgatgaatcattcttctttacctgaattactttgggaaaggtacttaagactgcagtctacattctaaatagagtacctagcaaattggtagctaataaatccctatatgaactatggacagggaaaaagtctagtagtaaatacttatattcactataccaatgcactctgtaccataactgtacaagtgttggtagtgcgactaacacaaaagcatgcatatacacttaacacatatatacactcaaatattcatattacacattatacacagttcttaccttctttccagattcaagtgtgctgaccgacctaaacagaaagtcttgtgctagatggatgccctaatcacataatgaaactgggtaatcacatgatcaaaaccctaatccaggaaactcgaacccaccactctagattctgttatactctctaaggattactctaactctaaaataaggaaacacccaactaaggcactgaaatggacgagaattgaggaaatggaacattcggggtaccatgccaaaactggctaaccggttttataggtactggtaaaaccggttacctagtttgcaccagttaacccaaaaattccatttcttgctcaaaatcccaccaaatgcaaccaaaccttccagagtatctaattagggtataaacaacatattccaaccaataattcctagaaaaacacactgaatcacaatatgccattaaagacctaagctttgagtttctaagctcaaacttgagcaaattcaacccaacaccaccaaatcagcatacagaacttacaatcaatccaaattaaccctagaattcgaattatacaacaaccaaaccctaacagctcatatttatcaaaatcacatactcaaactaactcaaagtttcaaaaacacataaataaaggttctaggattttacctttgctttagactcacaaatatcttgcttaatattcagattacacaagatttgaagatgaaatccccctagtttgcttcagcctaaagagaaggagaaagagttttctatttgttatgtttttccttaatttccttaattcactaatttccaagaaaatgcttattactaatccattattcagcataataataagggtagctgccaactaaataataagccacctaatcaccttaaccaaaagactaaaatacccttaaatgcttaatcttaagctatttcaagcctaggggtaaaatggtcaaattccataaccccg

SEQ ID NO: 316042 - DNA, 541 bp, Cannabis indica
tgatgtaataaaaattacaatatataatcacatataaataaactaataatattccatgtcaaactcgatggatcggtcctaaagctgcattgactattcgctaccttatttattatttatttttatttggtattggataattcttttgtctagcttgttattattaagtactgcatgctagtgcatctattctctctcattctcaatgaaagaaaaacacacacaattactgtgtcgtttcgcaatctattgcttataaaggagctactacatcacttcataatatagaaggtaatatatacatatacatacatatatatataaagaactactcgtaaaaattcattagttcatgcttttgttttctcttttccgggctccattaatattaagtccctatatataagtactctctcaaaatgtatacgtttctcgtcactgcaaactggagaaaattattcctatatatctctctgctttcaggtgtctgagtactgaggtaacattattcattatattatgataatcacaaaaatgagtt

SEQ ID NO: 316043 - DNA, 853 bp, Cannabis indica
tttttatattatttacacgagttggctcccttttaaatttcagcctggtatataacatacaaatgttgcttcgaaggcttagagtaagattttcgaatttaaacaaataaaaatgattggacttgcgcttctctctctctctcttagcgatttcattctttttgatttcgaattctgagaatttgggggcgcatcgaaaccctagatttgctcccattgttgactgatccgttcgagctttcatgttttatgtttgtgtttttgggtttttgtattcgtttccttaaaccctttctccacggtgacctaaatttagagtcttggtttggtttgttgcgttttgaaccccaatatttagattacgtttgtgaccttcaaaatagtttctgatttgtttgtggttaattcccacaatgtatttacgaaagattagtggtgtgtatataattgtacgacccttgttcttctcgctttgagttttagtttgtgatggctatattatatttatttctattacatttgagggtttatattattatagtttttgctttttaaaatttcaattttgttttggtttttttaaaaaaaacaaaaaaagaccttgatttattatttaaaagttgtcttgtcgttttgacatgtttggtatgtgatttttgctgttgagtggtgtgtgattttttttgttgagtggtgtcgttagttttgagtggtgtgatttttgctgaaagttatgagtttgttgagttagaattgtcgtgggcttgggaacccccgagttgttcaattccttaaagaaatagtttttcaaaagagacccaatttagttttttttgtgtgagacaatttgcaa

SEQ ID NO: 316044 - DNA, 638 bp, Cannabis indica
ggtgaaccatcaagattcctaagatcactgcactcgtcctaaaaaagtgcaagtagattaatcataatctcgaaatgtcatctatctattatgggcacttaaggtttgaatgaaatgaaaagagtttcattcaaaatgagatgatattattaccttcttgaattgtccagatttttcagaattgaaatgatttgaactttccataagctttgtttcttcttgaagaactaatttatcatattcagccttctgtttgcttatacactcgtgattttcagcactggaaataaaatcatcatcctcaatctggaaatgaaaggcaactttatgagtgaatgaatagattatagattggcaattttacaataaaaaatgctttctcaagttaatcctaagagggaaaaagagatcaaaggattgacctacttacaagagcggcctgttttttcatatcattcaaatcgaaattccacgcactgattgcccgtatatactcttgctgcaaagaatacaagctttaagcaaggaagtatttaatgcatagaatagtgtagatacacattcttttgcagagatgtaatgccctaaagaaagaaagaaaaaaaaaaacctgctcatctccaaccatagcctttttt

SEQ ID NO: 316045 - DNA, 4799 bp, Cannabis indica
aacattaaatgttatttctgatctatattaataagtaaatttgattatattgaaatgagttttatttagggcataaaacccaacaatgaatgccctggtcggctactgaactggtattaccagtctcttgcacaccaggcgcgatttcatccacaggagtcgtcacaccgtgactcgcagttgatggctgtctaggatttatggctagcggaacccttatgtttcctgggttctccaatgtaggatccaccgcctgtggatgtgctggatcaaccacgcccctacgagtctgtaccaccatcgtacttgtgattaaattcggaataaagagcgatccttgatttttctctcaatgaaagcaccaaaatgttgacctcgcttttagccaacgacaatgagtctaattttttaagcaacaagtggtttaatatgaatgaaatataattaagcgaataaagacacaagaattttatagaggttcagccccgagcagttcggtaatagcccaatcctccttatttgtattgacataagaacaagaaaaattgttccttttcttagagctcttacaacagtatctttgaatatgaattcgtagaaaaaatttctcgaccctttgcccactgaatatgaatcactatttataggactataagcttggagaggaagtatttcccttctagttataattaatataagcagaaagattgcgtagttaatatagaatacactaaccgtgggatttggacagcttgccatatctctgtaatctgatcccaaagttatagggatttttttgatgactcacgatgcgaaagctgaatttgcttagtgttggggttttgcacggactgttcattgctcggtctaggggacttcgtccgaacaaatgtatgaggtgccctgttcggcatgtgtcttgcgagcaggtacccagagttgattccacgtgtcatcatgaaaaaattgggataacagtataaaatgtacaaattaagtacaatagtcaagtggactccagacataataaacaaaatgcctatctcgctaaaggaaggctcattcctataacttcccccagtttacttcagacatcttttcagtgtgacttaaaagctaacatttaaatgtctactggggaactatctgctaataagaattgcagttaccggaaggaagcattaagtctacaaacaaagagacagcaaggcgtacttcatcaacctcaggaagataaaagagaaaagcttcagcttgctatcaaggccattggaacgaaaatcctatcgagatatcccagaattctacaattaaagacgtgtttaattgctagatcattttgacccagtaaaagcgagaaaatcacagctgtgtgattttcaaataataactgcaattatattgcgtgatatgtaatcaaaccccatgattttaggggaaaaatgttgtaaaaattacagtcaactttgtaattaattgcctactatgtgactataaatagtggcaagtaagataaaaaacagacgacgaaaaatcatacaaaaaaaggtcttgaaaaactatcagcaatctaataagattgactcgtggactatgtagaattttaactgcaaaaccacgtaagaaatcccttgtgttcatatctcttacttcattgctttaattttttctttgtgaaactaactgtgttaggctcaaattttggttaataaaaatctgcgttaacatcggtctagtcaaatgtatagcaaatacatcttatataagctcactttactaatgctctgaaaaagacattccacttatgtaagtttaagtaaaccatatcgttgattatcacattagtgtaaatctagtgcactgatatggcatgggactaaatgtttgaattatataataatgataattttccactgtacagacaatactataatcatcaacaacaatatgagagggatattgttgtacccgaaatttggctaccatctcagtggaagacacgtgtcaagataaagggaatacaaatcgatgatgtcactttttgtgcaataactcattaattgcgtaagtagcagagtatattcaaacccgttgactgtaaagttttatgcggggaaaagatatacaaattgttgcttagtatattaacgagaaaccatatgtcattaaaggaatatagcgaggcatcaagtacgttacatctggaaagacaaaagcgacgcatatagactgcgaaaacactagtacataacgtacaaactaagtataacaagtgggttggctcgagatccgataagcgaggtgtctatctcgctatgggaaggttcattcctgtaacttcccccagttaacttcagacatcttctcagtgaggcttacaatcctgacgagtcagaagctaacattcaaacaagcctcgaagaacactttgttaataagatctgtgatcgtcacaaagaagcaacaaggcatacttcgttgacctcagaaggataaagaaaaaggctctagctcgctattacggtcactggaaccaagtccctgtcaagacatttttggacgtaacaattaaagacgtgttaaaacacacaatcatattgacctaataaaagccaaaaaaatcacagctatatgattttcaaataataaccgcatttacactacatgatatgtaacaaaccccatgattttagcagataattattataaaaagattacagtcaactttataattaactgcctactatgtaattataaatagtggtaagtaagatcaaaaaggggaggaaaaaatcatacaaaagaggccctgaaaaaactatcagaaatctgaataagattgactcgtggacaatgcagaattttaactacaaaactacgtaaaaaaatcccttgtgttcatatctcttacttcattgctttcattttttctgtgtgagattgtaactgtttggctcaagctcaaattcggttaacgaaaatttgcattaacagtttggtgctttcattaagagcctctgtgaaaaggctcagaaaaaaaaaccctcctttcttttgaagaaaaataacctccttcatggctcaaaacccagaaaatgttaataccccacatgaggaaactcatcatcgtcttgggaaagggcccatgggctccagaaggtctaccaacccgtagtctacacagaccacccgttccaggaggactaaacatgagggtcgccccagcacacggaccactcgttccgagaggacccaacctaacgttggtcctagtacgcgaacaacacgctcgaggagaactcagcgtggtagttgccagaaccctgggacgagggatgaagagcccaatcgtggaggtacccagtctatggtagaaggtacttatgaaatggaaaactgccgcctaagacactgtctggaagaggagcagcggcagaacgctgaattagaatgtgatacagccgcaaccagggcggcacaggggacgaatgctcaaaatcaatctaaacttggagtgaggagaccacgaggtaggcctcgtggcttgcgaaccaggaaatatgaaaatgcccgggaagaacaacccagtgaagatgagataccccctgaaaatcagaatgatcagcccgaaccccctcactgaaatgaggatgggaggcaaccgaaaattgatgaacgagaaattcctcatgacaatgaggatgatcttaggactcaacctggagaacgtaggtcacttgtaagaaatcactagcatttttcccgaacacatagagcgaggactcatacggaccctaatgggggaaataagacaaaccacactcagggagaaagaatagagcgtgaaaaagcaagtgtgacctcgaggcagtcaaggacccacaatcgatcaactcgaagaggagaaagtacttaacgagttaatgattgagaaatcattggaaccagtaaatcggcgagtcactaaaagacgaagtctttgagtaggacaaagtctatgagtaggacatgatctgtgagtaaaacgaggtctttcagtaattactcccaactggatctacgcgagcacttggatcgaaagaaacctgacctttgccaacaactcggtccaaagtaagaggatcccatccaattgcgaataaacgaactggaggacaagttcaggagatatcaagtgggggaactagggagacaatctggatatgactcagacaaggagcttgagctgtatcatccagatatcatgagtaccccttttccttcaggattcaaaaacccgcatgtctcgtcgtatgacagaactactgatccggtcgtccatttggacaactttaatacaataatgcgagggagcaatgtgacgagcaatttacgttgtatcttgttctccacctcgcttgttggagcagcgagcagctagtttaacaagtttactcaccattcaataacttcctgggaccagctgtccagggatttcaagaaacagttccaggccactagggatagacgactcgaagcgaccttgctaaccaatataaagtagcagcccgacgagactcttaaggcatacttaagtcgtttcagcacggctgcgggtagggttaggaatttggatgatagtacacaacttacagcccttccggcagggatctctactgatccatcaaccgcagggggcgagttgtgggatgacttacaaggtcgtccagtaagaaacatcactgagttcaacgagagggctcaggtatttgttcaaaaagaggaagcccaaaaagaaatgaatttgttgaaaataggct

SEQ ID NO: 316046 - DNA, 950 bp, Cannabis indica
aaatcgaactttgcattccccatagttgccctggatgttcttcacgcacaaccacgctgagcttgtctcttctttgaagctcaagaacctattcagctatgataccagtttgttaggaatgaacgattcctatacaatcaaccacattgatccaagaacactacaaaccaatctagaacagaaagtgaagtaaaagcttgagcagtaatgctcctttattgtttatattgtaaagtatttacaatgagtgtctcaactgaaaaactagttacaaaatgaattagacaaagctataaatagctttgtcctaggtgtcaaactaattgctaaccaacatatctgtcaaggaaagtctttacagaataatcgaccatatctaacatgcacaattagtttgaaattaaatatctctaagcaattattgcacttttcacaatagtggctgaatatatagccagcacagaaactgtgaaataggctctttggctcaaagagatctctagagagttgggaatcaatcaaatgatcatagtgattcattgtgatagctagagtattcttcatttaagtaagaactaagtattccatgaaaaaacaaagcatatcaatgtaaaactacatttcattagtaacatacttgcaagtgacaaagtgaagttgtcaaagatttcaatagatgacaatcagctgacatgtttatcaagtctcttcctacagcaaaatttgatcattgcctcagatttttaaacattgtcaaaaactaaattgtcaaagtctagtcattacaaagtcaaggttgataatggctgtattttatatggctttgtagtgaatcacatgcaaagaaagttggttatataactaaggtagcgtttagtcggaggtaatgaaatggaatggaaagaaaataattttattccaattctttatttggttgcaatttaaagtat

SEQ ID NO: 316047 - DNA, 2400 bp, Cannabis indica
gatgttaatgaaacatacttgttagtaaatctagatcttggtaaaatatatccaacagcgtgtcctaggtgtcgaatgacgaaccgacgtgatcctgactaggggtctcttcaatttcggctcatttaatgctaattgacaattctgccttgaatcacaattagatgtctgcgcgtgttgacagttactctctagtaatgagaacataacgaatacttttatggggaattcgagtaatttgaatttttgaaatgattaattcccttttttggactgcttataaataggatcaagaacctttggtgatccttttagccattctcactcttgaaaaaccagagcagaaaatttccaaacaattgtttctcttaaattcttcgaaggattcatagaaaaactcttgacgacatcatccgagcagaataagaagcttcaaaccagtgagtaagttcatcatttcttccttttacatatttgcaatgaaaatgcatgcttaattttccgggtttcttgctatgaatcgtgcctattcttgaatcgttctaggttaaccatagaattcttaggttaaaagtctagaaatcttcattgtattcaaccacgatgtctgattgtctaactgcactttgaattgtaaccttacaacattcattttcactcatccattaggggttttagttaaaatcagattccaattcaaatttttgaacttttgggttgaaaattttatttttgggtgaaatttctacttttgattactcaatcgaacctggtcggtacatccaacctgtttttcattcgttgctccgatcaactctcactttcttgtctcctaccttttataaataaaccctggtgaattttggggaggcaatcatcatatcgatcaagatctgcttcaacttctatacgaggatcatcctcgtctctgtgctagcccgtcttcatctagtgacaaccttttaaattctagctttgaagattgggaaataagtagcgaacatatgccttccccgaaacccgaggtgcaacatcatttctatcccgaccagattcaaggtgagggacacggtcatttcatctaggaactcaagaaagggtggatgtgttaccttctcactaactagacgtacatagtccatttgaacgtggttgacactctgcccgagggccgtccaaaccctactattgtgggcaaacctgttgttgattttgttgtgaccattgccaggcatacttcagataagattctgcccagaagtaggatgataacgtggaccaaaaaaactgtacataaatcttcattgactgacccgcatgtttcccgtctcgccaccctgcctagggcagaatagactcgtcctaccactaaagaggaggatactgcgggggacattgaagtccaagaagtggaggaccagagcgaggtccatcctgctactccttctgatgctaaaggagatgagtaagtgggagtagctcaggtgttgccatttggtggctacaatgatgaaggagagccaatttctgaaggaggcgatgttctggaggccagggaggactacatcatcaaggaatacaccgaggctatccctttgaggaggagaagttcaccaggagatcgatagatttccccaccatctgtggtaaccatgaagaggatgacaaatctgctcgatcgttgtcttctagggaatgtagaatgcttccttccctcccccgaccaactagccactgactcaagataagattattgtgcctgatcggaagctcacaccaaacaaggcgcaatgttgcccttgctcccatactttaagaaaatagccaactactaccacataagtccgacccagttcaccccccaagggccttaagtatttgtcttccctgtttgtactctatgcctcacaaggatgggtgagtcgtgcccccatgataccaactggtttttgatctaaagtcaagccccaagcagaacaggtcgggatacttctatttctctcaaattgagaagtcatggttgatggggcacgacagccaccgaggtgacaaagataggaggcttcattgacgaatactactttgtcaagggatggataccacgtacaccagttttcagcagatgtcgtcctattgccgcccccgttcacactggaactcagggagagggctacaaaaattctctaactctcccttaccgaatggaatatctctcccctggctactgacgctaactttatcaagtacaaactctatccagctgatgttgtaccaaaggctgaggcaccataggagactgtgttcgaataggaggctccgagcaagaagaagaagaagagaaaatgttggaaatattttaccaggatctagatttactaccaagtatgtttcattaacatc

SEQ ID NO: 316048 - DNA, 815 bp, Cannabis indica
acaacaagttgtagaggctcggtataaactgtttgggatgccttgggaaaaggcagtttgtgaatctttcctaaacagcaggcttcacaaacagaattagagtctttattgattgagatgttacaagattgtagtacagactttacaattttctgagatggatggccaagcctattgtgccaaacatcccaaactgtaagactattagtattatgactacaacttggacaattattgactatggattcacttggaatgggctgagaagatgccacaaaggcattgacagagggctggggtgtaagtgtagactgagagggttgaatttgaggagaaggttgcagctgaatatcctcagattcaaacgaatacaggccattcttgtgtttccccatgagaagagtagcatgtgtcacctgatctttcacaagacaacagttagcatgaaactgaaaatacacaccattatcttcagcaaatttagatacactaactaaattcttagtgagagcagggacatgcaacaaatttttgagaagtaaaggttgagaatgacaagatttctgagaaataaaagtatgaccaatgtgtttaataggcagacctgtaccatcaccaacatacatgtgttcagggccattgtattcactgctgttcataatgttctgaggatctggtgtgcaatgattagttgctcctgaatcggggtaccagttgctgtccaaactctgatttgcagcagcaatgttggcttgtgcagaaggtgaagctgttgagctagaggcaggagtgttactaaaagatttgtcaaatct

SEQ ID NO: 316049 - DNA, 829 bp, Cannabis indica
tttttttaaaaaaaaaaaaagggctgcgcggtttgagtttttttttttttttttaagagtgacagttgaaaagggtttagagagagaggcaatattatggtgaaggatagagatgatggtgcggtgggctgttggatatgatgaaatggtaaactgtgtatttatagatttaggaaagggggcaagacgcacggctccgcagtcgatatttttaattaaatttattatttttattaaataaataaaagttcaaaatatttatttatttattctgaacaaaaaaacttatttttttaaaatggacaaataatttgaaaaacaataataacaataatttataacgaattgccaattatacgcgcctgcgcgtgatgagaaaagattaatcgaattcaatttgttggaaggaagtggataaaggaaaggtgttttcttatttggcggtggctcactccaatgttcgctaataaaatattgttaatcactattattaaaatagtatatctatgttaagtgttattttattttttatttaaaataaatacattataatttaaattttaattcataacacatatcttttatcttttattttttattttatattttataatatatataattctttttaatattacaatttaaatttatattctataaaatatagtatctttctattatcaatttcttaactaaattcacatgcgaaattatatttctattattattaaaaaaaattaagataaatgtatgattttttaaaaaaatatatattataaaattaaaaatattacacataaactaaaattataacaataaataattcata

SEQ ID NO: 316050 - DNA, 865 bp, Cannabis indica
gagatgggaaaaagcattcgacatcttccaggtatttgtccctttccaaattcctcatcttggcttgggttactatagatggatgagaaacccaccgagctcctaaggcaccttgccttctttgaggaacaacttcagggtattcttcagtgatgtagtcatcaccatctaccaagacttcaccggcatcggacacgggttccccttcctcattgtaaccactgaagggcaatccccgagcaacttcctcctcctcggcttcagatggactgtcaggatgggcttcgccctgatcctccacctcttggacttcgatgtccccttaattatcctcctccttagcagcaggtcgggcctgctcggcattgtggcaagctgagcgacgtgaggatcagttgaagcaattctccgcattgtttgtttagtgcgggccatcatcctatttctggatggtatttaattggtgtgcctagcgacggtcacgacaaaggatgctataggtataccaaaggctgcaggacttagtcagccccacgggtatagtatcaactatatctcattgaacgatgtatgtccaattggacaacaaatattgtctccaccttttcctaagtttccaaatgaagcctccgtaacctttacctacgatctggtcgggatagaaatcgtgttgtacctcgggttcaagggaaggtgtgctttcactgcttacctcccagtctttgaaactcgaattggatagaccgtcacttgatgaggacggactagcgtagagatgaggttgatcctcgtacagaagttgaagaagatcccgatcgatatgatgttctcctccccaaaactcaccagggttcatctataaaag

SEQ ID NO: 316051 - DNA, 563 bp, Cannabis indica
actattccaactgatatattttagggggtatttttaactacacttataaattaaggggcatcatagtatagtgtcataagtacagggactaaaaaagctaattattgtcattttaataactttggtttagagatattggaccatcactcggtcttgtaatatttggtcagctttcttataaaatctttagctaatattgttgttgttgttgtttttttaataatttagataatattgttaaacttatacattttatttttttgtttcattttttttagttaggtaaatgaatacaactttctattggagtactaaaattatgattatcgtagaaaatgagaatgatacgaagcatttacctattattatttcttaatcattctcatatacattattcataattttaatttttttatacaattttgagcaaattttaatacatacttgttcgaaaccgctcaaagaggggcttcttttcctagtttgaacataaacagaattatttatttttgggagttatatttacaccatttaaacttataaatacaccccattattaaaaa

SEQ ID NO: 316052 - DNA, 1167 bp, Cannabis indica
tttcgccgattataatcaacctcttacctctttcatctcctctcttcccccaaatcacaaggtatataactatcatcacttaattatataccatcacaaatttaacaatctctataaaatattacatttttattttttacaattttatgttgtaggtaatagtggtggggcatagcgctgggggtaagtctgtaacggatgtcatacttaaatttgctgacaaagtccatatcgctgtatacgtggctgctattatgatcaatattggtaattcagcttcaaccaatgaacatttatcaaagcaagtaagatcatttgctctgtttactttatatggattttcttcattcgtgttacatgttatatttgtgttcctattatctaggttcatatatttaattggtctattctaatttgtcttgtatatattttgtgttaaaaaatctcaactttatgttctcgtgtctacctatcatgttcgcaatatcatatataaattatctatctaattatatatttgaaagtattttttctttctaatttatatatttttctatgaaaattaataatattttaattataaattaataattttaataatatattaaatttaaacaagtaaatttgtgttgatttcaagtaaataataatattcgaattcgacccaattataatctgcatctatattttttcatgaccttaactctaataatttgtattaagtttgtatcgtattatcgtatcatcacttgaatacaaccttagggttaattacatcttccacggtttctttttgagaaatggttcatacattatggtaacatatgtattggttatatgaagtaattttataacaaaacatgagcgtataattttaactatttaattaaaataaaatgacactgctacagtaatgagatctgggaaccgacttctaaacctattgcttcagttcacaaaaccttagtgagataattgatatcatgtgtaagcctaattatattgaataatgaattgtatggtattattacacataaagttaattcaaatgtatcatgaggtgtgtaatgattatttttggttaaatgtactgtggtagctaggagatgctaatgcatatgagttgatatatggacttggattggaccagcctccaaccgggatcat

SEQ ID NO: 316053 - DNA, 843 bp, Cannabis indica
ataaaaataaaattaaaataagtattgaaattaagacaaaataatgtaagcaaaaatccttaaaagattcactcttctaagagtttgggacctgatgggtttggttcgggattcttcaaccggttgtggaatgagagtggggaggatatttctaagggtgtgttgggtttctttcaagatggtttgatggcaagtatgctcaatgaaacgaacatttctcttgtgcctaaaattgacaatcctaaagatgcgattgattatagaccgatagcatgttgcaacaccttgtacaagtgcatctgtaaaattatttgtgccagattgtttgaaatcctcccgattgttattcataacaatcaaggggcttttgttaagaaaatatacttggcgtataaaattctgattttccaagatctactcaaaggttacactaggaagaacatcttggccagatgcattataaagatagatttgagaaaggcctatgatactgttgactggttgttcgttgcagatttacttaaagggttgtgtattccctgcaaggttcatcaattggatccttatttgtctcaaaggtacttactacaatttgatgatgaatagtagactccaggaaaagtttaaaggtgaaaaaggtctgcgccaaggagatcctatctctcctctcttatttgtgcttgttatggattatctgaccagatgcttgctctattattccagtaaaacgagggtttttggcttttcacctgctgtgtaagcagcttaagcttgtcccttatgctttgcagacgatctgatctatcttttgtaagggtaatgagaactctgtgaggttagtcc

SEQ ID NO: 316054 - DNA, 763 bp, Cannabis indica
cacctagtatatatatatattactattggtttggtttgccccataataatatataatattcataaataattatatgcttagaagtgtgttgtaatcaaaactacataaacatatacacatataattggttacggaactagagatttctattaaaataacgacaccttataactttaaatgtttcttttataatattgtagaatggaatttgaatttgggacatatttcttaataagcatattaaactatccttatgaatcttatgatcgttatcgcctaaatataatcaacactttaattaaattaactagttattatgtacttatttatatttttatttctctttgatgacaccacataactaatcgaagtcttgaactatatacacataagtatattattattttttttttctatcaatttgtgattgtttataccaaccaaaaattaaaataaattatagtttttcactgtgcacaaaaataaattacacctaatcactactaagtcctttaactcattaatatatccttagatatgttagactatagttgaatgtaatatttatttattttttaaattcaattttatacaaaatataatatgtatttatatattttcaattttgtagtccgtactccatatatgaaataatattaataattgaattcaacaaaatccacttttgtagctatacatatttatgaaagtgaaacacaaaagcaatctgtagggattagcgacccactgtgtctcgtagcta

SEQ ID NO: 316055 - DNA, 754 bp, Cannabis indica
tgcatcgcacgtaactttttactagtatatatatataaatattataatttcctcattttaattatataacttgtttataatatgtctttcttataccattcaatcaaagacgtaaaagttgtattaattatatttgacataaaaaatatttttgtgatatatttgtatgctctagacaaaagaaaaaagagaatgtgcaagcttaaaatcttagttttagtttatttaaaccatagctagctacaacaaattaattaattttgaaatgatattaaaattccaatatctaaagtactcaatcatgaatacacatctatatatatcgcacttggaaaaaactaaacatagctagcattctaaaaaatatattttcagtgataatttatttttatctaaaattaactacctaattcattttttaagatattttttcctagaagagtcaactctagctttgactacatttcaaaaagtcagtgtaagacctaatgtatgaaagcaatttgaaaatgatattaggaattgaaagaaatgaaatgaaatgaaatgaaagggtgtgtaccttattttcagtgaacgtatggtcttcagcctctacgagttctctactcctccaactcttcatcatctttacttttgggcagtctgttatatacaatgtctccaaggccattggctgatgatgatttataaggtgaagttcctccatcacacttgctctgtaacaccccgatttcccgagatgtcacatagg

SEQ ID NO: 316056 - DNA, 751 bp, Cannabis indica
ttttttttttttattaaaaaatggtatcttgtgtaattatctcttatgtttaactattcacatatatatatatatattaagttattaactgacattgctatttttctaagttctaaccaaaaaaaataaataaaatagttagcttagaaattaaaaagagaaaaaaagagtcaaatcatattgctttatgtacggtaacaattaacattatgggtaacaaaattacaagttcaactaatattactgaaaatacagctagtaaaaaaaggagaataactattacaaaatgagacgtagttttccaatgcccaacatgacgccttcccattgagagcattgataactactcttgagtcactctccatgatgacaaacttggaaaccatatccttcacaattgatagagccaagcagcaggctgccgcctcactgcataacgcataagagaaatccagccgagccgtttcaatccaaaccaccctactaagatggtttctggcaacaattgcagtacacatgctttctaatcctacttttacatcacaattcagtttaatccaatcctcagggggagaagaccaaaccaccttccggcataaatcagggaaaggaaataaagaagcatgtaaatcagtaaaagaagtaaaaatagagtcaatacacttcttcacatcaactgtatcattattatgtacctttgcattgcgggtttgccagatcgtgtcaacaacaatcgaagcataaagcaaaa

SEQ ID NO: 316057 - DNA, 2096 bp, Cannabis indica
gggcataaaacccaacatagccgctaatatcccacatttattgcattagttcaaaaaactaacgtgtctatatgatgtataagaaaaaaatagaatgcatttaggttggttggtaattgacagtaaaaactttttgcgtccatttttaaccgatgcaaaaataaatataaaaatcatttttgattgtttgcgccagttttagatggaaacaaacattaaaaagttacattttatcaaatccaaactatgtcataccaacacaaacaaattcacaccaccaccacaacaaagccaaggcacacaaccacgaccaccacctgcaaatcaatcgaaaaaaaatcaaatctacatttatatactaaaaattagatttgaaaaacttagatcttacaaaaagtgagagagaaagtgagtgagtgaaatagatctgtaaatatcaatgtaatgtatataatatattaagaaccatggttaagggaatagagctaccgagatagacggaggaaggagtagcttctacttgtctgttttcttgaggtctcgatactgatgagaggcttttaataattttattcctttcacagaactaagtgaataatttaccatcaaactgagtttcattgttagatactattttgattggaatttcaaacctgcaaatgatgttcttaataacaaaatcgagaacttttttataagttatggaaaccagaggttcagcctttgtccattttataaagaagtcgactgccacaactgtgtattttactccacatcgccctgtgagtaatgcccaatcagattaatcccctatattgtgaatgggtatggcgaggtcatcattctcaactcagttggtggtacgcaaggtatatgtaaaaatctttggcatttgtcacatttcttaacaaatttatgtgtgtctttgttgattgttggccagtaatatccttgacggataatcttcttggatagacttttccaacctgcatggtccccgcaaaagccttgatggatttctttaattatttcatttacttctgctggtaacacacatcgtaagagaggcatagaataacccctcatgtataatttaccctcaaccattgtatagcaaggtattgaatataagagtttgtgtgtcttggttttgtctggaggaagttctccatttactagatacttgacaattggtgtcatccatgttggcaaagtatctattatctcgatttcttcctcttcacatatacttgggtcatttaagacttcaaccggtacccaattcaacttgtcaagatcaaattgagacgccagcttcgctagtgcatctacattagagtttttttctcttgggatttgtttgattttaaaataatcaaacttttcaaagttcttccgaactttctctaaatacttagccatttttaggcctttcgcttggtatttgcccaagacttgatttacaattagctgcgagttactatagcatgtatgatttttgacctttagtgcttccgctattctcaaacatgccaataaggcctcatattctgcctcgttgtttgaggtatcaaactggaacctcaatgcgtagtggaatttaaagttatcaagcaacatcattatgactcctgcccccgagccattctcgtttgaagccccatcaacatataattttcatgtttctactttgcattcaacgtctggatcttcttctgcgtttattctttcaataagaaagttagccaaagcctgccttttgattgacagtcttgagtggtaagttacgccaaattaccccaactcaatcgaccattttatcaatctttctgaagcatcaggttttgataaaacttgcttgagtggttgatttgttagatgtgcttaaaaatatgcccgtaatttgcaagatacatgaattaggcttaatgcaagtttttcaagaggtgggtacctcgactctgcccctagtaaccttttactgacataataaacaggttgctagtgcttaccctcttctcgcactaaagtcacactaatgtcatgcttcgagacagccagataaaggtataaagtttctttagttattggtttag

SEQ ID NO: 316058 - DNA, 1507 bp, Cannabis indica
aaattgtaactagtggggcccatcttctatggctggctactatgtggtttattttgctattattttatcttttttattccatataatttaaatcataaccctagtttaaatagtataaaaggaataggatgctctcattctcatccaagccttcaacctaataacctagtttttattctgttagacaactagaatttttgagagctccctcctttactattttttaatccccctcttttgttcttcattattttcaagcctatagtgatagagtacatgcccactcatatcaagtcaagtacttaattatagtgtggaggattgtgaagaatataacacctgaaggagaaacaggctcagatcttattaatactctgcgacagaaaggaacaaaggggttagagatctgagtggaggagacattattttgctgccaccaatgtaaggttttcttaactttatatgtgtttatttttattgttttagaaattcatatttagggtattagatatagtttataatcaacgtacttcttagtaaacctacattctggtaaaatatattccaacactagtttcatatgtgtctctattaatgtaaaaaaacaacttgttctatgtttctcacataaaaagttgattttagggttatcttctttagtattaaatctaggtaaaaacatggattttaaaattatttcaaattaccattagccttgttagtattaaatttagataaatacatgaattttaaacttttgccaaatgatcatcattattaaaatatgaataccatatttgattctatgatatttgaaataacaatagattatgagtatatatggattccaagtgtctttgcattatttggatcttgttaggatcatagacccctaggatatggctctgatatcatagaaaaattatggggttctatttaaaaactaagtggtaatgaatagagtagtccatgctcttatatttggctcatttacatttaattcatgtgggataatattgtctaaaacactcaattgatgagaattgcttatcatgtttcttagtaaactaattagaacactattaataccaataacatttactattgggtattacacattataaatcacattctatatacactactacaaaagtactattcttgtcggtccttaaattggtttttctagagaaccgttactaataaaagtaagtgactattagaaaccgtcgactatagttgagtattcccaacaattttaaagggttttttagtattcttgatggtgtgaaatagttacgagacaaaaattgaaacaaaacattttaaaaggaatcctcgactatttaaattaacagagattcccgtgtatatataagacccacttaaacgtttcagatctcacattcattctcactctcagatatctctctgctctttcatccgtgcgcactactacaaaaaccccctttagaggcggtttttaagccctttcagcgtcggtttt

SEQ ID NO: 316059 - DNA, 2970 bp, Cannabis indica
tttgtagtaacacgtaccccggaagattagttttggtactctatttacttattttagtatttaaagaaaaaaattgagttattttatttttttttttttgcatgatagcatatgctctatttataaatgttctgaaaattttaaataatttatcgtgttaaaattaaggttgaaataattatttaccacgcatataaataaataattgttcgtgcaacaaaatatttaaactttatttttcgataatttaaactactggaatttttttaaaaaattacaactgatcttatataactataacatacaccattacgaaaaaaaaaattgattaaaaattattttagatatcaaaatatatagagcatttaccgaaacaccatttagtgtactgtatacttacccaaagttctattattatgtctgccaagatgatatgagacttataatatagctcaaatttgaagtaatattgtatgggaaatttctgttaaaataatatatatggtgtggtagcaaaatttgattgtgaaagatggaattaatgtaaagtaagacagttttatttatttatttttatataaatttcaatcacatagcatttattaattatcaaaattttatcataaaattctatttttaaaacaaggcaaacttggtacagtttcattccacctaaactttattttggatggaatagatgcaaaattaataaatattggtatctagcaccatatgcttgttattttattaataaaatccttgtattttaattaataatataagatataagacttgataataaattacatcaactaatgttcgatggcattcgacatcataaatgccttataagttgtaacaatcgaagtcctataatttgtaaagaaaaagactgagtaagttatgtaattttatattacctagagaatgttaagtgtgataattctaagactgtgcatagatgagactacacaaatgaagagagcttaaatgaattgataggtgctacttatgacaacaagatgcatcttctttttggtagcccaccactagcaactccaaaattaagtatgtttaacttggagaaatcttaaggtggctgacctcttgagaagtttttctagaaagcatgcgagtgaggacaaaacacattgaaaagactcgcgttggtttgtacgaccagttgttattccaagaaacatacataagagccagcacaagtgtaggtggcacatacactgttattacacaatgataagctcctatcacctcactcagtttatttttagattaattaattaattcaaatgattaatatttatttaaatttgaatttaagatttggttataaatatttattatgattgagatatcccctcaaagtagttgagaaattctctccaagttattgaaatattctcagtaattgagagattctttcaatcagttattagaaatttaatttaaattaaatattcaaatttaaaaataatatctataaaataattagttacatatatttatttagatattataatataattatttatttttaaaataaataatatcttatttaattaaatttttactattattttattagttataattaatatatataccagtataattctaaatctatatatgatacaatttaaaaaacccaaaaaagttaaattaattgaatatacatatactttttctctccaataaaataattcttgctcatgagtttgaaattccaaaaacattattttgtgtatcttatcagtccaagctgatccttatgtgtagtggttgatttggaagatttggtgtgagttcattaccgttctttgatacaatttactaaaatatgggaagaatacttgatagatcatcaagagataactttcatattcatctttttcgttttcgatttagtatatatacatagagtgtggtagaaagataatctttattaaaatattttcgatacacgaaccatataaccaacaaatagtatcatagcttataccatatataaatatgttagtgttgtttgagttttcttgcattatatatatatgatagtatgtgaatggatgattatgattattgtgaatgtatagtttcatgattgattgttaattatatggtgataattgggtgtaagaattattttcaattttcttagaaaatttgtaagtcattataggggcataagaatttttatataatttatttttttaaaacaaaataaatacataaaatatgacgttgtaatgctcgtagcttttagcccaagacatgtttccaagaaaggagtaaattagaaatttaaactaaattcagaagtttcaaaacccctaaaaacattatgaaaaaattcaagtttaatgcaatcaaataaataaataacgactgccatagacaagagttgtcgtgacttcttatggggtactaaagggaatagaagtaagcttcaccgagcctcctgagaaaagatttgcctcccaaaaagtcttggtggagttggtttccgagaagataaaaagtggaacaaggctcttatggcgaaatttttgtgggctctagctaataaacaagattgcttgtgggttaaatggatcaactctatctatttgaaagaccatgaaatccggagctatcctaaaaaactggatgttagctggtatttcaagaaattgttgagtctttgagatagtatggatgagaccaagttgagccttgctgtgacaggtgtaaaattccgagcaaataagtactataacctgctagtggaggagactaaagtcgagtatgcatgagctgtttgggacaatttaattgtgcctaagcaacatgttttgtactggcagattgctaactcgcaactccttactcgagattacttgaacaaaattataaccctgcagaatattcagtgcctagttatgatgctgagatggaaatgttggaaattatttt

SEQ ID NO: 316060 - DNA, 1237 bp, Cannabis indica
acgatgacttggacttggtctaagttctaaccctaattaatgttcctaataaatattatacataattatataaataaagggcttgtttgtaacgctatatttgatcgtattatattgtattgtattatattatattgtattacattgaaatagattatattacatatatttttatataatacactatgttaaattttaatttatactaaaatattatatatttaggtgtccatataaaaattaataccacatatagtcttacataaaaatattgtacagaatacaattcaatataatactatataatataatataatgtaatgtgacgtaccaaacgaatcagaatagtgctatctatcaacctcttattacatgtcagtatattttttttaaaatttttttcatgacggtattcgttatgcttaattacaatatcatccttataaatttttaaaaaatttcaaatatagtttacagtgtcgaaaatacgtttgaagttttttacacacgcttggtaaactgaaatatcaggaactctgttttcggtattgtaaattatttggaattttttaaaaatttacaagaatgatactgtaactacaacgaataccgctataaaaaattaaaaaaatatttcggtatgtaattttaaatgtaaaaattaactgaaaggttgtaataagatgttataatattatcactcctttatcataataatatatataattttctttctgtcattaaatactatagcaacagtaccataccacgcgtacatatatgtatatatataatctcatgatgcatgcaagaattcatgaagttgtgttgctattaataaataagtgaaagattataaataattaagtatatgtgagtatggttcattttgttggtttcatggctggcatatttcttcttgtggcttccataattctgatgatgatgcagctcaacacagtccatgccgtaggtttgttcatcatcacaactactgcttctttctttttacatgaatgtatattatatatatataatgcatatatatatatggttttaattaggcgcagtacttatatgttaaccgaaaatcatttagaaatttataaattataattgtaagttaatattaggggtgttcacaaattatccgatccaatccattccgcacgatccaatccaatccaatccgcaaaatgcggatatccgcactcgcgcggattggattggattgaaa

SEQ ID NO: 316061 - DNA, 1061 bp, Cannabis indica
tgaggccatggccatggttgagttgagtagtgagtagtatatgcaaacaacttattatatatacaatccgcagtgtactaatgaggaagaggaacttgtttctctcctaatcttgacccttcatttcatctcttcatttttggagctacactatctcaattatcgtttcacttgcacttacataaaactctccaaattattatactgttaataaatttaaagtataatctatttttcacatgcggacatgagctatttatgtactcttatatatttgacatatttaaattggtacgcttaatattattatttaaaaattataaaaaaattataaattttgaaataatagtattaagttaaccaatataaacgtgctacgtatataaaagtatacagataagtagttcatgttaagagttaaacgaatgacaccttaaatttgctaacagttcaataatttagaagattttactactaaaatttgatcttaaagggttaagtacaaatgaaaccataatttgaagtgtttagttgtcaaagttcagggaaaaaaattactaattagcctaaaatgaatggctagggatggcttgaccattgattttgtcttctagttgttgcaatattttgtcctctatttgaagaaatatcctttatttattacataaatagggatatttgtagtgacatatttttaaattatgtattgaataaactaaaagaatatcactatatatttttgagctgacacttaacaaacttaattattagggttgttcatcgaaactggaaaaccgtagtttaaattcgaatcgcgacaatctgtaccattgtagatcgtaactggggaagccgtttctggtggtctggttaatccgaaccgtttaccgctaaatggttcggttacggatcgtaataaatagttaaatcttaaaccggaccggaccgtatataataaataatatgactatatgtataattttgaatttttttgtgtgtcgagatttttattgcatgaattttaaattttatgttatatttgacttttaagaatattttta

SEQ ID NO: 316062 - DNA, 536 bp, Cannabis indica
atttttttcaggataattgggagattattgggcaggatgtttttgaagctatcaactcttttcttcaaacaggtcaacttctcaaggagattaattctactgcattgacacttatccctaaaactaagtgtcccaatacagtaggtgatttcagaccaattgcttgttgcaacgtaatctacaaagtagcaaccaaactaatttgctcaagacttcgacatgtcctaccagtactagtagctctgaatcaaggtggctttatcaaaggcagatttatagcttacaacatcatgatttgtcaagatctagtgcgtcactatgggaggaaatcatcaaagtcagggtgtataattaaacttgacttccaaaaagcatatgataccgttgaatgggacttcgtggaagagatgctcagagaattcaatttcccagataagtttgtaaaactaatcatgacatgtgtgcgaacccccaggttctcacttatgttcaatggcacaatgcatggatactttgaagctcaaagaggactgagg

SEQ ID NO: 316063 - DNA, 2328 bp, Cannabis indica
actgtttgcttgtggtacaatcattaaggaggtcctttagaatgatttctgtgtttggtgatttgattaatgattgtaagatgatgcttaatgatttatcttttatttcgttttcttttgttaaacgatctgcgaatgtggttgctcatagttttgctagagcgtcccgttcatatcctgatcgtactttcagtttggggaatgtcccaactgagttgttatcgtgcttggtaacagagtttgatgcttaataaagcttgaattttcattcaaaaagaaaagagaaattaaagatacaaaatcaacacaataaaaacaatttaattgcataataaaaatacacattaattgaaaaatattttcacaacgaatgccaaaaaggactttacaatacttaagtcaaacttcaactttttttgttacctattttttgccaaaactattttttttcaacttgttatccatgtttcagagcatgtgacacatggattattatggaagggattatcctaataataccctatttaaagtcttacactacaatcttatctcggagaagcctcttggaatcgagaaaaggtcgagattgaagagtacacggaagtctacctaactttgccttggcttcccagatgccaaaggtgcattgcctctttcagatccagaggggtctaaaacatggaaggttgcccagctgatatccggacgggtactcaaagggcctaatctagatgtcgaccaccttggagtgttgtagatgtctaccttttatgcacgccaaatcaccaagtgatggttatgctttttcttagaaagatcaatttttctctcctacatccaagcgcgatagtgcgcacacctccaccaccttttaccagacgaatattacaaatctctatttttgaaggagaaacctttaggtgacacatggcctctacttttaaaggttaaacctttgaaaggcaactgtccatatagtacaaaatggtccacattgtctagctgcagcacacacaggcacaatggtttccatgggatccaacggtcagctctgattattgcatgtaatttgcgccattagtggaattttaacagaaatcctaggcgggtcatgggcatatccatagccgccccttagcctataaataccctcctatttccatacagaggggtttcatgtccaacatagcgaaaactctaccaagtttactcttcgtctcttccacaagaaactcagagcacagagttagggtttcctacaaaaaagttgtaacaacatcaaaaataccctaagaggctaatagactgactcattgactaaggttcattagcacccaaaccacataaaaaatctccaccccttcaattctagattttattatttctttagttctcaaatatttagtttctcaaaatctcgataaacattttggtgcattcattaagagctgaagaaagacgttaaccactatttttgccatggttttcacacgaaagatggttcctaacaagactcttcaatgtggcctcaagatggtcatggaggaagtaaaccccctctttctagagcacacccaactgagcgatgcgagagccaaggatatatccaatgtgaatgatcaagaggatgacccaaacaaccagcatgaccatgtcggtgatgaaaaagatgctgagattaatgaagaagaggaagatgacagagagtacatcaaagataggtactacaaagattggctaccattacgaacaagaccccgaagtggttcgagtgtctactgagttgctcaagaccaaacaaaagctagcccatcaagagaagttttctcaaaggattgagaaaatgatggctcaccctcgagccaagttcatagatctagatgagggggattctgatgatgatccctaagtggaatgcgtcgaaggaaacactagggaaaacccaaccaatgctggaacctatgctcctacgcaggacaaggggaaggcgaaggtaggtgatcctaacaaccttaatgctcccatacctcctcacaaaaatatgaatctagctaacatgccttctcaagcgcagaaggagaccgacgccttcggtctcagatgccattcgacccagaaaggccctgtagcaccaaaaaagattggtacaaaagtaccaaagcctaagggaaagaaaaactaccctagtgattcagtaaaccaggatggtgggatagggggacagtaatccgaagaaatttggtccatggtggatcttagaaggcctttagatgctaagtacaagaaaccaaaaagctgttgggttttatgccctaaataaaactcttt

SEQ ID NO: 316064 - DNA, 1887 bp, Cannabis indica
tttcaagcaaattctgatatctcttcttctggggatgaaaaaacaaattttcacaaagcaaattcatcgaatattgaaagctccatattaaaaaatattctcttgatatcaaacaccatagccatgtcctcttcttcaatagcgataatgctaaacttgttcataataatttctcgtttctctgaagatgacttgtttcggccattgccaatcgcattcatcgcgggaattatttcgctttacatttctataactttcatgatgacaagtttttgccttacatcctttattggtactaaatcgttagcgatacgtatttttacttgttttttggagcttttgccagtaattttatttccttatcttgtgtatcctattttaattgacttattaaatatgacatttttctcaaaatcaaagttcaagcctggaaaacgagtacttggacgatcgttatgatttttgatgaaataggtcatattatgtaattaaataatggtggagaatttgaaggattattaattagagatctatctaatgtgtaaataataataatgtaactatcttttgagagtatagttcgttacattttatgttttgtttgtcttaattattggacgtgatttaaattatttttaagtacttttaatttgttaataattatgaatttgagataaaagtggtttgctattaaaaaattttaaatcaaaatattaagaaattaaaaatttcttagtactttcctcctcggctttgaatttcttgaggatctcaaatttctttggcatctttagtgttggtgtatataggtcataaagcctatatgagagtgagttgagaatatgtcctctacatagaagattgtcattctctctcttcttcctttgtgccttgacctcattggtcggtaggtgcaaagtaagggctccaaggtggactcaagaatattggcaatcttgagtgtggttaggaaaaaccccaccttgtcttgctacctagtgaaattggtaatatcaaagcggtccaatctcactaagttttggttcatcatcttgattgtttttccttccattgaaaacaaaaaataaatcttctttcttgttagaaataaataagagattacaatagaaaaataaaataaagctgaataaaaatcaagaaaattacaactctaagcaaaatattacacggacaatatataaagagctataatcccaaaacacaaaatacaaataaaaaaaaagagctacaactcaaaattcaaagatacaaatatatgtaaactatatagaagtatatatatatctataatagtgtatatatatgatatagaaggtagctcagttaattaaaaatactgagttcagctgtaatttcaaattcatccaaaattttcccaaattacttcaattatttaatgtcattgtaattggaatcaaatagtatttcctttaaacaaaagaattgtaattaagagattattcttataatcatggatgggtagaatttaaattaataaactcttatgctataaatttggcataaataaaattgtgctagatgaaatttagtcaagagcttatttggtaacttgttattttaaatactttttatttataaatagtacgtttctctctttcttttacagtataactttcttgaattatacccaccttacgaaattaatatagttggggattaatagactgtgttcacgacgaactcaataatgttagacttttatttgggcttacattaaattttattggttttattaaaacttgggttgattggatagttctttgctgtgttagcccatgttgttggtgatcaattgttaatggacttagcatctgtgtgtaaagtctaggtgaagcagaagtgtgg

SEQ ID NO: 316065 - DNA, 2093 bp, Cannabis indica
tatatgtgatttgattcaaaatatcatcatatataatttgattaatctatgattatttttagtttaaaaaaatatatataaaactcactttaagaaaaactttaaaagttagacaactcgttatagtataatatttagaattatgattacaaatatagtatttttattgaattatttaatggcctttaatgaaatcgatcacaggccaacaaataatcaacctctaacacaccattaaaaaaaaaaaaaaaagagtcaatcctcaaaaaatttagttgtaaagtctcgtaatcgtatatgtttgccattgttggccctctcactcatccaatccaacctccttccctaaacacttggacactcagatctagctaggatttaataatatcattagaccatttttaatgggtgatgtaaaaattatatatactatattacttttttttttataaagtgatatgtgtaataaatataaatgttaagatggtttgtggtaaatgtcctttaattttattatattattaagattaattaaaaaatttatctcgaatttgatatgtaacaaatcatgctccttgaatttttaaggtcgttaaaatattgagatattgagatggttgaatttaaggacttttatccaattttagtaaaaaaaatttaaagtggataaaaatttagggataatttagtacgtgtcaaaagtttgaggagtatgatttggtagatattaaaatttgaggagcaaatagtaaaattgaatgtaattagacaaaaaattttaaatctaagaatctcatagttcagaaggtttttttaacactcaaaaaaattcagggtatgatttattatatgttaaagtttaggaggtaaagattattaatgattatttatttttgttcttttatgaaaattaaatgtacattgacttgttcaaatcaaagtgtaaactttgcatgcgcgattattcaccatgccacttcattgactgtttttcttaagttcaaaagatgagtcaaagaagcataatgaagaaacggccccgttttcttcttatatataaggtagtataatattcatagcattatttagataatatatattatagattactctttgttaattgttatcgtttttacttcagtaggaagctaccaaactattatacatattaattgttacacaattctaagaaaaaatttatccaaataactactacattccattgagtaaggaattgaattagttgtcacaatagaaaattgtgtagaatccatgtgtataaacaatttgcttagtaaataaaattaacattacaatatatttattttatctatcttctcttaatttggttagcttgaaggctttgctaatcattggtaatctttggactaatataaaaatggaaaattaacattaataatggataataacaaattttcaaatgcatgctattgtttgttggaaatcacatagactaaaataaataacttattgaatattaaaacaacattgaaaacttgactaattatacactacaagtaagaaacgtcataacaagaatatcaataaaataattaaaattgggcttggcttttagttgaagtttataagagaaaattacattgattaaattgtcaaagtatttacagcaatagcctttaaatatcatcaatatcgaatgggatgggtgtggtttaatgttcagtaaaatttagttttgaacatcatattatgtcgtattgtattgtattatattaaattgaattatatattatatttttatataacgctaattttagtttatattaaaatattatatatttaagtgtttataaaagttaatacctcgtataattttatataaaaatattgtataaaatataatttaatataatacaatacaatacgatgtaatacagcatacctaacgaaccctaattataccatttttgttggtaatgtcaaaattctataatttttctctttaatttgtttatttctccttttttttttatcaatttttttctttactataaaaacaaactattattataatgtatattcttctctctctctctcttttttttctttct

SEQ ID NO: 316066 - DNA, 1005 bp, Cannabis indica
tcacctccttcccctaaatctcatattagatcgcaccaactatactctttggcaatctttggtactagctattgttcgtgcatatgatctagatggctacattcttggcactgttccttaacctctagctctccttgcaggtaatgttcccaaccctcctcttcaataatagattcgttttgaccaattcttgatgtattggctaataaattctgtcactaaacacatgtggggacacagggccggccctgaaaatttatgggcccaagacgaattaaattttggggccctaaaaaatatatcaaaaaaagagtgtcatgggatttgaacccatgaccttggacattatgtcctccacctcaaccaactaagctataaatatttgttgtttatattacacttaaattttacttaaataaaaggctccttatcaatgaagaatacatactgaagatgaagcaacatgctaataatttagcagctgttggtcaatccatcaaagatgatgatcttgttctttacattcttagtggcttaggatctaaatatgaagctgtgattatcaatgtcacatctcgatttgaacctctctcacctctagaagtccaattcatgctgtaaagtcaggagatgtatattcaacaccacaccatagactctccccacaatgttgaagccaatttggcaaatgtaaatctcagcaacacaagaggttcatattcgaatcgagattcacgaggtgcctatcatggtggtcgatcctcaaattccaatagaggaggtcatcgcaacaaacctgtgtgccaactttgtggacgtgctggtcacattgctcttaaatgttatcacaagtttgatatcacattcacaggagcagcatctgtaacgttcccacttcaagcctccattgggccttccctcacagactcatggctcttatacacgagtacgctactctggcttctggtagtaccaatcaatccatttaagccctcttcaactgtg

SEQ ID NO: 316067 - DNA, 2017 bp, Cannabis indica
tgtatgttttggttcaccttatcaattatttgtctacttgatttttaaattcatccaaacccttttcacatacttaatcatgcaaatagtagctcttccttggccatcaaaagagtactcgaggtctaccatcaagcttcaggacaatttctcaatactcacaatcaatcatgtctttctctcctaatactttagatgatgcaaataatttctttagccaaactttgggaatgccaatatgtgagtgtcatgaaacatacctgggtctccctgcctattcaagtcataataagaaagagttgttcggaaatttaaaggaaagaatttggaaactcctacatgcttggaatgaaaaaaaatttctgttggaggtaaagaagttcttttgaaagctgtggtccaatctatttctacataagctataagttgttttcgtttgtcaatggggttctacaatcaaattaaatctatgatggccaatttttggtggggtacaaataaagacgagtccaagatttattggaaaagatggaaattgctgtgtaaatcaaagtttgaaggtgcaatgggctttcgttcgtttgttgatttcaatcaagctatgcttgcaaaactagcctggaggctgtttgagaatccgaactcactgttaggtagacttttgaagcatagatacttcccaagaaactcttttttagaagctcaccttggacactcaccttctttaacatggcaaggaatacactagggaagggaactacttcttaagggacttagatacaagattggtaatggctttcaagtcaaagtgggctggatccttggattccaggacatgacgaattaaagccaatttgctatactagcactccatcaactcatgtatctacttacattcacgatactatggaatggaatttggctcttcttgaagaagactttgcacaaatagacattgatcgaattatcaccattcccttaagcttttaccaatcacaggatcggcttatatggtatcataacacaactggggtatacacagttaaatttggttttcaccttgcaaactcaatcagtgagaaagatcaagaaacctcttcggaagattacgaaagctcgtggaaattcttttgggccttgcagctaccaccaaaagtgaaaatattttcttggaaagtcattcatcatgccctaccggttgcctatgctttacacaagagaaaagtcatagattcgactcaaggtgtaaaaatgcttcggagtcaattggacatgccttgtttacttgcaagcatgccaaggctgtttggaaaaacactaacttcacaattaattttcaccacgctcatggtacgttaaacgggaattatctaattcacttggcaacaatgatggataaatctgatgttgaagcattaatacgtgtaatgtggagtatctggaatggtagaaataaagtccttcatgggggttcacacatagatccatcctaccttgtagcacacgcattgaacattaaaaactatagaagtgccaaaggaatttgctgcaaaaaaatgctgcaacagcctaattcacagcatgcagtttcaaatgttcataatgctgggcaaacttatcaccaagagatgttgtgcacccaattttctccacaccaggctcaacaccaacagttttttaatggccaagaccaaattgcacaatcccctaatttgatgcacaaacaaagatcaacacttaatcatggccaaggtaacaatcagcaaaaagcttcatcacaggaccgtcattctcgacaagaagcaaaccagtatcagcaatctacaatttcagtgatgcgcaccaacaaggcaatccagccccagatgccactgttaacatctgaaggcctattgatgagatagcatggaagccaccagatgttaatatgctaaaaatgaatgtagatgctgcagccaatttcaaggataagatattaggaattggagctgtaacaccctaactaacttaggcgtat

SEQ ID NO: 316068 - DNA, 1128 bp, Cannabis indica
aaattcttttgggcattgcagttaccaccaaaagttaaaaattttgcttggaaagtcattagcatgcccttccggttgcctctgcactgcataggaggaaagtcatagattcgaccttatgttcaaggtgtaaaaatgcttgggagtcaattggacatgccttgtttacatgcaagcatgccaaggctgtttggaaaaacactaattccacaattgatttccaccaagctcatggtatgttaaacggggattatctaattcacttggcaacaacaatagataaagctgattttgaactatattgtaaactaccaaagtgcaaaacaatcttgctgcaataaattgcagcagcagcctacttcacagcaagcaggttcaactaattgtaatattgggataacacatcaccagattcatttgcagcagctaggagatggccaagatcattttgcacatccccagtacttgagacatgaacaagggccaacacaaaatcatggccacggttactttcagcatgttgtttcatcacagcaatgcaattctcgacaggaagcaggccaacaatagcaaccaacattttttgtgatgcatcagcaaggccattcgacaccagatatcactttcaatagaagcagacctattgatgaaattgtttggaaaccaccagaggtaaataggctaaaaatgaatgttgatgcagctgccaatttcaaggataaaattttaggaattggagctgtcgtgcgcaatcacaaaggagaagtaattgttgcgttttcaagaccagtccaaggatgcttcagaagtgatgaaatagaagcgaaggcgcttttccacagtttaaactgggttgctcagcaccaactatcaatcgtaattgtggaaacagagatgccttaagagtatcctctgctttgaacacttttcatagggacttatcttgttttaatgatctaattgacgatgtacgttgtcttttatcctctttccctggagttattgttactcatgctcgtaggcaagctaataaagctgctcatggcttggcaaagtacgctctagaattggatgaagatgttcttggataggagaaatttcttatcctattttctctattattgtaaa

SEQ ID NO: 316069 - DNA, 1518 bp, Cannabis indica
aatataatgaggtatatatatatattaattattatgttgatattttcactacaaaaaatgaaattaatttgtattattagtaaatttatttgtttaatttggtgtaattcatagagctgagaagatgattgccattacagcaagggcacctactggagacggttttaacatttccaacatttaatggtaattgattcatatattcaacatatatattaattatatatagtaaactaaaattaaattaaattaggggcatataatacaataaatatttcttcattattataaataaatatattttcttatttgtattatataagaaatgaaatatttaaatgatctaaaatttttaaaaattttagcaaatgacctatattttttttttgtttaggattaacaatactttgagtctcattttgaaaacatttcctaatttatatatatatatataaatacagaattaattgataaaattctttttttttactaggcaaaagtttttcattgactaatgattttgaggagcttcaagtttcaaagtacaaatctgtgatgtattataagaaacttttaccatattatggtcaaggtcaaagttgtccaattgtcaatcagaaggtatatatttatatatatatagctatatatacgtacaaaaacattaattatatatatttgacaaatatatatatataaagacttatattctgaaatatgtgataggtgactataatatatacaatctatgaccaaaatcggtatgtgaaaggatcaaaggatgatgttacggctgaagttgttataggcaccaaacatgatcttggtacaggtaaaaacattaatacccacaaaaaataaaaataaaaaatacctgataattttttagttataatataaaaattttgtgactaaattaatattatttgtgattaaaatataatatttaagtataaattattactaatttagttttaatctaagtgaaaatatatttaattacaaaaaattttaaattttatgactaatatatttagttattaacattttatacataaaaaataataatttataattatttacaactttaaaattaaagtaaaaaaatttgtaataaggctccaattaattataaacacagtgactacttcaattaattataacttattattattattattatgagaatatataatattgaataagatttattttaaaaatacattactaaatgattattatatatttatatgattacattaatttttgtgatattttacacatgcatgcagggcttgattttgcgattcgaacactcagattatatgaacgagcaatatttgtcatccctaaggctagtatttttaatttcacttttctcccatatatctattctatataaagtgtgtctatataactgaattcttgcgtttatgagaaattcatagataacttttttttaaaataattttctattcaaaaataatatatttttttttattaagatgtattttaata

SEQ ID NO: 316070 - DNA, 739 bp, Cannabis indica
ttaaaaaaagggagttttttttatgtatacggctataagtattgatttgtgcaaaaatacggtacctgaataagttaccgtttctaacgtttctttttgcagaattacgatgataaaagaagggattcggctggttgaagttgaatgcaatatagtctccgcctttggctccagcagcttttttgacagtattttggagctactgaccttaaacaccaacaattcatcttttccaaccaatccaaataaaaaaagtaaacaaaattttcaacctttctcaagatccattcaagtttgcaagtatttcaatgtttactgatgatacctattgtatttgaatttttcttttgttaaattttccattcagcgtatgataaggggctgatttttttggccgccaagactttatgctgatgagttgtcttttattggatcaattttggttaataacgattctttctctttttaatttaattccatcacaattagcaattcaagaaaaagaattaaatagtaaaggtatatcctacacaacaaattagcgggatagctgctgatatgatggctgcaaatgagtcaaatgctcacacatttctaagtaggccttgttgatcatttttttttatttttatacaaagcatttagagagtagtccaagtaattcactactacaaaaactctctttagaggcagtttttaagccctttcagcgtggatttttacgaaatttgctaccgac

SEQ ID NO: 316071 - DNA, 1812 bp, Cannabis indica
ttttttttttttttgtgaagagagatataatattagattgtatatatatattacgaaattaataatagatttatttagagcatttgttttttttttataggtgacgttttacgattaattaacaatattttataaatgatattttttttaagttatatgagatttaatattaaattacactaataacagtatgacaccgaggagggtgctaagcactagtagtgtcttttaacaattctcttttagagcgaatattgccattagatatattatctcacaattagttagcgatattccctaaaatccggtactgatcccactggaagtctgagacttgatacttaattacatttaggtatgacatcgaaaaaagtattaggcaccaaaaataatttttaacaattcttttttatttatataaatatattaatttgggagtagaaaagatgagcacttaaacttatttaaggagccctaaaaaaaaaccttactcaatgaggagatggatagctaggtcgagtggccaattgtaacactacactaattaagcatatatatacaaaaacaaaaacctaacacctaacatcttatgcaatcatgatatatatgagagtatatacattatattatatatccaaaatacaaaaagaaaaactaataaaatatagagtccctatgagaattattgtgttcttaattattatggagttgtggctttcatgcctatctatagggcttggaaagttgcaacatgtattgtcaatttttctcatatattatattcatcatcatccttataattttcaaactatatattattattatgattatttaaaatcaattcctaaagaaaaatagcaatgtgtctaaataaccttgctattaataatgttgtctgattcttgtcctttcaattaattttcagatttttaataatatattttatatacatatattttccaagcgcctttttgataactattctagtaattttctctattacttttggtaatagattcaatatactctaaaattaatcaacccaaccaaattaagtaattttttattttgtataaaaatcacatttagttacaaaatttttatatctaactaaaaagttaaaagtaattttgtttaatgcacattgtatactcaacctatattatactttggcagttaaacatccataaatcatttctttctttatctaaatacaataattccttttgaatcaagatctcctgttaaaaaataatgtcatagtgtcttatattgtgttaaattaattaaaatttgacatgttaattaatttttatttaaatagttaatatatgtaatataatttagattagttgatgtatcaaattttgacaggtttaacacagtgtgagacactaatttttaaccgaagatcttgattcattcctttttcccttttataaaaccacttataaataacaaataattccatcttttgatttgacgtcgcctgatttgttgtgcttccttctgaaccttttttttttcagtgtaactctataattataatctcttaatttaaatattttgcttaatactaaatgtattcttaaataaaaatttaatatacatagatgagtgtgcgcgccatttttgtaaataataatttgcctacttctacttataagaaagaaaaaaacccggtatatacttaaaaagtagggttgagttcactaaaattatatgtacagatatatattgaggttttttttatttttacacttcaaaatagtttttttttttaatatttttacagaattctacataaaaact

SEQ ID NO: 316072 - DNA, 1028 bp, Cannabis indica
atcagagcacacaacaattctctagagcttgttttttgcagcccactcaaaagccaacaaaactgtctgagcctcagcttcaattgcagaccgagctgggcatctactggaattagagaacaacctactagtggcaatagaccaccacacagttgctaaacccgtgacaccatctttccaggattcatccacatagaagagatcaaatgtgtcattagaaagtatctcattctgttgataaaagcaatcccccaggggctttggagatctctcgacaatcaagctgctgaactcaacagctctagcttgaactgctttcacaaggccgccacaatctacctctctcccctcatagagtcttttattccttagaacccagatttccatacaaagatagccagtaaacactagaagatgctcccgttcctttccctaggtagactgacataggttttcaaaaaaatcaataaaatgattacccagaataaagctactctatataggatagaccccagccatcaaaactactttggccaggggacagtccctaaacaaatttaaaactgtttcattggattgaaaacaaagaggacagtcttcttcatcaaaaatgggagtctgtcatgagttggcaagatattatgacaggccctccaaatcatcatattgattctaggatgcagaaacggcttccaaatccacttccaaatatctcttgtagcacagaaccgacccctttggtcttacaaataccccgccttagctgaatgtgaatttgagttaccatttttccagataacagtgtctttctcatcagaagggaatctagcaatccccacgattttgtttcccatctcctcactaaaaagctctcgtactgtattcgggttccaagaattcccgcaagaaatgtctgccaccgacttcagataagggttgttaatacggcatgcttccgttacctctcgaaattccacaaaattaagccaagggatccaaggtggcttccaaaggttaatatcctctcc

SEQ ID NO: 316073 - DNA, 1423 bp, Cannabis indica
taataaatttatcattttagatttttggtgtaaaaatttctatattatatatatgaatcgcatatgaaagatagaaatgtgatacaattaggaaagagtgttaagcaaaaaagtgagtattggtggggcacttattactcattatcaatgcaagttgtatttccacaataaatactttttgcaatctattattttttttctccttctgggattattaattattattattaataatatgtaactttttataattgatatttataagttgaagagaaaagaatggcaaaagaactaaaagcattgtcatctgccttgtagaaatgaacaagagctaatataaaataagagatatgattctttagaacctaactttttaaagatacgagcccttaaaaagttagttattttacagttagggaatttggttttgatgagtggcaaattaccggacgagggaaggtacaaagctaggacaattgtcactttagccatcctaatcaggaacattattcatgtgatattttacataggtgtgggtacaataacactagtacttcccactacctttatttcaacatgtcaatagattcttaattcttatcttcttctatataatattatattatatattataatataagtgtgcgggccaataaactaatattagattcaaaataatcattttttacaacttaatcatctaaaattatatctaagatacttatggcaaaagtagtcaaattaatatgattttttatagtattcaagtacttatattattattattattattattattattattattattattttgattaaaggataaatttacttatcaaaagaaagtaaatactacacacactagaattcatagaacaataaaagataggcttacttacatgttacaaacaaaattaaaaatttattggtctcttttagaaatttttcatattaacatgtattaatcttgctataagcgtaactctaatcaaattatttatatatgaaaccaaaaaaaccttttactcaaaaatacaagcattttgattctaccaaataaaataaattactgttgcacaaaaagctgcaacaaccttatgaagcacattgcgatctcggttagcattcaaccacaaaagccaattcgtataagactctggccaaatgacattaccaagccaagaatgaatagtttgcatgagatgcttgaaaaaaacaatcaaagaaaagatgattatgacagtcaacaccaacctcacaaactagggagctgataggattcatggcaatttctcttgccaataggtgatctcttgttaataaaatattatgagaggcttacaaaagaataaatctatattttggtatggataatctacaccaaatcattttataactatcaactttagcataaggagta

SEQ ID NO: 316074 - DNA, 1355 bp, Cannabis indica
aagaaaactgaacttactcattctgatccacacacacccaaaaaagacaaaaaaaaagaaaacaaacccaacaaattctttgtcatcatattccaacaactataaatacatatctcaaacatatgacatacaaaataaacttctaaactacacaacacattaaaaatggattcccaaaccctaaaaatctcaacaacactttcccttttctttttcctattcttattttcatcatcaacaaaagcacaaacatcatcaccatcatcaaacttggttgacacaatttgcaaagaaaccctagacaacacaaagtgcttggcagctcttgaatccgatccaagatcaaaaaccacaacaagtctcaaagctcttgccaagatatcagttcaattatcaatatcaaacgcgaaagggagcctcaatttcatcaacaacgaaattaagaagggaagtggtagcggtcaacaagaagtacttgagcaatgtgcttcttcctataaagccacggtggaatcattctcgagtgcactcaaggaactcgatgatgatgttatgtcggctaattatgatatcaaagtggctggagacgacgctgatttgtgtcaggctgagttggtttcgaaaaaggttgaaattccttctttggaggataggaatgatcaagtgaagttgtttagtaatattggatttgttatcaccaataaactttgatgttgattaatatgatcattatgtgtaataagtttctatctatttttttttttcaaattatattattattagaaaaataagaaataacgctagattttcggattttgttgattatttgcatgtgaaaagttgtgattagaaaaaatttattccttgtattttgttatatgcatgcatacaagatagcttctggaattttttttgattttttttggctctttttttaattttgacaacttgaaatatatgatcctttcttttggatggatggttcggtttattttttttctcttaatggtagatgtatattgaaagaaatttcgaatggaaaatcttttgaggtaacttcccgtaattaattttagtatatatatatatataaaatttttatggtaagaacctttattttattcctatagtatgaagacattttcttaactatagataaatagacttttgatattataaattagttattgtatactattacaataaattgctattttaatgagaactttttaatcataatataatttttttgtgactaaatatgacttttagtcacaacaaacgttgttgtgactaaaatataatatttagttacaagttattactaatttagttttagtcacaacaagtattgt

SEQ ID NO: 316075 - DNA, 922 bp, Cannabis indica
taggacacaaaacccaacagaactatcagagtcctctactacagccttgcccttgtccttagatataggcgcagggcatgtaggtctactcaaaaccctagcctctaggctagatatgaggagaagcatcacctaccggaccccctagccagacgccggtggagagccttctccctcttctccaaattccatgcaatacaagaaaaagatacttcatcatcagccaagctagggccttgcccatctccagggcagaccccatttgttgttggcactcttgcagctccaggagcaggaggatacaagccatacgtccagaaattgtccacactggtaaaccagataatatttttctgctcaactgataaagacaggatgtgattttccctatcccttatttacaaagcagggatggaacgcctgaagagtggcacatgccaaaattcgtggtgcccaatcctacgaagaccatatgcgataaagtactttttggcatacctaccgaccttcgacatggttgtgcaatcagtgtcacccagccattggtgaccaatctgactaaaataaaattatccagtcctattttgcttcagcgcaaacttaagatcaaagtagtactcaatcttgtaaggagtaggtggaggccagcatagctccttatactagatgaacattgtcgagagatacttgatgctcttcagcatgagctgtgttgggcacatcccaaagtaagcaacgacgtccaaaaaatacttttgaagcggcaacactaccccatgctcaatgtggtgttcaaaccatgccaaccaacccagaaggggcctatgcgcttgcagtttctgttgggttttatgccctaaataaaactcatttcatataatcaaatttactattaataaagatcaaaaataacattttatgt

SEQ ID NO: 316076 - DNA, 1005 bp, Cannabis indica
ttttttattttgggcccccggaaagtgtgggccctaggcacgggcctagcccgcctatgcctagggccggccctgtatatatgaaatattactatatgatcagcagttaaatttaaaattaagtcttgcttaattagttataattaatttaattatttattaaattaatttctttaattttgtttgaagttttaatattgcactgatcaacataacttattatctcatagtgaagctaataattattatttattttcctctttatttatttatttatttcagatttgcttgggtacaaaatcatcaaaatgcattatttctccctggtaattatctaattgaatctccttttatggcttcaataactaattcttctttatttgtaaacttattactatattatcaagctcttagaccatttaaattaatttttgtattttaattaatttggtgcaggtgatcatatggttttcttcattctaaatgttatcgagtttattgcactcgtaatgactttcaagccttttctagccttaactaataatgatgtcgtttgagtattttaaatatttaatttattatattattggatttattttattatattaaatataggatcggattggatgttgaaaaaataataacagagttggatgttgaccttgtctcgatattttttttaaagtttaatgtttctctatactagctagtttcatgctttttcattgttatgatttttttttacttttaaaataaattctattattaattaatttttgcaatattatggtgttattatgatttatttcatctataaaatataatttttacttatttataatgaaaaaaggtcttaattttgaaagatactaccatatataaatactataactagtatacagtaaaactttagcgggtaattaatatagttttttctatatatataatttgatcataaaaaaattagtagactaacatttaccatattgtagcattctaaaaact

SEQ ID NO: 316077 - DNA, 2846 bp, Cannabis indica
ataatgaagacatcagtttcttgatgaaaaaaattaaaaaaaactaatttcttgatgaagaaactagtttcttgataaaagatttttggtaagtttcgctctgaccgatcattgccggatgggtggatcgtcagtcgtcgtttgcagattgtggagttggtgaaggaaggtggataggtggagctgttgaggggtggtggaggtagggtttgacagaggagaagaaatgaaattttttatttctaaaattgattaatctaaaagattaaatataagtttcaactttcaaaaattacatttacatatacatagaaaataccataaaatagttcaaaaacaaaaaaaaaataaccataaaaaatggttaagtttaaagctcttgtatttaagtagaaaaaaaaaaaaaactaacatattgagtgtaaatttaactattttatacatgtgctagacctttttttttttgaaaaaaagcatttataaatgaaaataaaattaaacatcatggtcgttacaaaaattattgtcgggtatagaggatagctccaccataccagttaaattatttacaaacgctcacatagtcacgttataggccgtgaaattacaatatgtaaaaataaaagaaaaattacaacataacaatttaatagataagtgtttacaatgatgtacatagttatcaatgttaaaggaattcaatttattctgttattttctgttaagttagtttctcaactgttttggcttcggttgttaggttagcttttcagttgtaacagattcttattttgatgagtatatattgtactgaatcttccctaacatggtaggttgttaggttagcttttcaatctttctcttcatcttttctctctatttctctctgttctttctttgttgcttatgttcatcgactgaacatcaatggctaggagattcaactctcctaacatggtatcagagcagtggccacctctcatggcaaatgtggctagctcaggtcctggtatagctactaatggaggaacgacgatcaacaatggtggaaatcagatcaatacttagaatggaagtcgaaacagagattaagatgagaactcaccagtttattttaatcgttcgatttctatcaaacttaatgatcacaactttcttctatgaaaacaacaggttttggctgctattcgtggcaatcggttgctgaaattctttcaaaatgcagctcctcctcctcaatttctcaacgacactgatcaaactaatggtgtgttcaatcctgcgtttatcgaatgggatgttcaagatcaactcctcgtgtcatggcttttgtcctccatgacagaaagtttactaaccagaatggtgggatgcaacactgctaggaaaatctagagctctcgaaaagtattttactcttcgtgtttcatcaaaaattctggaattccgcaccagacttcagaatcttcgtaaagaatctatgaccttgaatgagtacttactgaaagtaaagcaaatggttgatctgctagcaagtgttggagaaactctcaatgatcgtgatcacatttctgcaattttcaaaggtcttcccactaaatatgacacgttcataatttctaccaatacaagaattgaaggctacactgtagctgaaattgaagcattgttgctagcatcagagtctagaattgagaaaactaatcaagaacatgagatcagtgtgaatcttgtcaagactgaagcagatcatgcctttgatcaagatctgaactttgaagctaacattgctcagttcaatcacaacatgcgatatcccatgccaaatcgcaacgactttaacaattctagaggaggttacactggaaacaatactcgtgatgctggaactcaatcacatcaaccaaatcaaaacagtcgtggtgctcctttcactggaagagggggaagatttcctgctccaccatcaagaatccaatgtcagctgtgtcatcgtcttggccacattgtccttgactgctactataggtttgacaaatgctttacaggtgtgggatccaactccacacaacaaaaccaacctcaagccaatctttctcagaacacagtttcacaagacacaaattggtaccccgactttggtgcaacaaatcactatacacctaatgttcagaaccaaatgagtcgatccaactaccacgaccctgacaatctttatgttggagatggaacaggtttgtccattaaacacactggtcattcttgttttttgtccaattctaatttgattcttgtgttaaacaatcttcttcatgttccaaaaatcacaaaaaaccttctcagtgtgtctaaatttagtagagataacaatgtatactttgagttttaccttgatttctgtcatgtcatggaccaggtgacacacaaaattctcctgactggtgctcacaagaatggcatgtattcttttgatgagtccctggttcagcttcaaccttcccctttgttgtctagtgaaaattccagttcagaaagtgaagccaaaaccaagtcagatcctgtccaagccaatgtttccattactgccaacatagaatgtagtcataccaataaacatctgtttcaaatgtggcacaacaggctaggccaccctagtgagaaaattatcaaaactggtcataactcttgtaacatcaatgttagtaataaaattcctttttctccctgtaatgcttgttgtctaggaaaaatgcataagtttcctttccctaaagcatctgaaactgtaacgccctaatgctaaggcactctacagtactttttcaattattgtgcaatctttgcta

SEQ ID NO: 316078 - DNA, 803 bp, Cannabis indica
gacttgattttttttataacaaattagagattattcttgaatagagtattcctaaatagatgttctactgtatcttgcattaactactgacatagataagcaataatccaacaactgaagacgtatttccttgattttattctgaactccaaaagctaaccatttatctacgcagctataaaagtcgcttgtttcaaaatcatctatcataaacttaaaacttgttatgctagaatccgagataaaatacatacctctcttgcgttgttccaaacaattgtcaacaaacttacaaaacttttctggccaatcgccttcattagtaaaatggcaatcgctgtcgcagaaagagattgtggggactgaataccacatgagtttccaatgctttgaaagaaagcaagtctgcatctggggtgggcagaaatgagaggataagtatgatgagtgtattaggaagtttcgagattctgtcctcatcagccattgatgtagttttaactcttttttcagccataagtaaaacacaaacgccctaacggatctcgggctgtaacaagaaaaaagaaaaaaaaaaccaagagggctcattaattcacatgctctaacccctacagctagaggtttaacataaatttttaatgcaattatgaaaaaaaaaaaagccagatccgttaatccttacttgtagcttgattagtggttaaaaatacacttttatttattttaaatgataaaataaattgagttttaattgatattttcatgaaattatttataaatgaaaatatttgattttgatt

SEQ ID NO: 316079 - DNA, 1123 bp, Cannabis indica
ctattatgaaactgaaattatctatgatgttaaatggttaactataaaatttttacttgccaagtttgctattttctttagtataaatggtgcatattgttttcttataaagaaaaatgtaaatgaattgtgtgagttttattgataagtagcaataaataaagtagattaaaaaaaaaaaaaaaaaaaaaaaggtacaggctgacccgacccaattatttcgggtcgggcctgacctgctaagatgaagaacgtggccgaatcgagccgggtctgccctagccccggccgattgacattcctattaaagataaaaaagatatatattgtggttgcatacaatgtatttaaattacatcatattatatgagccaagaagataaaccttgactagaactttagaatattgaggctatgctgtcgaagcttcagtcaaggctttcttagttgttagatccaatccaatagttggctgtgttgtgagagtcagcaattagtttaattatttagtagcttttatagtggtctggtggttaggctgttgtgttaggaagttggattctttctaaagattatgtcacaccaacaaacaacaattcagtacttaatttttactttctaaatttatcactagagccagatctcactgttttaggttattaattaatcataataataaagtaaaagcaatcttaggaagaaaaaaaatcataaagaaaaagagaaagattgattgaacttatttcagatcctatatttcacatatgttatgttggatgtattcacaattagaacaactctggaccactgtagattgattttagaccattttagattttagcacaatgttacacgtataggtatatttaattatatcacactaaaaaaaagaaaattaatttttaatcacaacataaatttttgttataataaaaagttgacttttaattataataaaaagtcaattgtaactaaaacatacaagttgtcattaatttagtttaaattgtgactaaaaacacatttagttacaataaattatgatttttgtgactaataactttagtcacagactttttaatcccaacataaaaataataatttattattaatcacaattttt

SEQ ID NO: 316080 - DNA, 660 bp, Cannabis indica
cttaattaattccaagccaagacagactcaataaattggcttagttgactaagctttcattaacattatctatccaaacaaactagcagaaacaacaaaattgtatactacactgttcccttatttttcatcaactatcctttcaagcaacaattaaccaattaagtatcactttctcttttttttttttttttttttgataaattattaaattttaagaacaccataatgagaaagataaagacctaaaacacaatggaatagaagaagaagagagaaaagaataattggcagttaaaataattaccgtctgtttcaagacaaattcggcactggatttgttcgccgggtcctgcctcgaggtcgatctcgttgggatcagtgatcggagacggtgggatgagaggcgaatcgtcggagtgatccgccataaaagtgggaggaaagaagaagattaaaagtaaaagagaaatggaagaaatgggttgtctttgttagactgcattaaagaaaccctaattcccaattctatcaaagggaagagaatttcaatgcctagcctgagaacggtggagtggaatgggattcgagaacgtcaacgtatttcaatttctttttcgtaccaaacgccaatttgttttttattttttttcctttttt

SEQ ID NO: 316081 - DNA, 1890 bp, Cannabis indica
taaaaataaaaaactccaaaaattaatgacgaattaaatagtgattaaagtagttaagagtaaaaattatatctatttattttatttcaataataacattacatagtctaataacattaattaactaaaaaaatgtaatattttgtaattacacataattcttataagggaccacgagaattagaaaatgtaattaagattcttcaattatctctaattacatagttcttgtgtaattatatttctcgaagaaagaagaaacatgtagatggtactgtaaatttgttaaaaaattaggaagtagatgattcaaaaatcctcacctggataaataactttgtggaacaatctattggtacccacttagcaaagtatgatacatcaaaagaagtctaggaccatctcgtaagactgtatacacagtctaattttgcaaagcagtttcagttggaaactgaaactagagttattgaacaaaaagatatgagcattcaagagttctattctgcaatgatagatctatgggatcatttggcattcattaaattagaagagctacgtgattttgcaccgtatatttctcgtagagaggaacaacgattggttcaatttttaatggctcttcatagtgattttgagggacttcgtggttctatattgcatcattctccactttgttcggttgatttaatcgtcagtgaattgttagtagatgaaattcctctcaagtctcaatcagggaaagactttctctcaacacccaattcttctattttggtagtccctcctactacactatttcctctacaagagaacaaacctcgcacaaaagttggtaatgatgagtgtagcttttgcaaacataaatgtcattagaaagctcaatgtcctaagcttgcaaatcgtgatttgcaacaagaaagatatcagcccacacctcctcatatgagtaactagccataatttaacaaccaaattcgacctccataatttagtactgttgcaattgttcctccatcaggctcttacgattttgttgctctgtcggaacagtttcaaaagttccttgctactcaacctaatgccatgtctgtctcttcttctgtaggctaaccatccattaccacgtcaggtatgtcaccttctacatgagttttcacaccttatgtcttcgcattctacatcctttacttctttgagtcctacatcgtctatgcctatcatgactgttgatggtactccaatgccattagctggcattgatctgttgtcagttcaaatttatcgcttcctaatgtttatcatattcctaattttcattgaatcttgcttttgtaggtcaatggtgtgattctggttattcagtatatttttcttctacttcttgtcatgtataggattcatactctcagaagctgattgtgaccgaccgtgggcgaggcagattatatgttttagatgagctaaggttactagtatttgcaaatcctagcattgatttatcttttttttcatttgtctccttcatattctagtttttatttatggcactctcgcattggtcatgtttcatagtcttgtttaaaaaatttagcttctaaaggaattttaggagatttgaaacctcatgatattttttattgtagtgaatgtaaaattgcaaatttttctgctttacctttcaataaagtacatcttcttctgttgcaccctttcatttagtacactctgatgtgtgggggaccctctcacgtcgttacaaaaaggggttctcgatattatatttcctttattgatgaccacactcatttttgttaggtttttcttatgaaacattattttgacttttatagtatttatgatcatttttgagcttatgtcaaaactcaa

SEQ ID NO: 316082 - DNA, 820 bp, Cannabis indica
agacttgtgaacatctctagcaacctcattgagtggctctttattgagatcacaaattctttttccccagtttggaatggatatcacatttccgaagaagttactcatcgcgttatgatcctcttttccatcgcctcttcctaatagcttccgaccatcaacaacaatgcccactttacattgcttttcaacatcagtactagtagaagatttggcaatcaacttccataaaaaaacactaaaagactcaatcttggttatgttattgttgttgttgtttttgcaagctagggtttggaggttgttgatatgttcagctttaatatagtagaggcgattaataggattgtcattatttcttggccgcgaggtgttttctggagtagtgacaacggtaacatacttgtcataaaccgaggtgtcaatgctaccaaagttgcggctagggtttagtaaagatcggcgaaatgagggcggattattataggtgagaggtttagaccggacaaattcagcccatgatactaaaaacatgctagctgagtagccgtcacttatacgatggtcaaatagggtcaccacaatcacactgccacacttgagagttgttgactgcatgtaataatgagaacgaattagtaaaaattgttacatgtatattaacaatgtttcttactacttataatatttacttaataccattacataagggtgattcttactcataaatactttttcttttgatgttttcgatacataataaataaattgttatcatatgtatatataaaaatatatataaactaagtattagtaacat

SEQ ID NO: 316083 - DNA, 894 bp, Cannabis indica
gggaaaagatgatgcatccatctcattccttcagataaaatttgacgcctcccctcctataccctagccgaaagtatctttctctctttctctcttctaaactgaagccacagagtgaaaagagtgagtgcccacacacatcaagtagtactcaatcatagtgtgtaaggctgtgaagaatccagattcaagagaaggagattcgtactcagattttggtgatactcttctacagaaaggatacaagggttagagatttgagtggaaggagacattatattccgctacaaccactgtaaggtttcttatactttatatgtgtttatttcatattgttttagaagttcatattaaggatgttaataacatacttgttagtaaatttaagatcctggtaaaacaattccaatagtgaagaaccttgccacaactaacaatctacagagggaggtggatgcggccaacaagaaggtcctggacgtgagaaatgagctgggagaggtgaacaagaagctccttgctgccaacaacttggtccaagagctaactaaagagatccaagagatgtcatcaaccgcccagctcgaggcagacaatgacgctttaaccaaggatgtcaatgaactcaaggacgagagggagggccttcgtactcttcttgcgtacttaatcaaggataagaaggacttggaagaggatgtcaagtctaggtagctgagggaagaagagctcttgaagggggtggaaaacttggaaactgctgccctggagatcttttatgaattttgaaaggcaaacccatcaggcaattttgattacctcagagattccaaagagacatatcttaattactgtgtgggtcaggcgaccaaagaaatcctaaaggaagctaat

SEQ ID NO: 316084 - DNA, 1089 bp, Cannabis indica
aagaaatcctaaaggaagctaattccactgttccaaccgaccagagcattgagactcctaccatccagagtgtcgagcctctagccccttctgattaggctgatccatacaaggagcctgggacccctgctatatgaaataataatttttttctcttttatatctgttcggcccatgagcctttaatagagaccaaaattaccggccaagcagtttttaaacttggaatatttcattttattttgagacaactagctgaccgggcagcctttaatcttaggtttagaccgtgctttgttatcttttttcaatgaatattttcccttattatgataattattcgtgttaactgatatgattttttttagcttcttatttacttttaccagtgctttgtacgggtatagttgcccccaattgaccgagcagacttatgactcttggtcacttgcatttcagaagtatgattttcatctatttggtgctttgggtcaagtggaccttttgtacgctttaatggtaagttcataacttgctaatacaattgacacaattagaatggaaataaacatattcatttattggtcggaatagtttttttaccgtagtaacttacatttatgaaatctattacatgatctaatatgatctttagctaaatttaagcataaaacaatttcacttaaagaaaaaacagaaattgtacatttaaaggtggtcatccgacctgggtacttaatattttaatcaaaaccttcgggcgggatccgcccagaaggccatctacttagaagtaaatgttcttactttgtctacttcaagtggtcatctgaccttgtacatttactggtagtactttctcaagtgttccccattccaataccttggaactagaacgagctccatattttcgtcatactgccgaagcttatatgcccccgaccctagaacttcgaccacataatatggtctttcccaattaggtccgagcacaccagccgtgtctcccacaaagaatttccttgctttcacttgcttgttgaagtatcgagccaccttttgttggtgtgctactaactttaggtttgt

SEQ ID NO: 316085 - DNA, 592 bp, Cannabis indica
gtacattttgggaacacggtattctatcctacagccgacctccgttcacgatggaactccgaaagagggcccaagaaattctccaactcccttaaggtaataggaacatctctctcttggccactgaaaccaattttgtcaagtatatgttctattcatctgactacgtaccaaaagccaagtaggcagtaggggaggtagtatccaaacgagagactctgagcaagaagaagaagaagaggaaggctcctccaagtgatcaagtacctattgagtgggctattaggattaaagatggtcctgagaaggtcgctccatcttctgccctagtggcttgaattaatgggagaggccattgtggctgacaaggaagaggaggattcttcagatgagtatgctccttctttgcttgtttgggagggtgcttctgcccacatgcagggtactttatcttgtttttaacttatttgcattcatttagatcattcttgttttgaccctcttattttagttatgtgtagttatgtctcagaggatgctattgttgggttttatgccctaaataaaactctttacaatctgattagttatc

SEQ ID NO: 316086 - DNA, 984 bp, Cannabis indica
agcatctctttgccagaatcgagtcaaccgtataatggcatacgagattgaagtactccaaatgcccactcaacatcattggatgcagcttcttgacatcgagcaaataattttctcttctctccttgaggcaatgggatagctttaacaaatgtaccccattctggatagataccatatgctagataatatccctagttgtattgtgtgacatttatcataaactcaactctgggagcttgtccctgtaagatgtcagtgaataatgatgattggtttaaaacattgagatcactattggatcccgaaacaccaaaaaacgcatgccaaatctaaagatcttgggatgcaactgcttcaagcatgattgttggcacaccgtgatcacctcgtgtgaattggtctttccatataattgagcaatttttccattccagtgcatacaatcaatgcttcccaacattccatgatttagttttatagtgtctaagtctgaatgtgatttgtctgtgggatgggtttgtcattcccacaccaatattttcttttagtatattatttttgatgtgattttgttattagcagctgttggtggtagttcttgcaatgctattccgtgttctacgaataatgttgtccatatactgacaacttctgttactagtttaagagagtctgtatggacatatgcttgttcttgatttattagttctcctataacagttaatttttcttaatgaatatattttcttttaaaaaaaagtgccacgtgtagaaaagtgtacacattcatggtggcattaattggatgacaccataaatgtgttaacagttcagtaggtttaaagattttatcgctaaaatttgaacttgaaaaattaagtgcaagtaaaacgataattgagatggtttaagcgctaaaaactctattaagccatctccaatggtaaaactaaattttgtattaaatcaacaccaaaaaac

SEQ ID NO: 316087 - DNA, 851 bp, Cannabis indica
cgttttcgacccgcgtctaatttccaacccgtaaaattcgtgtcgtgttcatattcatgtaccatgtcgaaacccgttttactacccctacttatttgtaagaagatgtatgtgtttgaattgtaatattgttataagtaaatattaaatcttatttattttactctcataaaaattataaacaatccttaactaattattggtgttcttgtgaaattaataagttatgtatatggacatgagaaagagtatgggttcgcagcagttttgtgcaatttaatattgggtgcattaggaataaatgtgtgtaattacacaatcaattccaagagacccaaaattaagctctgtaatcaatattgggtgtgttaagaactaattatttaattactatcctagtaatttaatacaaaatatataattccattgagctttgctctttaaggttattttctttaaaaaaaaaaattcgaattcttaatgtattatttaataaaatagttagtaattacattccaccatataagaattctaaagtgttattgagacctctcaactacttataatttgtaattacaaataattatgtggtcaaataaacttgacatctagttacactcaattctaactcattcttggctttctaattgtgcctaaaaatttcaatttctaagacttgaatattaataataatgctaatgattagtgattacaattaaacaaaacagagttgtatatatttatgggtaaatactattttggaccctctgttttacaaaagttattaattggaccctgtgtttgttaaatgacaaaatagaccctgtatttctaaaatagtataaatagaa

SEQ ID NO: 316088 - DNA, 1010 bp, Cannabis indica
taatataaaaaggatatagagtgtaatttcctctaattttaatccaaaactccaatgtttgggccatttaaatttaggataagttgaaaaataccataactattaattaaaaatactctcacatttttttttattaaaatatacccacttttttaagtaaattacctaatatacccttactctttacttaagtgtagcatataatttacataacctacagggtttaatggggacatcatccataaaaataggtatatctaaaaatatatgaaaatagagataaaaattaaaacaagtaaggtggatatacaatataatttcctctttaaaattcaagaacaattgtctcgggtgaatggagcttgttccatcttgtaatctttgaccacgtgcttgacttgttctagtctacgatctatttactagctaggtagaaagagggtggagaatgctccatccatatacatctttttaactattttaatactcactgaaaatttttaggtaagagtttctagtttatattctgaatgtaattttagtatggaaaatgtcttatataattgagctgctattatgtttggtagctgaatttcaaatttaataaagctaatgaatattcatttttttttttaaaaaggaatgcaccgattttatctgttttagtattcaaaataattttttagtcaaatttttttcatggtcatgtaaattatagttatttaacacatcctgcaaaattttaagaaattcggaaaagtttaacacgccaaaaactgtgttcaaacagtgtgttgcacgcgtgactattttattttacacgactataaaatggattgtttgaatattattttctatactgtaaattattccgaattttttaaaattttgtacgatatcttaaatagctataacatacatgaatatataaaaaaaaaattagactaaaaaattctttcgggtgtcgaaacaagtagagcatgcattagtacatttcttttaagggggtg

SEQ ID NO: 316089 - DNA, 1007 bp, Cannabis indica
atcgttactagcaataagtgctagagcgtctagccaggctgttggtattgtaatcggggagggactcctccggtggttcccatcttttcttctatataatgaactaaaacgttctataacaaaaaaaaaaaaaaagtagggagtaggcgtttaaattagcctgggagtcgagaggatcgattgaaacttaatagagatgctgctcaatcagtattctcaaaaaaatgaggttcgtaatagtccttcacaatagcaaagaagttgttgcatctccttattctggtatattcacatcaattcaaatgtgattgtaaaattctcgttaatagggtaaacgataaaaaggcttaagtgtgttccgctacatgattacgttcaattgatttctaaagctctatcttattttccacatgtcagttcgctttatccatagggaggccaacaaagtaatgtattaggaagatccctttcttattcaatgtaccctgaacaactagattaatgtcaatggatggagttttctttaagaataataaaaataaatgaataaatttggcaaaggccagggaggggtccctctaatgaaaagcgaggaagctttacgagaggctgacataatgagcatgcgacagggccctctttccaaaaaaaatcaaactcactagcataattgagagcagtagctttcgttttgaggaatctttttacatcaaacatcacacgccatttctttcttttctttttctctctttttccttatttgttactttgataaacatccaatttcttattccaaaaccacagagcaaatagtaccactacaagtgtaaatccaagcaagtgccactagctgtttggatacatggaaaataactgcactgactgtactcttgcagaaagaaaatatgaggcgtaactctcatcaaaggtgattagaaattgtctgtgattttgtcctcttactgaattttcatgttcatgctaaagagagagagaggagagagaga

SEQ ID NO: 316090 - DNA, 2046 bp, Cannabis indica
gtctaacctattatgccttacttcataactcttctcatttattcacataatatattatcgcatgtttattcataatttaaactttgggtaataaccctaactcatgattttatctaacaaccatgtaacatacaattgcaccatcgtgctacactctatgtgcttagttcactgtcttacccaatttctaatgtatgaggagaattccaatccacaagttatcctgactgagtatcggtattcttagtcacaatttttaggtttcacacatagggttaatcccaaaatcccatttcataaaaattaacatttaggtttccaacattgaaccaaataatagagctcaaaatgagcttccaacgatatattaaacatctaaaacagagtttggagtaaaaaattattcccaaaacaaaaaatgctaaaatgaactgttgtcatggggtcgctgcgaccagaccatatggtcgccgcggtaagattgggcaggggaaaatccatgttctgggttcaagcttggtcgcggcaaccacgagcttgaccacagagactaggcttaaaaaccaagaaaacacaatttacaacattttgaaaatttaacaattcattcatacttcatactattcaagtagtcaattattaggcttaactctgagagttatcccaaattttgtccacctgaggtggcatgcccatgtaagccaagacagaggacacgtggaatacagccttgccaatagtaggacaaagtctccttataaggcatggcaaaactgtcaagtaataagcaagaggacaagttggctggccaaaactgactttcagaccaaggaggggtccgttcaaccaaggaagcctgacctctataaggaaaagttgtacaaaggttggccaacacctgcgaaggctggccaacacttgccaaagctaggaggaacatgacctaccaaaccctggcagaaacatggccggtcagaccctggcctacagacattgtgcggctagctagcctgcacctggcaggtgcatggccggccagcctttaattggtaggcctttggtgtgtagccttcatccgtggagagcaaaccaagttgtggttcggaccttggcaactcatgaaaataggagaagatatcagcaacttacctatttttgaggaaaaattaactcatttgaagtttattatataattatgtaaatatagttttattgacctatttttaagggatattagttgttaatctacatgtaagctctactatataaaaagcactagcctaaccctaattccctaagtgctaagtttctaagctcactaaagctctcaaactctaagtttgaaaccttaactctctctttccatctcttctagacgccccagggctctctctctctctctaacttgacatttgtctacttgattcatatattgtaatcttaagagagctactttagattccacaaccattgtgatctgagtggtattatctctagtattaatacaaccaaaaggagagtaggtcattactcgctaactcagagggccgaacctctataaaatcctatgtctcttttactcttctattcttattgtataacacatgacaagcatcagtaataattaccactttgttgtcggttggccaaatttgaggtcaatactaagtataaacaaccataatctaccacaagtatttcatgtctaaaacacatacttcataaactccatatatcacaaatacataagcaatacacaagaaatcccaaactcacataggaaccaaaattcaaaatcaaaacatcttaatctttaatagcaagtatacaatcacagctacaaaacccttgcatttaggctcaactaaagaaagaagaatccaaccaaacattcaagaatattgtaacatccctgcttcaagcctccattgggtccttacgcccacggaatgaatggctcttatacacgagtacatcactctagctacttcatggactgacgactggccctatagaccaacacgagtgtttccagcatgctttgtc

SEQ ID NO: 316091 - DNA, 770 bp, Cannabis indica
ctatataataatatagttctattaagcacgtaattaaattaacttcatcaaattaccccctctcgggtcataatgaccaaaatgcccctagctcaccaacggggtctttaacatattaaaattcataaaatttcacatttattaaactatataataatataattccttaattattcataattatttaattagggttttgctaatccttttctgaattccgggtattacaaacctagttgacccaaggtgatcgcaattttaaattctttcaagtccagcccactctttcccatggtggtcataagtttatttggaaaaaaatcaaaaacactgctacaatatgggcctttagcttcccttttttcaacccattttataaaaagggaagctaaagggtgtgaaaatacccgcctgatttgaaattaatatttagaggcggtttttttggtaaaaaccaaaggtatagatattaataaaccctatgttgtgtgtagggggttggaaaattttgagggttttcaataaaccctatgccgtcggttcctagcaaataaccgacgacataggtgcgcactttattgacacgtgtgcacctatgccattggttatttgctaggaaccgatggcatagggtttataaaaataacttaacctcgtcttcttcttcttccccacgatagcagaccccttgaaaacccacaaaacactcgccaaccaccactaaaaaccccctatctccctcatttattcaccatttcatcccattttta

SEQ ID NO: 316092 - DNA, 629 bp, Cannabis indica
tattttttggtttttaatttttttttctagtgtaactctatttagttataacctctcaattataatataatttacttggtcccaagtgtattcctggatagatattctactggatatttaactataatattaaagttggataaaaagaaagattgggttgaagttcaacttgaattctgattgcttagttgttgtccaagttatgcaaaatttaattcatatgccatctccctctgatttattggttcatgagtgtaagcttctccctttgtttgttgtccaaacaaagctacccatagtatcatgcgtagcttttgtttctacccagtttgtattttcactaaacattacaaatttttttacttttagtcacaacaaaagttatgactaaaattataaaaattgtgactaaatataaattattatttttatgttgtgactaaaagatccgtgattaaaggtattagtcacaaaaattataatttgttgtgactaaatgtatttttaatcacaatacttgttgtgactaaaactaaattagttacaacttgtaattaaatactatgttttaatcacaagtaagtttttgttgtgactaaaagtcacattatttagtcacaaaaaattta

SEQ ID NO: 316093 - DNA, 653 bp, Cannabis indica
tagggtgaaaggaggtttaggatgggggtgggagcctattgattaaataagttgtagaagtgaaggcttcccaccagtattgcaagaggatattggtctgagcaagaagtgtgagtcccatgtcaacaacaagtttgtattttctttcaagacgaccttattgctgatgagtttggggacaagagtttcttgaactattcccattactttgaacatattgtacaaaggttcatattctttccctaaataggattgaacacttttgattttaaatggaaaaccctttcaacatagacattaaattgagtaaagatggatttgacttcagatttggatttcatgggaaataaccaagtgaacctagtgaaatcatcaatgaaactaacataatacttataaccatcattgaaagtgtaaaaggaagggccccaaacatcagttaagactaattcaaaaggcattgtagttttatttaatatttttttaaaactgaactaatgtagcttgccaatttgacaagcattacaaaatgagttggcattacatctaatatttggacaaacagtagaaagaactttattgagaattgagtgagaggggtggtgttgggttttatgccctaaataaaactctttacaatctgattagttatc

SEQ ID NO: 316094 - DNA, 622 bp, Cannabis indica
ctaattagccaaaaaaaaaaaattggtggtgagtaaggtgagaagaaagaaagagaagcaaaaaactggtggtgagattcagataaaaaaaaaatctggcggtgagaagaaagatacatgaaatttttgtgaaaaactttagggaaaaagaaagattattagttttattatttgatcgttctttaacattttcacaaatgacaacaagaataatatatgatgcaaacaatcaacatgataagacaattgaacaacttctccccaacatgttcaatacagcatcaaatttttggtcagtctgactcagcaactcttatcttaagatatcaaataccacaagaagaagtgacatattactattagtgtaatttaatattgtgtttcacacattttaaactgctaactactcacaaagcactacattaaatctataaatgagtagtagagtatattacaactaactttattttgtatattaatagagtcaccttcaagattcaagtaaatattacagtaaaacttctatttaagaatactcgattcaagaataacttctaatttgttataaaaaaatcaagtcccgatttgggtcagttataaataagaataacctctaaattgt

SEQ ID NO: 316095 - DNA, 768 bp, Cannabis indica
actgttgggccgtcttcgatagtgtggctaggaatatgcaatagagcacatcactagtgaccttctagaggtcaagttgcatctcgaagtatttaatgtgagcaagagggtcctctcgtcctgtatacatcttccataccgacatcttgaacttcagtagaggtagggcatttatatatgccgagaatggtgatcccctcgaccgatcgagtttgaggtctgaaggttttgggccaacaatgccctggatcatgtccctgagttggtccaattatgcttgcacagaaggatttgttgctgtggggacttgattgactggtcctccttggggacgctacaaattctaaagagacaaggtttggctggccataccctgggagagtgtatggtgaagatcagccatgccttgcagaccctggctagtcatccctagatacgggagttggcctaggctgaccaggtttacgcctggctgttgtgcttagcagaccagacctacattgggtaggggctggccgcccagttctccttcatggtcggctatacctgtaaagggcaaagtttggccgcccattatgcctccatgatcggctagacctgccttggccagggtctggctgcccgcgactcctcgattgactgttgttggttgtgtattgatcaaagatacatcacaccaatggttagagtttggtggatctaaatgcctgaagtggtcaatttcacttcttgaatcaccatttaaggtgtttccacccagtctcggtc

SEQ ID NO: 316096 - DNA, 1687 bp, Cannabis indica
tggggacttattgactggtcctccttggggaggttactgattctgaagggacagaggctggctgaccatactctgagtgagtgtatggtgaagatcagccatgccctacaaaccctggccggccatccccaggtgcggaagttggcctaggttggccaagtttatgcctgtatgttgtgcttggctggccagacctgcattgcgcagggtcttgccgcccagtactcctccatagtcggtcaggcctgcaaagggtagggtttggctgccagtgatgcctccatagccggccagacctgcattagacaggctctggctgcccgtgactcctcactcgactggtgtcaattgtgtgttgatcgagggtagagcacacatattgctggagtttggtgttatcggtttcacttctttaatcgccattttgggtgtttccacccagtctcggtccttgttggtcgaagatcaacctctatgtgccttgatccccttagaaaggaagtgttgtaccgtggacgaccatgggtactcctacagatggatggtcggccagtggttgtacagtgtgggttgctattgagccagagatccctggccggccccctaagccactggttgctgggatctggttgttctcaccgtttaacctttgggaaaaggtctatcatccctccagcaagggaagatccgtcctagttcctgaggaacttgacggtaatcatacttaaagtggatccctaagaagatcctgacctcttgtgttaattctctgattgaactgctggcctcccggtagtggcgatctaatttttcctggtgagatccaaggaagtactcctggtcatccatccttctcaggaatttacgtctttgctgtgcaaatacattgcaatcagcagcgcgtggttcttcaattagccatgccggccttcagcttccctgagtctggccaactcaaggtagttccagatgaggctcgctaattgctagctcatccactcccagacctgtttctccagatttgaggtccagtcattgttctaggaggttgttgcccctgggtccttcctttagtgggaggcgccaatggggctgccacttgcatccattgggatgcttacgtcaggctggccaacagtggtggctaaactttctatgcctgttgtggtgatgggattcaccacatttgcggtattcatggggatccctgttgtgactggaacccgagtgtttatatctataatctatgggtcttgagggagacccgaagatgcagatggtggaacaggagttcttcttgtgttcaccatggtgtttgatcaaatcatgatatccacgctctcaatggaagtaccaaactgatgactttgaaaagtgatcacccgacaacggggtcgatagatttgatgcttgccacgtgtgtgcacaaataagagtaagaaacaataaacaacgggatttgttatagagctttaaccccatgtggtagtggataatgacctactctccttttaattgtattgataccgagggaatcaatatctcaatcgctataggtgggatctacgatagtgccctttggattacaatgtatggattgatacctggcagactcaagtgttagacagccaagagtattgtacagctatttgggtgtgtgtgtgtgtgtgttgtgtgtgtgtgtgtg

SEQ ID NO: 316097 - DNA, 1021 bp, Cannabis indica
tcgatagtcgttctagagattattaagaagaagggatgtgttaacaagtaaagatttacaaggtatcgagatgagtatatgttagtaagcagaaataagaaatgctctaattgaatatttatcagaaacgaatacttaacttgttattaagttaagtcaatagatcagcttaggagatcccataggaggaatagaaagacataaatatgaattatgtactgtgggatcttatgattttgatcgagtagtagtggttagacatactgagtcaatatattgtctattagtgtagacaatttatacaataaattaggatatggaattcatacgaaagaatagtctaatcttgtgaaatcccaaagttgatatctttggctatgatgatgttaagagctaaagaaaattattgagaattatagagattaaagcgaaaattgtatgatgttctattcttgaagattgatatctaggaggatcaatggagtattagaaccatgttgtgaacatatttgataaatgttagattatatttagaataatctcttcctctgacaaagtgtttgtttaaaggtgataattcactactacaaattttccttttagtgactcgcacatttgtgcgggtcactaaaaggttaggagtaattttagtaaaatacacaattagtctctaaaattcgatgttagtatcctgtaatttgagtcactaaaaatgagaagtgtcagtaaagattaatgcccatagttttatgaattttttttaattaaaaatgttcacctataaagtcactctaggagagactgagaaaatatgtaccaacgcgcattgtgtgtcactaaagccactttacactgctacagtaatggtttatttttttaaaataataattattttattcatttatattaaatgttaggcaaaaaaaaatatttggactgccggttttaatttttatttcagaatgtatgagttttttttttttttttgaaaaaggtgctttataacctgagaagagaaata

SEQ ID NO: 316098 - DNA, 1792 bp, Cannabis indica
  modified_base (1724)..(1724): a, c, t, g, unknown or other
actcagtaagaaaagtataattaataacataactgtaacccaaattataatcaggcacccatacacccaactataatcctatccccgtgtccaacacggtactgagtctagaatgttcctacgacagtactatcgaccataatattagcctatactcagtactctagtcatactctaatcataccgatgtgatagcgtcgatcttgtacttgagccaaacatatatctatcggcatccagtataactccatgtatacagatattgttatcaatgtaatttaacaggctccataaacatgcacgctaaatatgtaaatgcatatgcatatctttatactaatcttacctcgtttctgaatttaagtgtgccggccggtcaacctgagtgaaactgctgcttgatgatttacaggcccctaaatcacattattcataatattgatgagtgaaacgctaaatcatttttcggggacttaaaattgaaactaaaagtttccctatcgatagattacctggaaataccctaaatattacaaaaacggaaaaaactaggatttcctaaattgccccaactgacagactggttccccaactggaattctaattctatggggttcctcgggaccaactggaattctagttcctacaggtctactgaaccggtcgattagttcagtgcaagaaacaccaaaaacctcctaaacacctcaattcgatctcaaacttcacaaacacctatttacagtacaacaaactgaatccatgcaataaaactaaccaaaacatccagaacaaaatccaccattagagagcaaagcttgagttcataaactcaaaccttgctcaaacaccacaataacccacaaatccaacataaaagagcttaaataacatcaacataaaatcagaatacaaaatcaaataactatcataaccacagaaccctaattcataaaaacatgcaatagaacctaacttgaacttagaaaaaaaaaaaaaaaagaagaaaggtgctaagagattataccttaaattgaaacaactaaaacctgctagaatcctcagaattgaagtagaaaaaaccaaacccttgctggcttcttgagagttcgagagagagtgagttgaagagagatgattatgtgttttctaatttttttttgaataacatgtataaatcttggtattatctaatattaacttaaccaaaaatcatatgtctaaccttatataaaaccactaacggatcaaaagtccaatggcaaaaagattattttgccccttgcacacaccataagtcacattgtcacttaggggtactttgatcatttctaaaactttaaatattccttacattcccaatttctatctaagttaccttgctactactaaaatactaaaatgtgattctattggccaaacaccacattctaatattgtcgggcataaaacataaaaaacatgaatttttatatatagtataaataacacacatagaatttaaataaatctccataaattcataaatcataattaataatctaatatcttaattaaaccctaattatctactaatttatcataataaaattaagcggtcttcacactaagatcccctataagactcatttcaaatgggaaatttgattttctatacttagaaaatcaaaaaatttcatttctaaaccaataatttaaaccctaaaaaaactataccttttttnttactaaaaccccaaaactaccccaaacctaaaactatactctctttctctctctatctagccggtcc

SEQ ID NO: 316099 - DNA, 922 bp, Cannabis indica
gtggcaatttgggctcacaacggatcacaagtggctctgataccatgttagaatttgaggaataagatgaatgaggttccatccctaaaccaattggcaatgggaggagtagcccttttatcttatatatcacaatttatttccacacattagcaatgtgggactaactcttaatattccttaaatgtattgatttctttaatactgttagcatgtaatgatttttcaactgatagtggtgaaaagctatattagtttaaaatgtgaatcaaaattattttcttcagaaaaaaaaaacaaaagataaagtaggtgatgcattaattttggaggatgaaagcacaaagatttttgcttgtaaagtggctgaccattacagtgcaaggacaaatcaaaccttagaagagcgagaagctactgtaattatacacttgaagaaacttaataattgggtgtcttcttctttgacaaacccattattactcttcttcttcaaaagtttcactactgaataggtcaaaacgatttctcttcaattctcttttctcttcacaaaaatttcttaattaatttattcgattcagtctccaatccaaggccaagaaccctgtgctgttttccaagccagagcctactccccctaaagacccacacaaggtgaagaagaagaagttcaagcaaaacaaaaaggtagaatcgaaagccctcgccgatgggaccagacccatcaaaaaggggctcagaaaacacccacttagggtacctggtatgaagccttcgccggagagtgtagcggttacaatcagaggatggttggggaccatgatcgatatcactaagattcgagccccattgcaggtgcctgttggaaatattttatcaggatctagatttactaccaagtatgttttattaacatcct

SEQ ID NO: 316100 - DNA, 465 bp, Cannabis indica
atcatttaatttgtatttacacatgactcacatggagaaaaagctaattaaataataactagctatatataaataataacttatagtaatgtgtttatttaaaacaatgagaggatcaatagtcctaagaaataatttaatttatgtacaatggacaagaaaggacttcacaattaatgaagattattaggctacgtatgtaagaagtatattgttacactactacaaggactttctagcgttagttttggtcgaaattcattatcgacgttgtatcaaggtgacgctgtaaggttaaatttaaccgtacaccatatatattcatatggcgtcagttattagctagctagaatccaataccataggggtatatatggcgtctgttcctagctaataaccgacgtcatatatggcgtaagaaccgacgccatatatacccgaatttcagtttttttaattttattt

SEQ ID NO: 316101 - DNA, 855 bp, Cannabis indica
ggtcaaacccaaaaggtcttcactcaatcgaattataattataactacaccaccatttataattatatatttaccgttttattttttcatattttggaatttgggtatatgtaattatatatgtttttaataaaatgatcataataatttggatttttttttccaacttaagcatgaatgatatgatgatacttttcgagatctgtgtggttttaattagatgtttgaaaatattgattttgttagagattttggggtgttttgacaaattagggaggtgtgtgtgtttgaataattgaaatatgtatatctattctattcaatgagacaaacataagaattttcccatatttttgttaatgaatgaaggattgattaataatctttacaaattattacatggacccactttatggcttcatgtgcttagaattaagttaaacaaagactaagcaacttaaaactcatgaaaagatagaagcaagagtaatgattcttcatggtggtatagttaggtccaccattaaacaaaacaaaacaaaaccagatatatatatacccacttcaatcaaaagcaagaaaagtgaaatatttaggttgagaaatatataaataaacttgaaatttcaattatatatgaattataagggagacttataaaaatactagaatttaggttaatttttacaaaaatattgtcacacggaaatctttttaaaaatatgtgtgttttataaaacaccagtaaaacacaaaacagaacaactcaaaacaacagtagaacaactaaaaaacatcagtagaacaacagtgaaaacttaacacagtatactgcagtatgaaacatataaaaaa

SEQ ID NO: 316102 - DNA, 1342 bp, Cannabis indica
aaccaagaaatgccgttagataggcacttttaatatataaagatatattttacatttttataaattttagttttcttgagaaaaatatgggagactttttttccactattttatgttactgctatgtaaatttaccctatcaacactatgaaatttgagagattactctttaaatcaaatgagctatttctgaagattctatggtaatttaattagatccttccataaattagaggaaccaataacttgtagctgagaattgaatacattacattccaagatgatgtgaataatttggataagtaatgtggatttctgatttctaaatcatgcaacaaagatacctctcaactccataaaataattattgagtttatattgtttacaaatcaaaaactttggatacttaaataagaatccgaaaatgtgcatatcactacacaggatctttcttacatcattatatagatcagccaatttatatccaccaagaaaattatttctttctaaaagaaaaaaaaaaatagaaaaaagcccatatttccatcttcatctcacaagcggtataagtagatattcggcataaaataactggaaaaataaaaaaacataaataaaataaattagtgaatcaacaaagttcacaaaaataaataaataaataataataaacaaaacaaattaattaatcaacaaactctacatctataatacataaataaaaataaaataagtttacatctatgatattttatttaaaatattacttttacaaaatgtactaaaaatttcgtgcaggttgtactgattcgttttatattttttcgtgcttttttaaatatgagtcgtgacgtgttatacaaatattttcaaaaataagctcagtattttcgtatcgtgctttggtcgtgtcgatctgtttttcttaaaaatgtcaacccgtttttatatgcaaactcaaattataatttcaattatatttaataattttttaatagtatttaacagacagtcatagaaaaaattattaaattattaaaatttaaatatttacttaaaaatactcaaatttttatattggctaattaaaatttttatcccctaaattttgatatgtaccaaatcatgtcttctaaactttcatccataatagactttccttactaaaattagagaaaagtctttaaatccaataattccaataattcagaggaatttataacaaccttaaaaattcaagagacataatttggtacatgtcaaaattcgaggagtaaaaattctaattaaccttttatattaccctataaataaattaatatatagttttagttttatattt

SEQ ID NO: 316103 - DNA, 1207 bp, Cannabis indica
atatttaaatttaaaataaaaataaaaataaaatattattacaccatttgcctcaaaaagaagagtaatagtgtactagctagaaatgtctataaattagattgatcttcacccataaactctcaccaattcataaacatattatatcaaaattagttattattattattattattattatttatttgtatgaagcaaaagggcagaggcttcaaccgtagatcaagaagcttttctcgatctcgtcgagccattgagggttcttaattaattacaattaattttatttttctttatttctttaaaaaaaaaaccaaaaatataaaattatataagtaattaatttggaataattaataaaatccaaaatcaaagactataattaaaatggcttctgctgctgcccatgtgaataatggtattgaatccctttaattttttcctacctttctttattataattataattattattattattttgggtaataattttataatttatttatttatttttataataattgaagaacgtgaaatacaaaagtgttactggaaagaacactctgtagatttaacattggaagccatgatgcttgattctaaagcctctgatcttgacaaagaagaaagaccagaggtattattaattattactaattaattaattaattaaataataattacttaattaactatataattaagctttattcagtactgcattatttcatttttatttatatatatatatataaatattaatattatttataggtattatctttgctaccaccgtacgatgggaaatcggtggtggagctcggtgccggaatcggtcgtttcaccggtgaattagctcagaaagctggccaactcattgctctggattttattgaggatgtcataagaaaggtatatataatatcactatatatcataaatatttaattatgaaaaaaaaaatagtttaatgatggatgacaatatttatgaaggtttttgtttattattattgtgtattttaaaattttaaaagttagaaaatttgattttatttttatttactggatttatattgaaagatttaggctaattacaatttttatctaaattactggacatttaatgatttatttttaatttatttcaattttactaatgtgataataattatttttgtactaaattatattccctaaatttt

SEQ ID NO: 316104 - DNA, 1077 bp, Cannabis indica
aaaataccccggtatttctaaaattaacttatcccaataatcttatcaatatttctaactaaaccgctgtaacatttttggcctccaatcgggtctccaggatcgccgaacctgaaaatatttttatttcacaaataactcatattatatccacctatttcaaagaaatctccgtaatcaacaaactacgcttatttagccacttatcgggtcttcaggatcgtcgaacttgaaaatatttttattccacatatagctcctattatattcacacatgctacataaattttcataatttataaattacgcttatttactcacttatagaaaaatttagattttatcttgaaatagattagtagaatcataatctcacttattacctaattaactcataatataaatataaaccctaattatttaccattagacttatcaagatgttacaaacatcccctccttatagaaattttgttctcgaaatttatttaaacaatttgggacattatccccatattcatgattctaactctcaaattgttgtttctatcttgctatttttctacgacattttcttaactagtgaaattgtctcatttcatagtacttcctttttgtagtccaaaacctgaacaagatgtttctcccatataataaatttatcttaagtttgacatcatcacaactcagaatatgggtcgagtttgatacatattttctcagtatggaaacatgaaacacattatatactccaagacaacgtagaagttaaggctagctaataggctacctagcctatttaccccagtaaataggtatctaatatttctctcgtaccacacttattaagatgcctaactagtggtacatttaattatcacttttaaataaacacatcgtcagggaagagattctaagataatctaaccttcatcaaatatgctcacaacatgtttctaatttattattgatcttctcaggttacccacctttcaagaataaaactattggaaattattttaccaggatcttagatctactcacaagtatgtttattgacaccctaaatatgaactt

SEQ ID NO: 316105 - DNA, 797 bp, Cannabis indica
aaatttactgtttcaccctcaatgtattttatccttaaaacattgggcacttgggctctttttaagaattcacttaatgcatctgcccttttgcgctggagatctcccacagttaacatctagttgtaagtcctgatgttagagccactattttcatgtcatcattgactttggtttaagcagccacatccatcatgcattgaataaacttattcaagctctcttcttattgtttcttgacactggttaaggagctagcttccaaatcatagtccttggctactataatctactttctgaacattacatgtagctctctctagttttggatcgatcccggagacaacctcttccaccaatcctctgggaacttactcaatgttaatgaaaaatataaacattttgcatcatcacgggccttggaaactttcatgatgcaattgtatttggacaaatggtccctggggtctgtgcgtccttcatacagttctatctggggcattctaaaatgttttgataatggtgcatcaatgattatcttcacagaaggctccgtctcctttgcctcagagtcatataaggcacaactttgttttctagaaatcttttctgtgatcttcatcaactcctcgaccttacgtttcagtcgttgagtcttatcactagatgattctcttccgcagatgcgatcatggatgtggtttatcaaatcgttcctgtggggtcttactttttcagctttggttctttccttcttggcattcaatcttcttcggagatcatttgtggaaaggctt

SEQ ID NO: 316106 - DNA, 1004 bp, Cannabis indica
tattaacgccccaacaacgtaaaaatccttgtctaattttcttacaactctctaatcctataatatttcattggttgccgaaaacctcggtcaacaggtaaatacatgtgagagattcaaattgcttttggcttggtatggtgtcgcttcaggtcaaaatataaatttccaaaagtctattgtttgttccaacctaaatgtttatgtatctggtaaaatgacatgcttggttcgcttcgttttatgggagagtgtcatgaaaaatatttgggccttcttggttagattgttcgctggtcaaaataaatcactgttgtttaattctgtacgagagctgatctagaattaattcaatggttggaagtcaaaatctttttctatggcaggtagagagattctggttaaagttgttattcaaacttgttatcctgatttttgctcacctggcgtggcatgtccacgtggcaagaattaataccatgtgggagtacaactagccaacaagaaggccaagctatctactcagcacttcaacaaacgaggagtttcagtacttaggtgggataacaaagtgacgaactagccacctcaaggggggtggtcggccacccatggccagctctatggctagcataggctggctagcttttgcgcatcatatgaccagccaggatgcactctacaggtgcatggctggccagcctttgtcctagcatgatttcggtgcgcaactttcatccgtggagatcaagtcacactacaaattgcaccttaatagtctacgaaaatagagggaaatatcaacaacatccctatttttgagggacaatttagttatttgtattttattaaattattatgaaaaaatagctttttacctatttttaagggatattaggaatgtaagctcttctatataaatagcattagccaaaccctaaaaacctagtctaaaaccctaagccttaagctctaagtctaataactcatctcatctctctctc

SEQ ID NO: 316107 - DNA, 1751 bp, Cannabis indica
aatcccagacttaaaacgctgaatagtatggaaatatgggttcaagtttatcttgaagttggttttcgatcagaccgtgtactacaaggggtgggagcttatattggcaaatatgtttcgtcttgttcgaagaactttgcgggaatttggcgagattattttcgagtacgtgttaggattaatgtggagaaaccactaaaacgacgtatgcagatctataagataagacggagtggttctgggctgacttcaaatacgagagggtgccaacgttttgcttatttgtggcatcataggccattcagaaaaattttgtcatcgattgtttgaagaacccattgagactattgctaaaccttatggtttatttatgaaagctccagaccgaaggcaggggaagcagattggtgcaagatggcttagagacaatatgggccagtcgctgggagtggttgccggccagaagtcgtcggagatctacagggaagagatgaacaatcatagccgatcatcaagggatgtaattatgattgatgggctggagatgggcgagaatccaggagagaagaatgaggaaagtttgaagttaatgctagaaagaaataagggaggagatcatgggagattgacaattggaataaatgagggaaatattgggaataatgtcaaagatggcctggtggttacagatttaaaaagaaggcgtatgaataaggaaagtttgttggagcagttaaatagtgaggaggtgggtccgaattgggtcttagaagaagtacataggcccatggtgaatgagattgagcccattcgaaatgtcattaccgaaaccactaaggactcaatagtgggctgtgtaattgggcctaatgatacggaaggagttttgcaaagtgattcagaggaagggatggagcttaatcacggtacttttccaaaaaacgatgtaatggcgggcactcattttgggtcccgccatccattatgagtcttttgagttggaattgccgagggcttgggaacccgaggattgttcaattcctaaaggaaatcgttttccaaaagaaacccaatgttgtctttttgtgtgagacaatttgcaaaactgacaaaattaatattgtgaaaagggcgttgggctttgaagggagtttcgtggtagaggcccgaggtcatagtggaggcctagctatgttatggaaaaaagaggaggagggtaagttgattagcttcagtacaaaccatatcgacttagagctcaacatggatggttacccaacatttcgtgcaaccggtttctatggagaacctcagagacatcttcgagctaacacctggcgtgctatacgtcaactctcaggtgagtcttccttaccgtggtgtttgttgggagatttaaataatactttgaaccatagtgataagagggggggccgcccatatcctaattggttattaactggttttcaagatgttgtgtcggaatgtcatctcattgatatggaattacaagggcatcctttcacttgggagaagggtaagggtacggaccaatgggttgaagtaaggttggatagagcgttagtttcttatgattggcaagctctgtttccgtcggccatattggagaatttggaggtcacagtatcagatcattgccctatatggttaaatctcgccaagtctaaaccggttcatgttaagaagagatttcggtatgaaaatgcgtggtctcgagaaccgatgtgtag

SEQ ID NO: 316108 - DNA, 1052 bp, Cannabis indica
gcaacgagctgcacagtacgttaaaaatcacgctaacacgcacataatagttagggtgttacagatattggctgttcactctctggaaactgcaccttgaaacccctcctacctccgcagatcggtgctcctccagtaccgatacaacttgttgcaattgtgacataaagaaacgacatccactttgtgttcaatgttttgaaaaatagcctttgactatatacgttttgttataaacaaaacattatgtgaactcacgagctgtgtaacttatcttcacaggtaaaaaaagatcataactaaggatgattttggaatcctttgaaaaattatgatatagttcaaactggatatatagtccagaaagatatgattttttatgtgatgaaatttacatgccaagtccttgttatctacttagtcgtctatagtatctaaattctagcaccatttggtgtctcctttgtgcttgttatttttttattatgtgaacaaacataaatgaagaaaaaaaagtaaaacttcagatgtcagaataatacttgaataataatatcagattaaatgaattaagtcaattgtaaaatgattattggatcaattgactaacatcgtctcatctattacaaaagaattttacaaaatttgaattgatttcaaatgaggaggaacggtccatttttcaaggggctttgctggtcctcacagtttcagactgtttaagtcctctgtttttaaacttccttaagagccactttggatagattaagcattacattgtctcttccagtattttgtccaagtgtaaaccaaagcacatcacatgttggtgatgacaacaataaggaagcatctgtggtggtagggctgcttggatgttgcagcagtgtgacttgtgaacattcttgagattgtaattttattaagtatacattatcaataaagttttgtagcaaaaatttgcaatctagttttgcaactctacacaaataaatacaaatacagaaactaatataatttgataatttgattttgcaatgcaaaataagtaa

SEQ ID NO: 316109 - DNA, 587 bp, Cannabis indica
acccactcattctatgccaactgtttctctggtaagagtggaacctcacttgctatgaacgaagggaacgagatagtggcgattggagacggcctgaaaccgattggagtagtgcgttcgtcaccggtaccggagatggttgcgaaggacctacatgttgctgctgctccgattacgagaaaggggatctcgagatctatgcggggccggtcttcgaggggacgaggtcgtacccagggtctgagggcgtggcacccgagatcgtctcctgcgatggagggagttggtgctaatttgggtgttgtttcactttcaccccacctggagatagaaaagtcgtttgcccctttacccactacaaaagatattttgaatggtaatgggggaggtgagtttatgggtatccgtgtgagtgagggtttgaattgtgtggtcaatgcgtaggctttgactggggctgtgggccaactggatggagtgtgtagtgggccgaattatggtaaaaagaaaagtaaggattatgggccgtttttaagagttgtgaagttccaagtgttgggttttgtgccctaaataaaacccattac

SEQ ID NO: 316110 - DNA, 608 bp, Cannabis indica
cacgtataaattaaattcacagttttacccctctcgggtcaacattactaaaatgcccctagctcaccaacggggtcttaacatgtcatttctcatattaatttgcatataataaattataatataatataattctacaataatactcaattaactagttagggctttgctaatcaatttccttaattccagggtattacatattgctaatgatttatcacctaagttagggagcatcaagacagtcaaacaatctcctgaaaatcattttgtctaccaatgatgttgtctaaatacctattgaggtattgagcttcctagaaaagcatcaacacaaccacgcacttttaaaagcacttgaattacaaaaatctacatatgattattgtagtcacataaaagatatgtaccaatagcttatatgacaaaaccttaggcaaatgtagttagctacatcagattttttttcttttccttgctcatgttagtatgtaatagaagttactcgagtggacatgagtcacacgagaactgtaaaccataaaaatatatatttttctttttttttttaaaaaaaaagaagaagaaaaaagtgttggaaattattt

SEQ ID NO: 316111 - DNA, 3314 bp, Cannabis indica
  modified_base (1031)..(1031): a, c, t, g, unknown or other
gggtctggatcttggtctgggtttaagtctatgtttggaccgagacccaagacccaaccccagacccgaatcctgacctaggacttggaccgggacctcggacatgaagtggaacaagactgggaccagagaccgtgatccagatctggacccagggcttggacctgacctgtagttagtgtttggatctgggtcccattccgagacgcaaacccaaacccaaacccaaacttggacccagacccgtacccgagacgtgggtccgagtccgaaaatgggtttgagtttggaattggaatctgactaggacccacacctagacttggacctagaccgagatgcggagctaaatcaaaactcgaatcgggattcgagacacgaacccgaaccaagacacagacttcgacccacacccaaacccaggacccaggacccagacctagattggggacccaaactcaaaattagaactagatcgggaccgaagattggggctgggactcggacccaagacttgacctcgatctcggtcccagaccaagaccaaaacacgaacacggaccgggacccaagatccgaatcggaacaagactaggacccaagattgggatccagatcttgacccacaaccaggggcttggaccgaacccgtagtcggtgtccagatcttggaatcttacacagacccgaacttcgaacaatttccaaactaggaccaaaacccagactcgaacccgagacccgaaatcgaaataagtactggaatcaggaccctagaaaaggaattttacctagacccaaaattggatctagacgcggaaccaaacacagaccaagacctagacctggatctatacccggacccaggcccacacttgtgccaggtactgtgacccgaaacccggaacccaggacccgtgacccgagacctggactagaacctagactcgtaccagaacccgaaccaagacccagacccaaacccagaccaacgaccgacccagaccacgaccaagacccagacccagacncggaccaggaatcagaccccgacaaagaccgacacccaaactcgaacccaaacactgaatcaaagtcaaaactgggacttggacccaaacccgaacatggacctagatcgggacctaagactcgaacatggatgggggacttggacctgggcctcggaacccagacccagatcagaacttgggagtcggacccgacctagattcgaacccagatctggacccagaccgatatcgtaatctgaacaaggacacggaccaggacttgaacctcgatcgggtccttgacccggaccctaacctaggacccagttggcacttgggacccgaagtgggactagactgggacctgagaccatgaaccaaatttggaatcggggcttgggcctaacccatagtcagtgtttgaattagggacccatacccggactctcaaacccagacccggactcagacctagaccctaacctagacccagacctgtaccctagacctgggtccgagtccgagtccgagtctgggtttgagttcgggaactcgaatcttactaagactaagatcccgactgcgatgcggacctgaatcaaaactcgaatcgagactcaggacacgaacccaaacctagacacggacttgaactaggaaccagacccaagacccggaccgggattggacactcagacctggacctaggacccaatcctagatccggacccaaaacccagatcgggatgggagactcaaacctggacctaggacccagacctagattgaggactcaaactcaaaattagaacaagaatcgggacctaagaatgggattgggacccaatacccgaccccagtctcggtcccacacccggacccagacacagacacggaccaggacccaagattcgaatcagaacgaaactgggacccaagaatgggatctggatatttacccacgactcggggcttggacccaacccgtagtcgccgtctagatcttggaatcataccaggacccaaacctggaacaatttccaaaccaagacccacaccaaaactcagatcaagacccgaacccagacacggaccaaaacccagacctagaccctgtcccagacccagaattggactcgtagcagaactcggactcgaactttggacttagacccagactgagattatgactgggacccaaacccggatgaggaccgagacgtgaacctagacttggactagaacctggactaggactaggactaggaccggggacagagactgggacgtaggactcgatactcggacttggaacctgagaatcgaaccgtgacccaaacccaaacaaggtctagacttgagacagtgacaaatactgaagaccgaccgaaaccgacagtcggactgggaccctaacgctgaccaggacctaggaccctgacctaaattagggacccggacccaagacccaaacctagacctaagacccgaaccaggacgcaagacaagagctagaacttgacaaggatctggatttggaccttgaaccaaggacccaacacccaaggcttggacccgacccatagttggtgtctaaatctggaaattggacctggacttggacccagacttggaccagaaactgaacccgtactaaaactcgaaatagacttgacatgaggttggtgtatggattttccaccaagactcggacctgaagccaaacacggacctagacccagacccacattcgaaccttaaattgcaccctgtgacttgaaatcggaaccagaactggaagcagacccataaacagtaaaccttaaaccttaaaccctagatcctaagctatttacactcacccctaaaccctaagccctaaaccctaaaccctaaatccctaaacacttaacccaataccctaaacctcaaaccctaacctggacacgggcccacacccatacctataccgagatcagaacccaagaccaagacccagacccaaatctagacccgaacctagacccagactcatgacatgaacctagtgttagaaatattttaccaagatctagatttactaccatgtatgttttattaacatcctaatatgaattctaaaataatgaaataaagacatataaagtttaggaaaccttacactgggtgcagtggaatataatgactcctttcgttcaacttcagatctctagcccttgattcctttctgtagcagaacataatcaagatctgaacctggatcgctctctctcctcctttgatgctgattctccatcttgt

SEQ ID NO: 316112 - DNA, 932 bp, Cannabis indica
aattactcttaaattttttatttttattttaatttttattttgtaaaatatggccacgtaggataattttttagtgacgtgtcattgccacgtgggtaaaattaagacttaatgaggctgaatagacggcaccttaaaaatgtaaacgaaacagtactttggaagaatttcccaccaaaatatgaggttggatggttttttgtaagtaaattgatagttgagggggttttgccgcaaattactcatgaaacaaatactattcaaacataaaccctttatccaaaccaactttttccaagtaaacagtgtttataacttccacagcaaataaaaggtctcaactttgaattttccactcacacaaaataatatgaagaaaaaaaaaagcagctaatttgaaattttaaaacaaagaagaggaacaaaacatacacagaggtaaattctgatggagtaatgagagaaggttgagggtatttctcctcaagaatcccaacaataacatcagaatcagatacccatttcccatcaaacttcaccacaggcaccttcccttcgggattcacttgcaaaaacctacaaatcatcaaagaaaacacaaacccatgtctcaaaaaaccctcatttcacaaaacccaaatgttttgtaattatggagttttcaaattaccattggggtttttcactgagattgatgaggtgcctctggtaaggaactttcttctcctccaaagttagaagaaccctttggctaaatggacctgaataaacaataaagaaaatcaaaacaaaatacaaaccccaaaaccataatcaaggaaattgatcgtacagtctccaagaacatcaggagcaccaactgcagccttaacagcaacctccagagacatggcgtcggagaggagaggattccgagagagagagagagagag

SEQ ID NO: 316113 - DNA, 1732 bp, Cannabis indica
ttttattattagttgtaacgtatttttgaacttttaaatttttaataaaaattaaaaaaaaatagaacttattttaattttaaacttttaattttttaaaaatttaaatacttatcgtttacatctcacgaccttaaaataaattaaattaagtttattatttatataaatgttcattattcttatctatttatttcgttttactttttttactacttagtttttttttttttttgtacttttttcaaactaatattttcaatatatgcataaatttatttatattagtttatgttaactcctattgcttaatggtaatttgattgagtctgttgttgggctgaacaaaagtgggattgaataattgttttaacccatcaataacatgggttataatagcccattaaactttttttagtgtgacattttctaatttgatttagtcaaaaaaaagataatttatttgaaaaattttaattatataaaatatataaagtttattttggacaataaaacactaaacctattacaatcatccaatctagtttgagagtctcatatttttgctaatatatacataaaaaataataataaagtatataaattcatgaccaattggttttaaaattgatcctcatgcatcttacaattctaatataatatcaaaaagtagagccaacacttaatgatttaggagatagtgagctagaaaagagccaccaaaagtccaaattcgatccaaaaaaatatagccaaaaagagccatttgtgattcgggagatagtaaactaaaaaagaaccgcttgtgatcgagctgtcgaagaaagtagataaaaaataactaatattttaaggaagaatgttagaaaattacacattactaatgtaaaagataataaaatatataaaaattcataaaccactgctctcgtaactaattaattttaaaataaaaccctctatcttacaattctaacaaaatctaataccgtaattagtttgattaaatctcttgtgcttgacaaactaagtaatcatcaattacaaaaatatattagataatttttatatgcttggccaactaaatgtgctttggaatttgtttattatagttttgtttagtgcaattcctagagccgtacgaagcctattatttttgcttaaataaatggcgatttctttcttttcttttttttttttttttttttgtaagagggataaatgattatttatttattatgattttgactacttattagattccttctaataggtacccaagtttgtacatactacaactaagagtattttttccaagaccttttctcaagactcattagttaattacttatttaattagctttaccaaatacataattaagactcattattcaatgttgtactttagattttatcagctccaaaaaaacatgccccattatgttggtaataattacttaaaacatatttaaaaaagtaaaaatatttcaaaaatatatttggtaaattattttcataaaatcaaaattttgaaactaaattactttactttgcaaaaaaaaaaaagaaaacttaaaatttatttaaatattttttaattatagtttattttgtactctattttattcaatattcacttcattttcttttggtccactttactttacttttcctctcctctattaaattaaataaaattatgttttcaattataaaataaattattaaatgt

SEQ ID NO: 316114 - DNA, 3323 bp, Cannabis indica
caaagcagtccttgattatggatgactttgagcctttttctagtaatgtgtcccatccttctatgccacaagctgacatttgcattgtcactgttggttactagagatgcttcacttgctactatcttgccaatcaaataatacgtcctttaatcaccaccatagaacccttgctaatcttcatgattccttatttaattttatttatgtaccctgcatcatcaagtgagccaacaaaatttatattcttggtcaggtttgctacataccttacatactttaagatcctaacggttttgtcaaatattttgaaatgaatatttccaatgtatttaactgcacatgtattgctatcactaagaattactcttccaccatatgttgttctgaattcttttagtaactctttgttgtacgcatgtgaaatgtgcagcctgaatccaagatccaatgttcatttggagttgattgagacttgtgattcagtttttttattgaattaatttcaataatctttcttataaatctgatgttgattcctgttcttgttgaagtaacaatctctttcttaatgtcctacttttctacatgtataacatccttttctatctttgtttgaaccttttgagtacgatcttcctgtattctttgagttgttattgattcttctattgtgattggttctttgtggttatctttccctggtgtagtgtgcttctccattagttcttgacaacttcctactgttctttaatgacatagtcttggagtagatggcaccaatgatttcctccagcaccaaagtgttctttgcatacaaaatggtatctttgaattgctcatattgttgtggcaatgaattgagaagatagatagcttgatcttcttcttcaatcttcacattcaagctgaaaaagattagataaaaattttgtaaattcgttttagttttcattaatcgatttaccctcatccattgtaaatccatagaatttgtgttttagaaaaaccctgcttagtagtgtttttgtcatgaaagtcgattcgagtttcttccacatgtcagtagttgtttcttctcaaacaaccatcctcaagatttcatcttcaaggctcatcactatagtgtttattgtcttcttcagaatctcttctttcttgcagtcctttaatgttgcagacattttctcttcccctttgagagcttcatccagtcccatgtttccaagatgagctttcatcttttctctccaatgataaaagttattcttgccattaaacttttcaatgtccattttggttgtggtcatctttcttgatcactctgtgataagttcttgatctttctcgagcaagtgactgaagccacaactcaaacaccttctgaactgtttcttgatcctttgatttcgcagattgttgtacgtggttaagcacaataaattgaatagctttgataccaatttatttggttaaacaacaaacctcaagcaaaaacttagaatgaaataatcaataaagaaactcaaaaccgaaactagaaaaatataaagtggaaaaattaaaagatgaatactagaattttaaggaggttcgaatttcctttacaaatgtagagagcctaatccccctttgaatttcttccaaggaattcttcttcactaaacaatgtcaaaagaattggtactatgtggacaattacaactacaagcaatataagttgatcactctccttcttcaaaccagtagagagtagagacctttaggaaatcaccttgaagatcaccatcttcccttcaatttcgcttctcattctctcactaggatattttagactctctctccctcgattacaagtattacatatgaaattgcttagttcttacaatgcttagccttcagttttgtcaagcttgtcataattgagttttgccatgtcttcaagcctaggggagttaagtgaggactatgtgtgaacatttaaacaattattgtatagattattatggaggcttcgtagtttgattttgagggattaatttgatggccctctcttaattttttattatatgcatgattgagggtcttgtctgctgaataggtaggtggatgggtctctcactgtaaatttcgaccctgcaattgagtgccattatatgaaatatgaaatattcatttcagtgctttacaatgcaaagcacaacttgtttgcatacaccaaatattattttttttgtgtccgacacacattacaagaaaagaaaaaacatgttttattaggcagtagtactatgtttgtcaaggaacgttatgatgagttgattagccaagtgtggtagctgttcgtgcacaaaatgacatccgtcttccaagaatataatatccagatcaggcacaaggctcttcaaggtcccactccttatgtagtcttccatccctggaaatttcatgcaatagtccttttcacccataatcagtaatgctggagcattcactttcggatcacttataccaatatccactgaaaaacgcctgcacaaaataaacagaaaaatgtcacaaacaaataatcatacatatataatgtgtactagtccttttgaagaattttcttgcctgtatggaatctgcaaagcataacgaaagcccgatttttcatacagggaggcatagactgagaggtcttcttcagtgaaccaagatggtagaggagtagatggatcaaacaagtccattatttcctggttttcattagctattggaatctcacttcttgagaagagtgtgtagatgtttcttatcacagatttcacatcgaagcgcccaaaatctgcttctgctcgacccggtacctaattagtaatgaccaactaattctaagtaaagatataagcgaacatttgatgaaaagagagtacacagaacaaaagatgtagttgtggtagtcattgttcatttttgacagcaaaaatgaagaaattacctgccatcttgcaacatagaagccttcaggaaggagatcatttcggatagaatttgtaccaggaagaatgtaaggtaaacatagtgttacaactcctaatactctttctgggtgtactgctgctattaagtacgccggaatagctccaaaatcttttcccactaaaaaagcctattttttgttttttttttcaacacaatttagtatctataaaattaaaggtgtgaaaagtatattttttatgaaaaaaaaaaaagataaaccttgttgatggcgagggaatccaataggccaacgacatcatctataagatcttggaatgtggctttctcaggctcta

SEQ ID NO: 316115 - DNA, 1345 bp, Cannabis indica
aaagtggaatagtcattccaccaaaataatagaaaggtgattccattagaatggtattctaatggttttaaatgcaaccaaataaaagaatagaataaaaattatttcttttctattccattccatttaattacctctaaccaaactccaccacctattataggaatgcttttattcaaaatagcacatatttatgtaatttaaattttacggattttatgttacgaaaaaaaaaagttttacaaattttaaatgattaatataaaaaattgtttataagaccgtgtttggaaagttaattgtgtaattggcgtgtttgtttaactaaataattacatactaattatgtaattaaaggtaattgaaaaatctcaattacacactctaatttacataattcctataaaaattgagtgtaattatataatattattacttttatataattaatattattaaattatgttattactaactcatttgtcaaacataaaaataaaaatctattgtaattactatttgagattcgaatacatattttatattttaaaataaagtgtaattactatcataataattaaattagatagtatttttatattaagtattgttatttgacacctagtaccatctaaaagtgagatgttactattagttaactattgattaacgattttttatattatttattaaattaaaatgtataaaatttaatattaaactacaccaaaaataacaatatgtgacctatgaatatgctacttagctttcttttatatttatgtatgcatatattgtatacgtacccgcaagtggtctagaacgacggggttgtcactcaagtatttgacagccaaggtcatggccatgggaaccgtttcctctcctgggatcatcatctctataatattccccgttatgaaatccaacggcagtcgtcgactctcgtctgaatcataactttcctgtagtagcacgtccaccacatcattccctacacctctttctttaattattattattattatttctaatttccatcgttgcttttctttcctctactattcgtcccactatcttcaacaacctctcctttgcctgaaacccaacaccaaaaataaactttatatatattcagcaaaaataaaaacttttgtatataacacataatacatttatatatatatatatttatactatagtccacctttctaaaatcatatttatgcggtatccctaattttaaaaaaaaaaaaaaacttaataattaatggatattataattattatgattatccgtaaatttttaaaaaatttaaataatttataataatgaaaataaatt

SEQ ID NO: 316116 - DNA, 929 bp, Cannabis indica
aaaataatttccaacaggatcaatctccacttcttccagttcttccacatgaccaaagctgtttgcaagatccccaaactgaggatctatgtctgcctcccgactttgggctggacttcattgccttttgtcaagctcttattcagagctctttgtgggcatcttctctttcttggctttagacaaaggcaggttgtaacagtgacagacagactgttggtctcccttgaaacatcctagcccattccttgttgcgaactataggcatatgtggtagatggatgttaccgcatttgggacgtacagggctggttgacctatcatagcattgaaggttgatggcacgtcgattactaagaattgtgccattagagttcttgtcgttgaattttctacaactatcaagggtagccgaatgtaccccatgggtgcaatgtcttgaccaaagaagtcatacattacataggtgcaaggtgcaaagtttgtcagttggagccccatcttttcataggttgatttgaaaaagaatgttggaggaggctccgttgtccaccatgcaccaagcaatcgtcatgttcctgatctgtgtagtaacgaccaaagggtcattgtgtgggaaattgacttgggcaacatctccctctgtaaaggagatggtaggctccccaagcttgagttgcttggagcccctttctttgacgaccaagatgtcacttttaggctcgtgaaggaaagtctaagcatagcgttccctagccttattggcctcaccttcaatgcgagggccacattttatgacccccaagtgaccctccattagaggtggcatatgatctctgttttgggcatcctgtgtctgtgcttggtcattctacacataacgacacaagtggggattgtttttctttatgaggaattcaatctccctc

SEQ ID NO: 316117 - DNA, 654 bp, Cannabis indica
atggattgcaattaataaagattgatttttttttttcaaaaaaatcatattctctgtcttaatattttagataattattagattattttgaactccttgtactaaacgcattcttattattccaattcaaaagcaaccataaagaaaaagtaaaaaaacctcacattcaaattttagacttttcgatactaattaagagttttagagtcttaattaagcatcaagcctaacgcaatgttaacaaactacttagtgatgtcacctaaataactaactctattctgttaattagtttgttatagctagttgatttatgtttcttgttttaactgtcattctcttgattgtatatactgattccgataaataaagcttttgcctactcagttgatgtaacgtccccgcttcaagcctccattgggtccttacacccacggaatcatggctcttatacacgagtacgccactctggctgcttcatggaatgatgactgaccctacagaccaacatgggtgtttccagcgtgctttgtcctcactcgcacgcttcctgagaaaatttcccaggaggtcacccatcctgaaattgccccaggtcaagcacgcttaactgtggagttctttcgtgatgggctaccgaaaaacaagatgcac

SEQ ID NO: 316118 - DNA, 1305 bp, Cannabis indica
ggaaattggcacacattggccgaaaggtcccaaatggaggttaaaggggagacaacagaagtatctgtttggaccggcgacagtttggctcacaacggatcacaaacggctttttggaccagtggcaattttggctcacaacggatcacaagtggctctgataccatgttagaatttgaggataagatgaatgaggttccatccaaaaaccaattggcaatgggaggagtagccaattcatgttatatatcacaatttatttccacacattaacaatatgggactaactcttaatagttcctgccgttttgtgagtccatgtccatggtggacgactgctatcagggttcttggggttcatcgttgatggctcaactctaggcagtgatgtggtggtttatttttgatgaatagtgttcagagaattttgtaaaatatattttaattgtaattaatattttttttatttaacttaaatcaaatttgtatttgaaattaaattttaataaaattaattaatttttatttaattattaaaattaagaaattattaaattattattaattttattaattattaaaattaagaaactattgactaattattatttaaatttaaatatatgtatataataatatatatttaaattattattttttataaagtagagatccaagcccagtaaaattggactagaaatttaatatttttgcgggttttattttcacgtctagcaatgttggaatagaaatttttatctagtccaatattgttggacatgaaaaataaactttttatgtccctggatattatgtccaacacaaaaagggactagaaaagcttatctagtccaaccttaatggacataaaagaggttttttatagtagtgtcgtctcccttttaccaaccctgcgatcgtccccacgcaagacgtgtttgtttcaatccctattcttcgatgtaaggtatctttaccctttcatccttttgtaaaagccatcctcaaaaattacgatctctctcctttccaactaaccccaaatagttatcgcatagttctgggattctatgcgatgtatatggagtatgtccaagggcagccaaggatggaggaatttagctatttttacgatataaaaaatgtaggccacgacaacgacttctactgctttagtaaaggggcctattatgagattaatggggtacaaggcatggtttccaatataggggattggaaatttaagtggttctacgcgtttgaagtatgaggagttaggactgacttcatgttgggttttatgcc

SEQ ID NO: 316119 - DNA, 1070 bp, Cannabis indica
atatttactcggtaaaagtcaaacataatcaaagaagtggattcaacaagtatatcagctacgatttcatagagcaagagcttcatcaagagatcaagaattcaagaccctatccaaaagagggcttcataagctcaaagtcaaaagtcaacccgaagtcaaagtcaaagtcaaagtcaactctcaagaaagtcaacttggatcaaaacatgaaaatcaagttaggaagctcatctatattaagactacacacaatcaaattgtataagtttactttagtcttgttaaagtgatttgcatagtacattaaagtttataagttaagagtatggctcactaacttgtgcgacaagttacttttcaaaaatgacatataaatttttcaaattggattttaagattattaatcttttaactaatagaacataactggaatttttgaaattggataaacgagctaagagttatgcgcattttcagtcaaaaatattgtattttgccactgtgcctaaacggtttaccatttggaaaacggtgaaccgtttttcccaagaaaaggtgaaccgtttaagcctaaatttgcatggattttcgtgcacaacagctataaaagactagttttctcccaaactatatataaactcatttgtatcacattttttaaaatggggctaagcatttattgagtatacaaaacatattaaaaatatttttctctctttataagtattaaatccaagtaaatacttttcacacacttggacccaaacttgttcttatctactctggtgtgcttgcaattctctctaggatttttacattgtatttcatcttattagagagagtttgctttgtatttcaaaattacatatacattttattgagaggtgaggttgacaataatagaaaaataactcggttgtaggtgaggttgacaccagttttataaacaacttgagaagagtgagattatcactacaacaatctgagagttagattggcacttcaataatccaaagaggttgatagtcctttggaaaactattggttgaggtgaagttgacaccggt

SEQ ID NO: 316120 - DNA, 1520 bp, Cannabis indica
ttcatatttaggatgttaattcaatatagttgttagtaaatctagatcctggtaaaatatttccaacacgtaaatcatatcctaggtgaatacacagcctgaggtgaaaagatgatagcctacttaagctagattcaagacttattaagtcaactcaaaggctactaaaaggtaagtccctaaagaaggtgcaatagccgatgcactcgcttgaccagccagacgcaccttgatagataaggcgaacttggtacccattcaattcttaaaagaactaagcatctctattttgaaagaaatagacatgctggatgacagtccaacatggatgacacccatagaagcatacctccaaataaaaactttgccagaaggcaataatgagggggaaagctactaggtgtccaatcctagacggggtaatgcatagagggggtagacgtggtatctaaataccacctctaagatgtgttaccaagaaagaagatgaacaactattgataggagtgcatgaaggctctatggaaatcatgtcgggggcaaatcaaactgagtgtaggtgggatcaaactgtcttggactacaacatcgaccttgggtccaaaaggttggccgaccatggcctcaacaggatggccagccatgggctcaacaacctagctggccactacctccataggctggccagccataacctcatcaaactggccagacgatgctccctcagcctggtcggccacctggtctgttccttggctggcctgatctgccaacagcctgctcttatacttttggtctactatgaacaaaaagcaaaccacatcttgctagcagaatcccttgatgaaataaaagaaagaggagactaagccaacttaaatcgacatgtgtggcagcaaaagttgccaggtacttcaacaaacaagtcaaagagaggaaattcttcatagaagacttagtgcttcaaagaatattccataataccaaagatcctgcaacaagcatgtttggactaaactaaaaatgtctacaccaagttacaagataacaagtaatggcttatacaatttggcgagtacaatgaaaacatggagttagctgtcctaccaagatacaggaatggagaacatctcagtaagtactgccactagccaacttctacaaaatactactgttcagtagtggttcctgtaacattttactatgcaggaattcaaaaaagagcaaagtttccatcactcttcagtgaattcctatgcacggtgtgctctgcaaaggtagacaaaaattaaagagctatatcaccatcactcatcattgatggctcttgcgtgatatgccgctcagggggtagccaaaacgtggtttcaaaattagactttgatttgtaagcttttgctacaccaaaaatgtacgttgcatagcaacaacacatatgaagaccaattgatgaataaaaatggtatttcatttcaatattgtgtcaaacaacttgctaacaagataacttcttaaagtta

SEQ ID NO: 316121 - DNA, 545 bp, Cannabis indica
ctttcaattcagtataatatatatcgttacacaatgtttcaggtgaataatgctggggtattaatacaaaagaagtccatagagttcaatgctgaagatatgtcaaccctattggaaaccaactttgtgtctggttttcatttttcacaattgagtcatcctcttttaaaagcttctggcaatggaagcattgtcttcatttcttctatcgctggggccatggcactttcagattgtgctatctatggggcaacaaaaggtacacacatacaactaaatatatattagtattaattgaaactatatttgtagactatttttgttttttcaattcctttctccatgctaaaacctgtatcaatcaattttttttttcaaattttttccaccatatgcatgaagaattaaatataattgtgaaatttattcaattcagctaatattagcttttgggaatccattagtgcatatttgacatcataactaaaaaactgttttttgtttttaaaaacaaaaaactgctttttgaaaataatttggcttgt

SEQ ID NO: 316122 - DNA, 727 bp, Cannabis indica
aaaaaattacaagttcactattagatttgatcatatatataggtgactttgatcttatattatgtaactttgatgatgtaatttatgcgaagtcaaaaagataaaattaatagattaatagatcaacatgcatgtctctaattatgacctaattagttatttaaaataataacaaagatctcattctcataaatgtaatgtaagtataagaaaaatgcactagtcttttttgtttgtttctttctatacgttgtattaattaattaatcttggcagaaacatttttagctagatttgcatatatgcttatttgtatcaacattgagattcattcatcaaaagctaaaaaaataatataaagaaaaaaaaacattgagattcattgatatagctaatcagtgtgcatttacctgtgtttctactttcaattgtataaaaaacataacacagatttttgttccaaaaatgcaaaaataataaatgaatgacaaagagaaagagaagagataaaaaagctcataaagataaataaataaagggaaattttatttacaccccaaaaaattctaaaggcaccccattttgataatttttattttatataaaatttatatttttaattgtactactttttttttaacttttttctttcaattcatattcttaaaaaatatacctatcaaacaaaaataaagtgtattttaaatattatgataaaaaaattaaa

SEQ ID NO: 316123 - DNA, 797 bp, Cannabis indica
ggcataaaacccaacagttgggctatcaccagagcttggaggtcgagatttgcataagagaatgagactggtgagaaagaagttctagcgagaagtgaaagaagaaagaaaaaagagagaaagaaaaaagaaaaaagaaaaaaaagcaaaaaggaaaaaaagaaaaattatttttaaaattattattatttattttgtttatattttgaattagttttcttatttcataattttttatagttaaataattaatattatgtgtaccattaaaaatttgacatctgtacgtttttgtgcatgttactgtccacgtgacctttaacaattgacatggatacacatttgggttgccacgtaagatactttgataatcaaacgaaggagaggtagcattctaatagagagcaaaacaaaatatgagtttagagaattttactatcaaaaattagatttgtggggtcacgcgaactaaatgtgtagtttgagtagtttagatactaatattcctaattattatttacttttaattgtctaattaaaacataaaactaaaataaaatttaataattaatttctttggatttgatgacttttttataattaaaattttactttaatagcactgtacacttgcagtaaaaagtgtgtatcacttactcattggtaatactaactcttagggccggccctgaaataaagtgggccataggggaaattttttttttgggcccttatgttagaaaaaatgtggtatttttcaaaatctgtaaaaaaaatgtataattttaaaagaggaa

SEQ ID NO: 316124 - DNA, 1335 bp, Cannabis indica
tggtgaaccgaatagaagccttcgtgctaaaacttgggattaaattcgtactcttcattctgcatcgactttgccgtggtgtatcattggagatttgaagatgtactgtctaatgctgataaaaaaggtggtaacctttatcctcattggcttattcatggttttcaaaaagtgttggatgagtgtcacctcaaagatttagctctatgggatacccttttacttgggaaaggggacatggaactcaagactggattgaagttcgtcttgacagggctttggttaatcaagcttggtttcagaggtttgtttctgcccagctttttaatctcgaagtatccatttctgatcattgtcctatacttcttcagttatcgtctcagcttttcaccaagttgaatgctcactttaaattcaaaaatgcctgactccgagaacctctttgttgttaggttgttgctgactgctgggagatgtgtgtgggtcggcctgtaatagaaacataaaagtttgtggggagaagttgctgggacgggattttacaggagattttcaagatcacattgctgcctgtaaaaaagaattacagaaattaaaaagaagcaaagatcatgattcagttatgaagtataaaaatgcccaggcctctcttggtgagatttataatcaacgtgaagtgttttggcagaagcgttccaagcagctttggcttcgtgagggtgatcaaaatagtaagttttttcatgacaagaccacttctagaaagaaaaacaatactattcactctttgaagaacaattctggtgtttgggctgattggaaagggggtttggctaatgtcattgtccactattttgatgagtgatttacatcttctagtgttgattatcattgtgtgactgatggaatttcaccaattgttacaagcttgcaaaaggctgagttattacagcatgtcacacctgaagaagtaaagaaagctatgtttcaaatgcatcctgaaaagtctctgggaccggatggaatgactccaggattctaccagaaatattgggatgttgttggcagcgatagatgtcatacaccaggtcactaatttcttcaattcgtgttccttaccagacggtatgaatcaaacaaacattgttctatttcactaacaagtatgtttttaacatcctaatatgaatttctaaaacgataaaaataaacacaaaaaaggtatgagaaaccttacagtggctgcagcggaattaaatgactccttctgcttagatctctaacccttgtatcctttctgtagcagagcatcaccaagatctgagcccgattctc

SEQ ID NO: 316125 - DNA, 985 bp, Cannabis indica
aataccttgctctgggcatgccagcgaggcatcctgctcagcctatcattcctgagcaaatgttccaagtggacaccacgtgtcaccattcttgtgatgccacgtcagagtgcaaaaattagaataatattatcattgtaatctttcttctacaaacaacttcccatggctcacaaagaattgtgttttcattaaaagtgcatgttaaaatgtgaagagttgctccagcagattaatattcttgatgatatttgttgacgctaaaaattgtcaactctgtatcctctgattagcaataatgacaaacaaaaaataataggaattaaagagagaacattacaatatatagtacttcactccatatatcacgatggtaatgaagctacgtctacttagagcttttactatcacaaaaagctaatttccttacaagataacttcagaaaaaatgactaagtctagcttcacgttacaatttctagggagagaaagtgtaaagagagagaagttcttaccttgtaaagataatagaatgtatgaataatgagctaaggaagctatccttttatagggagcgatgtccaattaaattacaataaaataatagaaaattcgcacaatattcgttggaaaataatcctacactagctcgcaagtcaatttttgaggcacgaaactttggaattgcggcaagggtgcgaggcacacttagatgcgtcttaaaaatatctttcattttccactcaaatcgcgtcatttgaatacaaaaagagagagttatggccatgttacagagtggtgtgctctactgaaaagtgactaagagatccggctgattttttggcgccaggttgcatgaacatcaacttgggcgcctaaaacttggtttcttgggctttaggcatattttgagatgcttgaattatttgatagctatccttagttcattctttgaccttggggaagttatcttggcaattttact

SEQ ID NO: 316126 - DNA, 558 bp, Cannabis indica
ataaaattaaatatgtaaataaaatgaaataatgacacttataattaaaaaaaaaaaaaaaatgactctatataaagtcattttcaatgcttttattgaagcattattttatattattaaaataattaatcttaattaaagaagagagcataattggagtaacattaagataaatgagtttttattttaatattttagctcaaattttgttaaaaaataaagagtatcctttatagatgcttatgaaagattacatataaatatagatagtacatcccacgtcttgtaaattgtaataggtttctataagaaaaagaaaaaagctggacactagctagttcaaatattacaacatatgtatgtatggtgtacttaagttgttaaggtccagtccagcacattaatcaattactaattagtgattataacatgtagaagcttaacaaagcttgaagaggtaaaacctgatggtaagaaccagagagaaaaccagaagcaaaacagaacaaatagcagagaaaagctcaaaaaataatattgagctgagagctttattta

SEQ ID NO: 316127 - DNA, 1903 bp, Cannabis indica
aaaaaaaaaaaaaaagactaggaaattcaacttctctcttcttttactctcactctcaaaccctaagaggatcaacaataattggggatttttcaactacaattcagtagagtatagcaagctttttgtgattcaactctaagtaagatactctagcctttctcttagtaatttcttaagctttaagtttaagttttgcatgattttgtaaggtagggttttgtagcttttagggttgtataattttattttctgaagtttaattagggtttattatgttgatttgaagttgttttgaatgttgttgtgatgtttgagcaagctttgagtttaaaaactcaagctatgctctctaatggtgttttgtgattctgagcatgttaggttgttttattgccttgtttatgttctttggggtatattgaacaggtcaagaaggtttggttgagtttggggttgatttgagagagtagtgaatttttggaatttttttgcactgaaccggtcaaccggttcagggggacctttagggcccggtcgatcggttggtccccaagaaaccccacaaaaccaaaattctagttaggaaatcgatctaccaattgaggtagttttgggaaccctagtttttcccatttttacgatatttagggtattgccatgttattcatcgataggaaaacttttagtttcgagtttatgtccccgaaaagtgatttagcatgtcacttatcagttttatgaataatgtgatttaggggtctgtaattcgtcgagcagctattccactcaggttggtcggcctgaattcggaaacgaggtaagattagcataatggttgcatatgtttatacatgtttagcatacatgtttgttgccgttagaataggaaatttatagtcatcagattagcatatcaaggcatcggtgaggtgtacatagaattgcaccgagatgccaacaaatttatggtaggctttcagatagtatgagttatctactaccacatcagtgtgactagagtactgagtataggttggattctcagtaagtcatactttgtcaggattatggttgggtgtatgggcgccgaatcataatctaggttaatgctatgttattatttatgcttttcttactaagtttgtcgactcatagttaagtttgcatgtgtaggtaagggcaaggctaaggttgagcagccgtgagagcgagtagatggagattgtacatgtcgagacggttaggcctggagcgtacggtctttgggacatcagggcttattttgtatagtctctaagcgataaacttttgtatatgcacaataaaacttttgtaatgggatcccagtttaatttatgtatattattttagtgtttataattaattaagtaaaattttaatttatcacgatttttaataaactcattgattagcagcgaactgcatagttaaataacttataacttatagttaacttttactctcactggcaaactgatttattatataagcactagaatataacgtattactttataatggagtatagacagagcaactatattgaagttatgtttgtgcaccacaaataatatattacaatttataataaagaaatggataaataatttaatatatttatataatgtaaataaaaaataaaaatatatataatatatttaaattgcgggttggcgggttcaacccgaaacccgatacttctaaaaactcaacccgcgaacccgcccgaagggtaccgggttgaacccgacccgcccgaacagttttttttttaaaaaaaaaattacgggttcaccggttcgggttcgggcagattgctcgggttcgggtcgaacccgctcaaaaatgtttagtcctaatagatacgctattaattatc

SEQ ID NO: 316128 - DNA, 1202 bp, Cannabis indica
aaaaaaatatagtaagataataaggtttgttattacataatacacagttacatataaaaagaaaattattatgttgtaaaataccaaaaaccaaaaaaaaataggtctttaaaattaaagcacccgaaaattatttataactgtactgcaaaaccatgatgaaactaagaaattttaaccctctaaagtgaaaatccagataaaaatgagaatagacaacagttaaaaatatctgacattttgttagtaatatttatctaagataacagtttttaataactatatatatatagagagagagagagttatatataagaatattaaaagtatatatagtaataatatatgtaccgtaggacgatggttgaatgtgaggatagattttccagaggaatccatgagagtaatttcttgtggtcgaaatctcatgtaattatcaacacggtaaatcagatttccatgtgaatcgatcactgtaaaaccattgcaactcattaacagtgattttctccacactgtcaaaacgacatccttttcattgtcgtatttttcatcatgagcagcttcatcatcttcatcatggaccaccacaactgatcttgatcttgagaaagacttcatagaaagaaatttcttcattattattgttgatatttttgtcctaattaatatagtgtttcgatgaagtacttatgtgtgtatatatatatatatatatttatatatatatatatatatataatatttggagacaatcctaccaaatggtagctgctggtattatagagacacattaatcaataccataatatttaatacaacaatgctataagtatcattggtgcctactactttagtaatatttggtatggaaaattgcattatatattcatttttactttgtttaattagagcaatactataagtattagtagtgcctattctctagtaattaataatttggagtaagttgaaaattaccacttttattaatcaattaattaaatttacctctaattttatatttaattaaagcatacctcttttatatgtattgtacctaaaatactttaacataagagagtaacatggagagtatcttgaagtgatggggcaaaactcgtacaatagtttaaaaaagaggaaaagttgatagactttaaaaacgaggtaaaaataaaagaggacaataagtaaaaagg

SEQ ID NO: 316129 - DNA, 1126 bp, Cannabis indica
tctccgttatagttcggtaccgtttaaacggagtagtcggaccaacttaatactgatgaacggaagtgaatgtgactaactttgaatctacgttttcccgttggatagtaagcggatattcgaccttgccactctaagtttttttttcaaatgctaatactcttatctagcatcataatgacatgggacagtatacggtcaagtctggttgtcacctggctgcttccctcaaagaaacttgcatctcttcctcttccaactcttcgacatcattgtggaaatatgctggtcattaaagttgccgctgaaaattaaaattttgcttggcgggccatctatgatgctcttcccgtcgccacatctttgatccgcaggaagatcattacgatgctacatgtccggtctgcaaacaggtgtgggagttgattggacatgctcttttggttaaaagtatgctcgatcaagaaaaattcaaatctggttttagactacaaacaagcatttttaaggcatcaaggagactatttggttcatatctcatctgtcttcaccaaagctagaatggaaaatattttttgcatcatctggcctattatcaggttgttcataggggtgccgctaaattagcacaccaaattgctagttttgctgctacatatgcaaaattttagaactccaaatgtcaagtacaattcggttgtttatgccactccaagactctccccaccaatccaagcacttgcgccatggaaaccgccatctccaggtgcccataaactcaacgtggatgtggaatgtggttgtaaatgaaagcaagaacattattagtgttgtagctgtgttgcatgattctcatggttgtgtggttggtgcactttcaaagccaatcattggcaattttgcttcccacaagatgtaagcaaaagcaatcttccatagcttgctttgatagtttcaaatgctctgaatgctcttttgtttacaatttcttttattaagatttaattgttgatattttgtcttttatccttttttcctatagttacatttgttcatgtcaagtgtattgccaatacggttgactcagggcttatccaatgataacatagtatttttttttttaaaa

SEQ ID NO: 316130 - DNA, 1437 bp, Cannabis indica
tatatcattattataataattatttttttacaaattcttgacatattgacctaaagctactatgatacagtttaaaaattctgacaaaaatgcaatacatttcaaataatgaaattatgtgaattagtataatttaatattgtattgcttaggaaacttgattggcatcttcattctcgtcaggattctttaattaaccgtgtatttaaggctcaatattattcttgtggctcttacttagatgtagagtttaaaagtaattcaagttttatttagaagtatctataaagcttagtcttttattcgaaaaggggtcgtgtggttgttagttgagggatgagtattgatatccttagggaactatagcttcgaaataaagataatttatttgtggtttttaatcaccttagtttagcaaatcaaaaagtctctagtcttatgaagattggagagacgtcttgggatgaaaaggttcttaaagacatctttgtggagtaggatgttaagctcattttaggtattcttttgtttctctcagtgtctaatgatatctggcagtggatatgtgaaagctctaatgtttattcggttaagagtgattatcggcttattcaggagcttaaaggagaatcatttggagttggcaactctatttatttagaaagagttgtgggaaatgagaattcctcttgaagttaagaatttagtttggaagactacttccagttgttttcttactcgagtccaattaggtgtgaagcatgtccatcttccctcattgttgtgtccaaggtgcttacgagttgttgaatccatttcacattgtcttgtggggtgttctttcactttcgcatgctagatgatggtaggtatttcggtagtgaagattggggacaattctttttgaggatggttggtatttcaatagtggagattggggacaattcttttggaggatggcttcatgataggtttcagagtgggaattttgagataaaacataaagttgctatgctttgctgggcgttgtgatctatgcgcaatgataatgtttagaatgataagaataagactgttaaagagatagtttctttggttcctctttgttctctttacaagacgagaaaggggatgagcactggatttcaccatgtggtaatacaatcaaaattaatcgatgcatttattattattattttttttttgataacatcgatgcagttatctttagcaatttgaacaagcatgggtatgattaggtcatgcgggactcttcaagtcaacttattttggcttggacaacaagtcagatatgtttggttgacattgttcttactgaggctatcatggttaaataggatctgagctggttgaaagagacgggttatgaatgtgtggtggtggagtcagacagtgtgatcacgatctaagttattt

SEQ ID NO: 316131 - DNA, 1483 bp, Cannabis indica
tatagatactacacatatactaaaattatccatatgtcaataaatatttatataatttggcgacaaaacagcaaacttagattatatcaatgtttggttacatcatatatgttaatgttatttatttatttttataatttaatgttatatttggctaaaatttacaattttactccaatacacaatgtataacttaatccctaaaattaacatagttattaaatttgttattcttatttttgcactatgacgtgacatttgtctagatgatacatgtaacgtatttcataacttaggcggatgattctactcttagtaggccgtacagattattataatgctctgagtcacacatagatagtaggatgtccgaacaagatcatgagtagacatccgaccagctctattaggtagatagctcgcatgcaccgaccaagaggttcaagttagcaatttctgagatatagttcgtgtatttccaagcttgtgaatcacagtacaatttctacatttgtgggatgaattcgtatcttcaaagaataaaagcaatcaacttgaatttcctattttcttcattgtaactatggaaataaactagtttcttatttttttattattgattaagggaaactaattttatgtaattaatccctataaatagtggtctcgtctcactatttagggacacaaaattattctgagagagaacactcaggagagaaatttgatctaagagtaaattgctcagagatcattgtaagagctttagagaaaaaataattcattcttgctcacaagtcaatacaacaaaaaggggagtaggctattaccaactataacgggtcgaacctctataaatctagtatttttttcatcgctttaattaagaatcactatcgttgactaaaagcaaagtcaacattttggtgctttcattgagagcaaagacacacaagtttctatcttaagtctttctcaggacacaagatggttgtgcaaactcgaaggaggaatcaaattgatacaactgatccaatggtgacggatccgagtgtgtagacacctacaaacccaagagctccgcccaggacagcccccgcccaagagacaccgactgtaggtcaagcgtaactaccgatctggcttggtttactctaggcatgcaagaaactggaaataccttttctacaactgaacagactactcctggaactagggtcccgtccactacaaattctcaaaggccagtcgaagaagacaccaaaatatagaatttgcaagaaaattagggctaatgcaaggccacaataacactcttcatcatgactagtaagatatccgagcagcgataaatcatgcttttgatgagcaaagacgccggctcaaagagtggaggaatcgagagatggagattgataagagccttttgttggggattattttaccaggatctagatttactaaaagtatgttatttaacatc

SEQ ID NO: 316132 - DNA, 1949 bp, Cannabis indica
ctatatattactatgactatgcatactataagctcactcaatttcttatttctctttctatttctcaaaataactctctccctcaatccatgttcacacattatatatatttatatgtatttatacaagcttttatttcgtttccagccaacaacagccagtactactaaggagaataattcaccatcatcatcatcatcatcatctcgaatatcgatgctaataatgagtcgaacaagcagcaaagactcgcttattattagcaccatttgataagaaacaaatgtctgtgataaggatttcagagtaaataataatgtaatccaatgctccatcatcatgtttcatctgtatcttaattaatatatgtataagcttttagttatttgtattggttagtgatttttctgtccaaaaatgagaaaagaaaatgttagtaatgtcaaattaaaatgagtacaattttcatctttttattttttatttttctttttctttttgtgggttatatatagtttctgaattttacaagtttaaaatccatattttaaatattgttcactatactttaatatatcagtgcacactattttatgagtattaaatgggaattttctaatataattagtaaattttatataaaaattaggggtgtgtataaattgatctaatttaatgataattgattgttaaatattagatatccaaatttgattagatcagattagatgttatttttaaatatctaattggtttggatgttggatggaatgtacaaaaatttaatatatctaacatccaatccaactaattagttttttcatttagtttgagtgagtaattagattttatattattatacgtaaaatatttatatatatatgaaaattaatattaaaattttactattttttcttggattggatggatctaatcatattgtacctaaaattttggataaatcaaatccgatccaaaaaatactagttttaaaatatgggataaattctaaataaacacccctaataaaatatgagatctgaataagcctaaaaacattgaatgtgatctaatacatatccctaataaaattatagaaaaacccaatataaaaaactaaaaaaattaataatctaaaacattatttatttataccataaaaaattctctctatatttaagtaagttattttgaaaggttagcatatgattgtgatttaatttagggataattacatgaggtattattttgtaaaaaaattatatttttacgtttacataatgtctttttatatttttacgattttctataaaaacaacacgaaaacaacaaaaaaacaacataaaagtaacaaaaaaataacatcaaaacaataacgaaaaataacatacatataacaaaaaatcaacaacaaattaacaagagtacaacataaacataccgtattttatgtaaataaaatcaaaaaaattgttaaaatatttaaaatttcgtaaaaccatatttttgtgtattagtgaaataatccctttaatttagggaaatttgcctggaaaatcctaaaaaaaattactttccaacaaaatttgcattacatttttattttatttgaaattgacatattacaccaataatatacagaggtttccttactcaggagtgagccttgctttgaaacaaaacactctctcttctttgattggtgaagccctagcccctcctctcttcctcttcttccttctttcgctttatcaaccaggtatctctctctatatatatataaatatatatatatatatatatgtgcgtggtggaaatcagatgtggtcggttaaatgtgtttctcaatttcatgaatcaattgctctgtttccccaaaattgaaacctttgtcactctgtccgtatgtatatgtatgtctatatgtatatggagagagagagagagag

SEQ ID NO: 316133 - DNA, 607 bp, Cannabis indica
aaaagatgttcataaatttgcatatctcgataggatcgtagttattactgttggcttctatttattcttttaaaaaaatatataaattttaaatatgtgaggctatctttttcaacatctccatcttagtgttgcctgtaaaaatctttacactttctactcttggcttttatggaagttccatagttactttcgtatgatctctttaaaagcatgaaacgaagccgttcaccttttcatagtgtataatatataatttagtttatagtataaaataaaactaacatcatattaaaatattcttaagaaaaaaacataacattattaaactatagaatgagttattttaatagcaaaaataaccgaagccttaataaaggaaatttgagccgaaagtttcttgtttctctctaataaactaacattgaatttgaagttaaaccaaattaattaaggaaacgattattcttgttagtactccatattatattaataagtaaactaatccaaattgctggacctactcgtactaagattcctccagagcacgtggggtctaaaggcctactttttttttttttttttttttttttttttttagtggtag

SEQ ID NO: 316134 - DNA, 739 bp, Cannabis indica
tgtgtgtgttgttccattacacaatctctagtgattgttggtattttcttatcattatcgttttctttcaatccatttgtcttgaataagagattttagtttagatttttggctgtcttttctttcaaatgttctctcagacaataagtgatggatttgcttacttagattttgagcctttggttcctcttttctatatttcaactctgatcttaaaactctaactgtgatctttttgcataaggaatctgccccagttgctttttagatttttggggaatggatattgaagccattcagttttggatctaaaggctgatgctaatctaaatgtaactaatatgttgggggagggaggttttggacctgtacgtaaggtatttagtttcattaatcaatttcataacaacttgtaggctaaacattttcatttgttgatcagcccagctgagatactttgggataaaatcaaattgtgaactgcgacttgggtttatagaacaaaacatttcgaggacctccctttcctagatttgtgtcgagagtggaatacactgatgtagtagatctagaagagagtttttccttttttgtatgtcttttattgatatgggcatttctctatgtcgtcttttagtttgtttaccggtttttcctctgccaagtgaggatattaataccttaaagaataattagcaaatttactccctgaacttatgtcactaccgacttgtggccc

SEQ ID NO: 316135 - DNA, 658 bp, Cannabis indica
ataagcagagattttatgcttcagaggataactgaagctaaaagaaaccaattagcgtcagctgttactccgaagctaaaagaggaactgagaaaaaaagttaaaatttgaaaaattgtcttttatattttgcttcagtggaaaatagactccaatttctttggcttcggttaggaacagaggttaaaaaatttgcgactgttatccattgaagcaaaaagattgaagcaaaaagatttaatttttgtaataaccctaatttttatccacgttgaaacttatttcgagttttcaaattaacttgcgaaaccctagcacagcccaaccctcacttcttccccattttgaaagaccatcgcccaccgtccctctctctttctctctgttgtgctgtccactgcccaaccctccctctctctttctctcaattactctctcctctctctctctctctatgtgttcgagcctccgccctcatcgtcgacttgtttaagtaaagataaactccctatagaaagtggcatgagaaggctacggaaggacagcagacaagaaaatagaactcctccttctatattatcagtccacactaatttgttcatcgagtaatctactttccctatttttcgtttagggtaagtctactttattcttcttg

SEQ ID NO: 316136 - DNA, 557 bp, Cannabis indica
atgagtaccattagttggaattgccgtgggcttgggaacccacgggcccaacaactttcctttttgacatttgtgtaccaaaagaaaaccctaaatttttatttctctgtgaaactctgtgtaaaaaaaaaagtggtggagcggttcagaataaagataggctttgagggattgtttctctgtcgatgttttttttttatttgaaggctggctatgctttggcgtatttctgaggaggctcatctcaataactactccaataatcacattgatattgaagttaggattcctgggatggtgaagtggagacttactggtttttatggcgaacccaacaggaacttgcgacatcacacatggaatcatcttcgatctatggctgctgactcaagtctcccttggtgtgtgataggagacttcaataatataatcagtcaagaagataagaaagggggaagaccttatcctgcaacactcatcactggttttcaggatgctatttcggactgtcatctcattgacttagagcttcgaggttatcaatttacatgggaacg

SEQ ID NO: 316137 - DNA, 1012 bp, Cannabis indica
tcttaattaattgcctaaacgtgtgcaacctatcaagtcgcatattgatttttcatattccaaacacacaagctcgcgggctctgaggtggtctgttcgcataacgggctttcaggccaacttagttaattaatgtgtctgcgagttcacatctcgatcacatatatggatattcctacgttgacaacttagaacttacgagttcttgtcaagttgtcgaacacactagtctttcagaccaaacctatgtaaagaagcggtctttacatgtcacaggagaaatgtacttgctggtcgcatataatcgatatatgcgcgactcgtactaatttctcttagtcctgcttatctttcgactatgctgggcataatgtgtgactaaatcatatctcggtcgcaccttcttgcaagttcacatcatgcaaggtcagctctactgaagttatttattgacacgtcattcttttctatcaggaactgaatccacgtgtcagttatttatgagattatacttgtatttctagacaaaaaattctcactataacaaaaatagtaacttaattgaaatacttgatcatataaaaaatattggttccattccaaatgcattctttgcttattgaattttactaacaattccagtaactgttgcttctcaagagagaaatttttcaaaattaaaattaataaaatcatatttaagatcatccatgttgcaagaatgattgagtgaattagctatgttgtttatcgaaaataaattgctaaataaacttcattacgatgatttgattagcaagtttgcatcccaaaaagtaataaagatacttatttaaataattcatctgttgctatctcttcttattaggttttatgttttaagaattgtccgttgaggaaaacaccacgtttactaaactgtaattggaatcagaataatcaatgcgagaaatgtatcggtttaaaattagaaaataatcggaaacaatattttattatgatgtttactaaa

SEQ ID NO: 316138 - DNA, 1049 bp, Cannabis indica
tagtatataaatttggttaaatttcaaacatattattaatttattaaatctcaaacacattgttatttataattattataacgttttatctttagggacgccacatatttttacttttataaattagtatataataataaattagctttttttttttaaaaaaaaaaaagtgattttataaaattttgctaataacccgaattataaaatcatggcataatctttttacaattagagattccctttttttaaaaaaataaatgacaagacatgccattatagaaatattataaaatataaaattatattcagaacatttgaaatacaattcttaataacttagcaccacttttcggatgagctatatgtacatttgctggagaagactcctgactcatagttgtccaaacgtgtggaaattctattaaaataggaaatcaattaataaaataaataaagaaaatatctctaaagatttcagctgcatttatcctggttagtgtatgtgggcttactgtgagattgatgttggttggacggtgtcatttaccctatccgaatattccaacttattctttcaaacaagttgtttttgaggaataacccaccctggacaacatgtcgaatatggtatcacccgtctaggtcttaaagtgttccacatatcacctaaatgaatgccacatcaccctgtgtagaaattgagataatacgcctcacatgtaccaaattctgcccattaattgttccttactactacatttgttgctccactattaatacctaaattattatcttcacctgttggttcaactaaggctcttcctgctgcagctggtgtaactaatgttgcacccattgtgtcaacaaccagtgccacacagccaaacatatcagctagtaccccacatccaactaattccaaggtgttatattttgggtcgcatgattggttttgcttgcagcgttcagtaggggtgtttgcggtgcgggtggtgcggtttttaaccattttttcaaatcaacccgcacatgaggtttttccaatt

SEQ ID NO: 316139 - DNA, 546 bp, Cannabis indica
ccacacaatttaatgaaaaaatatgtaaatgtgaataaaacttgtaaaacaattcatataataatataaagactgaaaatgcttatatgtcaaatctcaaaagtcctttgtagactttgtaatttaatgcttatagttttttttttaaatcaactttgtaattaattgcctactaggtgattataaatagtggcaactaaaaccaaaatggggatggaaaaaatcataccagagagaatttaaaaaaactatcagaaatctgaataagattgactcgtggactatgcagaatttaaactgcaaaacaacgtaaaaaatcctgcgtgttcatacttttcattttacagctttaattttttttctatgtgagattgtcactcttaggctcaactttggttaacaaaaatctgtgtttgcagtttgatgctttcattgacagcctttgtgaaagaatagctcagaaaaaacgtcctgacatgaaagtaatggatgacaacaaagaagaaatcctcatgaaggaatcaatcatcgttttggaaaagagcc

SEQ ID NO: 316140 - DNA, 2686 bp, Cannabis indica
attgaaaaagcactgtagcgtgccttagtattagggagttacactatataataatatagttccataagcatgtaattaaattaatttcattgttttacccttctcgagttaaaattacaacgcccctagctcaccaacggggtattaacatgccataaaatatatagattcacataattaaattatatactaatgtaatttcacaataatacacaattatctaattagggttttgctaatccattctcataattctagggtattacagtatgacagacctagggcttcaacccagccaagaaaggtcattcggccaagttcctacaacattagatctttttctgtaagcacaattagataaaataagacatatgatatagggcatcgccagccaaaaaccatcaaaccttgaactagataggtcaagggggtctccattcctggcatatataaacaccttacccttgcccatgttcaagatgctggtatggaaggtgtatacgagaagagaagatcctcttgcacagattaagcacttcgagatgcaaatagatctccagaaaaaaactagtgatgtgcagcgtcagatctttaaggtgactttgtcagattaagcctagcaatggtatttcaaactggctccaagaagattcaattcttggaatgaattttcccaagaattctacacgtaattctcatcctcgaggtagataccatcacagttggaagaccttattgaggtaaagcaaagacaaggcaaacctttgaaggattacattcaaaggtttatggttgaggctacgaaattcaaaggcctaacaaaagaagatcgttatacgaccatactaggaggcatccttccattgactaacttctggaaagatatcaggagaatctcaactgccaatataaaggagttcctggaacgagtagatgacttcataaagttagaggaagttgtcagacaagccaagataggagggcaagttaatggtaggcagtctcacagtgctgcgcagccccaagaccagccaaacatctaggctagtacaagtagtgaaagccagccctccaataacaagaatgcttgaggcaagcacaacaacaaaagttctagccggaatagtggcaaaaaattgaagtacaatacttccccttcgccacaaaaccaaaaagacaaggaggagaagtacacatgcttcactctcctaaccaaaaaacttgagaccatttacatggccactcaggccaatgtcccatacaagaagcctcctcatatcaaaaagaagatgagcaagaggaacatgtctatgttctgccaatttcacaatgattttggccatggtaccaatgagtgtcaacacttgaagagggagattaaattcctcataaggaaaaacaattctcacttgcatcgttacatggaaaactaccaagctcaggcacaacctgcccagaacggagaccctatgccacaaccagtggcaggtcacttaggtgtcataatagacagatcccacatagcacgagatacaagaaagactagggagggctgtgctcagactctccgttgcaagcctaaaagcgacatcctagccatttaagaaagagagtccgagtaactcagacttgaagagcctgccatctcctttggggggagatgctaccaagttaaggtttcttcacaatgaccctttggtcattactacacaaacaaggaatatgttggttgttaggtgcatggtggataatggagcctcttctaacatccttttcaaatcaacctctgaaaagatggggctccaactaacaaacctagcaccttgcactcaactaatatatggcttcttcaaacaaggcattacacccttggattgcatttgactgcccttgacagtcagagaaaatcccacaacaagaacgttgatggcataatttgtagtaatcgatgtgccatcagccttcaatgcaataataggctgacctgccctataggacctaaaggcagtaatatccatctaccacatatgcctgaagttcccaacaaggcatggggcagggtgtctaatgggagaccaacagtcttcccaacattgttacaatctggctttatctaaagctaaaaaagagaagatacctgccaagagctctgactaagagtctggaaagacgtaatgaagtctagcccaaagtaaggaagcagacatagatcctcgctatgaggatcctataaatagctttggacctatggaagaattagaagaagtggagatggacccactcttccaaccaaaaaattgaattaggaaaggtttagcaccaaaaataaaattaagtttgataaaatttctaaggtccaaccttgacctctttgcatggtcaaatgaagatatggtaggaatagacccatctgtgataacccatgcactaaacatagatccgaacttttaacatgtataatagaaaaggaggttgttagataaataacgcacccaatgttgtgaaaattaatatacgcaagtatacgcagtcacacaagtaataaagtgataagtaagatcgtctccatagggattgcaaataaaacatgatgtaaaattaactaattacaacttaaagtaaaagaaaaaaaaaatatgagaatggttgaaaaatgattcaagtttaaaaggactgtaattaaact

SEQ ID NO: 316141 - DNA, 621 bp, Cannabis indica
atattttatattgatatgtagggttttgaaatgggaaaattcaaagttgggtgaaaaattcatcaaaaatagaatttttggggtgaaaatcacccctggccgagaaagaggctgcacgcagcctcttccgtgcgtggagttgggatgatatagggtgcctgaccgaggtttctcagcgcttgcagagtcatgggcgagggatcgtgtctgaacgaggcgagcgaccaagcttcagataaaaatgtctaaattctgcgcgtgcgaatcaccttgtctaaggatctggtgcgcatgaagcaccatgctcgacacccaatggaccaaaattttcaaaaccacatatctcacgcatttttaatcagaatccaattccataaaaacaaacttgcttaatttttcacaaggaatccaaataaattatttttaaaatgaaaataaaattatttttcaaagaaaattcataatttataaacatccatcaattaagcacataaacaaatatgaacacacccaaatcaaacaaatttcattttaaatccatattttataaaagtaaatcattactatgcctttcagtcaagttgttggaagttattttaccaagatctagatttagtaaca

SEQ ID NO: 316142 - DNA, 725 bp, Cannabis indica
tgatcatgatgacattcaacatatgcatgaaccagagcattccaagaagcaatatttttgtcttgtaattggaaaaacacatttctagcaaactctactgatccacattttgagtacatgttaatcaaagtagttccaacaggcgcagtgatctctattccactagctattatatagccatgaaccattttgaccaaatcaatttctttaccgtaaccagaagccaaaatcaaactaatcaaggataccctatcaaatgcaatattatttgatctcatttcgctaaacaaaatgaaagctctcatgtattcaccaaccgaagcataaccagaaatcatagtattccatgaaaccaaatctttatcaaccattgcttcaaacaaacgtgatgcctcagtcatacacttaaacttggaatacaaatcaatgagtgcattacatgcctctgttaccgaatccagactcgttttatgacagtaagaatgaagtgtttttccaacatcaagtcttcgaaactcaaaacaaccagaaatcaatattactaaagtaacataattgggcttcaattccaaaccgaaaagacacaccagaattcgtttaaacaaattcaaaccagcatcaaatgactcattcttcacgaacccagaaatcataccattaacagtaacaatagtcttctcaggaattctatcaaacagaacacatgcaaggcccatcaagttcct

SEQ ID NO: 316143 - DNA, 1804 bp, Cannabis indica
aaatattaaatcgttctcatatctatttagaggcctatttaatagttgccaaagtttaggggggtaaaattattaatttacaaagacacatcaatatttaaatagaataatgggatgaaatttaatataatgactaagtttctaatggtaatagttatccgattagataaaattaataatattaaatattcatatttgcagtgaaatctttaaagcgaaaaaagtagatggcacttcgtattcacagataatatttgtctatacaagatttaggctatgtttggtaggatagaagaagagtagaatgaatggagagataagagaagatccaaaggataagagaatgagaagatagttgttcttctttatgtgaaataggaaagatagaaagagagaattaatcaatatgatacaatattatcctctccattcatcactttccctcaattcgtctccattcaagagtctctccttcttaccaaatataatgttaactattacaaataaatactaaactcaaaacaaagtcatttattaatagtgtcaaagaccaaaatctaaaattcaaacctggcatgcatgttttcaaaagggttaatctgataagaactgtgcaatccatttataaagttatcgtatttaatttggattaactaacttatttatgacaagacattacttaagtcggaatagcttgttctaaaaattttattagcattacttaaacggtaactaaaaacatatgaaagaccatcttgtaatttggactaaaggtctttcctttagatactcaaattgtaaccttattttatgctgagaaaagtgaggaggcctaaataaaacttacgagtttgtaccattgagatagcgaaaatagttttaatattatgatattatcaatcattgtttttttatgtatttggactaaaggtgaatgtagattctttaaaattttagtactaacctggagcaatttcttctaagtcaaagaacttcttggcttgaagacaatcctccaatgttgatcgaaaaaccacttgactattgttagatatgtatcttagttgtgtatattagctgtaaatcagctaaaaattgggctaataagttttctttattctcttagtttcctagtataactttcttaagttgtgtataaatatatactattaatgaaatacaagtcaattattgtcttcacaattgtttacatggtatcaccacaaaattcaaaattcaaagttagggtttatcccaaagttgaggtttgcaattagggtttgttatttatctttctttaggttcattttttggaaaacacttgagagagcacgtgaactctcactgccggtaccaaaaaactgcctagttgccgatctgtagaaccccaaaattcggtggcagaaccgtcgcgcatgagccatgcacctcctgaagctttggcgacaaccttcacgcgctagcgcatgagtgtgtgtgaggttccagccgtttctctactagtttactttttcggtgtttctgaccttgcggtgcatttaatctgaccattattttcttcttttgggatcagtgaaatttttttgccatcctttggtgtgatactttgttcattgtctctttggtcattgaaaaaccgtgtttttgcaaatgtcaattatatataagaaaatataaaactgtatgcgtctgtagaagcagaaagtaattctgctactgcagaaactcgttttgcaatgacaaaacagaacaggcagaatataaaatattgtagaaaaataataacttgacacaagagatttat

SEQ ID NO: 316144 - DNA, 603 bp, Cannabis indica
tatttataatcaatatacacctatttggcagctcatacatagtttgaatactcactagacaattccctaaaatagatcttcactcagcttaggaattttcgtttctatacctacagaatcgtgaacagtaagtgtgattttccttttatagaaaataaaagtcttgcttcatttttcttcacaagatatctgatcaagcatattacgaaactcacacaggatcagatatacacagttggatagataatgaaatgatgagtcatccaatttaccctttatgtcttattttctataaatagagaagctagacatatttccttccatatttaattttatcaatacaaaaatatagaaaccaaataacaactcacccgaaattaataaataaataataaactatttttgtcaaattaaagatgccaaaaatagaattaacaatctatttctttggcactttgattgacaaaatattttataagatcaaaacctacatcaagtgttagaaacaaaaacaataaagaatagaaaataccccctacatgaaatcatactaacacataaaataaataactttttaaatggaaaagttcacaaaccacaaac

SEQ ID NO: 316145 - DNA, 1918 bp, Cannabis indica
ctcaggaagattgttaaaatggttagcagagctgagtcagttcgacatcaggtacaagcctagatctacgatcaaggggcaagccctggcagtctttatacttgagttcgcgagcactgaggtggcccttatagaagaaaaaattgatcatgatgtaccaaaaggatggactttatatgttgacgaagcctccaacagctaagggtccagaggtggtataataatcagaagccccagtaagtttaaggtatatgtggcacttaggtttgaatttgctgcagctaacaatgaagccgagtatgaggctttgattgcgggattgaaactgctcttgagatgaagattgagtatttacaagccttcagccactcccaaataattgtatgccaagtcaacagagaatatctggccagaggcggacgtgtggctagatacctctccctaacttgcgagttgctacagaaattcaaaaaagtgattgtttctcgactaccccgtgttcataactctcatgcagacgctttggcccgtttggcctcaacaagagaagctgaattactcgatgtaattcttgttgatgtgttaacccacccaactgtaagttgaaccgaagtaatggaggtaaatactgccagagaagtcatatggatgactccgacaatggattacttggaaaaaataaatcctacccgaagataagatagaggctagaaaactgcggtatcgagctgctcgatatgtcatttatgatggcaggctttactgcaaaagcttcagccaatcgttgctcaaatgtattgatggagccgagtgcgaatacatactctgcaaagtgcatggtggcctctgcggcaaccacgccgggggtaattcccttgcttgaaaaaaaaatgcggcaagggtattattggacgacactgcgagtagatgcctcaaactttgctaaaaaatgtgacaatgtcaacagatagccacgtatgccaaccaaccgccaagccagttaaactccataacaagtccttggcccttcgcggtctgggccattgacttaattggagaattacccaaagggaagggcgggtcaaatacggtgtagtcgcagtcgattatttcaccaagtgggctaaggcaaaagcccttgtgactattacagctgtcaaattgcgagagttagtgtataattccatcatctgcacatttggcatctcttacaaacttatctcagataatggaaaacagttcgattgtaaggaaatgcgccaattgtgcgatgagttgggaattaaaaaattgttttcagcagttgcctatccatagagtaatgggcaaacagaagccgtgaataaaataattaagcatagcattaagggaaaaattgaagagcgtaagggggtatggctagaagagcttccgcaagttctatggtcgtataatacaattccccgatccacgactggcgaaactcccttctcgctttcttatgggtgcgaagccatgatactagtcgaagtcagggcagggtccctacgaagagatgttctcaacatcagtcaaaatgcggacaagcaattgttccaacttgatcttttagaggaaaaacgcgatcaggctcatctgaagaatgcggcctatcaggagagaactgctcgctatttcaattcaaaagtcaaagagagaaatctgtgagtaggggatttggtactacgaaaggtcatgccaaacacaaagaacccagcacatggggttttcggtgacaattgggaaggaccctaccttatcgcttagaaaattggccatgcgacttatcgtcttgcagaactcgatggtactgcgatatgaagagcttggaatgacgaaagtctgaagttttattatcagtagcactcacaatgtaacaatagtactcgtcgtgtattta

SEQ ID NO: 316146 - DNA, 1360 bp, Cannabis indica
gcaagtgggagtttgtcacgattttatgccctaaataaaacccatttcaatctaatctgttttgttatcaataaaagattagaagtcatttatgtttacatgtagttttcatgtttatggtttaatatatacaaaatctcttttgtgccaccatacttttttttttcaagaatgtaccgtcaacgctgatcataggacgataaaacttaaatccctcctacaagcatctagtgatcaaaaatagtacttgaacctgtcgtcctctctcacaatgtcagtaataatggtacgcagatccagaatgtagaagtaatcagctaatttcgtaaaagattgtgctggcgtacccttagtatatgtaagtgtcttctccctgcacctccatgtcttctcataactaatcgtgataccatagtcgacaaatatatccattttatactttttttcttgtacttagttctatctattgtgtactttctcttaataaggtggccaacaacccacgacgctgctttacggttattagattttctagaatctaggtgacatgtgtgttcaacgtggaacacagtaacctcaaacgtgtcacaatgtgccttcttcctccctctcaatctccacttgtaatttcgatccttgcaagttacgtaaaatacatcggtgccagaatttctcaccatgaactaaaaattcttttttaatgcatacattcctactacttgtatcaattctacattgtttgtgtacaacttgccaaagtgtatttcccttgaaggcgtaccaataagagagattgtataaatattattttcctctatgtcttccttggtccacacaagagatttaaattttgtacaaacttcaaaatcagatgcaagagtactatgaggaggaccttaccgactgctctagtgcctggtgtttggatattttcactatgggagttcttctttctccctctgtacaattattgcttagaggagattctaacatcaggtcaggtacctctatagcttaattaatttccaaatcgatagcatcatcctcgttcaaatgtaccacattatcattgttgcatagggagcatcagactcaatcaaatgcattattagctctgttatcatctatattattagggaactgctcatttaaaccaactagatgatctgtttttgggacaaaagctccaaccacacttcgagtcacatcctctttaccatagtcactaatagtggcagcaagttcatcgcactcatttttgccttcaagtctaagaacactctaacttgaccatctttcactaaaaccttaggaggtatcatggtacctttcatgtacatgtaacatacctctaatttca

SEQ ID NO: 316147 - DNA, 1025 bp, Cannabis indica
taactcttcatacaaattatcatgcatcttttctaaagtagtatcaatctcaaacatcaatgtcttactttttgcgctattgagtatccaataaaaaccttgaagagcccaaaccccatcatacaatacaattcaaacatagttgaatctacaaataaaaatagaacaaaaaattaatttaaatatcaatcgcatcgacaaaaatatcactaattattgtgaaatattacaaaatgacgacataataaaatatcaataattatcaacagatgttgttcaccactgcctcttacatgtaatgtacacttatatcgacaaacgttgcaaaatatgttgctatatatcgttaagcattatctctagtatcaaagacaaataaatatcgccaaaagtcataaaacatgtcgctaaacatcgttaagcatcatgcctagcatcacatacacatatattgtcgtcatgtcacgacacgtgtcgctgcacatcattaaacaaatctctaataaactaaccattatataacactacatgtcatgacccatgtcgctaaccatcgttggacgtcatctcttagatctaaccatcatatatgtcgatatatgtcgcgacacatgtcgctaaatattgttaaaacatgaaaaaactagaaaaacctagattcatcgaagtttcattttagacactaaacaatcaataataatgcagcagatgtgtagatctattcatatcaaaccaaatacaactaaactcaacaacaattattcaagaaattagatgtccattgttttttctttttaagaagtatgttggtaagggagtttgggttgatcttatgcacttggtggtcaagctaagttgatgaactggcaaagggtgttccggttgggtgtgtgtgttgtgtgactttctagagagagggagacaagcaggggcggagccagcatgaaaagttaggaaggccaaactatattataaatttaagtataaaaaatctcaatatttttattaaattcataattaaaatt

SEQ ID NO: 316148 - DNA, 802 bp, Cannabis indica
agtcgggcaagaaaaacttcaaatacctcaaaatttcttataaccaaacacaaacagagtaaataagaaaaaaccaataaaaaaaaccttgatgtatcacattgaaggaggatcagtaaaggaggttttgatcaatgcaggagaaaagtggggggaaatgggtgtagaagtaatgttgggagaattctagatcggcattcaatattagaatgcgacccacgcctttttaatcaacccatatagcctaaattaatagctaattttgttgtggaagaggttgcgaaagtcacaaatggctattctctgtcaaggacttggggccctcttccttgattttcccacacccattttccccgacattatcttcctgctcaaaccttttactattgtttaccatcatatccatctccattgttctgtgatatataaatcaatcagtagaacccagaagagaaagagtgaaagagagagatctataccctaacttgtatatgtaataatgcaatgcttgctttgcttgtcctcctactccatattagggtttgttttccatcctgataaattgacctctacgacgacgtttcgatgcccttctgccttttctgaaacgatttcgctagtggttcatctctaccgctcctctgcactttggcttgcattcaccgttggatgacttctaaatgtaaaacggaatgcaaacattgccatatgggcttgggccttacatatggagagcatgaatacaacacttgagctatcctttttgggattatttcaaaaaaaaaaaaaaaaacgaaacgta

SEQ ID NO: 316149 - DNA, 2756 bp, Cannabis indica
ttttgataatatatttgaagaataaagtagagaaggtgactgattcatatatctatacaatttatgtttatttaagtatatttttcgagtatgacctggttgaatttttcttttaaagaaaaatgagtataattaataaagatatattctttgaagtttaatttgggataagttgaggaatactatttttttttgtatacattaattaaaaatactctcatattatattttattaaaatataccacttttttgagtggattgttactcttcacttaagtctagcatatattttacattaacctaaagggtataatgagaacatcatcataaaagtgggtatatcttaaagaatctgaaaatgaaaagtaaaaattaaaataataaaataaaattggtatacaatacaatttcctcgtttattttgggtgcctctataagtttttgaggaaattgtattgtatacttacttttctttatttgttttaatttttaccttcatgtctatattctttaaaatatacccacttttataaatgatgtcccattataccccttaggttaatataaatcatgtgctacacttaagtggaggacaatgatatattaggcaatctactcataaaagtaggtatattttaattaaatataatatgaaagtatttttaattaatagatacaaaaggtattcctcaacttatcccaaagtttttagtaaattaatccacaaagtgtttgtattttgtaacaagtctgattaatttttattttttatttttttgttgaaaaagctttggatctaattaaaaacgttaaagtccaagcaattataggcccagaaacgtcaatgcaggcccatttcataatcgaactgggaaacaaagcccaagttccaatcataacattctcagcaaaaagcccatctctaacttcactccgaagcccatactttttccgaatagccgcaaacgactcatctcaggtggaagccattgccgccattgtcaaagctttcggatggagacaagtagtccccatctacgtcgacaacgagtacggcgaaggaatcatcccttacttaaccgacgctttacaaaacgtcgatgcccaagtaccttaccggactgtaattcctccgaccgccaccgacgaccacatttccggcgagctttacaagctcatgacaatgcagactagggttttcgtccttcatatgttgcctgatcttgggcaccgaattttcgccattgcagagaagattggtatgatgggtaacgattacgtttggatagtgaccgatgggattgctgattttcttggctcggctaattctacggttcttgattcgatgcaaggagttttagggtttaaaactcacgtacccaaatcgaaagagcttcagaattttacagctcggtggaaaccccaatttcaacgcgaaaatcccaccattgttaaccctcctttggtgacttttgggctttgggcatacgacgccgttttcggattggctgaatcggttgaggagattggtaaagcttcgaactttagcttcgaaagtgtgaattcagttaactcttctactgatttgggatcttttggggtttctcgaactggttttaatctttctcaagcgttatctaagatgagatttaaagggctttcgggtgagtttaaactcgttaatgggcagttacaaacttcaacttttgagattattaatgtgaatggaaatggtgaaagaaagattggattttggacagttgagaatggattggagagagttttggggtttggagataataagggaaagagcaaacactctggtttgaataccagtttggggcctataatatggcctggtgattcgaccacagctcctaaagggtggcaaattccggtgaatgggaagaagttgagaattggggttccggtgaaagaaggatataaagagtttgtgaatgtttcttttcctttctcaaacgacaccgtttcaggatacagtatagatgtgtttaaggctgtgttggaggctctgccttactctgtttcatttgagtttattcctttcgctgatgcttttggcaatgctgctggcacttacaatgactttgtatatcaagtgtttgatggggtaagaactttttaaacttttgtttttcacactacattcacattgttgtcaaatatatgtatgtatgattttttggtgaatcatatagggattttgtccttttaagtctaacaatctgaatatttttaattatattttagagattatgatttggtaaggagataaaattcctaattagtataaatataaataagtatggatgattttttgatgatagtttattttgcctcttgaagctccataaattattagtgatgttacatagttccttgaactattagagttagtgaaatatggtatttccgttaaataattggtaattttatttctgaattttttataattatcaattcgtgctccttttattaaaacaagtaaatttggtagtggtaaaagttcgataggcaaaatatgatagtgatcatcctcatatttcactaatattcacatttgagggggtatttaacatccctaacaatttagggagcacgattttattagtgaaaaaatttaggaggcaaaatatctgtttattttttttggttaagaagtttattcattgacaatttaaaaacttgtttgtttgtttttgttatacaaggagaataaatggttttactcttc

SEQ ID NO: 316150 - DNA, 531 bp, Cannabis indica
gggttcaaaacccagaaaccaattgtttatctttcaataaatctagcatctaagtttagagcaaatgcattacaaagccatgactgtcgaccgatttgctctgcttatcggtcttagcgattttctagatgaaattcggaacatataagtcttgacaaatagcatcttacaagattgtttttgtgaactgaaaatgaattttagagtttgtacatttacttattgcaaacacttttgtgtttttgattcctctgatttatatgtctagtttagttattgagtgtgttaaaacctttgtttttttatcaggttaagctgcaaaaacacaatactgaagcacatggtattcagtacaagaatggttggcattgtactactaggatactaaggactgaaggagtatgcttctgatttagctagtcattattttcttatatgcgcatttaagctggatgaagaagtgataaaatacctgtatattgctttgtttttttttttttttgtaaacaagacttgaaatacaaaaattga

SEQ ID NO: 316151 - DNA, 945 bp, Cannabis indica
aacaatctcccacttgtgctacaaattaattccaattataattacatttgataaccttatgtgcacacaaacttgctaattattctctaagcatctccttaaaacaatatgatccatcttttataccaatatgaggccaaaactgctattgttacttttatcgtaactggaccaatcaatgatcatcatattaaatatatataatgacatagatcaaatatagatgtgtaactggaaattacatgcaatgtaatcttaatcatgtctattctaattggtcttttattccttagggatatctatctttagtctttcaaacttttgtcaaactacaattgaaagataacacatttagagcaataaagataataaatcatcaactttattctgtagaaaactgaacctacttaaagtagtgtaatatatagtgtcattcaacaaagtaactaatattgaaaataaaccctcactaaaactaaacattatcaaataaaacaatacccctgtaagtagtatgcttataaaagatcttgggtgtcaaagctttagttagtggatttgctaaaattatgctcaatagacactattttactctaaactctcttttaacaactagagactcaatttctatgtgtttagactttgataagcttctactgtcatctaaatatagaactgctaatagattgtcacaatatatctttagtggtctttcaatttcttacacaacttgcagccaagtgacgaaatttcgcagaattatgttgccacgatggaatgagctacgagtgtctgcttagcccttttacatgatatagttgttggaaatattttaccatgatctagatttacttgtatgttgaattataattctataatttaacatcctaaatatgtattttttttttttaaaaaaaaataatgaattaaacacataaaggtata

SEQ ID NO: 316152 - DNA, 736 bp, Cannabis indica
atttaatttccaaaaataatttaataagcacgtaatcacaacaccaactaaaatatatcaaaattgacccaagaggtacctaattttgtgcaaataagtgaggactcacacacttgatccacaacacacgcttgcacaagccgtttgaggcgagttgggctagttggtgtggtgtggtgtgacactttattattttaacagaaaaattatttaataaaataattatttttattataattttttaatttaattgagaaacatgtttaattgaaggtgattacttagtcgtgtcagttactaggacacattcaaccagctaactactccccacgattcaaaaaatgttcttcttcccattatattatttcaatacattcatctatatgatgcgattaaactgacgggaagaatacatctttttcatatcgaaaaaaatagacacagttttcaccacaaaagtctatctgcgatgtcattaattttaggatgtattcgacagttctctacaatgtagtggggttccgatacagtacgactgagttgttttattcttgggacgaccaataaattttgactgcttgcacattcttgggcagtatcacaaacgtcttaaagagagcgatctaatctgcgacttaaccaaaaaaatttatccaataatatcgttcctcttttatttttactaacagtttaatcaacattattactgtaacgccctaatgctaaggcacgctac

SEQ ID NO: 316153 - DNA, 1950 bp, Cannabis indica
gccttgtgcaacttacataccaagtgaggagctgagggtatctcaaacccagggggctgcaccatgtaaacttcctcatttaatgtgccatttagaaaggcattattaacatcaagttgtttgattggccagttgtgagataaagcaagacttaaaacaagtcgaattgtgacaggtttaacaacggggctaaatgtttcagtgaaatcaaaccccggttgttgatgaaaaccttttgcaacgaggcgagctttgtaactatgatgtgtgccatcagaattttctttctctcgaaaaacccatttgcagcctatgggagttctgccatcaggtaaaggcactaaagtataagtgccatttcttgtcaaagccagcatttcatctgtcatggcctggttccacttctcttgctgtaatgcttctttgacagtctttggaatttttgctgcaatatatgccttcggtttatgtattccagacttagctcgagttgtcattgcatgagtgtttgtgacagtgcttggttgaacaacatctgatgactgagttgctgtaggtgcagcagctgtaacagtaggtatagattgattgtgatcatgcatttctggacttggaacagcagctggtgtgtctgaattagtaacagcaggttgttgaatatcatggggaaaacaatctggaggccctctttgtgttgatggctggtgctgggttacataatcctgcatattaatagtggaacttgccacagtaggcacaataggattagtaataacagtggtaggaatattgtgtggggaagtggacactggagctataggaatctgtgctggtgtgagaaaatcagaataagaatatgaatcaatggtctctgtgggaagtgaagtataaggaaatgaggtttcatcaaaaatgacatctcttgaaatgtataatctgccagaaacatctagacacttgtaccctttatgatttagactataccctagaaaagtgcaaggagaagacctaaattggagcttatgtttgttataaggtctaatattaggaaaacatttgcaaccaaaagttttgagagtagtataatcagggatgatgtcaaagagtttttgaatgggagatatgttttgcaaaacaggtgtgggtagtctattggataggtacacagatgttctaaatgcttcatcccaatatttcaatggcatagaagcttgagcaaggagagtaagaccattttcaacaacatgtctatgttttcgttcaactatgccattttgctcatgtgttgtaggacaaggatgcctatgagtgattccaaactgttttaggtgatcagtgaatgatctaaactcccctccccaatcagtttgaagacatttgatctttttgcctaattgtaattcagattcagttttgaattgcaaaaaggttttaatggcatcaaacttgtttttcaacatgtaaatccatgtgaacctagagtaggcatctataaattggatgtaatatctgtagccattgagtgaggttgttttagctgggccccataaatcagcaacaatgagttgtaaaggttcattgtacacagtttgagaagattttggaaatggtaacttgtgtatcttgcctaaacaacatgcagaacaaacatttaatggatttttattgctgattgttatattacatgtttgtaatacagctttaacaactttttcagagggatggccaagtctattgtgccacaactcatagtcagagacttgagatttattacaatgaatacaagtagatgattctggtacagtattagatgacacagaagctgtcaagacacttgaaacagctggatttggtgttacagaagctgtcaagactcttgggacagtggttgtatttgagggttgcacatgaaattgagagggattaaaagtatagaggccattctggtgt

SEQ ID NO: 316154 - DNA, 1013 bp, Cannabis indica
tgttaagcaaagttcagtcaattggagaaaaagaaactctcattcatgtacaagcaattcagttgttctgtatcccaagatcctgttaaatttactacatttttcacccaaagaaaaagtattgattgagcaaaactagtgaaaagtttttctaattatctgtctaatgggggaataactctgctttctattctcttctatggaaaatcgatgcaacatttcggtgcatcacttttgcagtcattaattaagttactgctcttcacataaatcagattttattaggacaggctcttggtgggtgaacatgtttccaccagaactcagagtgcacattacagtatttaagaatcaacaacatttctttacaaatgtttcatccatttggagtctagacatacaataaaacttagtggagtccatgctcagacctcctttgaagccaaaagtcttgctcataaagccaaccttcactgggcagctgttgttggcattgctatctctaccaggatcaccacgaggtgagctctaccaaatgcaacaagtacacacaaatgtttacaaaagtacaatatttgtaacaaatgtcaaatttgtaagcgtttgtaagtttgcagaactgtggcaaatgcttacaatttcataaatgctgtttttttaaaaaaaaataataaaaataaaaataaaatttgtatttacctcaagattttaccactctgtttttatacatttgtccctctgcgttttgtgttcctattagggcagagcgtgccaaataccaggactaggcttggcagactagcgtgacatcctaaatgccattttaattatattttaacattcaacggaatgaaaagattatcgatcttttaacaacctttagtatataaaattggctaattagtaatttttcccccgaactttgatatgtactaaatcgtgcccttggactttttttggccgttagaattttctccgaactattgagattgttaaatttaaggacttttgtc

SEQ ID NO: 316155 - DNA, 695 bp, Cannabis indica
aaaaaaaaaaaaagaaattatgaattggttgactattcaatatatgtagtaatcatgaagtagttaaaaaaagaatacatgaagagaaaatttcaatggtggtatacatgcagctaataataattcaatatataagaatgtttcaataatattgttatatatcagtatatgtatatatatacttcttcaatacttaattatataatatttgttttgttcaaaaaaaaaattgtatcatagttgttgtaagaaggtcaaattaagactattcctttggatatattattataatattgtagttgttggttaagatgacgtttggtatcacttttttaattagttttctatttttaaaattgaaaaagtgaaaatattttttaaaaaattgttttataaaactgtttttactttttaattttttaattaagaatcaaaattttaaaaacaaaaacaagttactttcaatatttttttaaattaacagttttttttaattaatattttagactccgacgagacctgaactcaaatcctccccccacggctctggcgttgaacttagcctctgactttagacctagacctgacttaaattaaatcaaaaaatgaaaataatgaactttacagaacacacttttgtttttaatttttaaaattgaaaaacaaaagtggttacagaacgcaattttgttttt

SEQ ID NO: 316156 - DNA, 2128 bp, Cannabis indica
ttaactgactttcccatcagttactgtccgacgaaagtcttttctaacaattacaaaatgtcatttaaattgacttttcctgtgtgttgtaaaccgtcatttagattgactttctctaataattataaactatcatttaaagtttcatatttttactacacctacatagccaaaaaaatttggaaattgacggaaatagtataaaagatagttttaagctaataggaaaggccatttttatagtagtgcaacatgttcacgaaggcattctggtccttagggacctgctggatagtatattaaaattctagagtagttctcgagctctagaaacttaggcagccatcttttctcctttagtttaatactcccctgatatttaattcacaactaactaggagatgctataaatctcaatgatttcgcccggacttccttaggtagatgcaaaccaacaatcatttcttcaggctttccttcattgttggaggtgacaaatcaaatcggaaggcactttggagctggtttccttgaggagaaatccaaataattttggctccggaaccttttccatttaaggctccatcaacgtagactttttagatcatttgaaataccctaggattaagagaaaggattagcaaaaccctaactagataattgtgtattattatggaattatattattatataatttattatatgtgaattaatatgagatatgacatgttaagaccccattggtgagccaggggcattttagtaattttgacctgacaagggttaaattgtgaatttaatttatttacgtgcttatggactatattattatatagtatgcatgttatgtcctttttcaggtgtattctgaaaagttggcgcagtataatcacaattgggtatttcgggccgaaccaggtttggggccgaaatacaattcttagcttaattattggcattttatttaagcatgaataatctgaatttatttgagtatgaggaggtattaaaatgactattttgtccttaaatgtttataagaggtattatgtggccatatgggcattttggtaacttggtatactttgattatttgcaacaaatgaatattgattgaaaaatgaatttcattttctggtttattctcctcaaaaccgcctctctctccctctccttatctctttctttcaagtgttgaattggtgaggtttttgcttgattcaagctcggatttggtggctttgtgcttgggtttgaagagatttgaggtagtttctcttgctggtttttagttgagtttattgctgagaatttttgtagaaaaacaagaaattctgttgtattctcttgaaaatgcatgtggttagaatttgtgttaaccttgataagtttgggtgtaattgcttggttttgtattggattatgtttgatgagttctagatgaatttttagggtaatttccatgtgtgaattcaagttttacttgttgtattgttgctggaattagaggttgaagcttgcttgaaagttcaagttcttgtttatgaatttttgatggattctgctcaagtttggagctttgatttttatgttgtttaatctgattttttaagggtctttattgatggatttgatgcatgaactctgtattttaactctctgaatatttattggcaactctaatttgtggttttagaggttgattaggtttgggatgattttggtgtgtttaaacatgagaattcgtagctgatttttgagattttatgggtttttggaacccaggggccgcgacccagctccctgggcgctgcggcccgcctctgtgtggtggcctgggatttggttacaggtgccgcggcccgcccttcgtttttgggcagattcgaacacgttattcaaatcctcataacattgtgatccgaactctgttttgggagttctatatatcgttggaaagctcgttccgagctctatttgattatttgtattttaaatgccaattttatattgtgtgaaagtggatttagggattaaccctatacttgtgaatcccagaatttgtgactaggattaccaacacttggttaggagcacccagggatttggtgttggaattattttacca

SEQ ID NO: 316157 - DNA, 2582 bp, Cannabis indica
ataaatcaaagaaattaagtcatattgctcaaaacattctttacatcctatccgtgcttacataaagcttgacaaatttttaaactatatcttatcctcatgtttaactttttctggcataaagagtctaattctatgcttagcttcttctttcacttttctcactattacatataatatggaactaaactattccagtatatatcatatcattcctatttagtcttaatctgtacactaaagctgcaagagttgctgctgccattaccatattctcttgaatttgcttgatcttgagcactccagccatcttatatgccttgtaaagtttcaatttgattcccccatccaagtcactgtttcaccactttcgttgactacatagacactcaaagaaatgtgctcaattattttctccttattacctcaaatcaaacatgaagcatcaatgctaatttgaaacttgaataatctcccttttgtttgaagtatatttagtgttaacgcatatttttgttaagcctttacgtaataaatatatcacaaaaatgataataaataattaaataactccaaataattttacgtgattttgcagttaaatctgcatatttcacgattctatcttatttatgattttttttgaatacagaatacaatatttaaatgataatattttttctctcaatttttggtccttttttctatggaatctgcccctatttataggaatataggttggaagttattttattggaatcaatttaaatgtcaccgttcatgaaacgtggacaatttccacgttttatttattcgcatataggataatatctaataactgcaaaattgtcttttgtttttatatttttcgatggttagtgctaatttggacgattgtatctcgtttaacatgaattatcctccttgtccaccgtgatgtggaaaaaatactaagtgttggcagataattcgcctcgacacatctcttcatctgggttaatattgcgaggtgactgtctcgctatatgtaaccccatgtagtgagtaaatgtcttctttttgattgtgtatttcaaagcaggtgtatgtcttgtcaacataagtttaatagtttctcatccttatctcgcttaatattatatagtcagcgagttgtaaatattttctatcaaacttttataaaagttattttattttgcatttaatgatataacttttttatatcaggtggttcatcttccaccgcaggacacgtattaacttctgaagtacttctagtgcagctgaactttgggtataataattgttccttaaaaaattcttttttaattaaaaagagatttttaaatgattataagggtattttgtcttaacccaaatataataatttcatgttttaggtttttggcgtctcaagatttcgaggcacatcattatcattaaatgcccatcttttcaaatcttgctgcgttcccatccattagatcttattgcttttgatctaacagtgttcacttccaaggtataaaattcgaaagtaaacattcatttttcatttatgcctttcaaaccttcaagccattctgcaaaaaaccttctctgacttccaatcaccttattgcatccccttactatctttgacttattttttgtgcgtttcatcagacttcctcctcaacctcagagattctcaaaagtcatttcttcagccatcaaattctcaatcgaaaagttcttcattacccaggaaccttcgtcaaaacagtaagtggtttacttctttatctttgttattcccttttcttgggttagtaatcttatttttgtaattgattgcatcattatttactttgtttggtttagataattttcaatttagttttctagataatttctaggattcacgaaaatttttaggttcattagatttgtaggtttctggtttaagtagaatttaacatttctacaaattgggtttattctttgtttgaaaatatgtcccaatctggttctaagattccaaccccagatttcccagaaatagaatgtcctagaaaattattccttccatttgaatctaaaatccaaaaacctaaatctaaacttgaaataaatgatgctaaagttagggatcactacagagggtaaataccattttctgcgagatatagcctggccagaatctgaaattgtaacttcaatccctttagcgggatttttgtttttacctagagtcattgttgctttttcaccacgtgacctagattttgaaatcatgtctactcaagctcgtaaatcataaaacccccaagatcccactgtcacttttaaagccgagctcattaaatccaaagtaagagctattggggactatgtcggtagtgtattaaaatcctgtggcatcaagcaagagcgaggatgtcacattagatttgttgctaaaagggagtttagctgctttccaccagaaagggttattcgagaagaatgtggtgaaggtagcactagtgcctctaggggtgagcaacggtcggtttggtcggttttttacacaaaaaaatccaaaattcggttttcggttt

SEQ ID NO: 316158 - DNA, 829 bp, Cannabis indica
gaaatagattggaaaatcattttattattttacaagaagagactattgaacagagatatattttggttattatttttcagaattcgtttcccagaaaatatactgaaaaatagatatgccaattaactactctactaagcctaatatgtaaagaagaaaacattattttattagtcttttagtcaagtttgtacatcatttgttattttcaaagtttaattaccaaattttcataataatggcaataaacaagtgcaataccatataagtgctatttgtgtgcagagccggccttataatttagtgggccatagaaaaaaaaattattttgaatatttttcaaaatcagtaaaaaaattgtataattttaaaaagaaaatatttttttttgagcctctaagctaggtgggccctaggcacaggcctagcccgcctatgctcagggccgggactgtatgtgtgtccatatatataaatatatatacaatagtatgtagtaatttacttcatcttctctttcaaaaatttacttcatctttattttatctttttttaagtactatatgtaattcttttagttgcaactattaagtttctcatacatatacactatttagactgctatttgtattctgtatattagtttatttccctccactttagtcggttagttacaacagtttccaactgcttagttgattgttgactggtgtgatcttagcttccctgaagctatatatatatgttgtattggtttccttttctattgaatgaatatacaaagacttttcctgttttcttcatttctcaatatggtatcagagcggga

SEQ ID NO: 316159 - DNA, 504 bp, Cannabis indica
ggattggattggatcggataattgtgaacacccctagacttgaagggtggctcatgaaaattttatcaaatgcaggtaaattagtttccattatatgttgcttgctcttgcgatgttagtttaccctatgtctactttcaagattcctttatctattgtcgtaaaatggacgttatggttcaaaggttttggtggatcgggaatgtggacaagagcaagttcctcgccactcgatgatgggattttctttgccaaccaaaaaacgaggaagttcagggtttaagagatttgaagattttaacggtgcccttctgactaagcttgcttgggaaattgcaactaacaaggagaaaccttaggtaatttctttcagagtgatcaaatgtttactgagtttttggaaaattaaatataatgaaataataagttcaaaaaaatagtattaagaagaaatgagacacgatttgttacgtggttggggcgtcttagtccacgaggcagtat

SEQ ID NO: 316160 - DNA, 1678 bp, Cannabis indica
tttgacggttacacttgattatgtttgatttccaatatttggttttgggggaaccgaggtgtctgaggtttttgaaattattaccccttttcgttgttcaacctataaatatgactgagcattgttcacaacttcattttcaccaacttctctgttaagcaagttcagagcaaaaaagagaaatttttcatctcaagtttgccgtgagattttaacaagaaccatccaagcagcttcgcttagagtgaatccagacgtcgatctgtttgtaagctctcgattcctcctccttttactttgcatgtttagtttttgaatacgatcttaaccttgccgtagaagataggtagaaaaccctaggtttagaaactttacgatttgtctttacaatggtcagtgcgatttaacggttcatgatgcttgctttttgattgcacaatgtctgtctttcaccttgcttattcaaagcttcgtgaagttttgcactaactccaaatatttcaaacctttgggttttggcttattttcgaatatttcaattctttaatctttgagtactcctggtcggcatatttgcttgtttattgtttgatatcccaaccgaacactcatctcgtgtgttgtcttttgtagatgaacctggtgagttttggggaagcgaacactgaatcaaccaggatttgcttcaactattattcgaggataatcctcatctctgttctagtctgccctcttcaagcgacggacattccatctcaatctttccgtccagccataggatgatggcgcgaacaaaatagacaatgcatatgggcaatgcatctgaccctcatgtggcccaacacaccactttacccagcgccgaacaggatccgctcatctaggaggaaggaaatcatgaaggggacgccgaagctcaggagatagaggaacagggcgatgtctgtcctggcagtccttccaaggtggaggaagaggaggaggctgcacctccaaactttggaggatacaacaaagctagggagccagtagacgcggacggcgatgtcctggtctaaggagttgattacattaccgagaagcttactactgcagtttcttagaggaggaaaggtgctttgggtgccaggtgggtgagccctccgtccaaggtcactgaggcacgtctaagggatctggaccagtcccacttgggtgagctggaatgttatgttcctgcctcaaacaaccgagccacaaacccgaagaatgggatgtgtgtctggtcgggtgctcattccaaacaaggggcattactacttttacacccgtactttaggaaggtggcagacttcttccgtctctctctgacccaatttactcccaagggcatcaaatatctatttccttattcgtcctctacgccacccagaagtggggtatgccatcctcgcacgaggttagctggttttttgacttgaagtctactccgaaacaaggcaagtcgggatacttctatttttcttagccagacttcaaatggttgataggcaccagggataaggccgtgagcaaaatcaggaattttcttgacgagtattacatgtgcatggcatgggcaccacctatactcggttcgagtaaatccttatatattgccacccacccttcacgctagctcttagggacagagctcaaa

SEQ ID NO: 316161 - DNA, 1868 bp, Cannabis indica
ttccttgacccacttcgttataatccacaattgtctaaaattaaaaaatatttatattattctacttacacttacttacatagagagtagagacagagacctaactatgttgttatgtgccagtattaagttttactgtgctgttattgtactagtattagatgtttttactgcttgttctttataaacaattagtttgtttagttgagttggttagtcttatagttataatcgttttctgttaattcggttaactttcctttcttaagttgtgtctatactgaggtctagctatttatgggctcacctcttctctcttcttaattaattcaaatttatttttctctcttcaagattatgattcttctatttctcaatatggtatcagagctggaaagataagctttcccgtctgatcctcccagctgtcgcgtgtcttcttctccagcgtagctgcgtctttctcgatcatcttctctgattgatattctcttctctctctgtacattgattccgtacaatggctacagatgacgattaaaccagagttcctgctgctgttgtcgatcttggcaatccttctattcaaactaattaaagccttcaagttacttcaaccaagaatcgattggaagatcctacaagtccgcacttccttcatcatggagataaccctgggaatgcattggtgtctcaacctctcacaggacaagacaactactttcatggagcagggcaatgcaactcacgatctctgtgaagaataaaatcggatttctcaacggttctatccctaaaccccctgtttctgaacaaaatctttataatgcttggtatcataataataacaatgtgatttcttgcatcttaaattctgtttcaaaggaaatttcattaagtattctttatgatgaatgtgcctcgacaatttgaaatgatttaaagatctgttttcaccagaaaaatggtcctcatatatacaattcgaggaaagatcttacgaatcttaaaaaagaaaaccagaccataagcatgtattttattagacttaaaactatatgggaagagctaaccaattacaagccttcatgcacatgtaacggatgtacatgtggaggagtcaagaagctccaagatcatcatcacatatagtacattatatcattcttgatgggactctcggattcatactcacaagttagaggaagcattctgcttatagattctttaccagaagtaaatagggtgttttatcttgtgactcaagaagaacaccaaagaggtattgcccctaattctaataatatgctaactctgccatggctttcgccttccaatgtgataaaaatttaagcccacttcaactatgtagtctcatacatacacagtctcaggatcattgcatttaacctttcttaggcaatgtgggattgaatagctcccgatcttttcctttcagatcacggggctctgactgtcacaaactaacttaacaacctatcttcttgcagccacgactttaagatcttgatcttaagcctataaataccaccaacacttattatttcagatacaacgatcaaattgagtttcgaggtagagagagaaagttacagagaaaagagagagattgagttttgtatgaagaatcttctgtagatgaagaagattcttgggtaagagtgtgagagttgaaacactttgagagaactcatcggagaattgatctcgacggtattgtacatgttcttgctcaatcaataaagagaattttggtggtgttgcagaactggagtagagtcatagatcacatcgatctattgaacttgagccaatatattgttagacttttatttgggcttacatta

SEQ ID NO: 316162 - DNA, 566 bp, Cannabis indica
tgaccaaaaattaaaaaataaaataatttatttttaaatttaaacctcaaaatatcaaaaattaataataatctattaaaaattaaatattattaatttagaatattgatatttagatttaaatgataaaaataatattttaattagatattagggtttgaaaattgaaaattccgaaattgggcgaaaaaatcccaaaaaaattggatttatgggtgaacaacacgcttcctgggcacacaggctgcgtgcagcctcatccgtgcgcgcaagaggctgttggcagcctcgtccgtgtgcgcaggaggctgcaatgcagccctcatgtgcgtgaaacgtggtgtgtctgaagggggggtcacgcagcattcagacaagatttgtccctgtcatgcgctcgtgtatgggcatcttgtctaaagcctggtgcgtgcaattgagcaccatcgacacccattcaacttgatttttcaaaccttcatatctcactcaatttttatcgttatcgagttccgtaaaaaacaaaattgcttaatttttcacaaggaaaccaaataaaatatttt

SEQ ID NO: 316163 - DNA, 596 bp, Cannabis indica
aaaaaaatttagtaatttttttttttgagtaaataacggcatcactctcaatacttttatttttctagcaaataatttttaaattttgacaacaaaacttaaaaaattcacattctgttagcatttaattatttttatttatttttaacagttaattgtcaaattaattgttcatgtttacataaaagtattgtacacagtgtaaataattaacttagaagttaactgatggaagtgattaaatgctaataaaaagtaagttttgaaaattttgttgtcaaaatttagagattgtgagttattaattactagcgaaataaaaatattagagattatgccacaatctatctatttacacataattcacatacaaatttgatatgcacgtatgtggtaatagtatattcaagaaaaatttgcggcataaatacttaaatttaattgttagttgcaaataaatactcaagtttaatttttagcagtaataatacttaagttatatttttggaactttgtaagtacctgaacattggtaagcggcttctccttggcctctctggcatacctttcttgtgatttgcgagagtcgcctgcga

SEQ ID NO: 316164 - DNA, 1577 bp, Cannabis indica
gatgagtgtttggccaggaaatcaaacaataaataggaaaaaatgccaacctggaccactcaacagattaaaaggacaaaaaatgcataaaagttaagtcataaccaaggagttttaaattttttggttaaaggctaaaattcacaaagctttgaataagcaaggtgagaaccgagcattaagattaaaggcggaatgtcgtaagcagcgaagccgtacgaactattacaaagaaaactacaaagttttgagcctagattttctatgaatcttctacaacaagtcaagaacaaatgtattttgtatcatgggaacccagaaattaaaaatacaaagtaaaagaggaaaagattgaaaacttactcactgtttgaagcctaaacgtaatcaagaaaaagttgctcgggtgcctctgatagaaatctcacgacagacttgaagaaaattccttttttgctcttagtttgttttgtggaaagaatggtgaaagtaaaattctgaaggagttccaaccttatttatagacaaataagtgaaaaaaagtaatcatttcaaaaatccccagacgcttcgatttccccccaaaataaaatattgagaaattataaacaatcaattgtaaccatcaaagcgtgcaaagaaaactgaattttgaggcattaactaagtacgagcattaattagctgaaaaccgaagagaggcatggccagactcacattgaatcacggacagacgcacctagcacgtgtcacccattcaaaagtaaaagcagctcagatgaagtctccacgcaacttcaaaagtctcgtaccgacttggggagcaaatgatcccaatttttgcactctgacgtggcatcacacgctagtgacatgtggaatcaactcccgatatttgcccaaaggagatattttgaacagaacaccacatatacctgcacggacgaagtcctcctagccgagtagtggacaatccgaatagcatagcaacacttagcaacttcagcacttgcatcatgaagcacaaaagcaatccctgttaatctaggatcgtattacagagatatggcaagttgtcctaattcctcaatcagtgtattctataaatgtaatgtgtaatcttaccaattatagaaattgtaaacaaaaggaaaaccttccttcaagcacatagccctataaatagtgatctattctcactaggcaaggagggagaaggatttgagagagtaaacttagagatgtcattgtaagagctttaacagaagaatctctgcattctttgttcttaagtcaatacaaagcaaggggagtaggctattaccgaactgctcaggaccgaacctctttaaaaactccgtgttctttatttatcttttcatattataacttaattattccacttatcgcttacaattaagactcattgtcgttggctaaaagcgaggtcagcatctagaaattcatgaaatttctcaaacatttcaaatttctttgcataaggtaaaatttagagtgatcgtcttaagaatttaacgataactcatatccacccctgaatgtacatccatattcaa

SEQ ID NO: 316165 - DNA, 1901 bp, Cannabis indica
tttgaggctttgaagccaaatttgattgctccatgtagttgttgcctctaggtgttgtaagggcaatgcctgcaccagacaatcggttagtgtagcttctgcctacatggatttttccatgttagatctttgagattttgttgctgctcttgctcttgcttctgatctagctcttgctattctctagagtcttgaggggtctcaagagttgagttggtgcactcagccacgaagtctgtaagggcttgacccttcatggctgttcttggttggtatgtgatctcaaactggccaagctcaacgacacatttgagtagtcagcttgatgctttaggtttttgcaaaacctatcctagtagttgatcgatgtaaacctttatggggtgtgcctggaagtagggcctccgttttctagaagcaaagagcaagctgtaggtcagcttctccatgagtgggtatcgaatttctgcgttgaccaaccttttactgatgtagtatatagggtgttgtacaccgccttctcttttgaacagcactcacagcatgctctgtgactgctaggtacacacctagctcttcattgtctaggggtttagacaacattggtggttgggccaattgcttcttcagctcctggaatgcattttcacattcccctgtccacttgaattttttgttacctctgagagtgttgaagaagggtacgcatttgtctatagacttggacacaaatcttcttagtgcagcaatgtgtccagtttggctttgtacttccttgacaattgtgggcgacttcatgtgtaaaaaggcttagatcttgtttagatttgcttctattcctctagcattgactatgaagtcaaggaattttcttgagcttatgcaaaaagagcatttgaggcggttgagctttatgttgtagctgcaaaggattttaaagcactcgcctaggtcctccacatgcccccaaccttttcgaacttaacaagcatgtcgtccacatacacctccatgttgcgactgatgagatctgtgaacatcatgttcaccaacttataagtggcccctacatttttttagccaaaagggcatgactttgtaatagtataggcctaggtccatcatgaagctagtgtgctcctgattagatagatacatctttatctgattgtaacttgaatatgcgcccataaaactcaggacttcatggccagctgtggcatccactagctagtcaattctaggcattgggaagcagtcctttggacatgctttatttaggttggtgaagtctatacaaatcctccacttcttgttcggtttaggtaccagcactgggttagacacccactgaagatagaatgcttctgttatgaagtccttggcccttagtcgtttgacttcatctttgagcacctgggcatgctccttgtctagcaatcgcctcttttgttgaacaggctagatgcttggatcaatgtcgagtgcatgggttatcaaggaggggtcaactctgaccatatctccatgtgaccatgcgaataggtccaggtttgcccttagaaattctatcaagattgacttgatttttggagccaaacttttaccgatcttcagtcttcgtgttgggtgagtgggatcaacttccacttcttccaactcttgtgcaggtccaaagcatcctctaggatccctaaagtgaggatctatgtttgtgtccccaccttgggctaggcttcattgcccctattgggctcatcttctagagtcttggtgggcatcttctcctatttggccttaaataaggcaatgttgtaacattgatgggtagactgttggtctcccctcacgcatgccactccatgccgtgttaggaatttaaggcataagtggtagataga

SEQ ID NO: 316166 - DNA, 1200 bp, Cannabis indica
gtttttgttaaaatgttgaaaaaagagaaaacttacatagagaatctccattcttgaaagtgtggtattttgaccatttgacatagacttgtggatttgctgaagtgggtattccccaagaatctaaatctccaactttgtacttagaacacaagactttattagcttgaaataataatgtgagcaaaagagaagccaataagagttgatatgtaggacaagtagtagtagtacaagtcctaaaaatggccattattgttcctcaaagcctccttaagttttcctttttcttttcccttttttcctctgaaatatgaataatgaaattttgaagtgattcaaagaagtatgaggagtactaaaagagtcactactagcaatcttaaattaatggccttttgtttctagagacagatggtataaagggtaattttacttaaatacccttcttttgaggggacaagttatgctggattttatctttctgagttttagagatcttttaataagttaaaatgtcaaagtcaaacacaatttataaatcaatccaaagatttatttttcattttaattaaaaaaaaatagtgatctcttacataagattatcaagctaataaagatttttgtcttgaattttactttgtactaaattatgtattttaaatttttttgaattgttaaaaattttccaatattattaaatgagaaatttaattttttatgcttacatgtgtttaaatttttttttttctaaacttataataactaatatttgtagaatatgacaacttttatgatatcactaaaataccccctatatacacaatcggacccgtcggaccccatatcggactccccatcggacctacgtctcctacctcgcaaacttgcagattcattaaccccatcggaccctatcggacctacatcggatcttgccccagattacagatttgagattctcaaaaacagaacacgaactcacctttgacagaaaattcatgttatacatattcatgttatcggacagcaattggactgccatcggacggcatcgacccgaccaacatgaaaaaattgaaaaaaaaaattaccttagacattgccacaggtgatttgttgccacaccgattgagtctttggtccggtcggtgggtgatgatggttgagggtgggcggcgaagagagagagagagagag

SEQ ID NO: 316167 - DNA, 1545 bp, Cannabis indica
taattttatccaaaacacaacttaaaattataaatatactaatatactaataaattataaacatacatgttaaaaaaaaatacaaacataaattataaattataaaatattactaaaaatataagataaaatactaaatgagtctccatttagacgggaaatccccacccacattagggccgggtccctgcgggcccatccccgtgggagaaatgtgcatccctacacacactacacacaataacttgatgggttttttttttgaactaatcataattatttaaattgggattcactatttttttttaaaaaaaaagtaacacactgaatgtaatatatagatatacatatcatttgtcacctctccattttagtgttagtgattcgataagctttctataattcttgtttttttttttttggtcttatgttgatgaagtgagagagttcaagtcattttctaatcctgttgagagtggtgagactgagatgtttaaattagggttggtaatataggtcatcatttgactcaaataccatacgaaataaataggtttcagcaacacgtttgatgatcatgttatattcgtttatcttatttgtatagtgtcataattgtgtcaacataaaaatattgcgagtattaaacatataaaagaaatgcatgcaaaactaacgaatatttactcagaataacacatactcgaagaaataagtaaaaataacaaaaaagtaagcaatgacacatggaagtatagtggttcaacaaagcttaattcacttagtccaatattgttcagaaagtattacaataaatgaaataaatatattgattataaataaatcatgaaccaattttggttgtttacattaattgatggaacgcctgcgattacactgatcacatatcaagcgttctatattaattgaataatctcaaacacacaggtttaaattgtttattgcatatttaaatttgagtcatacggatacaaagacatggtctttgtgtaattagttgcaggtgagaaaacactttgtcctcgcatatctttagatatgttgcgactctcaatttcccgtgtttgactacatctttgtaatatgtctattctaatattgcgacaaacattttattagttttggttgcttatcttctcacagattatgcgaggtgtgggaactgttccttaacacgtcatccttactcttgtgaatattggtccatgcgtattttattctcaagattgtactcgttttatagatgaaaaaaatcatctaataaaaacacatttcataatagtttcatctcataagagtgtcacacaacatgaattattactgttgattcattatttttttttaaaaatatttcattatagtgacacgcagaaaatgaatgcaaaaggtttcagtgacacgtgtgaagtgtcactaaaaattgtctttccagtcaccctcattagtgacgcgcgttgaagtgtcactatacacttttagagttactcaatgtgtgtcactaaaacccaattttctagtagtggt

SEQ ID NO: 316168 - DNA, 845 bp, Cannabis indica
ggtcctgatcaaatggattgaaatctagatcatccaacggtttgggacacaaaaggttgatatttaatatatctaaaaaaacggaataaagtatttattatttttcatttcacagcagcatcccaatgcacctaaggacaggtgccttttcaaaaccagtcgtcattcgtcctcccaataaatgtgcttaaagtgaagagcgtgagccgcatgactctgccaaacaaacgttatacctcgatgagtcctcaaaaaatgtctccaagagtgaccattacagaatgcatcccttcagtctcatgatggccaatccgtgagttaaagatgtgaaacgaacctccgggggaaggttgcaagctctcagtacttccaaatcttgagagcttgagggtaaatgttattcctgttcctagataggttctacacggaagtagaagagggtgccacgtcagatcctatgggaacatcccagattcccttttcttctgagataggatcagggaaggtatcaaagtattcagaaagttgcatccattgtgaaggagatatcaatcctcaaagttgtaacctaacactttcggtattcggaggcgtacgtgaagcttaggtcttcagggagcttttaggagttggttgttccaggatgtctcgagttatgcttccaggaagccccctacaacctaactcagagacacactcgatggttatgcatcgtttgacaccgagtcagatcttgtcccctgcatcaggccatagttgtgtgcgtacatgcctctgtagtgcttattgtccaacggcttatctgggatattgcttttaaaggagaaatgtttggaagacacatg

SEQ ID NO: 316169 - DNA, 704 bp, Cannabis indica
ttgaataaaatagattacattgaaatgaagttttatttagggcatgaaacctaacaataataacttataaattcccatccactggtggaggcatcaatatattctaattattgtatgttggggcggctgtttgattctgatcggccttgaaatatttttgcaaaatccagcttattctttcgaataaagaatttgatttcccacttcaagttattgtactcgtttatgtcgtggtcgtaatttgcgtgaaaacgacagtacttggacatatcgctcttacttacgtccttcttcatgggagaggctttcttatatgctaccatagattaggttgttgcatatattgtctgtaggtcgtctgttataatagaaaatgtggtaaactttgaggtatttttcctagggttgtgcccgaaattgctagtgaacttacccttctttctatttgatatacccgaaattcagctaccctcccagtgggggacacgtgtcaggatagaaggaatatggatcgatgcaatcactttttatggaataactcattaattacgtaagtgtaagagtatatttgtaacctgctgactgtaaggtcttatgtaaggaatcaatatacaaactgttgcttagtatattagcgagaaaccatatgtcgctgaatgtgaatagcgaggcatcaagtacattacatctaggaagacgaaagc

SEQ ID NO: 316170 - DNA, 1093 bp, Cannabis indica
cctaatctaccttctcactccatcactataagggtaaagaacctatcccattcaggtttgtaatatgcacatcgtacaatctacgctctcaagattatttcttttatgtaaaaatttctgcaatacctcctcaaagttctcataagtaagcaaacttttagtatgtttgccaacatacaagaacgtgtaaggagacgacgtactaaaatatcgactaataaaacaattatataagcggtgggggtgcgatggtgccggtggaagagtgtatttttgaggctgaattggcatatgatgttcttgataacaaagtcgaggaccttcttagaggtgattgttgccaggggttcaacttctgtccatttggtgaagtagtctactgcaaagacactaatttgtacccctccttttccctttgggagagaaccaattaggtctatcctccatactgcaaagggccaaggagactccatcatcataagctcgttgggtggagttctggatatttttgaaaatcttttccacttgtcacattttctgacatagatcatcgagtcttcgatcatcgttgcccaaaagtacccctgttggagtatcttcttggacaagctttatccctagcatgattatcgcagaagccttcatgcacttctatcataaattgttcaacttcgaatttgttgatgcacctgatgagaggcatagagaatttcaatctgtacattatgttgtataggatcaggtacctagcaacttttcttcttagttttctagcatcatttttgtctttttgcaaggctctggtttagaggtaacctgcgataggtgttatccatgttggcatgtcattcaacatgtcgacctcttctgggactacaatgttgggttcttctaggaactggatgggcaccatgtttgctttgtcaactatggtactgcttgctaggcgggcaagtgcatctgttgtggcattctgctctttggggatctgcttgatcatgtagcctttgaggtgacttaacaagtctttgatttttctcaaataggccaccattctatatcctcgagttgtgtattcacccaggacttgatt

SEQ ID NO: 316171 - DNA, 579 bp, Cannabis indica
acttttataaatatacttaaaagaaaaaaaaagtattgttaaatggataggaatttttttctcttatataaatatatctcacaatttaaaccttaatagttattatttttgcttttatttattttttattttttttaatgtactctttttaaattatataaatattaattaatttaaaaataataaaaaatatttataattataaatataatacaatttattgctcaatgataaataatagaaatataattatttataatatatatttaacattattataaatagtcgctcgtgaaacacaatttatttttataattttcattacattatgttgcaacgtatagaactttacttctctattttttatattttagtttaattaaaatcatgatgagtaatattttttatatttattattataagtactgttgttattattattaattatcataataagtagtgactattctaattcactctattatttataaaactgtatcttttcagatttttaaagctttcacccttttcaagtttttttttttcacattacttctctattttttttttttttatttt

SEQ ID NO: 316172 - DNA, 737 bp, Cannabis indica
gagtcagggtcacgggcccttttgaattttcgaatgtcctttttacaatcagcaaggcgttgtttaaagtttcccgtgaactctttaccccatgctaatagattcatcccacaaagcttgattttatttaccaccgatcctgagtccaacgagccccagctgtctttaacgatttggccacacataggctctcgcagccatgcattttcaaagcgaaagtggtgaaccggctgggcgacattgtgaattattgtttctaaaaacagtgggcaatgatctgacatggtaacttcaagattaaataattgagctgaattgaaaagttgtgtccaagagagactaaccaaagcacggtcaagtttgacttcaacccagttgttgcttccacggcctctttcccatgtgtacgggtaaccttttagttccatatcatgaaggtgagagtcatcaagagcaagctgaaaaccatccagtagccattgaggataaggagagcctccatttttatctgagtgtgaaagtgtgttgttaagatcgccaataacacaccaaggataagaatactcagtcgaaagtgtgcgtaaaaggttccacgttttgaatcgaagcgatcgattgggttcaccataaatcccagtaagccgccactcattgtccccattcaagccaatttttatgtcaacatgacacacagagtaacccaaaacaagaacatcttctttatgtctccaaagcat

SEQ ID NO: 316173 - DNA, 752 bp, Cannabis indica
tttaacaaaacacagggtccaatctgcaacttttgcaaaacacagggtccaaaatggtatttacccttatttttataagacaatgcacactttagctatttatcttctatatattttaattctaaataaatttagcgctaaagatatgatatgttacagttgtatttgctgtttttaatactcctgtaaaacatgttatttaaatcttatttttaaaaatataaattacacaatttttttttttaaaaaataattgcataatattttaaatgagtatacaatatagatcaccatttataaaaataaaattatacctacatacaatataataaagatacgagtacactcatttttggatcctatatatatcaccatgtatatatctacataaaatctaattatatatattgaaaaattatgtggtgtatctaaaccctaattgtatatataggaaaatttcgtggtgcgcctaaaaataaaaaattacactaatattttaattcgagatagtttttttctttaatagtataaatatataaagataaattatatttttagtattagaaattattcaaaatttatcaaaagattgtataacatttttttttgttgattgtattgctcattaacctgttttgtacaatcaaatagcatccacataagagaggacctataaaaatttgtgaagtaatatgcatacaattatatacatctaccaacccttgtatatcttataacttttgagaaccaat

SEQ ID NO: 316174 - DNA, 1230 bp, Cannabis indica
ggtatctaaatatcattgcctaataagaaaagctttttatcattgtgtaatcagacaatgtttacatcgttgcctaataacataatctttttcatcattgtctaatcagataatctttacatcgttgcctaataagataatctttttatcattgtctaatcagacaatctttacatcgttgcctaataagacaacattttcattacataacggtaataaccgtgttttaatctcaatatccatcaatcctcaacaataataattacattataacataacatgttatgtagtacaatatacttttttttttttatatttactctgaattcatgcatgtcggccaactcaagtagagaaatattcttgatgatctcggcctatgtcgcaataatggtaaactcataagtgtctatctcaaaacattgcttaatgttcgcattagataacccatttctaccaaactccgtggcataaacaccctaaaataaaatttatattttgtctctaaaacatataccatattgtaaagctcatcaatagcttcgaaacggtatatagaacgtctaaaatagacactcgagttatggccaaattataaattttgatcatcctgaaaaaactaaaaacaacagacggttttagtctgctccaaaaacggtttaccatttttcccaagaataaataactcaattttaaacttttcaaaaccccaccaagacctaatcaattgattcctaacttcacagaatacatatatattatccatacaacaattttaacatagtaaaaataaaaaacgagtccttaaacgaaaaacactaataaagctcgagctttgagctttaaagctcaaactcgatttctacttcaaaactacctcaaattcagcaagtaaatactgaaatcaatcctatattattgtagaaataaaaccccgagatcacagattccacaaccattctaaaacacaaagtcaacatatagaacttaacttttcaacttaaaaagagaatcgattcttaccttaagaatttccctcttcattgattcactacccacctactaacatggctaaaaacactatgtttttggctgaaaaattgaaaaaatatggatggtggaggtgcacgttcttgtcgcacaaataggtttcatttttagttttacatctttaaaccttaacttatatatatagggatatgattttgtcccgttattgtactttcacgg

SEQ ID NO: 316175 - DNA, 1211 bp, Cannabis indica
agggaattaattaaccacaccaataaaatcagtaccagtatcatacagacaaacaaaaacataagctggtgattggagaagcgtgtaaacttaatagcaattttgtagtacaaacttagtaccaatcacttcaggattacgtttttattatagctcataatagaatgtttcattttcatcttattataattactatatatatatagtgagacattatcttggatttagataatgacgtgtcatgcaattgaatcattacatttaaccttgcaaaagtgaataagatcaaaacaaacttattgctaaattaatttgtacgatatattccttatttttagaaacgaaataaagttaataccgcacagttgttgccatgtaattggagctagctccactttaatacaaaaccaaatcaaatcctatctaaaaacttctatcacttaacacattatttattttaaatatatattttttttaatatggaactttaaactaattataatttaaaaattatttttatttataattaacttaaattgagacataatattattataacaatttatttattggaggtattcttgaatatacactgaagaaggcagttgtgttgagtgtgagtggatcgagtataaatttgagtgagatagagtgaataaaatgatgagataattaatatatatggtccccatgagatgatatattattgttcactgcattattgcacttgttatgtccacaatattggcctgcaagaatattgagttgactagaattcttgtctttagaattccaatatatccctctaaaagggcaaacaatctaggccttcttttttttttttgattactaatccttaatacagtttacttatgttaaattcttaaatacagtcactacaacatttttactaccggcggaagtaataccggcggagccaaaccgccggtattaatggggttattaccggcagaaaaggcattccgccggtattacttttgaataattaaaaattaattaaatatttatttaaatttagtattcccggcggaactttagtattaccggcggaaaaagactaataccggtggattattgccggcgggttccgccgatattagtcaggggattctgaccgttttattaataccgacggaacccctattaatactggcgggtcctgccggtaataaatgtctatataatccccc

SEQ ID NO: 316176 - DNA, 1907 bp, Cannabis indica
gtacgcttccgctaatctatattctattgtttgattctcataaattaattagggctatatacagatttacagtattcctaacattgttatcaaatggaaaagtctatttccaccaaatcccaatgaattattgttattaagggttggccaattttgcttgtctcaccctattactgactcaaagtgacattaaaaaaagacttatccagacctttttaacctgtcgtgtaaacttttatcttctgttcctataatcgacgcctatgacaccaacacaaaacttaatgaagtaggcactcgcaaatcctttttcaagtctcccctctgcatgcccctgccaccattgttatccgtcgtagaaggagcaacaaaagtagccacgttaactttcacttccccattcctgagtggaggcgttgatgtcattcgagcaatcttagtttcattcgctattgtttctattttcttattaatatccttcaaattttggttaattttttgctttaggaaaacttcttggttcatcatcttcttgctctgatcgatctcgtgcatcttcttaaactttttactatacgttgtactcctgctaaagaaggctacacctcgggctgagtgtcatacgagttatagatgattgcacatgcatacattgcacaatgtgctcaactcgctcacttttttttatcaaacttttctttctcttcttttaagtggcttttcgagaggtgtcttagataatgtaagccaatttcaccttgtttttttgtcatggttatggctttctgagtcgaaaaagaaaaaaaataagacttaagttgagaaactagctagtgtgccaaaatgctcttccttaatttactttgtggtactatttattcacaaatttcatagaaaagatggtattagggtttcaatggcggaataaatattaacaatgaaatatggtaactaattcaattttttttgttatttgtgggtttcaaaattggactttttttattaatacggttgtactgaattctacatgcacaaatacgatgtctaattagctaaattaattatatggtatataatattttttttacaaaattacagtgatcaatcaaagaggaattagaggaagaagaataaatattatgatttggattgcagctcgagtatagtttagattgcaatatggtttgatggtaatttagagttgcaatttagattgcgactgacaatagctcagagattgtaatatagtttgatggtgatttagattgctatttgggttgcgatatcggttgcgactttagttttgttatggagatcaattgatgcttcacgtggtggtatcaccatttaggttgcgactggggcatgactaagattgctatatggtttgatggtgatttaggattgtgatatcgattgcgacttcaatttgttttggaaatcaatagatgcttcatgtggtggtcggtctcgaacaatcacaaagggaggatgaataattaagaggaggaagaagaaggggattgagactgcgatatggtttgatcgtggtttagagttgtgatatgtgttgcaagttcaattttaattttggaaaaaaaccaagcttcaatttccttggtggagaataacagggaggaagaagaagaaagaatgacaaaaactgtaaaaaaatatatattatcgcaaaaatgaattagggtgtgtttggaagtagctgtgtaattactaggcatggtaattattagggtagtaatcacgacaaatttagtaattacactatatatttaaaatgcaatgtgtgtttgaatatgaggtagtaattacatatgaattcctaatatgttgtttggcaaaatagttagtaattacatgagaaaataatatttttttagtagctaatgttt

SEQ ID NO: 316177 - DNA, 1330 bp, Cannabis indica
ctaaattaatttttttttgacttttcttacacattcttatttttatctttccatttcattcaaactccaatcaaacttaccttaaacttatttttaaaatttgtatgtgtagagtgataattttaaattcgtgacactatttatcttaggcacaaatttaatgtaacatcagtttgccaaccatatctactaaatgcattaataatataattaattattgtgtctcacatagtttaatctaataataaatctaaaataattattaattattcgtaaaacgtcacccgaccaccaccttcgctaaatgtttttttaatcttttatattatattttgtaatttttttaaaaaatttattaaatagcccccattaattacttttttacactttaacccctttgattttgtccctaacacgcactcctatttaattttagagaaatgctaaagagtactagtgatgcttagaactttcctaagtgtcaatatcgttattggtcgaactaagtatcaagtcccttataatttaatataataacttttagagaatatcgccagccaatcgtaatgcgacatgtcgagaaggtgctagacaccactgtgctcaatagcaatgctcttagttttaaataagagtaaacattccatcattagataactacgtggcatcagctgattggacatacagttagaacataacttttcgtttttccttttagttacaaaacagttagaacataacctttttaatttatattatataaccgaaaaaaatagagttaaatggtcgatttcatttctcacgtggcaaccacgtgatgccacgtcatcaacaatgaaaacaaaagttaaaaaagagaaagcgcacctctcttgttgacacgtggcagaactgattacgtggccaaatttctaaaccaagaaacagggggcattttcgtcttttacaaaaaggaaagatttcatgttaaaaacccaacattctctttctctctctaacaacacaaacaaacactcctttctctctcttgaaactctgagaattcatttcattccgtacatttgatcggagaaaagggctcggaaactcttccgagtacgaaaccctacctgaacaacctctgtaagaatgcttatctttcttctctctcattcgtttttctttttctttttttttttttgcaatttaaatctctaattcttttgtttggaattctttccatttctgatttcagttgattcttttattatcatcatttgttatattaatgtaatgttgtaatttgtaatgcttaattattatttttgttttgaatctttagtctcagctt

SEQ ID NO: 316178 - DNA, 1499 bp, Cannabis indica
taattacaatatatattattatataatacattattatattaagagatgaattacatacatatttttaaagcattgaaagattattttgtaaattatatttcaactgtaaatttttgtatacaatcaatgtaatagtagggggaattattctttttaccaccagtacactatctcggcgggctctttagaccgccgagattgaccaatatcggggtcagacctgtcaagataggtgtcaaaaatattaaattaggacaaaaatatacctatctcggcgggtatagactgtcgagattgaattataattaacggtgggctttgcccgccaagagtgcctctaataatgaaaggctgggaccgccgagatagattcaccaccaatctcggcattaaaatttacggcgggtctagatagctcaataacggggtgccaggcccgccaagatagacttattttttttatggtgagagcaatctgatttagaaaaaaagtattttcacaccaaaacaagaaacaataattttgaaaataccacacaataaatttaaaaatactcccatttttaattttgtcaattttaacaaatatgtcaataatgtattttagagaaattgaatatttatagattacttttggtgtcccaaagattctaaacggggctcacttagaccaagtgaaaagaaagtggaaatagaatgtaccctattgacatctctcacataccaaaaagagaagaagaagaagaagattaaggagagtgtggtattattcctttaacccccaacaaccaagattcggttagttagttagtctttaactaacttaactatcaaaaaagacaacttacatattgggtcccttggctatataaagagaactactcctctcatttcataataaggaaaaagagaataagtcaaacacaagagagagacacaataccacagagagagaagttagagtgagaaatagagagagatatctaagagagagagagggctgggattgggaaattatattgagcaacattgttgattatgttggctcgggttagtgagttaatgtgtattgaaggattacaccatggatgacttgctgtgattatttcattgtagctcctgagattgatatctcttattctattctcattatcaataaagattggtggcattgctttcaaactagagtatgaccaagttcacatagaacttaggatcggaaccagtataaatctctgtgttattgtgtttgacaaccatttagattcatctgtgttatatttttctaatttatgtgtttgctggtttttgctcttgatttgtttgttttgatttaacttttgtgtctttaagtgtgatcttgactctggaattacagagtttaattcctatgtatcaaagctaaatttcctacaaatcagagcttggttcatcgattaataagggagattcaaagatcacttgctttcgcaccaagaactcatcaagaattcatcaag

SEQ ID NO: 316179 - DNA, 1949 bp, Cannabis indica
tgaaatctgcatcagcatgatatttacttgtgttcgattcttcttcattggccaatatatcattaaaatcacccatcaataaccagctatcctttgttgcaatctcacataagtctttccataattccactcttccaattcaatcattatatgcataaaccactatgagatagctactataatgagaatcattacttttaaatgcataaattgacttgtgcatttaataatgtcaacgttataacttagagggttccaagctattactattcttctacctttatgccaagcaatgttagatgaaaacaccacccatcaaaaacatttaggtacaaggctccatgcttatgagccttgacccttgtctcaaggagaccaacaaatccaaccccttgtgacctaataaattgctttattagtctttgtttctattggttgttggctccttgaatgttccaacaaagaaacttatccattggcaagagagggaactccccctctcttgttttggacccgttactgctaaaaggatcttcctgttccttagcatgttcactagttgtaccagtataagaagtactaacatctgcaagcatactgaatgcattctctatttttgtttcagcaggtttctcctattccattactttctttccttttgtgaccttctggaaaccctcatcattaattagtaccacatcagtagtcttccttttatcttctttagtaacccattcttgcttgggttttgaattcttcttataatcagcaaccaaatgtcccataccagaacaattagagcatgttgttggcttccattcatacttaactcccacatgagtgtttgatccgaattcatcttcgaattccaacatacttggaaactcttgattcatctgaacttcaacaaggaattgagggtagttaagtctatctctttctttggtgacatcatcaaccatgatgggattgcccaattaacctactatcttgaatagggatttctatcgccagtatttgagatcaagatcttcaagttttatccatattggaatgaccttgacgtcctccttaaaattcgttttagggtcccatgacgtcataataacaggccgcctgttgaagaagatgtaacctccattcaagacagagtctctatcatcaatagagttaaacatgataatgaaaatactataggcaagcattcgaaccttatccactttatctttccagattctctttgtaaaacccttttaagatatgcaatggtgggttcgatcccagaacataacatacaatagaaggcttccaaaagttcacttcctcctatatgtcttccagctcaattttaactttgctacccttactagaaaatttaaaagagttctctaggttacgatcttttgaagtagaatgaagaattggtggagtcgagttcataacttgagcaagtgcactgttacatagctcattagctcagatgaacatcttgaagtcttttcgtgcatcctttttagaaacaagtaaaatactcaaagaaataaattccacagtattaactatagtgcctgttatcccaagttttacactctgacgtggcatcacacgatggtgacacgtggaattaaccccatgcatgtgctcacctgaaatatgctgaacaaggcaccaaatacattcgctcggatgaagtcctcttagccgggaaatgagcaatccgcgcagcacgccaacacttagcgaattcagctttcgcatcgtgagtcaccgaagaaattcctataactttgggattagatcacagagatatggcaagctgtccgaatcccttgattagtgtattctggatttactatgcaatctttccacttatatcaattgtaatcagaagggaaatacttcccttccaagcttaaagccctatacatagtgattcatactcactgggc

SEQ ID NO: 316180 - DNA, 1017 bp, Cannabis indica
aattcatgtttttgtctgttttacttttctaagtgatcaaagcaaggtagaattgttagttgtgccttaaccacttaaaagtacatctcaaaattagctttctaaaaaaaaaaaaaaaaaaaaaaaaagaaaaaaagtcatctcaaaattgtaatgacagttagtgactaactctttctcagttggtatatataaagagttattcattttttgttttgggattaaatattccgccttgggagataatcaaataaaatagaatagaaattaaataatttttattttattctttttttgttgtattctaaagtattgtaatattatttaaatagaatattttttttctatcattttgatgacataattattctattttgaaatggaaagaaaaatctatttcaatacaagaggagaaaaaaaattaataattattttattaattttttaatgtattttaaattcgattatattccattcaaattcttattcttattcttatgttttcatttgtcacaatcaaatgctacataagagattacttggagttgtaggacttagagagagctaagcttagatcttgagagactgagcaagtttagattttaacttcaaacagtttttaaaaacaaaaaataatttttaaaaactaatatgggatggttggctaaatttttttaaaatattgttctgaaaactgagttaagaaataattaaaaattagagaacatcaaaatattttttttattttcaaaaatatttttttttacatactcgggtctgagtgtcgggctaaggtccgggtttgggtttgggacttgataaacaagatttatactcgtttattagggtagtttagaacatattttagagtcttttatgtcaattttgtttgattttacccttgttttcttttgttttaggaaaatatgataaaaatataaaaaataaagaaacaagctaaatttgcaaaaaagcgggcttaaatgaaattattttttttatcttggtgagtttggc

SEQ ID NO: 316181 - DNA, 1559 bp, Cannabis indica
attgataagtgtttaccctagaacacttctctaatgcccgaaaagaacctagggtttttttctactaaactttgtggtgaagaaaccctaaaataaaatacataatttgactctagtttatataccatattatagagctcttcataagctttaaaacggtatatagaacgtctaaaacggacacccgagtgaaaagttatggccaaaatacgaaaatcgaccttccccgatacactccaaccggaattccggttggaacagccctgaaccaaccggaattccggttgtctgggcagattcaacacgaaaattctccaactttaagcctccaaaacctactcaaatcttccccaatcaccaccaaactttccagagcattaacatataacatattaaacatattccacagctcaaacataacaattacacctagaattaaaaagtgtcattgttgagcaagctttgagttcttgaactcaaacttgctcaacccaagaattaagcactaacaacaactcaaataggtctaagtcatcaatctaaatcttcaaaaactgaccctattcgaaactgaaccaaacagaaacataatcccccaatttcaatcctaagctatcaaaacttagcaataacataaataggattactagggttttaccttcactcaactaacttcaaaacttggctgaatcctcaaagaaattattgaaattagctgctccactgatttcccttggagccgaagtagggagaagagacaggaaagtttatctagtttcttcaattttcattttggagaaaggaatctatacattaatattataattatcatttcatgctttgtctagctcactaaatggcttaggggtaaaatagtccaagaccataaccccgcctaaactcgatagttcaaatatcacctatgaatactctcctaaataaaaaggttccaactaacccatgtgactaatttcgccacacgtctcattttccatcgtcgtcgggacaaaaagaataaaaactgtaaattttgcatataacataaatattacatttaaaatttaataaaatctccagaattgagaaatgataactctaatgcccatttctaataatgggacccacaacataataaactcatgcataattataaaaaatatcaataattaacgctaattgcctttactaatccatattctagtatgcggtcattacaaataatagttaatattattatgaaataacactttacgaatggtcataaatattctataattattattaaatgaaaatatataacactcaatatttaattgcaccaatctatctatccatctatctatatattatatattatttattctctctttaattttctcacatttttaattttttatttctactttaaattctcttcttattttctatcttttatttctactttatttaatttaaagatcattattaattaattaatttattctactatgttcgcttataatttacacagataatacacgtatgtataaagtaagtacttaccgatcattgtttgattt

SEQ ID NO: 316182 - DNA, 1681 bp, Cannabis indica
aaaaaaaaaaaagtaaaaattctaaatgtggacaaaattaagagcatgacacatacacaaaaatgggaagctaagctttaataatatatatatctacaaaatgaataatagaaaatattatttagaggtaaatcttcatattcggaagatatgaacataagaacgcaaatagctatacattatgaagtaatgtaatacattaatccaacttaaacccaattttagaaacattgacccaataataatggctaataaaaatagctaattaatcaagtttatataatggagtcaaaatacaatagcaaaataagtgaaaaaaagtagacccaaaaaaaaaaacaaaaaaaaaaacaaattatgtctccaattttaagcttatgtggaatagttaatctattcataattttggcatctcatggcaaggcccaagtttttgatatcacaaaaaaaggtgcaacaactagtagttcagatatttccaaggtaagaaattagtgtgtaattaatttgaattttatttttaagaaatgtttctttattttctttgaatcgagttgcgcactttgttgccagaaactctcgattgttagttgatcgtattattatagagattttggctctttatgagttgttatctattttgctgaacgattgctctatttaaataaaactctaaaagtgtattctatattgtttgtatttatgcatgtagagtttgttagaggcttggaatggagcttgtgcatcatcaacaccgagtaaagtgttggtgccgaaagggacattccaattaagcacagcgatgctacaaggaccctgcaaggctcctattaatttcgatttggaaggcacattgcaggcacctggattgggctctagttacagttctggcaacaattggatcgtttttgcttatgtcgaccaactcactatctctggtactggcactttcgacggtcgaggccccaccgcttggggtaaaaaatgtgattggaatgagttctgcggtagccttcccattgtaagaatattattctctataatgagttttatgatgaattggataattttatctaatggtttaaaattatttatatatcatccgattatatatattttttttaatatttacatataaaataaataatttgataaatataatgtatatcataaatttaatttttttttttaaaaaaaaagctttttttacttttaaattataagtgatatgtatcatatatatatatatatatatatattaatattatttaattttcataattattatttactgaaaaataatgtatttttcgttaaaaatcttatatctaaaattatttaacattacttttattaaaaggataattatagaattatatttttaatagaaaaaatatttatactttatttagtgtgtactaccccaaacatggaacatgactaacataatcttaatcaaatctaatcaaatactaaaaggaaaatttacatagtatattaacttttataaaaaatataatcaggcggtattttttactttttattgcgtttttttataagtttcatacttaaatttttattggtgttttttagttgttctactggtattttgagttgttctgttttatgttctactagtgttttataaaaacacagtgttttccttgtgacagtatttttg

SEQ ID NO: 316183 - DNA, 1238 bp, Cannabis indica
ctaattccttcctttaaatgccatgcgtcacatgatcagaatatggataacatttaccccaagcttttaggactctctgagatccgggagcttgcatttctcttctattttttagagataatttcctaacccgtggtaaatattggagtcgcagatgcctccaaccagctgtcattaagtaaaaggccataaattgaaggcaccacgaccgtggcacgcatgcaacgcctttaatacaattgttggcaactcgtgcatgctggggacgcatttcttgagaggagttacaatgatgaataataaatgcttggggcattttgccatcttttcaacttcccaatgattagatcaaagtgtgctttttggaagaagatatctgagccgtctatttcaaattgcaaggatcctgaccaatgtatcaaaggattcacccaactcctttcttctttttcctcgcctcaaactcccataattcccattttttaatttcaaaccagaacaccccattttccagaaaacttccctttcaccgtcatcttcatcagtgaatgcaagaggccttcgattacttaatccaatataatctaaacctttcttcagcctattttccagacgcagagccattaaaccccaaactactccacccttagatcaacaaaagtttcaacgttcaggcgggctacgatcatgtaatcgtctggatccaggattcttgggtaggtttctacgacaaactttcttttccgacccacacaacaagtaattatcctgacgctctactgactactttctatttcgtatctaagataaaaatgctaagttcaagctaggtcttggatgtcttgaatgtttgagcggtaaagtgttgcctatagagtttcattttttggacagggtaatgtggaaattttttgtgccctggaagtgctgagtttgtatgaatagtttgggtatggttatttgcgctccgtagaaatttgcatgcttataggattctaaaattaggacagaactaggcaagatgaatttttgaacgaatattaggccaatattttctcttcacacccatttagagttgttaggacttcgaggggctttaatttttggatttttctttagactttattctggtaattttcattaggttctcgatctatcgctttgagttgtctaggtaaaatagatttttgggagtgataggtctggtggggacctctccaagaaattttagaggaggc

SEQ ID NO: 316184 - DNA, 1224 bp, Cannabis indica
atttttgaatatatgtaatgattcaaatttaaatatgtgattaatgtacgattatttgattctgatgatgtgagtttacttattgatattgtatggtgaattatatgattgttgttaacttgttattacttttcttggtgagtccttgtgactcacgggtgctatgtggtgcaggtaatagacagagatatttggacaaccatgagtcagaaatcttctctagttaaatgtacagatcaacttatttggcaggtggtgttgagttgtcaagagttgtatttcaaatgttctaaacttttaaatttattttatgataacactgtaatgacatatattgtaatatttcaaatagggggatccccaattttaaaaattgactgccatgattttataatttagaatagttagtaaaattttattaaatcatatgttatctaaactgcaagtttattattataaactagtttttaaacgcacacacgtggcatccctaagtgttagggcattacagcaagtaaccaatgaaggcactttctcgatcactcaaaaggtatatacaccctagtatgttaaatgagcattcaaatcttttttcacaagagattgagtatttctatggtttaataaaatatttacgttttccctcatgactaagtttcttaattctataatgctagtgctagtactgccaaggtcattaagttgatcaaccgcacatacagactatttgcacaatagagttaagcactattatgatttaatatataaaattcttgaggtcacacacaaatataatgaccgagtttataaatctaaagtactagtgcaagtactcctccacagatcacaaaaatcaaaaataaaagaaatacgtcatcaattatagaaaattctttggaagtaggacaatgcatccaacaaaaattttttaattgattagaagaaaccctctgggagtgaaacactaccttatatgtggtattctttctgttactaaactcctctaagtatgagagattatacttaccacgagttttgtacattctttctttcttttcctcatttggagttttttcatttaaacctttaacaaggttctatgagtttaaatcatcgagcaaggttcttcaacatccataaattttatccttattaaagatttgatgggtttttctgaactactctacaatagtgattcatctcgcttatgatgataaaataaat

SEQ ID NO: 316185 - DNA, 1458 bp, Cannabis indica
caagcgtaaaactgctccaaaagacatcaatagacgagataatgctaactttaaggacccgaaacataggctaattataacctaacaaagtccagcgtccacaaatagatttaactcgcccaaagtcagatccagtttggaatcggtcacaacattcgacccgaaactaaagggggactaaccattgagcaaagacccacatacattaccatcttgacaccagcaaagataattaaaatgaactaactatattatttgatagaagcttgtgatcgtgaacaaaaggtgtaacgtctaagccaaatgcgccagcaaagaacaatgaactcctctaatttctgtttactcaaaatatacaagcaacccaacaacaacacataaaaacaagaggcatcctttagagtatcaagccctttcaaaatccattgagaccgagtagacttaaaatgaagggcaaagccaaaatgcatatatagtatttcattattttggaaacaaataggataaaccttaggtgctttcataccttggcgagtcaggttagcattagacaacaagaaattcaagcttaccttccaaacaaagtctttaatctttagcgaaaggttaagactctaaagaagccttcaccaacgagaattccttgaggagctcgaaactttttcccaacccatgctcaagacagtgctccaataaccactcttcatcgaataaatactgttatccaaaaaatttcatgtaagcctatcttgtctatcaaacaagaaacaagaaatagacatgataactctagcttccacatttttaaacaaatcttgatccatagaggatttccaacaaccagaatcaagcttaagatcaccctcgtagcacctatttctttgaacactctagccggaacccaaccatgaacaatagatgaccaagcatgatcaaccatcaacttgcttcgctcatccctagtccaccaagcttcaaatttaaattgatttttgaactcagttcctaggccttgagtataaacgcacaaaggtctatgataagagttcactgtgtgaagggattcgataactgccttggggaacaagccgatcaaaccatcattggccatccccttatccaaagcagatttaatgttggttgtgtcgtcacggtgattatctcacgtgagattgtcacctttgatgggcaaattaatgagtccattggagttgatcaggtcggatatgaatggaataaattggtcatttttttttgaaaccaactgcttcagactgacagagaacaaaatttacatctcatgattaaccacgaacctccaaagcttttatcaacaatcatcaaattctcccaaaacctttttttctcataaaaataaggcaggccataaacacacaagagaagccaaggataatgagccagatttgagtaaacaatacatgtgattttttttttttt

SEQ ID NO: 316186 - DNA, 1364 bp, Cannabis indica
tcagtcatcattacgatcgaacggtttctattgtttaggtataaagtctgaacctttcccttatttttccattaccgtttatagagcctcaattttaaatttcaaccattttttctctctaaaattggatgccctcactatccctcacatacttcctttgagtttctgtcgatctttttcctcaatcccaaaattgccacggttcaaaccttcatcttcaggagtgttcaacaaggaattcttcaaaaccatatttctttcaacgaaccagtaagtgaattttcactatatctctttttattgcttttcatatattttttggcatcatttatcactctcatgtgggatttatatgatttttagtaacttagggctagaattaaggttacacaattcgcatgtcctgagttttcttgctctttcaaaaaaaaaaaaaaatggggcattttctattttgtgaccaagataatgtcccaatctgatcaataatatgcacacccagacctggtagaatctgattatccccaatttcaagccatagtttttaaacctcaacatcgtgaaccccaatccatacttgagataaatgatgaaaaaattagcaagcacaccattataggattaatcaagaagagacatccactcgttataggcgacttttagataaagttattgagggtaaaagttgttatctacgagaagaaacttggcctaagttttccaatttagtaaaaatctccttagcaagatcattattttcacccaaagtcattgttgcttttccaccaaatgatcttgaaaacgagattatggcttctaaagcttgaaagtataagatgcctcaaaatccaagagttaccttcgaggcagagctgatcaagtctaaggtcagattgattgccccttcataggttaacttttaaggttttccccgtaactcatcttttgaatgacgaaggctacagtatcagcgactcttcaaggataggagattggactgtcgagcatattaggcaggagttgtccttcctctattaggtaattttaaggatttttgtagctacctcgagattgcgccctttcaactcgtacccaactcttacttaatccttgcatgcctgaagtcactctacccagtggcggacccagaatttaaagtgagagggtaattttttttttttttgtaaagcaggagacaaaaataaaaatcaaaataaacaataaagtgttgttagtgggttttgaacatttgacctctaaaatatatgtaatctactgtaactattacaccaagcttactattatcatctactttaaccattataccaagtttatgttggaaaaacttttaccaggatcttaga

SEQ ID NO: 316187 - DNA, 1728 bp, Cannabis indica
acaatttatacatttagtgacacaattttagcgacacgcaacaaaaattatgggtacactaaatatcttaaccgatatttagtgacgcgcattgcgtgtcagtaaaaaatttacattgtgtttcataatgtgggtcactaaaactttggaaatgtcacaaaaagcttatttatttatctaacaaaacatgttttaacccacaaatccattttcaagtgcttaaaagtctggatcctcctcatcaacattttctggatgcttatccatgatctgcatatgaaatgaaaaaggcattgttcaatatcataatgagaattttctaagactaatcatcaatattaagggatgaaaatgatgtacctacctctgttcgaaaatacttttgactgtttgttgggagcttggctttctagcaacctcagtcgattcaacttctacattctttcgatctgagttcaagtgtctagttgcaccctaaaaatttgaggaccaaatcaaacgaagataaaaagaaacaaaataaaattgaagaaaatgttattgtttttaacatgaaatagttactacttacagctacagagcatcgcaactcaactaagctatttgcataccaggggtttgttgattagccataaaatggctagtaaaagggtgtttgatgcctgagataacttgccaacataaagaggactttcacagactttgcctttttagtttaaaaccccgttgaaggcacaattgataagttatgtatatatggatagaaaacaagggatgtttatttttactgaatagatcagattaagtttcttatgaatgacaatgggatattctgctctgaattcagcctagtatcgtataaatgtaagaaccatattgtttagtatggcaatttatgtgtttgtaccttctgatcacctagtagttccatctaagtatgtattttttgggtttacattttaagctttgacaggtcagctattaagtgataaatatcttggctagctgtcacgagctgacatgtgagctgtcaaagttggtttggtgagagttgaggttatagatacttggttcttaaagtacctaaccaactctcactcatttgattcttttataaagatttttctctctagggtaaaaatatttttattcttcttctttgtttcttgcaggttcatatattgttgaagagcttaagcttttgtgatgaaatgataatggaggtatttcatctgaaaagagttcagattcataactgaagggatttcaactcaatcaaagtaaggggagcttgtctttgaatctaaggagacttagatttgaatctcggttggttaatcaagatcttagggtaaaattttgtaagaattttcactgtattgttttacatacatttgatttactaattggagtttgtatcttgacaatgattcttattggagttatttaccctagtttagggaacctaagcactacctggtcgaaatgtgtgttcgatgcaagggaagcttgtaaatcttgatcttctctgatttacatttagctttatattgtgtgatttaatgttattatttcaattagtagcatccaattagatcaacttttcatttggtatcagagctaacttttttcgatgaatgaaatcgagatcctgtcgctactagattgattttaggttgtgtgtgttaattctggtttggagtttttaaatcttgttgtcctccatct

SEQ ID NO: 316188 - DNA, 1677 bp, Cannabis indica
atattcctgtttttttcccataaaatttttagtttaataatattttttagtttttttacgttaagtttaactgaatgttattaattttataatattatgatatatatatatatatttaaaaataaaaattaatatagatattttatatataaaaaattaatttaaatttaaaatattaaaaaattaaaaaaataaaaattatgtagacattttattatataaaaaatttaaatttaaatttaaaatacttaaaatattataaatattttatataaaaaaaattaattgtgaatattttatattagttttctggccatatttagtgtgattatgttattttttttttatcaatatatatgtagagtaaaacctaatgatttttatgattttatgaattgttgcatttcacatgattttttaaaggcatatgatcttaaaatatagtttatataaattattttttaacatcaaaatcgaaaaatattttaagtcaaacttgatatatcatgattatataaagcactaattattgataggaggaatatatacactaatattgccgcaatagttaaaaaaaattctcaaaaatcaaaatcttaaatatcatttgaattttttttagaaaaatacattatttaactagaaaaaaaattaaacatacatattacacttaacatcacctaattaaacttagttaaaaataaaaataattatatgtgcattacacgtaacatcaacatttgttaagtttgactagtatacgtgatatagctagaagtatctattatcagtttggtgaggttataatgtatttttattatttcaatataaatgacatgttacatatatttaagtgtagtccgtttaatgaaaaattaaaaaaaaagtttaacccacctaataatttcgttgatttggtcggattaacctattcaaattaatctttatttttatttttttattattattaatatttggtgttcaaataatttattttaaaaattaaataaatatatagtatatacatattttaattttacgattgaaattaaataaatgttgataaaattaattttaaaaaaaccataaattaaataaatgttgaaatattatattaaacaacattcttgaaagtaggatagaaaaataaatattttatgtgtaaattttaaattttaaattttaaattttcattttaatattcaaatacaataattatcagccataaatttcgaatttcaattaaacactacaaaatgcaaattttaaatgtaaaataatttaactatttaatttatatataatattataaataattttagtaaaatatataaatctgtttattcagtttatctagattatttcagcgagttagaataatattcagctaacccaataaatttattaggcgattttaacttttggttagattgttcaaaaatattttattattattattattttttttttttggtttattagtttactttgatttatttaagttagacggtttgtaaatttttttgagatcattagggtgtcgtttggtaacactttttttaatcagttttctgtttttaaaattaaaaagtaaaaatatttttaaaacatgttctataaactgttttcactttttaatttttaattggaaatcaaaattttcaaaacaaaaaaaaa

SEQ ID NO: 316189 - DNA, 1094 bp, Cannabis indica
aaaagtgcggattggatcggatgaacacccctacaatatatattacaatcattttatttaataataataatgacactcataattaacatacttggtaatcagcgcaaactgatcaattatgcatatgattttgtctcacaaattaaaattgtcttattttttagatgtaggaaagcaaaataattttaaaccgaaaccaaataaatcaaactaaaccattagtgcgatgatttaaatttgtattttgaaacttcgataaaatttaaatagtttgtatatatgttaaataatttgtgacttttacttttctttaaagtttttcttttttaaagaaagacataatttattaagataaatctactattacaatgtacaagcatatctatttaaacccaatctcttacactagtaacaaaggttggtcgtgtgtgggcaatactattcaccaatcacagaatggtgttgaagaactaccaccaccaacagctaataaagaataaatatctaataaaattgattgaaaaataaaatttgtgtgaaacttattaatccaaccaattgtcacagcagaatcactattagtaatggagatactaaaactaaattgatgcgcaaacatcaagcccaaacgaatggcaagcagtttagccacattagcaaaaaaatcatcgaccacacatgatgatcacgccaactaaaccacacccttttgtatctcgtatcactccccctaaaccgacaaagcccctcctcagaaccaccgaagcatcagtcgttagagcaaagaaatcaggaggaggtgacatccatcgattaggtcggcttacaactgggtttgcaagacccaataccaaatgaaggccttgccgaccatactccttaaacttcgacaaatggttaattatgggctaactctggaataacatctaatttggactgcttattgccaaataaaattgaatttcgatcataccacagccaccaaagggttgtcatcatcaattgaaaagcctcacgggatagcctgtcaaagaaaaataagagaatttcctagattcgtctatacacacatcgacggagcaccgaccacaccc

SEQ ID NO: 316190 - DNA, 2276 bp, Cannabis indica
atagggaggaggcgtatacacaccccaacggggggcatgtatctaaccattgccaaaggagaagacttgtgcgtgacgaggcaagtttttagctcaggaccttcacgatctcgagatcatagtagatctatgcgaggaggtgataggtctcaccacagtaatgatagagaaagtatgagcacaactaggagccatcaatctgagagttactcagacacaaggtcaataagaaactatgatcaatgacggcctgatcttcatgagcaattgaatcggaggaagcccaatttatgcaaacatttcaattcgaatgaaaagcaagatgatccaatccaattgcgaatcagtgagttagaaaacaaattcaagaaatatcaagatgggaaactgcctaattacaatttagatgaagagcttgaacctttccatcaaattattatgagctctgaatttccccaaggatttaaaaaccctcacgtctcgccgtacgatgggactacggatccagtcactcacctcaacaattcaaataccattatgtgagccagcagtgtcacgaataacttacgttgtattttattccccacctcgctgattggagcagcaaacagatggttcaataaattcacccatcactcaattacctcttgggaatagttgtataaatatttcaagaaacaatttcaggtagcgagagataggcaatttgaagtatcttccctcactaacgtgaagcaataaccaggcagtcactcaaggcttacttgagtcgatttagtataggttctgctagaaatagaaacttgaacgatagtatacagcttactactcttcaagaagggattacgactgacctctcgacagttggagttacatggtctcccagcaaaaaacattactgagttaaatgaaagagctcaggtgttcgtacaaaaagaggaagcaatgaaagagatgaaactgataaagattggctcgggaaataaacccagcactatctcagcaagtaccatctcgatgaaggctgacagtccaggaggctctagcactaagagaaaagatgactctaaggaatcagccaacggttaaaaaaacaaagaagaagcgcaataagtacatgccaatttacactatttatatcgagcttaatgaaactcgcgaaaatatattcctcgcacatgagcacaaggttgcatttttcaagattaagcccatgaggcatgcgaggcacaaacaggatgcaacaaaattctatagatttcacaaggacatagggcatacaactgatgaatgtcgtcagttgaaagacgagatcgagagcctcatcttgtgtggttactttcaacactatgtaaagcgacaaggtaatcgacaaaaccagccaaatccacccaataacctgggcaaccaaagattacaacctccaccagttgaaggagagcacattttggttatcttgggagggtcacttctcgctggagaaagtagtaatgcccagaagagatatgtcaaggaaatcaaaaacaagcagtcaattttcacattagaaccatcaaagaaagctaagactgaagaacctccaattgttttggaggaagacacagagcacgtgaggtatccacacgtcgacccacttaaaattataatccatcttgccaacaaaagaacaaaaagagtgtggataatggaagttcagtgaaaatcctttacaagatacactgaagaaaatgggattgcaaaataagttaaaaccttacatggtgaatttgtgcgaattcacttgggatagtgtcgtcagtcaaggaattatcgagctcccgtaaactttgggcgagccacctatatccacaacattcatgcaatattttctagttgttgacataccatcagcctacaacatattgttgggtcttcctgcactaatttgactagggaaagttagttcaattaaacacttgcctttaatcaaacaccggcaggtgtaggtgtaatgcgaggtgaccaactattggctcaggaatggtattgcatatagctacaaaataaaaaggccagccatcagttaatagcagtcataataaaggatagcgagaaacatgacgagaatctagatcctcaagttcaagatgaaaagaacttgttaaaaccaatcgaggaattggaagaagttattttagatccaaaaaatcccacaaagtgtgtattcatcgggataaatatgaagaaaaactaatatagcaactaataagttttctgaaggcaaaccaggatcagtt

SEQ ID NO: 316191 - DNA, 758 bp, Cannabis indica
attgtctaaatttccgggggcagttttgtcccatgtggctcgctctgtagatcttagcggctcatggcttggcaaagcatgctctgcggttagacgatgagctatcccggttcgaggaggttccagcgccggtggcggacgtgggcgtcgtaaattcatgagtgattctaatcactttgtcaaaaaaaaaaaaaaaaaaaaacaagtgcaatattatatacagaaattagtgacttaattaattatatagtacaacaactaattatagattatgtactacttaattaccttttatatttcttgataattgcctattaattcgtttaataaaaaaacatataaattgatgtgtatggaaattaaatgaggaaaattctcaatatatataactcactatatatatataaatatatatatatatatatatatattatatccccacctacaacatcaccacttcctcatgtctttgatttttgttatattgatttgacttaagagacatcactatatatatttatataggaattaggaaacttaattaacaatctcttgactcactaacaaagtaagttaaaggattttcattaatcaagataaatggcatagaaatgatactcaatgactagattcacactgttaaacattgaaatagtgtaaggactcactaaaaagatttattgaatgaagtccgaatagaacgaaagaacaccaaaaccactgctttaggacagagatcagtgcaatcttgacatttc

SEQ ID NO: 316192 - DNA, 895 bp, Cannabis indica
ataaataaaaaaatttaaaataaaaagttaaaaaaacccatttttccctaaaaaaacaccttcatctctttgcctccctctctttctgcctcgatgacctttgcaacctagacgtcaccaccgacggaaccccaccaaacacacctctacaacccagacattaccgccaatcagcttatttttctctccctctctctctctctgttcttttcttcttcatcttctcgcttatattgtttcaccatcttctcttattcttcttgtaggtcactgtcagatcttgaagatacatttagatttgggttaagttcgatcagatctagactgggacaagtcaaatatgggatgggttcccttgtccttcttctcggctacaatggcagacattaccccacgaaatcgagatctcagtcgtcctccgtatatttgatttctagatcacaaatccatagagatctttttctcattttcacttttccaaattcatttttgattttttgtatactttcgtgtataaatctggttatatgaatatttttgtgtttttggatttaagtatggtgttagtggtgatggttgcaccagtggggtttcagtggaatagtgtaatggtgatagtttttgtatggtgtaatggtggtggttatgggagagatgagtgttagtttttatagttcatatgagagtcgtaattgaagtgtagttagaaaactttttgatttaaaataattgttgaatctaatatgaatcataaaccctagatctcacaccagcgtcttccaagtcagcatcaacactccaagaatagagtgggctattagatttaatttgagataggaaaaacacaacacacacaacaacctatagtgataggcgtgtgagagagagagagaga

SEQ ID NO: 316193 - DNA, 731 bp, Cannabis indica
attaaaaaaaatgatacataacacaccttatatttgtatattatatgtgaatatatttacgggcatatgtactcaaacttttgagtttgtaaacagtgtagacttaataatttttttataagtacgcccaatattaagaaaactgtaatttttgtctaattttatcaatatgaactctattgatgtcttaaatttataattagacttgatttttgaatttattgaaagaagatttaaaaataattgatgttacatattttcttttagacctaatatgatttagaatttgagtcttataattatcttatttaagacactaattgactctataattacaaaaatgaacacaaattacagttttattaacaataagtactcatatttttaaaaaaaatcataaagtttgtactgatcacaaactcaaaaatttagatatttatgtataaatattcctactataaactatatagaataatgattgacaaccactaaatttgcataaaaaatactatacaataataagatatcaaattattttaaaaaattatacataaaactgtactaaatcaatcattaaaaaataaattttaagcatgtaaaaaaaggtgtattagcatcatgataaacactaccaaaaatcttactttttgtgactaattataaattattattcttatgctatgactaaaaagtccgtagctaaaagtacatagtcacaaaaattacaattt

SEQ ID NO: 316194 - DNA, 2209 bp, Cannabis indica
gcctatacgactgtcgtaaaatgtgcaaaataggcgacgtttaaaaaccgtcgctaataaggacttcctgacggtttaaaatcgtcgcctataacagggtataggggacggttttaaaccgtgccctataatataggcgacagttttaaaccgtcgagaatgtaaaaaaaaaagagaaaaaaaaaatacaaatttttctgtcattaatggcaaaaaaatctgtatttttcctatttgtttcctgcattagttttataattttacctaaattaaaataaaataactaattagttttattacaataacaactaactttaaaacacattaaatttatacaataacaaaataagtagatataataaataaaaaaatatataaataaataaatgtatttataccgagatcgaagagagagaaagaaagagagggagacggacgggaggtggtggtggtctaacgtatgagacaaagatgagagggacaccgacaggaggtggtggtgatatgacgtatgtgacggagatgagtggaaaaccgacgggaggaggggtgggtggagatcgatggacgagagagacaagatgaaagtgagatcgagagagggaggaagacggcgagagaggagggcgatggtacataggcgtggatatggttttggagagttaagattttggttttagggtgtgggaaatggagaagaaataggtgcgaatgtgggaaatagaaaagaagtagttgggcacgtgggaaatatggcgaaaagtaggtaacgattttttattgggcccttaaaccgtcaggtataagggcgcaataaatttatgaattccaattaaaaccgtcgcctattcttgtaattactgttataaaccttcggaatagtaatttttcctcacaatttttagcagttacttaattttttttagtgacggttccccaaaaaaggcgtttttaggaccgtcgcgaattccgacttttgtagtagcggttgcatgtaatttatcccagtagtggaattttagcagagaccttaggcaggtcatgagtctatccatactcgccacataacttataaataccctaaattcacatatgaaagggaatgtccaacatagctaaaactttgctgatattatttttggttttcttcttcttgaaaaagaagctaaggataaagagttcgggtttcttgcttaaatattatatataaacacatcaaattcgctctaagaagctaatagaattgatcatagactaaggtttattaatacccaaactacataaaaaaaaaccttcatctctttatttcaggaatttataatttctttagttcttaaatatttacttttcgaaaatctcagtaaacattttggtgctttcatttagagctgaagaatgacataaaccactgtctctgccatacttttcacatgaaagacggttcctaagaagactcttcaaggtagcctcgagacggtcatggaggaagtaaatcccctctcgtcggagcacgccaagccgagcgatgcgagaggtggggatacgtccaacatcaatgattgagaggacgatccacgttgctgatgatagagatactgaaatgaacgaagaagagtaagacaatgacggttacgtcaaagacgagtattacaaagacgactaccattatgagcaagaccccgaggtggttcgggtgtctaacgagttacttgagactagaaaaaagttggcccgtcaagtgatagatagtgtttgacggtcctaacaagtggtattagagccaaaaatttaggagtgctgggatagtaggttgcatgtgcgatgtgtgagaaaaaccttcaatgtaatgccctcactattgaagatctatgtggtgctttgtatcaaaagtctacctgatattgaagtagtcaggtggcatgtcccgttgataattacggaagtagaagatagagatcagtgtttaggacctgtgtcgaaatatataagactttttgataaagttgatggtcaggcgacgagttccgttagtaataagttaataacggcatcacaaagtgatttcgcttaaagagaagctacgagtatttcgtcctttatttgaaaaaagaattattgggtgtacaactgttgtggacattgtcccacatagaataaatggtagagaattgagccatatataagaacatgggctactccactcattgcc

SEQ ID NO: 316195 - DNA, 545 bp, Cannabis indica
tattaaattgcttatacatatatagatgcttttgtacgtatctttatttttgtaaaataaataaataaataaaaggctaattaattacaagtccaacttgccaactaaaataaaataaaaatgtcttgacaacaataaattttaggagatatgaaagaatggtttggtttatattttcaatgagacaaggaattcccattttagtaattaattatttaatttttttattggtaggacccaataaatgaaagggtctctccacttcctcttacatattaaataaatataacaatttctttttaataataacaataacttcaagtctcacatttaggtttatacttataaaataaattccaactccatatgataccattatttttccacccaaaaaaaaaaaaaacaaaattaatttccagataagataccccattctatatttattattattttctgaataaactcttacttatcttaccattgacctcaattttgctgccaaaaaaaaaaataataataataataaatcacgtgcagctcaggtg

SEQ ID NO: 316196 - DNA, 807 bp, Cannabis indica
taatttttcccatatttttgaaaatagcccataaaactaagaatacataggctcaaatttggccatatggtattttttatttttagactttttagatgggtttgattatgtagaaattatattatatataaaaaaaatattttaaaaattaattttttatgatataaataaataaaatcaaattacatgagaaagtgaaaaattcaaaaatattacaaaaatgtgattagattattaaatagtctaaattagggctcattaatgaattaatatagagtgtgtataccaaattaatttatttagggtaaatattattttatactttgtattttttaaaagttattgattggactctctattttattaaatgacaaaattaaccttatattttttaaaactgtaaaaataagattctgagcttaatttttaataattttttttagtataaccaacttgaagacaaatcttaatacaaacacatacagaaaatgtaactagtcttgtcataacacgtctagatcgaattattattaagttttattttgacaaaaaaatcaattcagggtcctatttgtgctattttcaaaaatacatgatctattttgtcatttaacaaaacagaggttccaattgataactttacaaaacacgaggtccaaaatagtatttaccatttctttattcttctttttcccttggcttacctactctctttcttctttttttcccctcccaaaaagttttaaaagatttttgttagcccaagatatgtttccaatagggtgggtgaattggaaatttaaacta

SEQ ID NO: 316197 - DNA, 5578 bp, Cannabis indica
ccaccggcactgcctgtgcctctgcagaatccggggataatatgggggctggtaatgctaatctacctgctgattggcagtgtttcaagaaatgcgaggtatcatactttatcaagaggaagagctgcatcgatcaatgaaaccggctgcccctgttgggcatcaaccaacaccggctacccctattgagcaagtgttaccacctgcacctgtaccaatggtgggtaacctggggttcatgttgccgcatagagatttcgtgtttgaacgattgtgaagctgggacctctaacttttctgggaggtactgacataattaaagctaagaggtggatgactacaattactcgtatccttgacaatatgagggtgatgggaatagagagagtgaattgtgcagctttcatgttgcaagatcattcccgtgtctggtgggatattgtgggacagactcgtgatgtcagtgtgatgacttgggatgagttcaagagtctatttgaggaaaaattatataacatcgctgtgaggacttcacatatggaggattttgtgaaattaacttaggggaaaatgattgtggccgaatacactctgagtttgatcggttttccaagtttactggtgatctggggcctacagtcaccaagaaacagaaatatgtgacaagactgaatgccacaatcagttgggacttgaaaattacaactactcatgacactatgtacaagaaagtggtagagctagccttaattgttgaggaggatgaacaacatgtaacaaaagagtagacagcaaaggatgtcgccacgacatcgaatcctcctgctagttgtaatatcaataagaggaccaatggtgataaccctgatcacaaacgaaaggctgacccagtgtggcatggtgagccactttatcagagatttttcccaggccaagaaagagtagcctaagaagaatactactcagaacctgggacaactttttactatgacttaggctgacgctgatgctagtctgtcagtggtgacaggtcagttatctataaattgttgttcctacactgtattgtttgactcgggagctactcattgttatgtgttgagtagagtaattgaaagtttccataaaccatgatatttatgctttagggtttggtactctgttatcttcaggagaccatatagtatccactaggtggattcagtctttgtctttttggattgacggttgtgaattaaccgcgaatctaattgaactgcaactgtctgattttgatataatcctgggaatggattttctgtctaagtatagggcaacgatcgattacaagtggaagatggtggtgtttgagcccaatagtgctaacccaacagttttgtgggtaaagtttaggggacacgcatacaaggagtaacacttttgaaagaaaatgatctgatgagcagaggttgtttgggattcatagtcactgtagtggataccagccaacctgtgacattttgacctgagaacacgagattggtgtgcaagatccttgacgtttttccagaagatttatcgagatcgccacctacctgggaaattgagtaattgaattagtttcgggagcaaaaccagtatcaaaagcatcgtatcgaatggctctggcaaaattgaaagtactaaagatacaattgcaagagttattgaacctggggttcattagaccgagttactctccttggggtgctccggtattatttgtgaagaagaaagacgggttgctgcgaatgtgtattgattaccaggagttgaacaaacttagtataaaaaaaaagtatcctctaccttgaatggatgatatttttggtcaactgaaggggaagacggtcttctccaagatcgatcttcgctcaggctatcatcagctaagaattcgagaagaagatgtctcgaaaactgcattctatacttggtatggacattatgaatttctagtgatgtctttcggactcaccaatgaccccgagacattcatggatcttatgaatcaaatattcaaggattacttggatagaagtgtgatcgtgtttattgatgacatcttggtttattctaaatcagaaggagaacatgagttgcatcttagatctgcactgcaacggttatgagaccacaaactatatgctaagttcaaagagtgtgaattttgtttgtctcgtgtctctttcttggggcatatagtaaataaatatgggatcatggttgatccagccaagattgaagctgttcgaaattgaccaacaccaaaatcggctactgaagttagaagctttttggatttagctggttattatcgtcggtttgttgagggtttctcaaagatttttgtacccttaattgaattaactcgaaagaatctaaagtttgtttggactgatcggtgttagaaaagttttctagagttaaagcaacgcttgattaccgctccagtgctaactcttccttgagataaggaaaagattgttgtttattgtgatgccttgagacaaggtctggactatgttcttatgcaagctggaaaggtaatagcctacgcttcttggcagttaaaggactacaagcagaggtacccaactcactacttagaactcgcagcagtggtatttgcgctaaagatttggctgcattacctatatggcgagaaatgtgagaagtacactaatcataaaagtctaaaatactgcttcacccaaagagacctgaacatgagaagaagacgctgactagagttggtgaaggattatgattgtgagatcctttattaccctaggaaggccaacattgttgccatgccttgagtagaaaaggccagactcagataaatacattgaaacaaatctcccaatagttagcaaatgagatgacccgagctaaaatcgagttggttgtaggcagttggctaatattaccctataatctactcttttagagcgaattagagaagcacaattgcaagatccagagttagtgaaatcctgagatagggtttcggctgggaagactggtgactttgcagtggatgatacgagaatcctatgatttatgaatcgtgtttgtgtgcctatggatgatgacataaaaagagagattatgaatgaggctcatacatctccttactcaattcatccacagtcaacaaagatgtatcaagacctcaaggccatgttctggtcgttaggaaataagagtgatattgctgagtatgttgctaagtgtcttacttgccagaaagtgaaagttgaacgtcagaggcttgtagggttgttgcagtcattgaatatttcagagtggaaatgggaagatattgctattgacttcgtggttggcttacctagaaccacaagagagtatgactctgtgtgggtcataatggacaggtttacaaagttagcgcactttttaactgttgggacgaacttctccactgatcagtatgctgagttatctgttagagaaattgttcatcttcatggtgtcccaaagtccattatttcaaatagatattcgaaattcacatcaaaattttgggaggctctacatcgagctataggtacccagttgaagtttagcatagcatttcatcctcagacggatggacagtcttagaggactatttagatcttagaagacatggttcgggcatgtgtgcttgattttgaaggatcatgggtaaagtaccttcccctggttgagttctcgtacaacaatagctatcaagcaacaatcgggatggctccttatgatcttttgtatggaaggaagtgcagatcacctattcattgagatgaagtaggtgaaagaaacttccttggtcccgaggctgttcagagaataagtgaggcagttgataaaatcagagcgcgaatgctcgcgcttcagagcagacagaagagttatgatgatccaaagcgatgggatattgatttttagattgacgacatggtattttctgagtattgcatatgaaaggcatcaaatgctttggtaagtaaggaaagctttgcccgaggtacattggacctttgaagtccttgagaagatagggcaagtagcgtacatgttggctatgcccccagcgctgggagctgtacatgatgtgttccatgttttgatgcttcggaagtatatctcatattcgtcccatattctgagttatgaagcattggaactttagccaaatttatcatacgaggaacaactggtgcaagtacttgacagaagggagaaagtcttgaggaacaagacaatggcactgataaaggtattatggagagacactaaagtggaagaggcaacttgggaactcgagacggatatgcagcagaaatatcctgagttgttcaggtaaattttgggatgaaatttctataaggagggggtaattctagtaccctatgattaagaaaattgattagcaaaccctaacaagttaattgtgtattattatggaattatattattgtataatctattatatgttaattaatattatttatgacatgttaagactatgttggtgagccaggggcattttagtaattttgacccgagaagggtaaaactatgaatttaatttaattacgttcttacggattatactattatgacaagttagcgcagtatagtcatccgagaagggcattttagtatgtctattttgtcctttttcatgtgtattctgacaagttggcgcagtatagtcacaaccgggtatttagggacgaaccgggttcggggccaaaatacaattttgggataatttattggcattatattttaagtgattaatctgaaattttttttagtatatttgtgatgtgaatgaaaaaattgcccttggatgcttttgtgtgtgttatatggccataggggccctaaggtaatttcgctcatttggattatttgtatcaaaagagaattatttgtaaaaatagaaagtaatttttggttgtccaacacccaaaactgaccctccctctctctctaaacctatttctaaatttgtaaatttgcttgagaattgagttggattaagcttgattttgaggagttgtggcttgatcattgctaggagcttcaggtagttcctacacctttgattcttggttttaggttgctaaaattgatgatgaatgttatgattttttgctttagatgttcttagaatgcatgtatgttgatattggtgtaatcttgatatcttatgcttgattgagttagaaattgatgtacgatgcttgtgtagtattcttgaaattattttagggattctattgtgcttttaattgagtttagagctgagaatttgttgttattatgggctgagaatttcggtgaatcatttaagctcttggttgttgggttcttggagaatcttgtgttggaaatattttaccaggatctagatttactaccatgtatgtttcattaacatcctaatatgaattctaaaacaatgaaataaacacatatgaagtttaggaaatcttacattgggtgcagcagaatataatgactccttctattcagatctcta

SEQ ID NO: 316198 - DNA, 2266 bp, Cannabis indica
caagtttattttcattctgtttaatataaaagtttaaattcagctctattttgattagtaatccagattaggggattagagtttcataagtattttgggtagcgtgcctaattatttagggcgttacattgggagtaatcgtcaaaacgcgcagacatcgaaccatgattcgagcaaaaactatcaattaccattaaatgagccaaaattgaagagacccttagttagggtcacgtcgattcatcattcgacacctaggacatgcgtcacccatgtggacaagactctaggttgagtaaagtccacgtgcgaccaggaaggtctcgcgcagacttggggggcaaatgttatcatgttttttgcaccttgacgtgacaatagaattggatgacacatgtcgcatatttctgatatcttggcagaggagaatatccctagcaaccaataaatgactaattagcatctgtaatagtcagctatctgagcaggattgtggagaatgtttgaccagttatgagcatgtttatgacaaatgacatacaagagtttagagactactctcgattgtccagacatgaagacaatccctataatcgtgggattgagttagaggaaaatggcaacctcttctagtttcctatttcatgcattgtaattatagaatcattgtaatttcctactttgtgcattataagcaaaagagaaaccatccctcatgcattcagtctctatgaatagtgacctagcctcactatgaaagggatcgagagagttgctagagaaatatactctacaaagaaaagagagatctaagagagaaacttctcaaaaattaattataagagctttcaaggggaagaacactttgttccttctcttaagttaataaaataaaaggggagtaggccattaccatacttacagagccaaacctctttaaaatctggtgttcactttaccttactgttttttctttcttttaattatattacttaatcactttattatttgactcactatctttggctaaaagtgaggtcagcaccttcaagtagagataaattgaatcatccagctgatttaattcttgaaaattcaaaagatggcatgataacaagaagaaggttcactaatgttgttcaacttcttcataggttaaaatctttacattttgaaaaagactttcttgtcaaatgggaaatattcacttgcatacactatcacacacatatgcttgaaatattacaagaaaaatactacacagtttattttgtgacagactcttacatgttgattaattttcttaaagaatatgtgtttgtgattaaattgtgcttctttctctcgaaaattctttctattttaaaaatcacatgtgtttttatctctaacatacactaacatctatttccaattttcttgtcttatttcttttagagagtaatgcacattgatcatatgtattttttttttgggattttgtcattgttgtttattatttaagaaaatcaaggattttaaagtgagccgaattaattgaagcatttggtgtgaaaattttcattttatttatttggtttaatatgttattagtcatcaagttatatatttttgtcaacttattttttatggaagatttgatatatgtcattatctggttatgtttgtttctttttaactctcttttaaagagggaagtttccttgggctgatcgtttaggggatgttgaaccctattcttgtggatttttattgctcttattcgattaaaaaaaaataaatcataaaaaatcttgtttcatattttttagttgcaaatcatttttttaaaaaaaatgggtaacttcttggctgatcgtgtgtggtggtgttggtattagttttggtttcttttttttttttggtttcaaatggaaaaaggaaactacttaatggtggttttatttcaaaaatgaaatgtcttgtcttataaatatttctcacctactctcttttttcccacacgagttcttcttcttcattgtgtttccttcacaaagtcttgtgtgagtgtgtttgagtttcaattttttttgctacgagaaaaattgtgaagactcgaagatgataatcgtccaaggtgcatgctgcatctcaagtccgaacaccgccatctcttttggctttaattttgacattactgccatctgcaacagctccgatggcctttcttggtcgcaccaccaagatcaagacttgaaaaataagtttttctctctctctctct

SEQ ID NO: 316199 - DNA, 746 bp, Cannabis indica
ttctattaagcacgtaattaaattaatttcatcattttacccctcgcgggtcacaattactaaaatgcccctagctcaccaacggggtcttaacatattaaaattcatataatttcacatatattgaactatataataatataattcctcaattatacataattatctagttagggttttgctaatcctttctcataattctgggtattacaggccccttgtgatagtaggtaatgacctacaaaccttttgtttgtattaataccgagggaatcactatccacatcgctataggtgggatctgttatagtaccctttggattacaatgtatggattgatgcgtagcagacttaagtgttgaacaaccacgagtgcttttatagccatgctttggcgtgtaagagtgtgaggaagagagatagagtccaacacttagagaatatgaggtttgtagcttattggaggcttaggcatcttagattttcaactagaggttaaagccttcatataaaaggcctaaaccctaggtttacaactgacttccttgaaagtaggatagttaattgatatttacataagactgaaaatcccttagattctagatacttctcggcctgtgtggtgggcttttgggccccaattcccagcctacatatgatgtccacgtgtaggcatgtcctgagggacccattgagaaatcctttgtaaagcccgcttagttaatttggaaattagcagttgttta

SEQ ID NO: 316200 - DNA, 1616 bp, Cannabis indica
aagactattacgtctttcatattttgtggtacatccaactcactttagtgtcatattgggtactttgttccttcataagttgctagctaatttttctttgtgtagtaatttgagaagtacttgtatgggtccatgttcatctccttcaacacagccacaacatgtccataaggcatttcatcgatttagaatctgtttctcatgcatgttctctctttgaggtctagtgtccacgattttttcattttggttacctcaaataaataatcagtggttgcttttacctatgttatttgaaaccaacatttattatacatagagaacaacagtgggacaaccctaaaaaaaatactagaaaaaccataatagccccagaatgattttgtttaacaacttaaactacataatctagatctcacctccaggttcaatgagtatgtgtagcttttcaatagaatctgttctccaagtggtgccaatttaattaatatgttttgtgcttttatcctattactatgtgtccattgttgcattaatgctctcaagcattccaatagtgttctaattggaagatctcttcttgccaaatttgctgagtttagtgattctactatgttttacgtcatggtggaatatctcttatttttgttgtgaatccttgaccatttatcataactgagttttttcaagtacgttcttatgcgtttgtccaagccatctagtttttccatgtggtactcaaattgtctttctatgtacgatttcactgctccaaagaatggcaggttgtacttagcagcatgtgttttgaaagttgttttaaggttgttcatcaggtgatatccacagtatgcatgtgtatatttctcttattgttttgattaggctctcatttccgtctaaaattagacactatttttctctcacaccatatacttcttttaattttttgaaaaaatatttccaagagttgtcattttcagaattggtaacacagattgcaagcagaaatatgtgacatgttgcatcttgtgtgcatgcagacatcaatgttgctccgtaagctgctttcaggaatgtactatcgaccattattatcggcctgcatgttttccacccttttatcgaagcatccaaagccttaaaaataaacaaaaaactgttgtcttatgctgttttcaaatccataaatgatgctaggttgttttttttgcaccatgtgcaagaaacttggtatcaagctgtatgatttcttagtatttcctcataagtaattaacaacatgctctttacttctccaagctttcatgtagttcatcttgatttcatacttgtgtttcaattctccttttatatctagtggtgttgcttttgtctttatgttcagaaactttgatttgatgcattcccctatggattttgttgttgcttgcctttgatcttcatatctaacatttattgggcaggtgtgtatgtttgagaacctcctgattatgaatgtatttgctggctcatttttttatgctcgtagagaccaattacaactttcatataaacactttagactgtattcttgagagcacgacctccatgccttgaattggaagttgtttttg

SEQ ID NO: 316201 - DNA, 1984 bp, Cannabis indica
tatttacctttttttttttatttgccatctctatttaaccatcgataatatttatatagataatttatactaatgcaactaatttacaaacatatatatatatattcgaaaacagcaaatcttatacaaaataaaattttataattgaattaaccacaataatatgagattcaatcaaatatagctatataactaacatgtaatgtgataaaacaataatgaaacatattcaattaatactagcacgaattaataaaaaaatagatataaatcttaaaattatggtggcaatccttctggttagggcaatgatagatggatttggatcttaaaaagtaatgggtgattctcgtgtaaatcggcttatttaacccaagctttggaaagagctcctcactgcgaggtggctccgtcgctttggaatagcaaaattttggagtgccataagattttttggtggtgtatcctatctaatgcgctccctattagagcagtaatcaaaagcaggtttcagattgaggatacaagctgtctgatgtgtgggttgagggaggaatctattgaacacttatttctatatgtgatatgacgtttcatctttggagatcttcgccttggggcatttaccctgtttgtgatactggtattcgtatgtgggactgggttaaattcatatagaatcttgaggacaggggtatacgagttgaggatgtttttctttatgcttcattattgttgacaccatctggaggacacgcaacgatatggtacacaataattgttcgactgatgttaagaaatgtattgactctgcttgtaattcttttgcagatttacatgctactttcttgccttgtcctacgccaatcttgcgagagtcttgggctcctcctcctcaggattggattaacttaattgtgatgttagagtgggcctggagagtatgtgttctgcagttgtagcaagaatcaccttggtagggtgattcaagtccactcggctcggttggatttttcggatgcactttgtggagaagctgcggcctgctgtttggctgtatcggtggcgttggaactaggatctaagtttgtaattgtggagaatgactcgagactagttatcgattctctcaatgggaaggagtcgcattgggctcttgagaactatgtctcattttgtattaagtcttctccctcttttattagctgtaatttttctaatgttagtaggtcctgtaattttgttggccataatgtggttaagtgggcttttacccaccagttgtacagatctattccaatttcttccttactggagaacttattttgtaataaccgtgaggtctaacagtttcattttatgatatttacgcttttattaaaaaaaattaggagtgtacgttggtcggtttgattagtttacgctatattttattcaacccaacgtaaaaattgagttacaaaaatctaagtacaacccacccaattaagaaaaaataaaacttcaacccgcccaataaattggtcagtttggtcaggttaatccgtccaaaccgagcactaatatttatttgttttcacattcaattgttatattttaattaattgtgataatagggtaaatataaaaattgaattcaaagtttaaattaaccaccataaaagaaaattttttaatttttttttttataaatatgtatataaattatattatctatagattatatttaatatacatctatatataaaaacctcataatcgggttggtcgagtaagttcaggttgattggacgggttggtattattttcaatccgcccaatataaagattgggcaagttatattttcgtcaggtttttcggttagtatttttcgtcgagttatttggtttggtttggatgagttgttcaggttcggctgtaaagaccgcttagtttaatttggaaattagttgttaattatgtttaattttgaaaattatttat

SEQ ID NO: 316202 - DNA, 1320 bp, Cannabis indica
ctccacaggggcctggccagctaggaggtgctctgcagggtttcctatgcacttctacaggtggacaataactctgaggctacaaatcaggccctaaaagcccgacaaaataactgaataatatatagattcaatgacattttggtcttttgtaataaactaatctagggtttaggcctcctatatattggccttaactctaacctagaaagcctaagctcaattaagccaaacactggcctccaagttctaagcgtaagtttgacaatttctctctttttcacttcctatctcacacgcccatacaagcattatctctacgcttgagtttttccattcttgattcataaattatatccctaagggtgctatagtagatcccctctatagttatctggatagtattttaacccttggtattaatacaactaaaaggggagtaggtcattacccgctaccttaagggggctgaacctctataaaaaatcttgtgtttattacttttcattcttgtttgtgcaaatgcatggtaagcattggatctacatgaccctactgtcggttgatcactttttaaggtcaacagtagtagagatggtagctcgagtgtgtgccattgctatgtacttgaaaatgtaatttgagtttttgaagcttcaaagtgttacatctgataccatattagtttgcaagatgacggagaagaagatctttattgatattatctgaatgaatcaattacaatggcatgaattatatttatagagaaagcaatgagaggaaccgagttatttggacaaaacaactctaactaactctaacaaattctgcctaattcctatatcctataataactcacataactaactaacaaccaatttaatacaagttgaggagttgaaattaatgttttgttttttttttctgttattttgtagttgtctttttattgttttatagttctttgttaggttgctctagagtagttttttagctgtcttagttgttttcaagttgtttttattttattttattgaaacagttatcccaatttttgcactctcacttggcatcacacgatggtgacatgtggatgtgtatctgctcgcataagatgtgtcgaacaaggcaccgcatatattcactcggacaaagccttcttaactgggtagtgagcagtctgaacaacacgccaacacttagcgaattcaattctcgcatcgtgagtcaccaaaggaatcccaaaaattttgggattagatcacaaagatatggaaagtttttcgaatgccttgattagtgtattctgtatttaatatg

SEQ ID NO: 316203 - DNA, 1699 bp, Cannabis indica
tgtcaattgattactttttaaggttaacagtttggtgctttcattgagagtgtggatatcgtatctgatcaaacgtcgtggttaacacgagaagaaccccagtcacactgtctgcatcttcaggtctccatcaagactcatagactgtagattcaaatgctcaggttccagccacaactggaatccctatgaacaccgagatgtgataaatcatgtcactacaacaagcaccacaagcctggccactacagatggccaaactgatacaagcatcttggtggatcaaaatagcaggtccttgcctccaagtcaagaccaaccattggcgcctcctactaaagtaaggactcatgggcaatagcccccaggaacaataaccgaatctcgtctccaatattacgccggagagacaggaccaggagttggcaagcctgcaattggtaagccccacatggacttgggagaagatctcaaattagtcggactcaaagaagatgtaggccaagccagcctaactaaagaaccacgcgctattgattgcgatgtattcactcaatagagatgcaaattcttgagatggatggatgaccaggagtacatccttcgatgtcccatattcccagccacattgtcagaaataacttaaaaatggtacttcaaactcaccccaagaagattcaattcttgggccaagttctctcgagaattctacacgcaattctcgtctttgagacttgtaccatcacaactagaagaccttgtcgaagtcaaacaatgacaaggagaacttttgaagaattacatccagtggctcatggatgaggaaaggcctcacaaaagaaagatggtacacgaccatactaggggcatactcccattgagtgacttctggaaagacatctgaaggatctcaaccaacaacataaaggagttcctcgatagagctgatggctttatcaaattcgaaaaagccattcgacatgcccaggtggggcatgccagcaataggcattcacgagacatattgtagtctcatgacctaccaggcacacacgccagcaccagcaactctacccagatctctagtgacaaaaacacttgaattaagtgcaacaccaataactctgggaggaacaatagcaaaaaggataagttcaacacttctcctacgccatgaaagaaaaagaaggagaagtatacttgcttcacccttttgacggagaaacctgaggccatctttatggccactcaaggaacaccccctactagaagcccttttatattaaaaggaagatgagctagagggacatgacaaagttctgtcaatatcacaacgacttcggccatgacaccaatgagtgtcaaaatctaaagagagagattgaatacctcttaaggcataacaatcctcacctgctttgttatgttcaaaatcgattatatcaatggagaccgtagtaaaactcagtaaatataattctataattactaagagttcaattctatatttataatagagtaatcatggaattaataaacatgattatttggttaatgagacttaataaataatctagtttattggagcttaaaattataggtccatggtccccgaatcactaccttaaaacactattaagggtagggataaagagttgaataatgttgttcggaaaaatctattttgaattggcaaaat

SEQ ID NO: 316204 - DNA, 1081 bp, Cannabis indica
aatgataataaaactaaatattgcattttttttatcaagaataaaacacttcattactcgatagaactaaatacaaacacaaacagaaaacaaagccactcacggctccttccagccaaacaactccaaacccacaattacctactctataatctcaacaagtagtctctctcctgattggacatatttctattgattataatttgtaatatatattttattgtattctttacatcatttacaattccaaaaattgatctagtataactattaaaaatacatgtgtttctattgagctaaatgtagtaaatcactgctgccaaaatggtgatattaagccgatgaatctgagcatgacttgtcagaacaacccaaacataccagccagcataagcaatcgaccgacccctataccccatccaagcaaaaattaaacccaggacttttcgagataaaacacagttaaaaaataggtactcatgagtctcctccacctcctcatacaccgggcatttgatcgagtttagaacaatgtaaaactgagacatcttgtccctagtaagaagatgagcatccatcacttgccataaggtaaatctgtgttttggcactgataacgaacttcaaacaaccttgtaataattgattgggttttgaaccaatctatactgtacaaccaattggttttaaaccagcctaatgtaccagctttcactatctcatttcgctcaaatttcttccttagatgacatagtttacgccagtaccaactcgaatctagttttagatcgtaagaccagaagcatgtagattttaagtagatattatctacccacttaacccatagcaggtcttgttttgtgaaaactgctcaaacatatttagctagaatagcctggttccatttaacaccatctttaaatccaaggccaccatatgccttcagaaggcaaaatttgtcccaagaagcaatatgaatcttactcctttttccattcgctctctaaagaaatcctctatataatttttcaacctccttagtgatactatgggaaagaacaaaaatgctcatccaataatt

SEQ ID NO: 316205 - DNA, 1371 bp, Cannabis indica
atatatatatatgaaaaaaaaaagttaatcatatgaccattgaaaggttaattacatgtgatctacagatctagaactaaaaatataatattgtaactaataattaagtttacgtaaattagtcaaatattttatattatattatatattaatttactcctaaaaaaagatatgtgtgttacgtacattgaatataaaaagaattaaccaaaagaattaggttaattatctctgacaatatatatagtattaatttagttaattaatagttatataacctcttctgatcatgaggctgctaactatagctggcaatttgaaaaaaaaaaataaaaaaaaaatgctttaatgggtttcaaaatatataatcatagataccaaatttaaaataaaataattaaaaaaattaaattttgaattaattataaaattaagccaccggtggctgataatatataatctttctttttcttaatcaattaataattacgtacctgatcactaattactttatagtatggttattattaattttatcttatttgaacctaattgtatgtaccatatattcatattatttattttaggttaattaagatttttgctccttaaattttaacatgtattaaaatcatgcccttaaacttttaaatccgctaaaaaatttctctgagctattgagattgttgaatttaaagactttcgtacaatttcaattaattttactaagtcggtgattgtccatatactcaatcatgctccccaaactttaaaatttactaaatcattaaagttagtcattaataaaacagtcagcaatatattaaagttatggaatctttaatcaacagttgatattactgttcactgatgcccgttattcggtgcaagtaatctcaatttaaattgttgatgtaatgctatatataatagagtttacatatgacatggaccgattgtaattaaattatctttatcaaacatgtcgcttaccataaagaccttattcatatcataacgatgattaattaatagtagatcgacttaaatcctgagtaatcatgaacttctattcatgttattagtttttttgattcagtcgtaaaagtgtctcaaagaagattcttcttacaaattttgttttggaaagttaataatgggaatgattggaaacttgatttacaattatgaaatattaactttcctaacggatattgattcattttaagtgttaattttagaattgaaaaattgtccataaatttagactggacccttcaagcctccattaggtccttacacccacggactaatggctcttatacacgggtacgccactctggttgcttcctggattgatgactgacccta

SEQ ID NO: 316206 - DNA, 2724 bp, Cannabis indica
caacgaagattaactaaagtgtacagctaatgtacactagagtattggtaaattagagcctagagcactaaaatgtgtattgttgggatacccattaggaacaaaaagatacagactttgggtaagagaaaaaggttttaaactatcaatagcacggatgtaatatttaatgagaatatttttccatttattgttactaacccaaatttttatgctctagcccaagtactaaccatgcaggtaactctatcaactttgatctaaggcctactgctccaagtgatgaagagaatatataatagctagaatctattgaactagaccagggtagaggtcaggtggaacaaagagagaatactgttcagatatatcaacaagaagagaataattttcagattgaataaggagagaacactattaaggtagaataaggagagaaaactattcagttggaacaacaaggaaacctgagggaaaatcagacagagttttcggaggactatcaattggctagagacaaagttaaaagagcacctagacagaattccaagtacagcttcaacatttggaatgaggacattgcctatgcactgttaagcactctaaaaggatagaagatagaaccaaaaacttatgaagaagctataaagtgcaatgatgcaaagaagtgtaataatgcaatggatgaggagacatactctttgaagaagaataagacttgggtctgtgctccaagacccaagggaaagagtattgtaaaatgtatgtggccttttaaacagaaagaaaaatgccttaggacaaagaaggagaaagaggagatgagctagatccccccactctaataaggtttgtttgatgatgtatcttatgatgagtactgcatatactgtaagtgttgttagcaagtatatggttatgactggcaagatacattggttggatatcaaattaatttttaggtacttaaaggggacaacaaatgttggacttctatttagacagtcacaaaaccaaatgttggtggaagggttttgtgactcagactatgtaggggatagagacaaggtgacacagggagatgtcacagtggaaaaggttcccactgaacataaccctacagatatggggaccaaggtggtaacccttgctacgtttaaacattgtatgaacttgctagggatagaaaaaggaagctgaccctagtggtcattcaagctaaaacctcagagtatcatcaactatcattgggtacataagggaatcgagttggaatttattaatacagtttcccttatataacctaagtatcaaattactaatcattgggaataaaatgacatttttacccacaacagattacaacttacaaccagatttaaatacaagaaatgcaatacaaaaatacagtttcaacaacaaaaacattctccaccaagatcaaacagttacagccctagatcagttcacagatcctacatctatttaaggatacatttttccatcattttgtaacacttaaagctagtgagagagcgattgagagagcttttttgtagagagccttctcaaaggagagagcacattgtttatccccagtgtgtatttgcaaaagagagaaaaagaaagagttagtaactttgtaaaaggagacaaaaacagtgagaacataaagagagacaaagttgtaacctttacgtgatatgttgatgaatgaagatcaggactactctgaggagagcttgacgaagaagtagccattgtggatgaagtccgagaatatttttgggtattgtctttgcactgtttgttgtctcataaaactaacattttgatttctttgatattgtgtttgaatattattgttcttggttttcaatttttgagttttttggccgagtctctttgagaattttttctaggttcgggtcttggtgtttgtagtcgtgggttagtaatttctgggtttttcgggtttgagtatcaagctgaatttgttattttatgggttatccttgttttgggtagaacaagagagaagaaaagattttttgaaaaaaaattgcaaagttgtcagtttataaaaatactattttctattgtagacgcataatagaaagtgtaaaattaaaaaaataccatttttatactattgtattaatttcgtatttttgaagttgtatttgaataaaaaagtttctaaacacatcgcacactaactttctagtattttgtggcttgattcttgagatgatggcgcttaggggtgtgagtttgtgttgctattcttagtcggagacattgaacttggtcagatacatttaacggatgtacaaccttccaggaaaagataattttgagatgatggctgaattcaaagtttaccaagctgatgttcacgcatcctgtaatgatatcgtattatttttttgatatatcagtatcaattttaattttttatttattgttgattatattggtattaatggtgattatgttgagttttgtgctctaaataaaactcatttcaatataatcagatttattaattaatataagatcagaaattacttttatattgcatggttcacatgatttatttcatgattatgtttaatgtataaattctattaattctaatacatatatatttgttcatgattatagtatcgttagcacagtagaatataatcatgattatatgttcaaaagtttaattcccat

SEQ ID NO: 316207 - DNA, 772 bp, Cannabis indica
caacaaaaatggaaagaaataagaaaaagtcataaaggtcccctcagaacaaaatatcaagggagagccactttaaaaatatcttggaaaaggcatagtgatcgagtggtggagggggtatccacgtgtcaaaagaaaaagcaacctaccatgagtcttcccacgtgtcgacccctagtttggaggtctatctcttatcattgtcgttttccaatttttgtcggtattcgctttaatccccagacaggactggtccacatccgactcactgagtcactgcccttcgagtcagctccataaaaataatctgctgtttccgcgggttcacctactcacctcactcaccaaacacttccattacatttcattttaacaaataatatttatcaataaaatctaataattaattatataagttctcttctcagcatgaaactttaatccaacgtaagttattgtttttttaatagaaaatatcaaaattttgaagttatattattataattcatagggataagatatttttattaaaattgtgttactcatatttatttattttttattacaaattttttgtgtggcatccatcaacaaccaattaagagaattaaacttaaacaactctaacatcatcaactaagagttgcaattaatattcaatacatagaaaaggaagtcacactgaaacaaatatatatatatatatattttaaaggctagaattttctgttttatctaaatataactttgaaattctataatgcacctcttt

SEQ ID NO: 316208 - DNA, 1333 bp, Cannabis indica
aaatcgtaaatttgaaaaaaaaaatgttaaaaaaatagtatatgggataattctcctatattaaaatacttttcattttttaaaaatattatatacttttttgatgttttaaaaaataataataaaaagatatttttgacaccacactaataatttcttatgcccgcttggagactacatatcatgcactttgggattgtagcaagcttgcctcgactcagaagctacgtgcttttaaacttgatgatccaaatatgattgttaatgatattcatgattttatttgtaattatcttctccaactttcttgtagagaaaccaaatcggttcttgttatttggtggtgtatttggttttgtcgcaatagagttcatgaaaattcttctattctgccagaattcataggcccttgggcggctgagttttgggctcttaccacagtgcaaacaagaggcacgatcagtcctatccacgatgtagctacatatctgcctcactgaaaccctcctctagggtcgttcaaagccaatacagacgcgatattgagatctaacttaacttcgtgtggtcttgctatggtggtcagagatcaagatgataatgttttcgctatagcagcttagaaagctcacagaagccctcctccagagtgggcaaaagctctcgcaatttgttacacactctcccaatgcaccttttttggcatccaaaatctccaggttgaatctgattgtcaaagtttgatccataagctcaatccttcaatgatttggatttttctttgaggttacttattattggtgatattagatatttatggtcttaaatttttccattgtgatttttaattattgccttaaaattatcaacgtagtagttgatactcttgttgtatttgctttgcaagctacttctagcaaagtttggtggcctggtcattctttatgtgtttagaatatcattttggttgatgcgagttatcaatgaatcatttagtcatcaactccttcgagatctcttttctttggtggtattttctaagacatttttctaaataaaaatagtgattctttaagaaacataaatattttttctattttattgtgtaaaaagtaatttgctgtataaataattaagtttaacttttagttgcaaacaaatacctaagtttaatttttggcggtaataatactttaattatattaatttctgaaactctataagtatttgaccatttaatcttaagttattatctaagtgttatttttttttatttgtataattaaatcaatttttttaaaaaaaataaaaatttaatgacttagaccaatta

SEQ ID NO: 316209 - DNA, 1040 bp, Cannabis indica
agcttcattatatttcaccttttcccctatcctttcttccttgctcaatatctcattgaaatcacctagtatcacccatgcctcatttgttgcaattcgcttcaaatcagtccaaagtacatttctcccttccatatcattaaaagcataaacatatgtaataaagaatcgacacttaccatctaaagttgtgacgaatagatggataagttgacttgtacacatgagaacacttacaatgaaactagaaggattccaagcctccatattcttcctccatcatgccatgcattattcgatgtaaaacaccatccacgaaacatatttacatataaggcacccagcttgtgggcttaactctcgtctcgagaagaccaactagtccagctctatgagtactaatcatactcttaacttgattctacttatcttgactattgatccctcggacgttccaactcactattttatccatttcccgcaggaggcactccccctcttctagtttttccaatatttccttccccatattctgctactggtaccgattgtgcttgtgaagttcctgccatatccaaactcaaaaatctgtcagataacacaacaaaggcattagtcacttttgtcacctctgcttctgcaatattcttgcctttgctccccttttttacttcctgaaatccatctgcatcaactatatcatccgttgctggtgctgcttgtttactctcttttactacccattgttgctttttcccatccttcttgcgacattcaatcgtttcgtgacctagtcctttgcaatgattgcattgaaccggtttccattcataagaaactgatgtagtgactacaaatccatactcatcttcaaaatgaattagagcaggaaactcctattttatcgacacttctatcaataccctaggatagttcagcttgttcctttccttggttacaggatcaacttgtaacggggttcccacttgtcccacaatcttgtataatgacttctccccccaatacttcaaatcaagatc

SEQ ID NO: 316210 - DNA, 1273 bp, Cannabis indica
aatccttcaaaggttctccttattgttgtttaacttcttcaaggtcttctagctctgatggtacaagtcttgaagacaagaattatgtgtagaattctcgagaaaacttggcccaagaatttaatcttcttagggtgagtttaaagtatcattgttgagttgtttccgacaaagtggcttggaatatgcaacatcacacatcactagtaaccttctggagattgagttacatgtcgaagtatttcatgtgagccaacgggtattctcattctgtatacatcttccatactgacatcttgaatttgggcaagggcaagggatttatgtagccgagaatggtaatccccttgattaatttaattcaagatcttaaggcatcggactagcaatgccttgaattatgtccctaagttggtcaaactgtgcttccatagaaggatccgttgttgtcatgggacttgactgactagccctcgttggtggggttgcaaattttattgtgatatggaatggctggccattctctaagagagtgtatggtgaaggtcagccagacctgtgttgaactgcaaaccctagccaaccattctcatgtacgggtcttggatttggctagccatgcctacacttagatgttgtccttcgccagctagacctacattaggcaaggtccaactatccattactccttcatggctggccaaacctgcaaagggcaaggtctggccgcccgtgactcctccatgaccggacagacctacaaatggaaaggtctggctacacgcaattcttccatggccggccagacctgcaaagggtagggtcttgccacccacgactcctctgctgactaatgttggatgtgtcttgacagggggtagatcacacaagttgctggagtttggtggatttaggtctttgaagtgatcaatttcacttctcgaataaccattttgggtgtttccacctgttctcggtcgttatcagttgaagattaacctcggggtgcctcggtccccaaaaggagggagtgctattctttggtcatccaagggtgctcctgctagtggctagccagccatggtctaaataatggggggtattgttgagccagagatccctggttgacctccaagtcgctggttgccgagatctggctattctcgtcgttagaactgtgaggaaaggtttgtcctccctctggcaagggaagatctatcatagttcctgaggaaccaggttggtcagcatgtcgatagaccctccctgatct

SEQ ID NO: 316211 - DNA, 777 bp, Cannabis indica
taatgaaaaaaattattaatttttttatgtgacaaaagacaatataaataataaataatttaaaaagattattttactaatgaaaatatttattaatatagttttataatttgagaccatttactatatttttcctaatacattttgcctacaatgtagagacttgcaaacaattttggcattaaaaagagacacattagtgtaacaaaagtgcttaattttcttgttaaaaagaaaaatcttaattttctttttattagttttgtgcagctaaagcaatggtagttatgaaattagtagcacttattattaaatcaacatgggtatactattattacttttgcattgctaggctttataagcatggtgtcttccttagaagacacccttcctatcctcctatctctctagactctagtttacacatgttaagcttaaatggatgatttcttccaatcattagggatctgtgctagagacacgttggcagtatacattatcaaattactcattcttattgatacaaaatataaaggaaaattataacaaatgatcccaaattataacattatgtatgtaaatattttcattccaaaatttgtagagaaataactattatttatttatttatttatattacctttcattatatgaaaaaatcaataatttttttcatatattgttttttagaatttacaacaaattattgaagattatggtatatatattagttttgttaatttttttttcctttattttaaagttatgtcatttttt

SEQ ID NO: 316212 - DNA, 921 bp, Cannabis indica
tttttggggatatggcgttagaataatactttagctcatcagctaaccccaaaaacaggcaagaagtagcatcagcaacctcagtaacacaaactagtcttccatctattatgtcatcaacattcaagacaaaattaaaatctctacaagtaagccaaggcttgactgccattgtaagaccaacaagcttttgccaaagaacatgtctctttgttatatcattactgccacacaccactgttaaataaaataatttgtttaatcctggcattctaacacaaaaatgaacaaactggtttgaatcctctaaaatttccatttttacaaaagtcttaagccaaacaagtaaaattcatccttttatagccaaacatgaatgaaaatcccaacaaaaaacttaaaaatcatcaaatcagctactttatttcctcgaaccttagtttcaagcattgttccaattcctactttattagaactcaacaattctctagctttcacctgtttttctttcttattaaaacctctaacattccaacaaagtaaattgcagttatccataaacaaatgaagagccttgcaatacaccaaaagagttatctcgttgtttagtagtttgttgtttaattatatcactcttccttttagaaatctcccaaacttcatttgtatcattacttggtttcaccttacccaactatccagatgcatcacccttgtctagagactcaaaaatacacaaattagccttagtaataacatccattttagtagatgaatcacccaactaggtagacgaatcaccatcctctggaattgaagagaccattttatcagttgaaaatgggttcttaaaagcttgatcagataaattatcgaccttgtaacgccctaaacaattaggcacgctacccaaaatactta

SEQ ID NO: 316213 - DNA, 977 bp, Cannabis indica
gtaattatctacatgtctgtaagctttaattaattatccttgtaatactttcttagaaaactccaagagctttgtacacaaaatttgtgcacagcaattgtgcttgtccataaaattgtacacaattagttgaaacttcaatagaaacaaatacgaagttatggtcagatgagtgctaaaaacatatataattaatgtgtataattggaaaatagtaaaccaaaccaaagagaatcaacatatttcactaaataaatcaaggatcataatatactactaaacttgtccctttacatttgttgtctctagaatattttattaccaattatcattagatttattatacaagcaacttattcataattctgtagctttacaattgtagtcatctctattattcgctgaccatattttagtattacaaatttgtatgtatttgattttatttaggtaaacacattatcttaaattaaggtaaatgacatgtcttattaagcaaattttctaacaaggtaaacaacacgtcttatttaggtaaacattatgcttcaaataaagtaaatcaaaacataatttatcattattaaggctttattagataaatttcgtgtcttaattaaagtttaaacataatttattattggataggtaaacgttacatcttattaagtaaattttatgccttgaataaagtaaacaacatcttattgtataaatatcgtgcctcaaatattgtaaaccaatttataattaggcaaatttgtgccataaataagataaattaaaatataatttatcattaaaaatgtaaattgctactataaaatatggtaaacgacaccttattaggcaagtttcctaccttaaataaggtaaattacacaacttatttaggtaaataccatgccttaaataatataaattagaacataatttatcattaaaaaggtaaacccactaccttaaaataagataaa

SEQ ID NO: 316214 - DNA, 761 bp, Cannabis indica
tactcttagactacaccaaatcaagtttctagacttgccttagttctagaaagtctacttattagatggtgattactctgggagtggagcaatgatttttgagaagtgtaaatgtaacgccctgtccaacaaggacgccatgtgtgtgtgttttcatcaaattcttatttatatacaatataattataacaaaagtgtgggtagttaaatttaacttttttttataattaaaaatcaaacatataaaaacttcattataaaaagataattaatagtgactacaaggtccccagttttcaaaattgttacaaactagcttaatattactttacaacataaacattgcattctcaaaatacaataaaaaatagagcatcttgttcactaggccgtgccactgcggctgatatgtacattgctgcttcgaccttgaactcatggctgctggaacctttactttccccttacttacaccataacacccatgagtcacagagactcagcaagaaaagtgaataaaataataaccagtaatattcagcaattcaatctcaaattaaattgcatacacatttaaacaatattatgaacacaatcctcgtactttataaagtacccctttaccactcgttaaccacgagctgaatatgccactatcgttgcccgatgaagcaaacaataagtaagaaacctatacacagttttaagagtaattactcataaccgtaataactaatcccaaccctaggtcataacctagg

SEQ ID NO: 316215 - DNA, 1355 bp, Cannabis indica
aggttataccgcaaatatatttttaagtgatgtagaagtttttgacactcttaaagaatgtcactattggagatgctcttagtccataagttaatatcattaaactcttcggttatgttgtatttttcacaagagtgttcttgccaaaattttaaccattattttctgccagaaattgtaacccttggcatgaagggttacccttatttatcggggttttgggtaaatccagacctgctagggttttgcatgtgaaataagcacattgatgaggtaaaatatattataatattgatattgagacccaatttggcaggtgtttgttgtctatacgggatcgtattgcctgacattgatagtggcatccacgcttattcttctcgaggttgactctactctttttgttgaaccaacgagtgccgctaagactaagagtgattatgaaagctttcccctgacttgcgatataaacaagaatactcatctgagttccgcatttcatctcaaagaggatctaagcctaaacccaagttagcctgacggtcagctaaatgagtcgcttccctcttcacttgagtgtgctccgccgatcatgaataatgggtgttgagaaaaatgtgatttgctttttggcgtgtgccttttccaagtctaacacaggggacatgctcttgattcttcgtgatttggtgtcagaggggtgccatgtagtatttctcttggacacctttctattcttggatgtctcatcaactatactattttgcaatttattttttagagtatttgatttccttttttgagtcttcacttctttgaacgagagtcatcatttcagaactaaaatgtctaattttgctaaggtaattaagattacagttaaacccagaacctctgtctaactctacttgtgggccaatccattgattagtttgggtctagcgagtggtcgtgaattgaccatttctaataataatataaaaatatatttagcaagtgtgccttttttttttatgaagaatgcatatgtgtgtctaattaacatttgatatatataaatattcatactttatattttctcaaattaatggagataaattaagtttacttttctcaattaaaagaaattaaattggatatatactaaaaataaattattctatagtgataaatttttattcacaccaaaattttaagtgattaaaaaattaatattttgatgtatacaagttgtctaatattattttactcacaatatattatataataaaacttgttgtaaactaaaaacacatttaggatgccttgtttttttttttttttgaaaaaccttgaacctttattaatcaagacaa

SEQ ID NO: 316216 - DNA, 2930 bp, Cannabis indica
acgttcaatatcaggttattgcatcttccttggacaatcactcatcacctggaaatccaagaaacaacaaacgttgtcgcgatcctcagctgaagccgaatacagggccatggcaaatgcaacatgttaactaacttagcttcactccatccttcgcaatttcaacatcaatattagacttccatctactttgttttacgacaacagtgttgcactccacatattagaaaatccaatttaccatgaacgcacaaaatacatcaaaatcaattgtcacctcattcaagataaaataaataatgacaccatcaaaacaaaccatgttccatctaaatccaacacccatggacattctaacaaagcctctcttcctttctcattttcatgaactcattttcaagatgagtgtcaaaaatttctacactccagtttgaaaggggctattaaagatcattatgtctgttattttttgttacaagtttactagttagttgtaatgtaatcattctctatataaggattagttcattcccattgtaaattatttattttttttttataataatgaaaatagtatatatctctgtaattcaactaatattctaagaatgcacatgtattttcatagtttatgagacactgtaatttttgcatttatttttaatctagactcttaaatttggttaaattaacgtcacattaattagtgctatatcagtaaactgtttaaagaaataagtataatgcaactacatgagatattgcaatgatttttatagttcaaagggaattttttcaacagagaaaaattcacgagacgaagctttacaagggtcctagttcgagaggaataaatcttatttattattgaattacacattatttggtaaacaaacaaattttatacattattttaaaattttttataaaatttattaatatgtgttatctattgtattatgaatgatgagtatgtttagaactatttttaaaaaggatttaagataacctaacaatcttatttctaaaataataatttttggcatttaaaaatacaaaaatctcgtaataacaatcatatataattcaaagattcaatttccatactataattacattatactaaacaatccagagtaaattcaaataacaatgattattttacattattatactaaacaatcttaaatattttaagatgtttaataacaatgctaaataataattaaaataaaaaataatcttaaagtgtccaatataattggtattgttataaataataaattcaaattgaatgtcacgtagcataaataataaaattctcacaataagtacattgtgggacagatcgaaaaaaaaactcaagactcaacctgtgaggtgatcgatctcatctaaataaagaccataagattcatgaagtgaggtatttcatcattgtcgggatgttaatttgataaatatttaacatctcgcaacaaagatcttgtagttgcttgtaatacaaagatcttgtagctcctcgtaatacacaacagtgattaatcacctcgtaatacacaacagtgatgaaccacctcgtaatatacaacagtgatgaatcatctcattatacacaattgtgatgaatcacctcgtaatacacatcagtgatgaatcacctcgtactacagccaatgatgaatcacctcgtattacacaacagtgatgaatcaactcgaattactcagtcagtgatgaatcacctcgtaataaacagcagtgatgaatcaccttgtaatacaaagttagtgatgaatcacctcgcaatacttgattagtgatgaatcacctcgtaatacacaacattgatgaatcaccttgtatcagtgatgaatcacctcgtaatacaaaacaacaatgtattgcctcgtattacacagtagtagtgaacatgctctcaaataacatgatctgaccaagtcaaattctacttcacagaccacttttttatattttaaatataaagaagttatttatacttatgtaaatattcagttatatgtgaaacatgagcagtaaccacccatcaattgtaacttttcactaagataagattgagtaactaccatcctattcctatagataggggttcactcaaagggaaaaggaaggagcaattctgaattacagaactttgctaaattgtaaacataattaaaactcagaaataatatgaacttgtgcagtatgtagattttaactacaaaattacataaaaatatatggtgttatttattattattattttctgtagtgtgttattgcaaaaagcctatttatataatagttaacaaaaaatcgcatcatcaggtattataatttgttattggtattacactttaattatcctaagtgagggtaataccattttacactccttgttttgtaaaaattattgattaggctctttgttttgttaaataacaatgtagaccatacatttttttaaaatagtataaaatagacacaaagcttaatttttatcaaattgaaccttagtaataaccaaacttgaatgtgttatgacaagatcggttatatatatatttttgcaaaacaagcttcaagttagttattttaaaaaaagataaaaattgaatccatggtctaatttttattattttaacaaatacagtatttaaatattatcatttaataaaatagatgatctcctaataacttttacaattacaaaatttattattgtatgtatcataagagcaatgatagcatccttaaaggattctaaaagttacacatcatcttaaaaatataatattttattttatctctcttccacattatttttggcactcttacttctaaaaacactccaatgtattagcgctctttaaaaatgttataattatgatctcacacattattat

SEQ ID NO: 316217 - DNA, 1178 bp, Cannabis indica
taaaaaaattgaaaatttcagtacatgatgtaaatatcctttcataaatgacttgaatttaaattttaaatttttcagagaattaatgattggatcaaattggagtttgtcattaacttataatacctattacctagtctcaataattatattgagactaggtccacaattttagaggcccaaaagtttaaaattaagagatatttatatagaaataatataataaacaaatatttaattcaacaagttatataaagaattttattgttattatattaaatttagtaaaaaaaataaaaatatcaaattacatatctatagaaattttcattgttctttattcaattgctacaagatcaacaagtccaattataactcaaggtgtcaagtaaagttttaatcaacaagtctaattatagctcaaggtgtcaagtaaagttttaatttaattacactacaaaaatagttacttttagttacaacataattttttatgattaaatgtgacttgtagtcataataaaaaattacttgtgtgactaaaatatagcatttaaatacaagttgtcactaatttacttttagttactacatgtattgtaactaaaaacacatttagttacaacaaattataatttttgtgacaaatatctttagtcacagacgttttagtcacaacataggaatgataatttataattagtcacaatttttttattttttaatcacaagttttgttataattaaaagtaaaattttttatagtattatgaggtgattggttcaaactcttcaaaaagttattattattattattattattattatttaagattatatatttttagtaattaagtagctaatattatcattagtgcaattttaaaataaaaatactctaatgtataattgtatactacagtaacatttcaagatctgaactaaactgataaaaagaaagatttagggcccgtttggcagaaacttaaaagctacttttaaaaaagttgtgaaaaaaagatatttggtacgcaattaaaaacagcttattgaagaatttataaaaaaaattacaagctaaaagctaaagctggacccaacttttagagaaagctattttgattaaaaaactctatagtaattaattttactaaaaatatatttaattatttattata

SEQ ID NO: 316218 - DNA, 1390 bp, Cannabis indica
taaaaaaaaaaaaaaacagtataaatgttgcaatttccgtgcaacagtaaaaatgaaataaattgggaaaaatcagtatagggtgtaaatttcccttaatctaaatacaagtttagtatcctgtttttttaataatacttatttagtaccttatattttaaaatcatacatatttggtaccctaaatttaattttttttttggtaaaattttatcatcaatacaatcaatagtctaaaatttaatgaattcttaattcaaatttaattatttgattacacataactgaaaaatgtttgattaaattgataaattttactttagggtaccaaatatatacaatttaaaaatataaagtactaatgaagtattattaaaaaaagcagggtatcaaatatgtatgttttttatgaaaacacaaggtactaaataagtatgttcccttctttatttaactaatcaaaacgcatatattaatttacatttaaaaaatataggtgagttaaatatttatgatatatattttttaaaatacagtttactaaaatggtagcttattggatgacaactcattatttttaaaaataaacataaaagttactcaaatgtattaatataacctaaataattaatttattattaaagtgtatacatgtaagttttagaggtaaccaaaatatatctcagattatataatataaaagtgatattgtttttatgaaaaagttacttattggtttcctatcaatgtcataagtagccaaaagattacttttgaactatgaatttggactaaggaaccaagtggtcgtttctacgaaatctgcctaccttgctcaagccttgtcaagagcaccacatacaacgatggctcccgctctttggaacaaactttagaattctagtatcctagagcgccataaggttctttggtggagtattctcttaaatgccttaccgattaggtctgctctagataaaagaatgcaaattgaggatgtgtcttgccccttgtgcggtgagaaagaggaaactatggagcatctcttcctttattgtaactttgcttttcacctctagaggtcctccccctagggcgtgatgcctgagctaaattctggggcacgaatgtgagattgggtcaaattcctttagagcctgaagcaaaaaagagtagaggtcaaagaagtatttttgtatattttaattatagtggacacaatttggaaaactcgaaacgataatgttcatactaatagtttaaatgtaacattaagcattgtattgactatatttctacacattacgcaaattttggcccttgtttgtttccttcaccggtgattatcacgcctcttgcttggtcccctctgttgggttttataccctaa

SEQ ID NO: 316219 - DNA, 701 bp, Cannabis indica
aaaaaaaaaaaacaattactctaggaaaacaaatttggtttaatcttccattaatttgtttcaatttagtttcaaaaacaatacatgaatatatggttcctctcaatctcaaaatataaattatggggttcaaatataattttaaaactccatttatcttatgaaaatatctaattaaattccagttacttttgtaattaagattgagacctaattaagtgcctaacattgttggaaaaaagaaattgacaaaacttatatgtattaaaatatttatgtatattattattaaaatcatattatatagatttcttaatattttgaaatccttaaattatttaatttttatgtattaattattgaaacttaacctacaagattgacatcttcaaaaataggttcacataaatatgagtatcacaagcaaggcaatcagggacggagggactttagcccatatgtgggctaaagccctcactcaaatatatacatcaaattttttatatgtagatatatacatatattaattcactttgctcaatttattaaagtccaattcacaaaagccctcactcaatatcttaatcatgattcatgagcctactcttattctaatcaagcccattttaaaagtagtccaatacaaataataaaaaaaataatactttattaaaaaataaaataataccattgacaatatt

SEQ ID NO: 316220 - DNA, 775 bp, Cannabis indica
cccaaaaaacaaaagaaaaattatctttaaataaatgacagttgaattatttattagacaaaatgcaactttatctattaatttgtcacccttttcaaaataatatctaataaattttgcttaatgtaacatagcaaactatgtactcatctggatccctattgaaaataccacctctcatctttgccggccaaagtttctgaagaaaacataattagttaattaattagatatttaactttttgaataaaacacataatatgacataaaaaaaattattaataacacaaagtttgaatataacaacatgtaactaatgaaaaaaaagaaagatgatagctctaatatttagtatataatttatttgatagtgtattataatagttaatattattgtatgcattttattattttttcttattattttttctaaaaaattatgaatagtttacaatattagaaaaatagctcaaacaatgagttacaggtgtatttttttctatacgtatagataactattttgatcttaatgtacttgaatatattaattttaaattatttaaaatttttcaaaatatagaataagatatatctattatagctataatatttacaattgtataaaacagattaaataagcttgcagcaattgaacatttactttagcagaacatcttttatttttttaataatttccaaaaataaaataaataaaataacaaaaaaaaaaaaaaaaaaaagagaattactaaccttagggatgacaaatattgct

SEQ ID NO: 316221 - DNA, 1729 bp, Cannabis indica
atagtacttattgtggattaaaatttaactcatcttatttttgtgttaaatttggcataatttataacttgaatcaaatttgacatacattttacataactattggagttaagatttagcaaaatattctaaaaatagcaatacactatatttataactctatattggaaatgctcttagttatttatttgtaagaaaattaaatttacgtatttatgccgtaatttattctaatcttaattacaaattaattgtaaaattattgatgattaaaaataaaatcatataatgactacattccaccaattcaattgaacaattagaatctaaaattagttgaagttgcatacttaactctataacatatttgacagttcaataattcaattattagcacacatttattcatttttttaaaaatagaagaaattgcaccacaaaatgatagcaaagaagaacaagcaatataaataagtaatcaaagcacaaaaatgtaaaaacataccaagatataatataaattaaatttgttagaacattaattaataatgaggtatcttttgaaatttattaacatctaaaactaaaagtttagttgtctaaatgtctaattagattttgagctgtaaactacatatgttgaggattatggggttccatcttaaaatcaattggcaatgagtggagtggcccatgttcttatatatgacttacttctctactatttattccatgtgagacaatgtccacaataatatacgattaagggctcgtttagtacgttgtattaagtcgtattgtattgtgttgtattatattaaattagatcatatatcatatttttatataatactatgttaaattttaatttatactaaaatatcatacatttaaatttcataaaagtcaaaaccacgtttaatttttacataaaaatattacatgaaatgcaattgatacttcaattatctttgtttctttgttgttgtgtgagtgtcccgcatagaggacaaaacacaaaagcaattgaagttttaatttgacattgatttggaaggaaaactatacttggtaaaaaggaagacaacctcatttttgaacgatgtggtactggtagagttatttacatatgggatttgtagtatctattctattgtgtggaattttaggctccccattttgaaataacatggatcgatgaagattgaagaaaattgtgagttgatcatttaaggtaatttcatgtaccatcaacccgtctaagtgaatatcattttcattagtatcagactatgatctaatattattgcatgggctaggcaagaactgcaatgaactaatccaaactaaccataaagtatatccacaaaataactagaattgattacttgtattaaactgtactcgaatccacctgagcatgtttttcgaatcaaggcctctgatctttcacctttttacatatgaaaccccccttatcctatgcatctcttgctaaaagccatgtccccccatctgcatgcattggaattttctggtgtactttgttatttacaaatctaccttaaatgttttttgcagctgttcattctacataatcgaacaggcatacgccaatactttcacatttatggtttcattgaactgacagtttagattatgaacagtgttgagaatcatggagttccatctcaaaaccaattggtgatgagtggagtaacccatgttc

SEQ ID NO: 316222 - DNA, 1319 bp, Cannabis indica
caccaaagaaaaccccaaccttgtagcccagagaaggcccattcggatagccagaagctctgccaccgacacttggaagtccccaatcgcccccacggcccaagccgcccacaccaccccctcacaacctcggataacccccccaaaccccgcaaaacccatccccggagtgacggccgcatccacagacaacacaaactcacccaccccaggtgggcaccacagaccccctccccggccaccacaccccctccccgccacccgaaggccaccaccaccacccctgacaaccatcccacccacgcccaacaccgtagcccccaagacccgccccccagcactcacccccacacctcgaaactcctcccaagcttcccgggctaacacatcaagcacatccaaccgagattgtttcttcccaaacaagacagaattcctatcataccacacccaccaccagaccatagccaacaaaccaaaatcactctgatcaagtacctcgaaaagataaacaagcaattccgctaaagagccataccgaccacgactgagcacattccaaagccgaagcttaaaccacaaaggacgcaacgaagggcaaaagactaaagcatgctccggagtctccgtttcctcaccgcatctatggcacagaggctgaataagaagcttacgcttaataagctgggaattagtcggaagagcccgatgaaacatacgccaaagaaaaattttgaccttttgtggaacccgcaaattccacatcccattctaccaacgagcctggtccacagaagaactcccatccctttcactcaccacctcaagagcaaccgcatacccacttttcacagtgtagcacccatttgaagtgtaatgccaacaccatcgatcctcacacaatccaccctgtaaagggattcccaaaatgacattaacatccagtctcaaagaatactgggatagagtctggatgtcccaagacccctccgcaccaatcaagtcactcaccataatgccatcactaggagaaggcgagataggacggaacgttctaggctgcggaatccacggatctcggaacgcatccccgatcactttcctcatccctgaatgtaacaacttcatcccccatatcaaactcgaccacaaatgagacgaaccttggcggtctttagcatccaaaattgatgtaataggaaaatatttgtgcttcaaaacacgaccggcgaaggaatttggcgattgcagtaaccgccaaacttgtttagtgaccatggcttgattaaagagcataagatccttgaagcctaagcccc

SEQ ID NO: 316223 - DNA, 839 bp, Cannabis indica
tttttgttgatattaagcttcaatgcttcataagttagactccattaatcgaggtaagacaaacaaaattaaaaatatgataaacaagtcattacaattgagagtagtgtactactttttaataaggccatgattattatgagaataacacattatatattaatattaagttttaagtggcaaaatagttgttaatttagacacttaataacttggaccttgaaaatttacaatacaaatcccattaattaaataacaacaatatctatggccgttgcctttactcaattgcctctaatttctctctctcattgactctttttcaaagcattggcttgcttagtttaataaaaaatgctaaaataatatatgaggtacaatattattataatattagtacaatttaatattaaattttatttattttactttaataaaaattataaaaaattattaaccaattaattatagaacgtcatttcataataatacttgacacataccttagtacatctcaatactctaacttaatagagcaaccaaacataaaagattgccataggtgtgatcatgttatttacctcaacaatatatttatgacacttaatttcaataaaaaaaaaaaaagaaaatcttagaaaaatgaaacttttaccattaatgtcaaagttttagttcagtttggtgtccaaggaaaatgttaagcacaagtgtaattattagatgcattgggagacaaatgttaaggtggcgtttagttggaggtaatgaaattgaatggaatggaaaagaaacaatttttattccattcctttgtttggttgccttttaaagtattg

SEQ ID NO: 316224 - DNA, 3360 bp, Cannabis indica
acggcataaagacttagcaaagcaaatattttggattgtacattgcttgatccacgtgtccttattcggttggtccacgtatattgggaaaaatcaggggcaacagtggtgaccgatgtcggttgttcaactaatgatgcagaaattgttggtttagaaatctgattaattctgatttcctcaataaccacttgactgcgttgcttgtgactttttatatagtcacgttcaagaaaaatagcatttatcgatacaaatactttgttgtcttgatgattgtagaaataagcacctcgagtttcatctgaatatcctacaaacatacacagttcagatctaggagccagtttcctagtcttcggtttaagaacatgagcaggacaaccctaaatacgaaaatctttcaaattgggttttgtcccattctataattctattaaagtattgcttatgctctttgagggtactacattcaaaatctaggtagccgctagaagtgcatatccccacaagtttagtagctgcagagatgagtagcacatcatagatttgaccatgtctaataaggtccattttcttctctctacaataccattcttctgaggtgttccaggtgctgtaaattgggacaagatccattcttctagcaaatagtctttgaattctgaatccaaatactctccaccatgatttgatcgaagtgtcttcaatgatttacctaattgcttgtcactcgtagctttgaagtctttaaaatttttgaaagtttcagacttcttagccattaggtaagtatgactgtatcttgaataattgtcaataaaagtgacgaagtattcataaccaccttaagcttgaatattaataggtccaaatacatcaatgtgaattagctcaagttgttctttggctctattgccttttacagaaaaaggtttgtagccatcttgccttctagacatgatttgcacaccagaagagttctaacttttagctctctcaaaggatcatcctttgttgactggtttattttgtctagatggcctaaacgtagattccatagatacgtttcatcatcatcaaaaaccttttgcctcttattttgttgagacaatgctactctaaataattcatatttaaaattaattgctcaccttactctgttttgcagaacaaataggtgtaccattcttgaaactaataatctcattattgataaaaccaatattgaaaattttttcatgcaaaagagataaagaaaaaatgttcatggtacattcaagaataaaataaatatttttcaataacaaaaaattattattaaatttcaaacagactctgccaacacccttgataaatacttgtgctccattccccacgcgcatagtcacctccctattggccaactcccttgacgattcaagtatctgcatagaagaacaaatgtgattagtggctctagaatcaacaatccataaggatttatcatcctccactaagttagcttcaagaacaaataaatcgcatttatctttcttaagctcgaagaaatacttgttacagtttctctttcagtgtctcattacgccacaataataacacttcccttttgcctttttgtccttggacttggggctgactttgttcttcttagctttgggtgacttcttacctttgggctcgcaaccgttgttgtccttactgttccactttctaatcttgtcagacgaagaaggagagctagattttttttcaacaatgtttgattcaccttccttagatttatccttgttaagatttttaaacacggtcaactcgttcaataattgagtcatgttgaactctagcttgttcatgacatagtttgtggtgaaagccttgaagcaaggagatagcagctcaaggatcatactcacttgagtcatctcgtcaatgatggtctcgtgtgtctctacctcatgcattagcttaaccatgtccaatacatgacttctaacagggacacccttcttcatcttacaattcatgtagctagagcagtatcatgtcttgtttgattagactgcttcccaaatatggcttgtagagaattcattatttgagatacattctccatatcttcatacgtcttacacatcacatcattcatgcttacaagcattaaatatttggccttattgttagattgttaccaagtataatatatgtcccaaatattttttggagtattggcagcgggctcctcaagacgatcctcagttaggataaatttgtagttccacaaactagcattaaatttagattcaatttctatttataaaagttatcaccattcagtttttcaaatgctagtaaagtagtaagggatttagcatggtaaacatgactgaaataaattaagtgacataatgattatactagaataataaatatcatttcagaactactataaatgtaatgcatgagtgcatataagtaaaatacataaaatcttgtttagttattccacgataaaactctttgacaattgatcactgccataggatcagtatcgagtcaatctcattgagtctatgagacgattctcatctttattattttgaaacttaaatatttcatatttctttttctataaagtactgctttttgactaaattaacaactaaccaccataaaactaagttgtactttgtgactataacccaatatatcagatttcatgacttaacttagtagcgacaccttaaggatcagtatcgcactaaaatacatcacttcagcttttatcttagtcaatagatcaaccttgaacaacagtatagacacatctcttccttaggggaatgaatctaagccatctcgaggccagtttatactccttcagtgttgaacaataatagatttcgtaggttacattgacatgtactccttctcccactcactattttaggttaatgtgtttgttttattaatcaatacatgttaaccactttaataattatgattaatttatttataataaaaacctcaatttataaataaattttttgtcataattattaaatcggaatcaactctttaagtcataatttaaaactattttaaattaataggttaattttaaagagaaatttgatttttttatgcttacatatacttaaaatttttcccctaaactcataatatttgatatttgtgggatatgatatattttataatatccctaaaatacctccccatttacatcaccccctctctattcttctctcttttttttcactacgttgtcgaaccatccggccatatcaaattctattttttttacacaggcatcggccctatcaggcctttgtcttcctc

SEQ ID NO: 316225 - DNA, 1138 bp, Cannabis indica
aacacagggttcaaaatggtatttacccattatgtatattaggcagtatttaaatttacaaaattaatacttacataaacataaaataataataaaaatttaatcgaacactattggatagatgtaccaattatgactttccatgtaaaccaaagatgtaggattgaattgaaaattttcaaaagtatggctctcactacaataaacacacaaaacttcctcaagatgacccatagatgaggaaacattattttgacccatgctcatagtcttcaaagtatttgaaatagaagctacttgggcagccaaatcagtaatgacatcaacttcaataacaccagcaaccttcccaaaggtgctccggtagtaggccactggtaattgttgttagaaattctttcaataatgtcataggcctcattataggacttagcaagtaaatgcctatttgccgaagcatcaccaacattcgagtatgagcgtttagactgttgtaaaatgtttccatttagatgcaatgagaaatgcaatggtgaggacatttcggcaaaaattccttgaacctctcccatgcctcatacaaagactcgtcttcacatttttgaaaggatgttctccgttatctccttctggagcttagcattcttagtgggagaaaaatacttcatcaaaaaccgctccgccaattcttgccaagctgtaactgacatagaaggctaggatttcaaccaagctcgagcttgatctctcaaagaatagaggaataacttcaacctcaaggcattctttgtaactccaggaaatttgaaagaattactcacttccataaatagacaaaaatgaaggtgaggatcttcagtgggtgcaccaccaaactatcccacggtttgaagcatttggaacataatcggcttcaattcaaattgtgaagcctgaatttctagcctcacaatgcttggattgagctcattgaaaagaagggttgcatactatcgaatgatttgatctctatcatccgccatgatcactagattttgaccattgttaggggccagccccctctgaacttgttgtccatctctttggttatccatcatttctatttccccttgtgtctctttgttgtgctcttcttctt

SEQ ID NO: 316226 - DNA, 1220 bp, Cannabis indica
gaatgttcccggtataagtctgcaccataatgtcaaattattatcacatcaccaacactaccatataaacataattaatgtaattaggcacacaatattggagtaaatcttacataaatttcgttcatctcatatctggttgccaaattatgcagtaccccaggttcatgcaaatatgataatttagtcatgtcatctactccatctttaggagtttccatatctttcggatataattttgaaacttttgcaacaacctaaaaaataatgaacaaatttaccatgaatcaaaaagtttgaaattgtttaaaaagaaaacaaaaataaaaaattataccttctttccattggtagtttgaatctcagcttcttctccatcaatgtttaaaacatgtccatcaacccagactaattctggatctccaacccaaacatgagaaccaacaataatattaaccggcaagccctgcatcaatgttgaattattattggtattcaaattctcaacaaagatttgaattattattcaaatacaaaatcattttgagatgctgctaaaatcaacaaatttgaataacacaattttcttaactataaaatcagttaccaaatcaaatcattatagatagatcgtaggagattaccatttcgagaaatcaaagagattatctgtacagattgaaacccatttcttcttcttcttcttcagtggaagatgagggaagaaaatgcataaagtgctgggtataataataataatattaatgatatgttgcattggatttgaatatggagatgaaaggtgaggcctccattttcgccattcttgtggttctctcactcttcgcgccctactcccactcccaactctcattttctggcgggtaatcgataaggccgcgtttggttaaaccaacttttaacttcaaaatataaaagggaaatttgattttctatgcttagaaaatcaaaaaatttgatttataaaccaataattaaaaccctaaaaaactataccttttttttcaaaaccccaaaaatacccccaaactaaaactatctctctttctctctctatctagccggtcccaataatcccacaccccaggtccgatggtcggaccatggggtccgatggggtccgaccaatcggacccatcggaccccaaggtccgaccatcggacctctctcttcccctctctctcaaatcgcaggaaaa

SEQ ID NO: 316227 - DNA, 1508 bp, Cannabis indica
aattatcatcattatcatgatcttcataccagtaattatccaatattcaaaactgatggagctaaaactataatcgtttgattttaaaagaaggataaccattgaaccttttcctaatacatttgcatgaattgaaatgacaccaaatcaaatgaatgtatgactaaatttatgggtattgggaacaagaaacatgtgaatgaaccaaaaaaagagtacaacatgccaatgaataattttacaagtgtcaaaatttttagctcatctaaaaataatattttataattttttctatacattattttatcactctaatttttaaaagatgagtactaccgtcaatttcctgttacaacctcttagtcaacctctatattcgaaaatacatgttggtatattttttttcatggggtattcgtaatgcttacaacatcatccctgtaatttcttaaaaaattttgaatagtttacagtgccgaaaatacgtttgaaattttttgaatgcgcgtgataaacgggaatatcaggaactttattttcggtattgtaaactattcggaatttttcaaaaatttacagggatgatattgtaacgaataccgctatgaaaaaaaattaaaaaaaaatattttggcattgattccggacgtagagactgactaagaggttgtaataggaggttataattagctttcctttttttttaaaaaaaaattactctaataataagtatttcttaaatttactactataatctcaaaatcaagatcccttattaaaaattagtatctcacactttattaaactaatcaaaatttgacacatcaactaatctaatttatattaaatatgttaactacttttgttgactcatttagaggtttagtttttccataaataaaaaattagttgacgggtcaaattttgattagtttaacacaatatgggacaccactttttaaccgaagatcttgattcataatctcatacattattaattaatattattcattttacttttattggaaaaagaaatatgacatcaatatcaaattttagcatcaatattattttctaagagtatcttcaatgtggtcacatatacaatgtggtcatcatttttaatataattttatcagtaccattatctatatttgacaacactctcatgtgacattatcgttttctttttctttctttttttttttcaaaaaaaaattactatatgtattattttatagtatttaataaaatttaattatttacttagcagcacgtgggatcatgatgggtaacttttggagttgtcaattattagagtaatttttatatgaaaagttgtcaaatcttagagcatctccaatggtaaacctttagaggatgtttggtgaggtggacatattatgtggcaaaatattgagatgttataccattggagagaagaaaatgccattttagaaatttgcaaagatgctatgttgtagcattgatactattcattatttttt

SEQ ID NO: 316228 - DNA, 665 bp, Cannabis indica
gtgagatattaagaaactaagaaaaaggaaactaagaaaagaggaatgttaattacaattaatggtaataaataaaagatttggacatccacataattattaatatttataacactattagctatgtaacctccgtttttaaaaatttagctacatgaactaaccttcactttaaacaccattttattaatttacattttatatttcttttaaattaaaataggaaaaaaaaaaaaaccattcaggttggggtgttcttaggtgtctttagctcttcatttactttttttttttaaatttctcaaaatcttataaattttttccaaatcaatagagaaattaatttgtaacacataagatcgacattgttatcaaagggaaatttcactatttgcccttaataaaatacctcatatcaaaatttataccccttattaatttgtacaaaacaattccactattttcaaattcgacccaaaatacgccttccatttaattttccctctctctctttccctctctctctctgtctttccatttctctctccgtctttccctcttcgtccctgcccacgaaacgaaagaacccaacaacccaacccaacccgaccacgaccacgccgaacccaacaacccacgccaacgacgacccaaccatctctcta

SEQ ID NO: 316229 - DNA, 2049 bp, Cannabis indica
ttaaatgattacaaaggtatttttgtcttaacccatcttttaaaaattgcatgttttgggtttttagtggtttggaactccgaggcatatcattagcattaaatgctctgactgttctcttttgcaatgtttccatccattagattagatttcttttgatctaatgctgatctataacagggtataaaaattaaaagtatcagttcattttgccatttttgcactttagatcttcaaatttcttctgcaaattgcgattatctcccatttcaacttgcatgccctcaatgtcattgacttatttcttgcgtatttcatcagattacattttcaacctcaaaaacttttagaacccatcatttcaatcatcaacatctcaattgcgaagtccttcattgcctagaaatcttcatcaagacagtaagtggctcaatccctccttcccattatttcgcttttatgtatttgtagttttatcttcatgattgattgtttcctttatctgctttgtttgattattttttaggtaatttttattttatttgtctggacaattttagggttaaggaaaattcttaggttattagattcatagatttttgggttaggttgtatttaatattccgaaaattgggattacacttgttcaaaagtatgacccaatttattcgagaaattaaaaccccatacttcttagaaattgattgtcctaaaaattttgcccttccactcgaatccaaacttatgtacttaaaaccattcttgagataaacgatgccaaaattagggatcatctaataaaaaccaatcaggatgagtcttcaagtcgctaaaggaaatttttgtagaaaataactgagggtaaacgtcattttctacgagatgcagcttggcctgaaccccaaaattaatccttctattcctttagcgagacctttgcttttacctcgagtcactattaatttttcaccaggtgacttagatttcgaaatcatgacttcacaagttcgaaaaatcaaagacccctcaaaatcccacagtcacctttgaggcagaacttattgaatccaaagttaggtcaataggagcttacgtgggggaggtattaaaatcttgtgtcatcaaatatgaatgaggatgccgagttaggtccgttgctaaaggggaatttagttgttttccccctgaaaggataattcgagaagaagggtgtagcaccagcgaaccatctagtataggcacttagagcgtagagcatataaaggctggagcattacttcctctcaaagattactataaggaattctacaattaccttgaaattgcccctgtccaattaattccaacctcctatagaattttggcatgtctgaaggtcttataccacattttggggtgagagtgcccaactccatttgaaattttatacttctactcaataaaggcccaccccgcaacggaagcgaggggcatgtggattttattatctcgagacccacacgaatgatcataggatcatagtgaggcagcccaacaaaactgagttcaaagatgatttcttctagacgtctggcctcgccccaattaatataaccgcattttgcatcatatgtaagtatttctgtctcaacacttggttttgagttttcaatttagtaactgttgacatttgcttatttttcttattgtattgacatcaatttcgaaaagacctatcccaactcctgagatggaagaacgacacagaactctcttaggtcttctgttcggactacgatcaagtaattttttactaaacgaggccaacctgaagacatgcaatctccttggcagctagcaatctacttgtgacattaaaatccaaaatactccaagtggcaataggtttcagtccttgttgacgaggaagacagggattatgtggcacagatccactacttgaagaaagtatcccctcgagaagctaaagagaagcatctcgaggtataattgcggatggtctcctgctatgtttagagccaatcttaccaagttagttaggtttaagga

SEQ ID NO: 316230 - DNA, 1409 bp, Cannabis indica
gtcttttgtctatttaccaatttatttttcagctaagtttttgtgttttctaatttgtactaaaggaacttcatgatatgtgctaaccctataggtattcattaagttgcttttttgaaaaaattgaggtttgtttctttcttcacaacatgaagtcattgatactagtacttatagtttttgttctaatgatgtacttaacacaccttatgttcatttgtagtctaagggagaatgcacaaaatcaaggtaatgcaaagtagagaattatttatttaggaatgtgttgtgatcacttgagtaattagagtcaagcattttacaatttgaattcttaggccaaaaagatgtgtttcctctacaataagttaccatattttttctgcctgtttgttgttgtgttggtatactgtttgataagccaattctcatcttttgataacattttctttaattatgtatttaaaaaactaatttttttatacacataaaataaagacaaaactaatttggtgctatagtcccacaataataactataggatgctaatgttgctgttacatattcttattgcagccataagaaaacaattttgaatttatattatttgaatcacttgttggaccaatagtgagtggaaaaggggagacttttctactaaatgaaatgctaagcccttaaaaaaattattcatttaatttagtgaactttattttcaaggctatatatggagacatttcttacccttaaaaatatcaccacttatctattttggtatttgttgcaggttttgttttggaaaagaggggactagggaagagagaagcttccagcatgattgaagagaattcaaactattgggaaataaatgcaaagtttaaaaacttaagaacatgaaaaccttccctcgcaccaggatacatttgttcgttcttttcactagcttgctgaaaagttgtaagtagtataatgtcttattttatgtgtacaaagaattcttaagttttctatattttcaaattatagattaaatgttactacttttgttataatacatgagtaacaagttttatgattattgttatcttttgcatatgtaattagtttatatttagtttacgtacaatggaatttaagtattatgatcgattctattaacaattttggtattgtgtgattagttaatagaatcgattactaattttatgtaagttttacaaatgttattttaaatttttttgtattatgtatttacttttatatagaattataaaatttgataatgcatatgaggaaaattgcatgaaaaaattgcaattttctcttacttatatttgtgtcattttataagcgacgcaataggtaaaaaaaacaaaaaatttcgtaatagatatgatatttttaaaccg

SEQ ID NO: 316231 - DNA, 1192 bp, Cannabis indica
gggaaattagtttcatcacgatcgtaaagttttatattttatatatgtttatttgttaacgggagatcaaacctaatcgttaaattaacagaatattttttaagtatattctgttaaactaaaaaatgccgttagataaacactttttattgaagaaagaattacttatatgtatgtcgtgtgcattgaattcataagttgttaatctaattaaaaaactcctaatccaccatcacatatgtcatcactaattaagagcaactttcaattgtattacttgataaaatctctttgtaataagggcatttagttcataattcatgagtttttttttttcttttttttttttggtatgggatgactcatgagttataataacttttataaaaaaaaaatgataacctaataatagaaatacataattataaaagttcaatacaaaaagaaaaatagctacattataattttacatacaaattttttaattagtgagtgctattagttgaaaaaaaaaaagctatacgatccaaaacttaataccacatttttagcactattttgtttcacctaaactaaacttttataaaatatattaacaaggaaatactatttcacaatattcactcatcaatctacaaatgagtgcaacacatttttaaattatttcaatataaaattataaattgtttacttatcctacaataatcaatataatcacccaaaatacatttatctaatatcttcttaattcacttacttttttattttttattctataaatattgattgatgcattaattaattaagaaaaaatataataattaattaatagtttattttttttaaaaaaaatatatagttgtataactcaaatagcataaccatcacatatttcagttcttatttttttacgacttatatattttttaaagcattttttttttcataacttatatttattaataaaaaaaaaaaaacaaaaataatctctaaactattgtaacatatttaaattttttctttaaatatcttcaaactatctatctgtctatatctatatacataaagcagagatatgaggcggtaactagcattctaaaatcactctaataaatacatctaataattatatccttaattctctcacttttaattttgattaaagtaaaatcatttaaaatacatctattga

SEQ ID NO: 316232 - DNA, 1238 bp, Cannabis indica
tttttttgtacagccctagttgctagggttcaagtcgaacccgctcaaaatgttcagtcctaatttttatgactattgatttatttttcatgaaagatttttataaataaattaaagtttattgatggagaaaaaattaatcataatctggataattattaataaagcaaatgaaaaataatatgaaattaatacatgaaataaaaattttaatgataagaatttgaaattaatttttatgaaaaataaaatttcaataaattttgataacattaataattttgtcaaggtctaaattttttttgagtaatttcagtataaatatctaaatttagctctcagttgtaaataattaaaaataatacataagttataattctgaaacttctgtaagtagtggacgttaagttttaagtaattaccacgtgacaattcttgattggtccatgtcatttttatttataccaataaaaaaaatgacacgtgaataataatttgacattgaacggctaagtacttacagaattacagaaaaataatttaagtatttatttgcaatcgataattaaatttaagtacttataccgcaaattatttatttatttttttttttaagcataaatccgtatttgccattgccattatcttgttaatatgccattacatcgtgcaccatctttttattttttatttttttttacatgtaaataatcataatttaaagagtatgttgaaatgtagatctaacactaagactcacatcataagagccacatctttaaaaaatagctaaacattgataaaagatcactccattagctgctctatatttactttacagaacgctctgttcgctacatggagcgatacagtgttcatcttttatttattattttaataatttaaatgccaatttttcttcttctctactctttcattttctcattgtaaaatcatttattagcatatttgataaattaaacaaaaataatatttgtagtatttttaacaataattttagttgtgtattcattattttcgaaaatataattatatttttttaagtgtgaaaaggctttcaaaagcagattctattcacttttgattttatttatgaataatataattttcttatttagatattatgtatcttgtatttagtaaattcttaatcatattatttcatttttatctcattttttaacctaagtaaaccatgtatatctgtgtgtgtaaaa

SEQ ID NO: 316233 - DNA, 1225 bp, Cannabis indica
tgttaaatgacaaaatagactttttggtttgttaaatgacagaatggaccatgtattttccaaaataatacaaataggatcctgaactgattttttgtcaaaataaaatttaataataatccgatctaaaggtgttatgacaaaactgtttatattttttgtatctgttcgtgttaggaattgtcttcaagttggttatattaaaaaacagttgtcaaaaataatgcttatatggtcctatttttaccattttggaaaatacagggtttattttatcatttaataaaacaaaaggtccaatcagcaacttttgcaaaacacaaatgtccaaaatgatatttactctaaaaaataataaaaaattaacaataaaataacaagagtataacataaaaatatgtaaaaagtcgtattttatataaataaaatcttaaacaatatttaaaattctgtacaattgtatttttgttattttttcgtattatttttaaataattcctaatgtatatattcgtgctacacatacatttaattaattaatgacatatatattatgtatatttcaatcatgattaaaataattcactaacaataaatcatccctacacatagttttggtggtctactttcaactctataggaattacctttaaattttttttacatgaaactcatcttatggtggtctttttttcttgggtgaaaagacttgcatggaaaaaatattcaattcgagagatattaagaaatagctatatataatatatatattaatggacaataatgtataacattaacatcctatagctagatatacatccatatatcacttgtcaaaagtactcatgaggagtcttaattattatagatatgttataaaaaccaatcaaacattctttttatgatcatcttgtattgtaattttttttttgtattaagacaatgatagggtgagtatatatgcatgtggacctttccacacatcaatcgaaatataaatataccatgtaagtatacctatataagcactgtactagtactagtacacacaaacaattaatattatcattatcaaatggttaattagtaattttttctcttaaactttgacatgtactaaatcgtgccctctgaatttttttggccgttaaaaattcccctcgaactattgaaattgtaaatttaaggactttgtctaatttagtaaaaattactaatatggatg

SEQ ID NO: 316234 - DNA, 1037 bp, Cannabis indica
attcaaacttttactcaacaattgtatatttgccttggggtcttttcaaagcatccctagaagagggtgctttagtttttctttttcttttggtaatatgatttttcgttagaatattgttattgggcacttgtggtgtctaacatttctagacatgtcgttttgcaattgaatagcgatacttcgtaaaagttattacattaaattatatgagatttaatatttagttagacttatagtgatatttacacattggaaggtgctaggtactacttatacctttaagcattttctcttttggttaagaataatctggcttcaacgccaatgcgatggagatcttatcaagcaaccaatatcattcaacttaataaaattatttgtgttactgttaatcttttattataatttctaagttaacatctatacttgaaaacacatatataacggtcttcgttataattacaatattatatttgtaaattttgtatagtttaccgtatctaaagtgggtatgaaattttttgaacatattgaaatattaaaaattctatttttgtggtaaactatttagaatttttaaaaaatttacaagaataatattgtaactataacgaataccgatattataaaaacaattttttttaaaaaaatattgcggtatgtgattttggacataaaaattgtaataagaagttataattaacactcttcttaaacttataagtaaattgtgtaattttcacacctattccaataaattacattgataatttgtgaatcaaaaaagtatatttacatccaatatgatcatgtgagtgaatcatatgcacgttgttatgtgcttggttttgtgataaagaaaacttggaatattattattaataacctaattaacataaatacataggaatattaaatgatcccattttgaggagaaactcactaacacaacacacctttcttatttttgcgtgtacaagacaccaaatattactcatgacattttctacctatatatatatgtgtgtttatat

SEQ ID NO: 316235 - DNA, 523 bp, Cannabis indica
ctacaagtcgtattcagctttgaattaggccatcaccataagcccacgtgaagaaatctttttcttatgcttcagactaggggcgggccgcgacatgcctttccttgggtcgcagcccctatgccatcttcacacgattatgcatgctgctcatgatatgggccgcgacataggaatgagcatatcgcggcccgtgtataatttccccacgtggtcaacgcgtttaatcttttttcctaggcaggatcccaatttttcacagtgatattttatgtgatcttttatcttttttttttttcatctttttcctttgatatttttctaatcttcttctgttttaaatctacaaaaataaaagataacaagcgtaaaattgctccaaacacgagtaaaattaatactaaaaataacgtaacagcgacaacattgaaggagtggccaactccaaataactaaggagccacaagagaggcaagcatattgagagaaagtaccatctactaaggagtacagtagagagagg

SEQ ID NO: 316236 - DNA, 1436 bp, Cannabis indica
tttttttatctataagggccaaagacaaaaagaaattaaaataagtccaacaaaatatcaccgaaaaagtaaaagcaaaggaaagtgaacacaaaacttaagcctaataaagcttgatcaaggtggataattatttagaaatttcttgttgaaactcctccattgcagtcaagcgattgttcatcaaagtcacttcctccttgacttcttggacatctgcaggaacctgcagcaactaaagagggagttgcacaaatagatgccttggggcacttggggaaggccccatcaaaatactttgagggttgaaaattattccagtaaggggatgctcaagtgtctcattcaaaaagaccatattcttctgagaggaaagaaccttatagattagattaggaaaaataagcttatggtttcattttacctcgacagaaggaaacaattttctccacgataaaagaagccaagttaatggttgctcttgtagtgattcaataaagaagaaaggtcaaatcttaagacacttttatcttgttggagtttggaaatcaattggtaagagcaaaccgcattagagaagcatggccataagtgagatgagtaatgtggaaactatgaatattaggccattcaacttgttcaccagtgatttcagagagaattcaatcacgatccatagaaactttagcactcttaacaccttttggcaatttcaaggcttcgacaatatcatcttcagaggaagaaaactaattcgtgtgacatagactttgccaaagaactcaaatttttatcaagcaattcatcaatcaattagcataaaatttcttaactatgccatcaatataaccatcaaaaccagttaatgtgtcctcccaatttctataatgaacatacttcacaatgccataaactcgatgagcacttagatcaaaattcctctcatttttatacttacgagtagcatataatttccaatcacgttgattttcattataaaaaaaaatctagaattgatagtttgagaggaagagaggttaccagaggaagagcccttcataggttatttccccttttttatggctgaagctttggctgcagaagcagaacgaggagttgttgttgcagaagctttgatcccatacctgtatttcaactttccttttatgtccatcggtgttgcctttgtcattatgttcataaacttcagttttatgcattctccaatcagtttcgatgttgcttgcctttggtcttcatgcctaatatttatggggcatgtgtggatttttgagaacctcctgattatgaatgtgtttgttgggccatttctggatactcgtagagaccaattgcagctttcgtaaacactattcaaactgtactcttgagagcacgacttccacactttgtactgaaagttgtttttgattgcg

SEQ ID NO: 316237 - DNA, 739 bp, Cannabis indica
tgatcacatgggtaagtctagaatcttatttcttagtgggatgtatatttgagaaaatagagtagcgggattgagcgggtttatggaatttgaccattttacccctagccttgaaaatacctaagttataagtttaggggcattttattaaattgccaaaagaagagacttggtggctgtcctagatgatgacacctagcaagtatgatttcagcaaaagattaatttgattaatctttattcactttaggataaataaaggaaaataggaaaattaaggaaaaacacaaaatcaagagaacccttttctctctctctcttcttgtttgtgcaccacaaaacaaagaaggaactcagcaacttttcatctagttttctggggattcaaccattgaatcaagagtaattggagtaggtaagctctagaacttctaaccttgagtttttaaagctttgtattggttttaacttgtgatttttgaaatgaagagctattaggatttaggggttgtgtagtctgatttctaagttgattttatgttgattttaaactttggatactagttttggtttatggggatagaattgagcaatcttgagcttagaaatccaaattttgatcttcaatggcatgtttggtttttgtgtatttttctgggattttctggttgaaatatatagtgtataccctatttaggtactctggtaaagttgggaggctaagttggtacatggtttt

SEQ ID NO: 316238 - DNA, 1544 bp, Cannabis indica
aactttccaaacaaggaaaaaggcaactacaatccgaatttataaggtaagaaatcgaatatgaatgcacaacaatcctaccataaatggaaaaattattttgtcaactaacttgccaaaaaaggactttacaaaattaaaatacaaaaggtaatttataaataaatataatataaaaattgttattccaaataattattgcaaaaattataaattaaaataaaaaaattgtcaaaataacctatcaacttaaattattttataaataaatgtaatttagaagtaattgttacaaaaattactactaaataactaatgaaaaatttaattgagcaagactaaattctttagtcacccatagaaataatgcaacattaatttcaagacaaactaaagtggaacaaatagtaaactatatataggctataacacaacacgcacaaaagtttctaaaccatgtggaatttttgtttttaataaaatttactaatgaatcaaatcattctatgatatatggaattaaaaattggaaaaaatagaaaaattgagaaaatagaaactttgaaagaaagctcttatgtaatgccccatcaactctcaataagtttcctttatatataaaatatagatatagattgaatcaataataatattaacatgtaaaaatatagtaaggcaagttcgttttagtatttctctaataataataataagagaaatttgcggctaaacctctttatgtttcagtttgtatacacataaccctatttttttttagtggtgaaaccccctttagtttagttctatttgtaaacctaaaataacagttaaattttctaattaagtgccaattaggacgccaactaagactgtcaccatgtacatctatgtacatattgcatattcttgttggtaccaaatttttttttaattatttcaatcttttttcacaaatatttaaataataaaaaatatgtataaccctaaataaatattttaaattaaaaaaaaaactaaataaataaatataaccctaaaatctaaatttcaatcttcgcgcttctttcttttgctcttcctcttcttcgcaggtgactggcagctagcggcggaggacggcgaaggacggatgatcaaggggaagagatgggattgagatttctgggccttagggaagcctatggtgctttgttcatctcttgaccgagaatcgtgaaggggagaacaagaaaagacgcgacagagtgagagtatctctagacatcaaatgtgtttagctccacgctctgaaaaccttcataattatgatttggagtctccgagtctcgggacaaccgatggaaaagtccccttccgtggtgtatgataccgcccttctctatgatttattggagttgcagacacttcagggaagagtgtctcccgtctgcctcccaaccggtagcttggtggacatgattccacatcaaaattgggccattcaagacatctgccaatgtgatcactgggggtcctgcagccccttgttggaattattttaccag

SEQ ID NO: 316239 - DNA, 560 bp, Cannabis indica
ttaataataatatattagaaaattatatttttaagtaattatttattataatactaaaaaaaattaaattaatcacgcgaagagcgattatattacataattttactaatatataaagaaaaaaatttttgtcaaattgttaaaccagagttagaatctattgcaagatcacaattaagggtgttcaaaaatttatttgactaatctaatccacattcaatatgcaaaatagagacgaatagataattcacattagtgtgttagataaaaaaaatttaaagtttgtatttgtgtggattaatatacattcttaataaaaattaaaaattaaaaaaaaaaaaatctgaactaatcaagtctgcacttgtttttatatttatttattatcatgaaaattagaaacgtatataaaaagtttaataaattaaaaaaaaaaacattgtaaattaaaataaatgtcataagcatcttcaaccttaacactaaattacactaacattaaatttagtgtcaaaaactctttttactcttgttgaaaatcatggggttctatctcaaaa

SEQ ID NO: 316240 - DNA, 1954 bp, Cannabis indica
gtgaagctcgtagaggattttcgagcgttgatcaagattgtcagatgttaaaagcgagatatcaataggtggggattgaatattcagaatcattagagtctactacttcttcatcaggattcggtttcacagcaaattcatatttagatgtaattgaagaaattgcatccatatttaaattaaaacttaattaataagtttatagattagtgagagaggaagaaaggaagagaactctaaagagaaatgtgagcataaacttaatcatttagcaagttacaatttatataggctatataatataaattatatttttttttcttttctcaaataggataaataaattttatttggtaccatttattaatataaaaatatattagaacacattttctttttgttatattacaagtttcttaacattttatttaactaaaacgaaaattatttttaaaattgttactttaattttaaaatataaattacttcattacttcattactaagaaaagaacagcacataatgtcaatctaattggatctgatgcttttccctttagtggtttttttctttttttcctttttaattgtctctcagcttatttggataatggacactttgttggtttaatatttaattacttttttaaaacacacacatatatttatataggaagatcaaatataaaagtacatataaactctttagatatattcccacaagtctttttcataaatcataaagactaattaagtgatttcatccttgtaatcttataggccataagatgtatattatatatataaaagcatatatagtgcaaaatgcttgttgggaataaagtctttatataaataaaggaggaatttgtagtgaaattttttttttgttttaattttatatatataattttttttttttgtggcgaatttttcttaagtttatttttttttgtaaatttaaggtgtcagttaaatattaccgttaaatactagtatcgacttcgaggttttaattgtactactttttcttatataaaattctaattttcgaatattataaaaatttgcaagagacctattatgattacaataatcgtgatcataggaaaaaaaaactagaattataattgatttatgtacctaaaataaggttatacttatacttatatttaaatatataagtactcccactataatatattataatatatgcctaatatatttaatactaattaggtatagagaattattaagggataccactactactacccaacaccactttatatagaatatatattattattagtggaatttagtataaaatatcatatattttataaaagtagaatatgtaaaaagtgaaaccccaatttctttaataatatgcctattttaatgttcctcatagaacacacttaaaatgataaacctacttttaaaaacataacttaatattaggtcccacggttttgtttttaggaatcttctcaaaagtctcatactaataaaataggtggaatacttatattcaaggcaactcttgcttattcttctgttgtgggacttgggttaatacctactagagttagtctcacattgcttatggaaataaattgtcatatataagatgaataagttagtcttcctattaccaattagttttgagatggaaccacattcacattatcctaaattctaacatggtatcatagccacttataatctgcctcccctttaacctccatttgggatctttcggccaatgtgttctaatttttaatgttggggtctttgacctgttttaaaatccataaatttctcgacgtgtatagccacaaatttctcgatatttggccttgtgggattctttcaaatgtcacgttcgaccttgtggtatcttaaaggtcgtttgttatacacacttttcaggctcaaacgtgaggacggtg

SEQ ID NO: 316241 - DNA, 833 bp, Cannabis indica
atcaattacattgatttttaatttcaaattaaatgtgatgataatgaatattctaaatgtggttagttttcgatttgccgaattattcatttctcaatttgattttctgaattaattaattgtcataatattttgataattaatgtggtgcaaatactaatagagagtatcacacctataaatatagagtaccgattctcgagcttctcactcattctgtacaaactaaaaattctatctaagagagtagaaagagcttggaagtgcgattacccaattcaaagcaacacaagattgaagctcaaaattattaatgactagatatttcgatctctttcgtccttcgcgtatgcattcgatatgtctttattatttcgctttgcaaatcgatcctatataattatttctaacatgtaatctcattatacatcacttttaaaagaaattaaaaattataaaagtaattttaatttatattcattacaccaaaccaaatatgattttaggtatgatattgatatctttgtgttgttttataagtacataatagtaaaaaaaaattacatggagtacttatatttaaataacacaacaaagatgatacaccttaacttcaagaaacgaactgtatcacattatattattgtttaattgataaaaaaatataattaacatacaaattttaacagagaatacatgccacctagtatatataaacataggcagctgattttgtgcccaaatgtgcaaaacacggattggaatccgtgtacggcaggtaggtcccacgttagaataattataatttttaattatttaattaagttggtaac

SEQ ID NO: 316242 - DNA, 1087 bp, Cannabis indica
gaaattacttccatttgttctctaatttaggcttgaatttgatcttgtccacgacagtgaccaaatccttagaaatcaaaatgcaataaataatgttttagacaatgtgcattacaaagtaaaatggaaacatcattatataaagagaaacacgaaagcaaagaaaaaagtaaaatgcatgttgtttggtgttataaaggaaaacatatgcaagaattgtacgttaaagtgccagggaaagaactgtagagaagacttcacaaaaaaaaaattgtgttcagtacaaatcttgctccatatacctttcgacttaaagaactcatctccatcactttccttaccactctcttcttcattatttgatgtagtcttcccatatacaagttccataaggctagtagtttgtctcaagttaattctttctattatagactttctccatcttgaaatatttcccatgtcctctaaaattacaactaaaatattgcagaaagtgataatatattaagcagcccgacttacaatttcactaatttcaataaacaaaacagcatactaatcaatcattttctataaagttaatgatcatggaagaatttacacacttttaataacgagtaccacttctctctctcttcgttccttgcaactctcccctgagttggtgccatggcgaaaatgaggtccaagactatgggaaagtcgaaaatttcgaacaagaaatccaaaaagaaaggttcgaattcatctgctgatgtaaggaagaccaaatccatggaggaaatacttggtgttgaaccagtggaattcttggatgaggaagatgacagagcaggggtagatttgttgcttcatgatcagcctccggtatctccggattctactttgagattattgaagcgacaagatgagatagttgctgattttggctatttcctagctgcgaatagggatgccaaaattctatctcgaagggacttaaagctacgcctctgattcttcgagcagaaccggtgatgcgtaacttggaatcggattttaacagttcgagaaggaggggaaagtgaagatcacattggatgacata

SEQ ID NO: 316243 - DNA, 2390 bp, Cannabis indica
tcctatcaaaacctctagataatgaggacctaggtgtgtacttggctatcacaaagcatgatgtgagttaagttttgataggagaagaagatggtatccaacatctagtatactacatcagtaaaagattaatcgacgctgaaagtcgatacacactcatggagaaactaacatactatttaatcttagcatcaagaaagctaaggttgtacttccaagatcacccaataagggtgtacactaaccaaccattgcgataggtttatagaaacctgaagagtctggctgactactcaagagggccatcgagcttggccaatttgagatcacataccaacttagagtggcaataaaaggccaatctcttgccgactttgtggctgaatgtacaagcatatctcctaaaatctctcaagattttggagaaaagcaagagccagagaaaaagcaagagcaagagcagcaaccaaaacttgaagaatcaacatggaaattacatgttgatggaagctccactgatcaactgtccgatgcaggcattgccctcattacacctgggggcaatagctacatggtgcaatcaagtttggcttcaaaccctctaaaaatgaggctaagtatgaggccataattgctggccttaagctggcgcatgaagtacaagctgaccacctggacatatacaacgactatcagttagtcataaatcaagtcttaggtgagtatgtagcccgaggtgaaagaatgatagcctatttgagcgaaatccaagacttcttaagtcggctcaaaggctatacaatgaggtaggtccccacaaaagagaatgtaacaggtgatacactcgctcgtctagtgagcaacaccattattgataaggcaaatttggtgcccatatagttcttaaaagaacgaagcattaccattctagaagaggttgacatgttggatgacaacccaacttggatgacacctatagcagcttaactccaaactggagccttgcctgagaacaaaaacgaggcaagaaagatgagaagaaaagctgctaggtacctaatcttagacggagtaatgtatatatgagacttctcaatgccgctcctaaggtgtgtcactaagacacaagtcaagcaattattgatagaagtgcatgaaggcttctatggcattcgtgcgagggggcaaagcctatccaaaatgatactctgacatgggacttttggccaaccatgatcgaagattcaatggactatgtcaaaaaatgtgataagtaccaaagattctcaaatatctcgaaagctccacccgagctcacattgatgtggtctccttggccctttgctatatgggaatagacctcattggtcaactcccaaagagaaaaggaggtgtgcaatatgtcgtagtcgcagttgactactttaccaagtggacagaagctaaacccctggcaacaataacttccaagaaagtcctcgactttgttctcaagaacatcatatgtcagtttggacttccacagaagattgtgtcagataattgaaagcaatttgacagtgacatgttagaatgatttttaaaatagacacgacattatcaaaagcttctctgtcgttgcccatgctcaaatgaatgggaaggtataagctgtggataagaccctctaggatactttgaaaatgagtctagaagaggcaaaaggcaattggcctaagttgctcccagaggtattctggtcacacaggaccactgagaagatggccatcaagacaacatcatttgctttagcttatggctatgatgcaatattgcccgtagagctggtgccatcgtctcataggaggataacatatgacaaagaagtaaacaacaccttgttggcagaatcccttgacgaaatataagaaagaagagaccaagccaacctcaagttgcaggcttgccagcagaaggttgcaaggcacttcaacaaacaagtcaaggagaggaaattcttcttagaagacttagtgctctgaagagtgttcttgaatacaaaagatcccgcaacatgagtgtttggaccaaacttgaaaggcccttaccaaattacagaaataacaagtaagggtgcctacaagcttggcgagtacaattagaacatggagttatttctcctaccaaggtactggaatggagaatatctaaaaaaaaattacttgtgaccaacttgtaagaacactacttttcagtagtagttctagcaactcaattataagagttaatttagaaagagctaagtctccatgactcttcagtgatggcttttgcctggcatgtctggcaggggtagccacttgagttctagaagcagaatttttattttgtaagcttttagaatcaataaa

SEQ ID NO: 316244 - DNA, 399 bp, Cannabis indica
tccatcgcatgaaaccatttccgatcattaagagtagcaataatggatttaggagttattgaagccatcataacttttggcttcctaatacctaacttagctcttgttctcattggatgcatattgacacttggttaagcttattgtgtagcaacttgatcaacaagagcagcatctgatgcaacatgagatggatcagaattatttgagtaagtagcatgaacaaatgcaggtggtgacatgctgtcgtggaatttagatgcatttgaaatattagcagtaataggagttggatatattttaccaggatctagatttactaacaagtatgtttcattaacatcctaatatgaattctaaaacaatgaaatagacaaatataaagtttagtaaacctta

SEQ ID NO: 316245 - DNA, 826 bp, Cannabis indica
acaagagaacagggcggggagttcttacagagtctgggcatcggtagcaaggccggaaagaccgaggtaaagcctttcgtggactttgtaaatcttctcgaaatcagtggcgattgtttggagctgaactccgagtctccgatcgctggcgatggcgaagcagttcttgcccaccatggcaaccagggcacttccattgtactcgaagatctgttcttccacaaaattataatcagagatagataaatacatatacacatcgtatacacatacaaatcaaattttagccctaaaatcacagaatgagagaaatgcatagcggaacttaccgacatgagagaaaattagggtttggttgtagttgaaattggtcagagtgaggtggtgtttgcagtgtcgatcgctttttcagagtaaatcggtggcttggggctcaatccaagctttttgagactcttttctttagtttcttctctattttccttcttctttgctcttagataataatgggcttgggccgtttagtttattgggctgggctctcattaatgctaactatgatcggaaaatttcaaattttttgggggaaaaattatgagtttcttcttggggaaagttgaaaaatacctcttttattaatcaattaactaaatttgcctctaattttatatttatttgaaacatacctctttttatgtgtattgtacccaaaatacccacacataagagagtcacatggagagtatcttgaaattacaggggcaaaattggtacaatgttaaggtaaaaataatagactttaaaaaagagggtaaaaatgaaagag

SEQ ID NO: 316246 - DNA, 987 bp, Cannabis indica
gtttcatgcaaattttataacccgatctttatgtcgggttggaaaatatatagtataaaccgactaaaccgatcgatgtacagccctagtttatactctttacaaacttaaaatttttgatatgctgctatttaccctcttaaaagtaatgctaacctattttgctaattaaagtttagtttttatgctaggtattacttcttaattcaaaaaatgaatgaatcaattcataaaactaacgttgcataatcaataattaagatattatgtggatgactagatattatgtggatggcaattttctcaatgcccaacttgggtctaatcgaagtttcatttggcggagtattgtggaagctcaagaccttgttcatgcaggagcccgttggtgtgttggtaatgggcattcaatttcagttttgaaggatccatggctttcaaatgagaccaatccttgggtggtttcaactcaccctagtcttgttgatgtcaccatggcaaacctgcttactatggattggtcaggatgggatttggagatcattgctgacctgtttgaggctagggatcagtctctaatctgtggtatccctctgtccgatactgctgcatctgattaactgttttggtcttttgaaaattcaggtgtgtactctgtaaagtcagcatataatttcctgcagaagcaaaaaagtaactggtttgatgaagagattgctactttctggagtaaattatggaagctgaaacttccttctaaggttagtaatctgttatggcgtgcgtgtatacaatgccttcctacgttggttcagctcaaaaccaagagagtagatgttaatttactttgtcccatctgtatggaagaagaggagagtgtcctgcactatttggtgacttgccgtgttgtcaaactgtgttggaatcgggttggtatcggtacggtggtgactcctggatctggttttttggactggtgctggggtg

SEQ ID NO: 316247 - DNA, 877 bp, Cannabis indica
gacttacttagagctgcaaatcgaggtagggttgcaatcgggcaggcttgatcggggtttcgagacttgggttttacaaactattacactaaagccacccatattaggactaggtttttggtttgggcatgggtgtggttaagtgtgggtatgggtctaggtgtgagtcgggttggattgattgggtttgactaaggttgggttcgagttttgagttgaggaaaacacttaccaaacatgcctgttacagtgaatggtgagaaggggctttgcttgtgatgacagtgagttgaggagactgcgtgagatagtgaatgggtgaaatctaaggagagattgagacattgagagtgagacggtgagatcgagaggcctagagtgagtagataggtgttgtactcatatttcgagcagtaaatatggttgcgacacgtgtacaagaacccgaaaataagtaggctcgcatgttaagagaattaatgtgttattttaatgcatttcggataatacccacatgacttagaatttaagtctttctttagtccaaaggagtaagtcaaatttactgatcataaagtagtaggcaagcaagacgaaagacctatactatagcctcctcgggatacactgtacatacaaaaaatggcctctagagactcgtattaataaagatgagttcagcgagaatagaaaagctaagctggttgcaagattgaatgttttcatcacgagaagcacaagtgacacaatttgaaagagtttgcttataaggattatacaaaaagcatcaaaaacctcatttaagataaattcctacgagaagaatgttcaaagagtcattatattatttttttagagacaattcaatataatgatt

SEQ ID NO: 316248 - DNA, 2096 bp, Cannabis indica
tttgggagagccttcttcttcttcttgcttggcctctcctgctctgtcacaccagccttgcgtagctttgcctttttcttcatctccttcacaggctttggcataaattcctctggaagagtttgtacttaacatagttggcctcagtggcaagtagggtgatgtttcgagcagcatctgccagttgaagaatatttatgccctttccctgagtcacaatgtgaaaggagggcgacaatacgagggaatctgttggaaccgagtgtggatggtatccatgccctgaacaaagtagtactcgcccacaaaatgtcctattttgcggacctcggtgtccacagtgcccgtcacccatttctcatccagttgggagaagtagaaatacccgaacctgctgtgcttgggagttgacttcaggtcaaaaaaactagttgatttcgtgcgcagatggctcgccccatccttgcggggcgtaaatgatgaatagggcgaatagatatttaatgcccttcaaagtgaactgggtagggcagaggtggtagtagttcacaatctttttaaagtatggaagcaaaggcagcattgcaccctgcttggtatgagtgccccactaggcgcagtacccctgccttgaactagttgcccggtgatttggatagggaaagaagcattcgacattccccaagtagtcgtgcttctccaaattctttatcttggcttgggttactatagatggaggagaaacccaccgagctcctacggaaccttgtcttctcttaggaaaagcctcggtgaattcctaaataacatagtcttcaccctccactaggacttcactagccttagacacgagttccacttcctcgttgaatccccaaaaaggcaatccccaagcaactccctcctcctccgcttcagatggagtatcatgctagacctcgctctaatccaccacctcttagacttcagcgtccccctaattgtcttcctcctcagtagtaggttgggcctgctcagcactcggcattgtggcaagctgagccatgtgaggatcggtcaaagaggatctccgtactgtttgtttggtgtatgccatcatcctgtccctgaacggagcttgattggtatgcgtgacaatggtcacagcaaaagtggctataggcgtacctaaagcagcaaaacttgggtgacctacgagtatagtgtcaactatatccggtcgaacaatgtatgtccaattggacagcaaatatcgcatccaccccttcttgagctcccacataatacattcgtagctttcacttgcaatctgaccgagataaaaatggtattgcaccttgggttctggagaaggtgtatgttcgctgcttacctcccaatctttgaagctcgagttggaagtactgtcacatgatgaggacagactggcacaaagacagggatgatccttgtacaaaagttgaagaatgtactggtcgatatgatgttcgcctccctaaaactcaccagggttcatctacaaaaggtaggacacaagatgagtatttggccgacatatcaaacaaaaaaaattaaatatactgaccaggtctgatcgaaggattaaaaaagtgaattttgcatgatattaggtttataatccagaatttcaaaacttcgaattaagggttaattttcactaaaccccaaatgggcaagtgaaaccgaacatcgtggaatcgaaatcagaatgcaatcacagtcaagccacatggttgaacataatcaaaatattaaattcctaaacctagattctctacggttttcctagaacaagttcaagaactatcgaattttctacagtggacccagaaaatcaaatattcaagcataaaagaagaaagaggtgaagaacttactcactgtttgaagcttcagagttgttcagatgacactgatcggcacttcctggggattcttcgaagaatttgagaggaaaagctttcttattctaaactcttcaagaatgaaaaatgctaaaagtggtttattagggatttctgctctacttttaagctgattagcaaagaagggcaatcgtttcaaaatttaaatgc

SEQ ID NO: 316249 - DNA, 2066 bp, Cannabis indica
gagctttgtttgcagtgaagtgtatctcacccctacatcgtaaccactaatctcaagaaggtatttttcttcttacccaaaatgaaattattatatacatggtataattttatggtatatgttttattcaattctcttggtattaaaaattaacttaagttctattaaaaaaaaattaacttgagtttgtaatacgaaaagggagctcaaattatatgaccatggctatctagaaaaacctaaattcaatattaatttttttggaaaaaaacagccccccaatttaattatcaatttgttatacacgtggtgattaaggagccttatttaagggatactaatggaggaattgactgagagcaagtaatttacatggtgattctattataaacttcatacttgaggttatttttttattttttttcctatttcggcaggggaagcctcccacctttttgttgctctttgccagatgattttttttttttttaacgaagtgattataatcactcatgaatttacgacccagacatctacaaccagcgctggatcctcctcgaactaggatagctcatcgtctaaccgcagagcatgctttgccaaaccatgggccactaaattctcagagtgagccacatgggacaaaattgcccccagaaatttagacaataaagctataacatcttcaaacaacactcctagctcgttaaaatataccttccctttgatagcgtcaccaaagctaatgaatctgaatagactatatgaattaggaggccacacatgtgagccccattgagtctaaccaatagggctaaagtttcagcctgtaaaactaaaatgtcacctgaaaaaataacagaaaattcagaataaaacttttattagaaaattatcaaattgaccagcatctaccaaacaacaagaactaagcaactagaaccccactataatattactagaactagccaaatagattaccctttagctagtagcaactaatttatagcactctatttcataaccttcttaaagccactatctcttactaagatcatatcacctaaaacagattttagtatgtaaactagcaaaaagtaatgaacatgaaccctaccatgtatgtataataaaaactaccacttgaatcatatatgctaggtgatccttgctacaatgtattgcggaattgaacaaaaccaataaagtattttttgattgtaaaaattatgtatgtaataatgagccattaaaactatatataagtgttatactcaaaatttggctaacacatcagaggaggacacatgtcaaactgtaaagaatacaaatcaacacgcgtaataataattatatttgaaatggaataagtcgttaaaggcaaaattgacaaagtatatttacaactcggttgactgaacaagtcttaggcgagataaagatatacaaactgttgcttcatacattaacgaaaaactatacaacttcagatgtacaaggcgaggcgtcaacctcgctacgcattagaagacaaaatataatgactgacaagacacttagcgtataatatacggtatacaaactaagtataatagtcgggtaaacccatacaactaatagggaggcgtcaatctcgctataggaagacacactcgtggtatcttcactaatcagctacagacatctttcaatgagattaatagtctcgtcgagtcagttctctcgaaaagaagctgacattcaaatgatgttggctgctgaagttcaccttgtcgccaagagctgtagtggtcagatggagcgttatgacttcagtagcataaatgacgaggctcacaaagatacaggaggatctctagctcgctattagggttagtgttgctatgttcccaacgagatgatcccaagacaatacacgttacaacatgtttaatacacttttatattgacacaataaaagcggactaatcacaactgtgtaattttcaaatattaagcgcacttattttacgtggaatgtgatcaaatcccatgattttaggggatatttgttgtaaagatatcag

SEQ ID NO: 316250 - DNA, 635 bp, Cannabis indica
tcttcactctcatctttgatcaccatcatctcatgtctattgtccttcttcatcatcataataaaaaattcatttgcaatgaaaccggttgaaaaacctacaataacctgtattaaaccataagttttgagaaaaatcaaaaaaccacctgccaaagatgacacaaaatggagtgtcatgatattaagttgcccacagtgaaaggggattgtactgtttctttataaaaaggggatatcagccaaagccatataggtatcactacaaaaaattgctacttttagtgacaattttttagtcataatataaattttttgtgactaaatgtgacttttagtcacaagaaaatgttacttgtgattaaaacatagtatttagttacaagctgtcactaatttagtttaagtcagaacaagtattgtgactaaaaatatatttaatcacaataaattttaatttttgtgactaatacctttagtcacggacattttaatcacaacataagaatataataatttataattagtcacaatttttatacttagtcacaaaaaatttgtaaagtccttttttggcaagttaggtgtcaaaataatttttcctttttatggtaagattgctatgcattcattttc

SEQ ID NO: 316251 - DNA, 952 bp, Cannabis indica
tttacgaaagaaatgaagaagaaagaaaacgttttgaaatgacaacttaaaaagaaaaatgagagtagaagaaatgagagtgagaatgagagttgaaaatgagaaatgagagagttaacagtagagaagaggagagagaccaaatataaatgtaaaaaagtagtgtagaaaagaaaacagcgtgaagaccattacttattaacagatttaaataatgtgtagtgacctctttaatcatattatatcataaaagaataatcaaaagcagagtctccattaggtgaataataggaaattagtttgttctgcttttaaatttggggaaaagcaagttgctttaaacaatgaaagctcttcctttcctaataggttaaaacagaccaaaacaaaacaggtttgattatgaaatgaaaacaataagcatttgcttcacaataacccaaaccagtgtttatcatcccccaacaacattatattttggattttaaaaaactgaatactactttacactttgtattttgcaaaagttaaagatttaatcttttgttttgttaaatcacaaaatagattttatatttttgaaaatggtacaaatagaaccttaagtttaattttttaaaatggtacaaagtgaaatagtttaatttttaaaatggactatctaggaaattgaagaggaaaagcaataagaccaggagacaattacataaagaaaggagctaggtgctccaaactcgatcctcatcgtgctgtaaagcttctctagcgttaatgtgagcttcgctattgcggttcctagaaatgtgatggagagaagcattaggatatgaagacaaggattctcggatcaaactaataacaccagacagagcaaaattgtccttccatttgctgttaaccttcaactgaaggtcactccttatatagtcattgaggaactaaaaaaaaaaaa

SEQ ID NO: 316252 - DNA, 1154 bp, Cannabis indica
gaaatattttctcctctttttttagcaacgttttcacagtctaatttaatctctcataatcaagaaaaaataactttctctatgttattgttttatgtgcattctttacataatgcattagaattaatgggagaaaaacattattttctcacgaaaaagtttatatacaattttatattacgatatgtatttcgagcaaacaataataggttttttgagtgtagtataacaacagttgtcttcgtgtaataatagagctcagatacagtagtttgactgagttattttatcctggacggcgatgttaatagtctacttgcacattaattttagacagtaccacaaatgtcttaaaaagagcaacctaattcgcaattcaacctaaatttattcaataatttcattcgtttttaattctacaacaactattcaaacaatgtatatatgaattaggtaatattcaatattagtcaaattatacaaaaacaactaacttcaaatataataaatcagtgaaacataatcaaattgtgcacaatcaatatttgatacattatttgtttaagaggaaaaataaataaactaatttatttcttaatatttagttaaattatatatgtcagtttatcaaaataatgtatttggttacaaccaattcctcataatgaattatgaggagaagaatatagaccgcatcttaatggccacgccatgtttgaatagtggtagaatatggaagtgtatgatgaaggaagtaggaataggtgagtgtatggtataaaatacatgatgttttatctcaaaattaattgataataagaagagtatctcatgcaacttatgtatggtatttagttcctacatattatcaatgtaagactctctaacatctcacgatagaagtgtacggttgaagatatagagataggtgagtgtatggtataaggtgcataaggttacatcttaaaaccaattaatactgagaagaataactcatgtatcttatgcataatatttaatttttacatattatcaatgtgaacttctctatcaaataattatattaaaattacattgagtaaaacataatagttttaggtcccatttgtttgaataacaaatgtgatttgttcagatatagatccattaagatt

SEQ ID NO: 316253 - DNA, 738 bp, Cannabis indica
ttatataaaataaattttatatattttgaaattataataaattagattataacattatcattataatatatcttaacaactttgaaatttataatttaccaaacaaactcagctttcttccacagttctgctgcaactgttttttctcacaacacaactataactattttttgccacaacacagttgtgccaaactggccctaacactatcaaatactaaaatttagaaaataacttcatttaatttactctatgcgaccatgttagtagcacagtataaatttatagccgttttgtaatcataatggttgtttatggtataattcatggtcatttttacgactatataagattattttgctaataaaaaatttcataaaggctatttttactaataaattttgttataaagttatttcgcatagcataaatatttttatagtatttactatatagccagagaacattcaaaaatgatttcgaatgtttagacaaaaaaatttagtaatcgtgaacatataaattatgcacaaatttgacaaagaatggcaaaaagtagggtaactaattaaggtgacatttggttggaagaaataaaaaaataagaataagaatagaaataggaatgagaatatgaatgaaatcaaatcaaatttaaaatgcataaaaaaattaaatcaaaaaaatatataaatttttgggtaaataccatttgggaccctctgttttacaaaagtt

SEQ ID NO: 316254 - DNA, 1129 bp, Cannabis indica
ataaatatttaattttttcaaacagaaaatttgtaatctttaaaaataaaatacattcacaatcttaaaaagaccaaaatcttaaatgaaactagcaatacgtggctcggtacgtacattcacctagttattattaatatgtgagtgtatatggaagaataaaagattttttggtaatttacttggttaaggtccaaaatattgtcactttcattatggtaatagattaagcttaaacgggtgtatgtgccaatggcatgttaacaatgactattttattgttataattttatataagtgttagatgtaagaagcaaactaggtagcagcacgtgaagtgaagatgttgaattaaaatagtgaataaatagaactacaccaaccagtctaacaccaagaatttcagcttcagcatttttggaaggtttaaattttgaattatatgatagtgacgaggatatataacatagactcgtcaagcccccaactaactttctttcaactaatcctcaaatcccatctatctatcactctactacatgacaaatatatgtatatacactacatacatatagttatcttcttttaaaaaatatgcatacatctaatttggggcataaatatttaactttaactctcagttgctaaacaaatatctaaatttaatttttagtcagtaataatacctaagttataattctggaacttttataggtacctgacaattaagtattaaataaattgccacgtcacaatttttaataggtccaagtcattaaatttttatttttttaaaaaaataaatttaaatatacctataaaaaaataacacgtgaataatgacttaatatttaacggttaggtacttataaagttacaaaaatataacttaggtattattaccgccaaaaattaaacttaagtatttatttacaactgggagttaaacttaggtatttttactgcaaattactctagggaaatttgattttctatacttagaaaatcaaaaaattttttccctaaaccaaaaatttaaaacctaaaaaactaattcctttttttctaaaaccccaaaatacccctctcacaatattctctctctctctgcatcatctctctctccctc

SEQ ID NO: 316255 - DNA, 854 bp, Cannabis indica
tgattatattaaaatgggtttttgtttagggcacaaaacccaacagggcctttacatgccccccaatctttatgttaataatgtcttagaaatgtcgggggcttggcaaaccctaggcagtcaactcgctacggtccctaattcgtagcattaacccagatatggtgtgcttaatggaaactaagaaagttagtgaggatatggaagggatttggcaaagattaggctttaatgaaggggtggcttgttctttgattggagcttcgggttgacttgctcttttctggcgtgctggttgggatgtccaagttattactctgaagtatgataaaattatttttcatataggggctaataggaatttcaaaccttggatggggtgttcgtttatgctccaccaagaagagaaagtcgattggcattttggacggatataggagaaatggtgaaagatttcacgatgttgtggaggctgataggagatgtgaacgcagttttgaacctaaaagacaaaattggggggaatatctttttactgaagcagaagggcaagggcttccaaaattttatgtttgattctggtgtggtggatcgtcgaaggggttggtgcgatgcatgcttagtctaatggtcgagattgggagcaccttattgttgggttttgtgccctaaataaactcatttcaatataatcaaatttactaattaataaatattagaaatcacattttatgttgcatggttcacatgatttatttcatgtttatttttaatgtataaattttattaagtccaaaatatatgtatttgttcatgattatagtgttgtcagcacagtggaatataatcatgat

SEQ ID NO: 316256 - DNA, 846 bp, Cannabis indica
acacggcgaaaatgatgattagtgccaccccggcaatggtggccacgacagcaatgataataattcttgtcttgtcactacgcttttgtcctgcaaaaaaggtaaaatttgctctcgtaactgtatctcagacattaaaataatgaaactagtctttcaatctcataactatataagtagttatggtgtgatttgttcttaatttcaagctttattaccttctgtagcattgttaatggtgttattagtcggccccgtcgttacttctggggatggaggcggcgcgttaattggagatccataaaacaagtctttctcataccttacactacaactcgggacaataactctgcatcctactttcccagaacaacatgtcggaatttgttcgtacacattattcaaacaattgatacattgttgctcggacaagtccggggtgcactgtacgagtgcataaattgttaaaaaccctggagccttggcatttccggtggcgtacttacgaagagatcctcctgaagcggcttcgcttttcaagccattcaataaagtgctaagattatcaaaatgctcttcaacgttagaagacgacacgttttcggtgttaaacaagcagaatcttggggtagtctcaggaattcccaacatggacctattcgagtagcgtaagatcaggcagctgtcgtacccacctattacctccttctggttcgggcagatgtctttgaggacttgcgtggagttcttgaggcaactccggcagaaatcggttgtggtgtctccgcggcagagtccaactgcgtaaacttggtctgagcctttgccgtaggagagattgtaaaa

SEQ ID NO: 316257 - DNA, 1736 bp, Cannabis indica
atattaatatatagatatagatattaatgattgattgattttttaatatttaacataaacattgaattattcgcaaaattatacatattgtgttacattttatgtttgatttttttaaaaaatatattttattaaaaattaaaacaccatttaattaaatatttaactttaaattatgtgacattaaaataaaattactaaagagatattatatgaataaaaaatataatatttaaacaacataaaaaaatataaaaatatatagctaattggataagactaattttattaattaataaaaaaaaataacatactaagaaaatatttatttgctataatactttttacactatagtaaataataatgattggactaatgaaagttgcaaagaaaagcttattaatagtttggatatagaaaaccacaatactttctaaacaaaatgtgagatttttttacaaagttcgtagactttttttcattggacaaaacttgaagctctcacaaaataataaaaatattatgaaaaaaatatgagatgctacatcatcacttttaaattctcctttatataaatatattgataagggttttattattagactatagttcaaaggccacatgccttgaatggccctcgaataagtaattaaaaaaatagtaaatactattttggatcttgtattttgggaaaattattaattggaccttttttttttgttaaatgacaaaatggactctgtattttctaaaattatacaaataagattttgaactgattttttgtcaaaataaaacttaataataatctgatctagagatattatgataaaactggttatatattttgtatatgttcgtgttagaaattatcttaaagtaggttatattaaaaacaaaatcattaaaaattgagctcagggtcctatatttactattttgaaaaatataggattcattttgtcatttaacaaaacagaaagtctaattggtaacttatacaaaacacaggatccaaaaatatttacccttaaaaaaataagaatgttgtaataatctaataaaattaagaacgatcatttcttaaaaattttatgttcaactttgcagtagatacttaaaaaactacaatatatgtattaactatatatgcaaatttcatttcttcttcatcatcttaaaacatcaaaagaatgcctccaatcggaaccatggatatgcaacttctagcaatcatgacaagcataatatatattaaagtaccaattgtattttactttttatattttacatatttaaagtttttaggactaattaataaatcattgagttattatttatgataatatataataaattgggatggtaaaattgtaacaatttttattgatctatacactttgtagaagacaaataaaatttatgtaggttaggactctaacagatataaccaactgaattgaacatgtaactaacctcctaacagactaaggagaactaactaactctaataatttataatactgcaaaattaatatatattacatacataaattatgatatatagatcgacatcacatatgataaaatattataaataattcttaaactctattaaattatgtttggtttgcatgaacttaattacagtataaaacaatagaatcgatatattgttagatttctatatcactcataaatatgcaacacaaaaattcaattctatagataaaca

SEQ ID NO: 316258 - DNA, 757 bp, Cannabis indica
tttgttagtttttttagtgtgttttattttttaaataacaattctatgtataaattttttatttctattaatagttttatatattttaggaatatagagaataacaaaataggaaatattaattttttaatatttaattaatgactattaatattaaccattagatatttgatccaatggtcaagaataaaatacccatacatgggtaatatccattaaaagcatacccatatatatataaattatttcaaaaatatcaagtaaaataccattaatcatgtcaactagttattagttttaattattggccgtaatgctccattttattttatttttgtatagaaatattttacttaaaaaaaaagctatgtgataataatgtagatatcttttcttaaaaataacatgcctcaaagttataatataaaaataaatatgaataatacatagaaataaatgtatgtattattaataacatgattaaatttttaaaaattcacaagtaattttgttttgatttttgccatatataaatatgaagaattgccatgtatactacattttcggttttttttttcttacttttacatttttttttatattttttttatttttataaaaactgtttttattttgaagttatgctatttttatttcgaagttatactgtttctattttataaagttatttcatttcgagattatgttgttttcattttaaggttatgttgtttctatttttataaataaataaaaa

SEQ ID NO: 316259 - DNA, 935 bp, Cannabis indica
ttatattctttctttcatatgtccagttatatgcctgctacccttattctttataattttattattaccggctcgagttaagtgtccatagtaagtgtgtagcattattattttttaaatatatttcaagctaatctccattctcctcttctctttctgcaaattttaaatttgacttttcactattgattttcaaataacctcacacactaattaaaattagtttttaaatcattttaaattatataattatttattgaatctttcttaattaaattatagaacatataacataaaattaatatacgtgccttgcacgtaactttcttctagtttaaggaaatattgattgataaatattacatttctatattgcctatactctgaatattatatttgatatttaatgaaaaatctacttaattgatcgaatttaattgttaaatatgtatagttatatttatatttcaactgtatatgttaaataaatatatatgtattttttttaatatatcataaaattttattaatatagtaattaattaaaataatagtctgtaattcaatcggtactttttttattggagatataattagggtcaaaattagactaacagactaattagttagtagtctaattcttaaattatttgacaaaaaaattaaaatcaaattaaataaaagcaattgtaacattataattaaccttaaaacatctatctataattaatgtggatgaaaatttatagtcgagtgttaatgagtttgttattgtgaagtcatagagatattaattaattataaaataaaatattattatattaaataatcatagttattataagattagtgaaaaattaaagttgataatgatgaaggccagcaagatcagagaccccttaccacaatgatgaagatgatgtagatttgattag

SEQ ID NO: 316260 - DNA, 667 bp, Cannabis indica
tatataattaatttgaaaaaaataatatagaagttttaatttaatattacaaattttttcaattaatttttaggttaatgttcttttaaaaatacaaatataagcacaccatcatttaatctgccacgcatgaccaaatctaataaaaaaaaactatattacaatgaatagtttagaaactattttcaactgactgaaacaaaatactaaaaattttgtatagcccatctcatatacccatgatataatcctgtttgggggaaacaaaccttaagaaaggcaaacatataatgaaaagcatgaaaggagttaaactacacttttacaatttgaccacaaatatatactaataagtagaaaatttattactttttaacacatcaatgtacataaccaaaaacccaaatttaagaagaaaaagaattggaccattgttaaaaaaatggtaattttaaaaaatatcaaacaaatatgggcctctctggactgggcagagcccagagctgggcatggtaaacaatctatgaaaggaaataaatcaacaaaaaaattaacaaagcccaagcacatgcaatatcctgaatttatctaataataaaggaataattacataaggcactattttttgtaaaatatctacaattttacgtttaaagaatattttttt

SEQ ID NO: 316261 - DNA, 878 bp, Cannabis indica
aattcgaaatgccacttatacattggctccattgccacctggtagagaacccattggttgtaaatgggtctttagacacaaagagaactctgatggtactcacaacaagttcaaagctcaacttgttgcaaaagggttccaccaatagccggggtttgacttcatagagacattcagccttgtagttaaaccagccaccatacgcattgtcattaccttggccttgcctcatggatggtgtataaagaaattagatgtgaacaatgcgtttctaaatggtgatctcaaataggaagtgtacatggtacaacctcctggctttgaaatacaatcatcccctccccttgtctgcaaactgcacaaagcattatatggcctcaagtaggctcctcgagcatggttcgataaattgcatcactgtctcattcaacttgggttctttccatcaaaatcagatcattccctgttcattcaacatacatccacttacacaacactgattcttgtctatgtggacaatattcttatcactgaaagtgaccccaaaattgtctccaatctcaatactgctctcaatgacaggttctctctaaaggatctcgatgatcttcattattttatgggaattgaaatcaatccaacaccatctagtttacacttatctcaagcaaaatatgcttgtgatttgcctgttaaagcttaaatgtaagaagcaaagccatcttcaacccctatgaccagtggcttgcgtctctcagcccatggcagtgaaccaatgacagatcctcaactttatcgctcgattgttggagcattacagtacatactcatcaccaggcctaatctgtcatttagtgtgaataaggtttgtcaattta

SEQ ID NO: 316262 - DNA, 971 bp, Cannabis indica
tttaactagtttctcgtatcgttctaattataatttatttttattttcttcttatgctatttaattacaactcaaaactcccttataatttctgtttgatactaaataataagttaatcatagtcctcgtgggatatatcgacgtgtacttacttttatactgaaataattgaaagtattagaattaaaaaatagtaaatttgatatggtatacgacacccatcaataatataatatatgttcaatatatataatttatttttcttataggaagcattgggtgtgcgctatattggtaccctagccataccacgtatattaattggaccctgttaatgcacccataacaaattgtcctatcattctaaaaataatcgaggaagcatatgacacatacttaatgagaaagagtatgaagatcccaaaaaacttaataagtatcaaggagctcatagtaaatatatgtaaatttcaatggtaatttaaaattttattgaattattaatttaattatttaaataataaattattgtaagtgtcctcgtcaactaagtaatgtagagcaactactatgttatgaggataataaaagacctagttcagtcgcctaatcaacgtaactactttaagaaagatgtacataaatatttgtaaaataattataaactataaattatgttatatttatatttattatttaattaatttatttttattttatattttgcagctaatagaaaaaaaaccatatccaaaagctatgattgatgaaatgagggaagactgggcggtagatatgctttcacacttggagagtcatcacattgtggatcattagttttcttttttttttctttttgaaaaaatattatttataacaaatatttagcaaacaatagcagttatatatatatatatatatatatctctttcctctatacatattattattttgttatatatatatatat

SEQ ID NO: 316263 - DNA, 1094 bp, Cannabis indica
tttaggtaatatactatattaggtaagtttttactaaaaataacgttaataatgtatcacacacaaaatgacgtgacacgtcatcatctcctccacgattatctgcaaacataaacacaacctgttaatcctaaaaatagaaaattaccaaaaaaacggcaattatatatacaaaaacttaacataacaaaaacaacgttatttttgaaaataattgccaaaataaggtggcccatgaaaatttcccttttttttatttgtaaatttgtaactattttgtaatagtagtatagtattgtatgttttgacaaggtccccgttaatttgtttgtgaaagcctttttgggcttaggaaatggttaaagaccaaaatactcttggtgagtgggttgccttttacttgacttagctcgatggactataatttcacttgggccgataaggcctttgctttgggcatggtaccacttttggccactataaatagtaggatattctagtcacttttttttttaaaaaaaaaaaatagtaatattttctggtcactttagttttacactgaatttggtaatcatctacaacttttgttttcttttgaaaggatcatctacaactacaacttgtttaccaatgccatttattaaggcggcgaatcatgtctgaattttctcaattgctcaactctcatatttttcaaacgagaaacttatttatttttattgttattttcttaaaaaggtagcgacaatttaatgatgagtctttcggcggtatctctttgacccttttcgatcttttaattaataatatgattaaaaagataaagactcaactttttttctttgattcctttcgttaagctgtggcttggctatcatttcacaatattattccttattctttttctttaatcctttattttaccttttactttctcaaatttacatccaaacttggtattaaataagatttattgggctcgtttggaacgccgtattaagtcgtattgtattgtattgtattatattgaattggattatatatcatatttttatataatactttgttaaactttaatttatactaaaatatta

SEQ ID NO: 316264 - DNA, 3006 bp, Cannabis indica
accacatgtctgaccattttgagatactcttcttcggtacactatctataaccataacaaaacagaaattttttaaaaacaaagatatcattgtggaatattaggtctataatggatagataacaggccaagtttctcaatttctacagtaataaaacaaactgactaaatcacacacgtgaataactgaagcaccagcttattccttggtttatctaagacatacattacaggaaagccaccttacttgaggtttaatctactcatttattgcaacatcccacttacagcttgcaatttgaaatccacacatttaaactcgcataaaagaagaaaacaaatatagtagctgaggtgacacttacccatgatgatcccttgtgcacctctgtaatacgagctggtcaatgttctaaatctttcttgcccagctgcatatttaaagaatcaacatcagttaagaaggtcaaccctccatttaggagggagcagggctattgggggtggaagaaaaacagcaacaatagtgataaagccaaacaaatttaaaggacattgaaaatttatagcaactgtcaaccaatatgaacagaagttctgctataaagaacattgaaaaaggggagggaggttaaaatagtgaaagaatctagaacaaaaaagagaaaataatagatttacttatatggattcacatttccaaaggttaaggaaaaaaaaaaaaaaaactaaacttagtagttgtaattatccacagtatagctcactgtgtgagcacaagaaagccaagaagttgtaaaatctctcacaaagaacctatttgctagttcaaggtgccgtaatcaaccgacccaccaatgcaggagaatagtacatttaagagaaagaacaaaattcagagtcaatagtacaattctacgagaaatatgatacatactgtcgacgtcataaagacaaaagctgaataaatagctaaaacagcggataatactgcaatttcaatcattatgtgcacctacatggccattttaattattcgctcttgtacttttgagggaaaataatgttcagaaagttttatatttatacataaacgattttgagaaatggaaaaattttgcaatcagtaataaataaatcagcataaaggatttgaagaaatggtcatttgtagaaacattcaaaaatgtgcgtccttaacatgaaagcaaaaatataataagatcatgatcagatttatgaagctttgatataagatgaattacttacctgtatcccaaattgcaagtttcagctttttccctccaatgttaacatatttgaccttaaaatcaacacctagaagaaataaaataaaaaagaaagaaaaattcatggagagctttatcaaccaaaagcaaaaaggaagaaagtaagaaaaaaaaaatagaaatggattgaagaaatttacctatggtgggagagagatcttcgaatgagtcggaggtgaagctgagaagaagactactcttgcctacgcctgaatctccaatcatcaaaagcttgaacaagtaatcgaattcagttttattagaagaagtttccatagttgtatcagatttgaaccctaaagctcttacttctttctcgcttttcagaagaattgatccacaaattttgatcactgcgttattaagttattgttgaaagaagaagatcaaccagattggacccttttatttaacaaaagggtataattgtcatcctaagatgcttctacggtgtgcgccccaaaaaaaaaaaaaaaacgtgcaccgatccgcatttttaatatctcaatagatttttttttctataactttaatatctcaatggttataattgggatgtgtacataggtttatgggtaacttctggactcttccttcgagttgtgctagggtttttttgttgcgccaccatgattcaatcattgtcgtcgtcgttggcacttggcgttctcgttcgtccgggatccgtaacccctggtgacggttgctctccattacagtccacttgaagcctgctggttcacgctgttaacggcttcgcacatcaacagattgacccagcaataatcactgcctacttcgccattttgcatctagaccttcctcaagtaggtatgcatcacttccaccataactctttgcactatgtcacttctgctattaatgttgttgtccaaatacgttttcaacccaattttaaccctaaccgaatttccccctttcatttcggcaccttctttccaaaaatagaattaaattaccatcacatctctaaacctccttggttactcatcatttctctacgatcattaaagcctccatcccctctaggcgtcctttggaagtttttagggggcactgacagaaactcaccatcgagctttgctttccctagtttgcagagaccttcattaattttcctacatattgtgataatattttctcaatggtgcttgagtaattccttttgtcacagatactcaccaaattctcaaagccctctccgtgccttgattttagctgatacactctccactataaatataacaacattctataaatattcttcccattcagtttagtcttgcccatccaatatcatccctcactgccctgtaacacgaatacctcacctccccaactatcatacacctttattctggttttttctcccttctttgactgaatttgccatggaagacctctctcaaactctcaacaccactctcaatctcactgacactgaaactaaaatacactccctctctaaattacccgaagagcctgaagaagacgcaggggaagaaccctttactttccttgcagtcaagctgctaactaatcgtcatttaaacgaatatgctttcaaaaaatgccttcgccaaatgtggtatggacgttactccatcaatgttctggtgaaggaactaagtttcttcactgtagaatttggtgttgggttttacgccctaaataa

SEQ ID NO: 316265 - DNA, 1374 bp, Cannabis indica
tcaacataagatttgcaaacaagcgataggctacaagaaagttgattggaaactacattaactcaaggttcaccaacataaaaataactcaaatgccacaagacatcagaggagaattcaaggataaatatggcgtaaaaatgaactgcatgaaagcatagagaagtaaagagcacacacaacaagaattacaaaagaaagctaaagaatcgtacagcttgcttctaagttttttgcacatgctccaaaaactaatcctgaaaccatagtacacatgcaaacagaagaagataacaacttcatgtacttatttgtagcactaaatgtttcaataaaaagatggaacaagtgcaaactcataatcgtggttgatggaactttcctaaaatcaacatatgaagggacattactcttagcctgtacacaagatgcaaatggatacatttttcccctagcactctctgttggatttagaaaataacaactcatcatgggtatgatttttaaaaaaaaatggagggaagcatatggtgtaagagaagaacagtgcttgatcttagacaaaattgagagcataattaaggatgctgctcacgtatttccagacataactcacggctactatgtataccacctattgagcaacctaaaagcaacctttaagaagaatgccagcaaactcgataaaccattcttaatttgcagcagcaaaagcatacacagagatgaaatttgaataccatatgagcaagcttgatagcttggacaagcgtgttagaccctatttataataagttggataccacaaatggtcaaggtatcacagcaaacacagtaggtatacaactatgacttctaacatagttgaatctctaaactcgacaaatttagaagctaaagaactactaatcactacactaatggagtcattgagagttttgatacaacattggacatacacaaataggaaaaaagtacaaaatacaacaacaattttcacacctattgctgagaagaagttaatcaacaattttgtggactcattgacaaaaaatataagaattcattaaacgaaaagttacatgatagttgtgttgtagtttctttttagttttgttaacattaagtacacattaccaaatctcacgtgaaaccaataaacgacggtatatttaaagtagtacagcaaataaggtcatggatatggtcattttaaaagaaaaaatatgcagttacaacagattccaacaagacaaactaccatgtgcttatgctcttgctgtgatgaaagatatgagcttaaatgtttacaattactattcacagcagtacacaactaaaacatggcttgaaacatatagtgggtcaatatat

SEQ ID NO: 316266 - DNA, 1699 bp, Cannabis indica
tttctgcaagagaggtcgaaacctgggtagccacaacgagttgggtagtgattttgatcggaaagtttgaaatgggaatttgacagttaattcagttggagaaatacagttatttctgttacagatttgagcaactgtggttgtgaaattcatgatgattaaaatcgaatatggtaataagaagaatgataaaattttagaagaaacagacatttttttgtgtgtgtaatattattcattgatatagaaatctagtgtgtatatataatatatattgaattattatatatatatatatataaaaaaaatatgaagtgaaatataatgtcaattgtcaactcaatctaaagttatgattaaatattgtgttttgtaggtgcttggaaggttaatgaagatttcttagcaagagggttggtattattatatataataataatatataaacaaataattattaatttagttatgtgtgtatagtttaaaattaatatttcattcatttaaaaataaataaataaatatttcattaattttcttactgttgatcttttatttttaaaacagtgtctttgacctaacaaaaataaataaataaataaatagtgtacttatttttaataagatatattaataatcagtaaatattattttgaactatgtgttttataaaagttattaattggatattatgttttgttaaatgataaaatagactctgtattttttagaattgtaaaaataggaccccgaacttaatttttaacaattttttttaatataaccaacttgaagatgatttctaacatgaacagatacagaaaatgtaacagttttgtcataacacatttagatcggtttattattaaattttattttgacaaagaaatcagctcaggatcctagttttactattttagaaaaatacggggtccattatatcatttaacaaaacagaaggtccaattggtaacttttgtaaaactcagggtctaatttttttaatataaccaactagaaaataattcttagcacaaatatatgcagaaaatgtaactaattttatcataacacctctgtatcgggttactattaagttttattttagcaaaaaaaaataatttaagctcttatttgtactattttaaaaaatacaaagtctattattttgtcatttttcataatagtatttactcttataacaaaataacagctggtattagagtctatctccataccaaccaatcacgtaaaatttgaacggccatttggcaatacaatgaacaacttgattatagttttagaggtctaaaaaaagaacaatccgacgattcaggataacccaattatcgatgaccagttctatgttaatttgagtcttgtaaaaataaaaaaatgagacccaataaaaaagctactggttattaaacattgaactttttagatattattttatttaaattacttatcactaaagtgcaatatatatttagtactataagtataactttttagtttattattaactttattttatttattttattttttttttaaatgaggcctaagcggtgaagggcctaagacgactgctttcttcgtctcacttcgtcgcacaaggggcacaagagggtcggagagggctaggagttctgtgagggctgggtgaagaagaaagaagaagaaaaaaaaaaaagaa

SEQ ID NO: 316267 - DNA, 892 bp, Cannabis indica
aaaaaattttaaaaatttatatggatggtgttgtagctataacgaatagtgccatgaaaaaatattttgatatgtgttttcaagtacgaaagttgacgataacactccttttctgtaaaatttttgggggaatgtttcaaattcttacatgtaattttttttttggataatttaaaaaagaaaaaaatttaactgataataaattatactaaaataagacttttgtcttttatattatttcattcatgcgagttgttaaaaactgagttattaactaatgacttttgatgaaattattacaactatgactcttttgaagaaattatttgttatatttatgatgtcgtttatttaattgctaaacaactaagtacgtacgttcctttattatattaatttataagtagttcatgataactgtattcatgattttattgcaggataaagtatattgacttttaacaagtattcagtttagtgcaatcatcattaattcaaccttcactccattattatataagaataatgagtattattattggacactaggagtatccgataccatttagagatgatgttctacgaatactcagggacggagggactttagtctatatgtaggcttaagccctcacttaaatatataaattaaacttttcacatgtagatatctttatatattaaaagtgcctatctaacggcaattcttggtttaacgattcttggtttaacgattctttttttatttagccttacacgattaacttaacagacggttaacgttaaacgttaacaaataaataaacccaataattaaacccaaaaaattaaacaatctttttttaaatcaaaaaaaatatcttacccacatatctctctaacaactattttt

SEQ ID NO: 316268 - DNA, 2611 bp, Cannabis indica
ccctatggccacttgaactaacctcaagtggttaccctcagaactctcaaacacattctcgtaatgaaactaatcacatataggtgcaggattccataactcgatactaactctcataacagaatgtttgccaactcggttacttaagttagtttcacattggagtaggagataggaagttggcattagatcaagtatcactaaaagatgaagctgcaaagatgctgtgattagtagcattggttttggctttaaagtaagattgtatatcatatgtgactattactcttgccacttttgtgattagtagcattggttttggcttagtagaccatgaaaacatgagcattataaatgcaaagctaaaatgctatatgaggagttggtttctatgcttcacaatacaaactcttgtaatgtaacaacccttttaggagaaatgaaaaatcattcacataataaatttgaagaaactacatctaacattcacatctatgaaggtacaaatgatgcattttgaatagcaaaatatcatcagcaaataattcccaaattttcatatcagaacaattaagagaacattattttcatataaatatttgtttcaaacattgttcattgaaagcaatcagtctcttgtattgctttctgttacagagtagagagtagagattcaggtcatattacaattgagaaacaaacaaaaggaaaatcaataaatctcattatatcacatgatcactcatatttatctgaatagggaaagaaaactcaacaaatatggtaaaacaataattcaaaacacataactgaaactaaatgaaataaattcagtgtctgtatttgagtccacttatggcattgttttcctttcatggtttcccaggtgacgcgtagtgttagtcaaaactaaagaagcacgccaggaacgtgagcgaacgaacgaacgaacacacgtgtttttcattcattgtattaaatatgtcatcatatctcagattttgtccagataagaaaaaaaaaatctggtttctggattttgatcctattcaagcaaaatttccccgcaaatcgcggtatttctctccttttcttttgtcacccaccggaaatggtaggacacaggaaatgttagccttgtagtctctatataaagcctgtttgagggatagacaattcacactaaaaaattcttgtaaggtttttattgttcaaggaaaattcatctttcttataatcttttctattatctagttcttcattctacacactaaagaatctaaacaaagtacacataagaatataactcttgattttgtgttgtgttcaggtttgagtgaagaattaaaaatggcaccaacatacttgttacctagacaaatacgtgcaaataggggcgagaatctacctcagcgtaggaatccacccgggggagaattcaaccccgaaaccaacaccttcatgacatggaggaacaggctcactgcgcttgttgtggacagcgaatcgttctgcagaatgctcgaaaagagtttcctatctgcttatggagtggagactgaggatgtagagagtggtagtgctgctattgagctcatccgaggtggagctacatttgatcttattgtcatcaatccacatttatctggcataagtggcattgaggtaagttcatcaaacatattagaatctaataagacttatcatacaagtaagttaccttattccttgtttattctatggtgtgatgatagacggctagatcgcttcgaaacatgggtgtgcagagcattgtgggaagctctgcaatgtacgttgaagaagagcgatggcgctttcttcgagcaggtggtgatcattattttgagaagcctttggtccaaacctctttattccaatccttcaacaacttgacaaccaatagagtagtactactactactactactcaatgatgaaccaaccaaactgaaactacacatactttgaatctgtcttttatggttattgttgtttcttatgttttcttttatttctgcaatctcatgatgaaccctatctatctatctatctcatacaaaagtaaaataatgtaactatggtgcataaatttgtgaaattgtgttgtgatctgattgttcttgattcaataaacacaaaaaacataaatattgatattgaatctaaaaacctagaatttcataactccattcttcaacataggaagaaattttatttagattccttccatccataacagatgcatcttgttattgtcagttttgaaaacctgatgaacacaattcaatcaaacccaccaaaagaaactcagaacaacaccaaaattttacatgaatttatttaaaaaatcaaaatacaaaaacaaaattaaaaataaatgtatacataataaacacataattatgtaatttgagagattaaattacctctgaaagttggccattgtcagcaatatcaagctcttcttcttaggaaggattgaattagtgagtttgtttcatttttttatagagtaattgggaaaaataatacttattatgtttgtggaactttctaagtacgttattgaagtcattgtcacgtgttataaa

SEQ ID NO: 316269 - DNA, 1419 bp, Cannabis indica
attttcctataatcatattctccttcataatattccctataatcagattattttaagcacctcataccaaacgccctcttagtaatatagctatcattgaggagggtaatgttgatttcttgaaaaaaatatgggcttgaattataccttcatttatttatttatttatttatttttttttaaaatgaaaacgttcattgataagaaattagatctcatagtcattacaaaataagttagttggaatggacgatacagacaagctaccatactatttttgagtaaatgtccactttgttacattatgggctacaaaattacaaattctaagagtgcaagaaaataaacaaccgacaaaataagtagacagcctattacaaaaagaagaatagttctcaatctcccaacaagaaaccttgtgattgagagaattgatcactaccctagagtcgctctccactatgatgcacttgcaacctttgagctttgccatttccagagctaagcaacaagcagccgtctcaccacaaaaagcatcctaaaaaaccaaactagtcgtgctaacccaaactacctctccaaaatagtttctagcaactaccgcaatacacatgctttccaacctcactttaacattacagttcagtttgagccaatcttgaggaggaagacgccaatctttcaccaggattggactagaagcaaggataagagaagctctcaaatctttcataagagtaatgaattgagtcaatacaatgtttcacattattaatattatgattgtgtgtaccttatcgttttttatctgccaaatagtgtcaacaactacagaagcataaagaaagatctcatctgcattgatgcccttagtttttagactccacgcgaatttgacctagtcccacatacaaatgtcgaaatcaataacaaaaaaaatacatcacagagaagatctccacaaatggaaggctagattgcacttgaggaacaagtgctccattgattcctcctccacccacaaataggacacttcacttcatcaacatgaaatctcttctttagaatagccttaattggtaaagcgtttgacaagatgctccactaaagaaccttatgcctctccatgattttactattccaaagggaagggacaacctcacaaggagccctttgtaaagcttggataagataagtcgatttgcaagaaaatcgctcattacgctcttttgtccagacccaattatctttttcttgaccaaaaagtctacccctttcagttatattaatttgaataacattatgaaattaatcaataaatgtaaatagcattaatattatggtttattctaaaaaaaattattaggatatatatttagtttgcaattttatttttaattgagttatttttatgttatt

SEQ ID NO: 316270 - DNA, 1052 bp, Cannabis indica
gtagcgtgccttagcattagggcgttacagatgagtgttaattcaggagttggaaatgaggctaatcagaacgagcttcctttgatccaagaggaaccagctgttgaaatcttcctagaccgtgcgaagaactggagaacatcctgaagggaaaagatgaagatctgagtgccttgaaaccaaatccacgatctactagctggggagatgaggttacgacaacacattttcaagcttcagccaaggatatgtggagcaatttcaatgtaaacaaagttagaactcgctcctcaaggcttgattatattgaacccatgaacattagggatcagtttgtggcaaaacttgatcaagaggaagtagaaattgacggatcctattggaaatcatctatcatctgtattgtattaggtgccaacccgcccttcaaagtttttgagggttttattaagagaatttggggaaacttaggagtggaaaagattgttaggatgcattatggtttcacattggttagcttcagggatgaaacgactagggacatcatacttgaaatgggagtgatccattttgacaaaaaacttatgcttcttaggtcgtggtcttcatatttggatactaaccaaatggtgtgatctgtaccagtcttcattaggctaaatggcttgtgtctttaatattagggcaagaattctgtgagtgctttagtgagcactataagcaagcctatcatggtggataaagtaacacttgagaggtctatgatcaagtttgcgagagtccttgttgatgttgagatttcggattgccctccaaaatctattgcattgatcaatgagagaaagcaactaatggaataaattatagaatatgaatggttgccatcaagatgtacatcttgttctctattggggcacattgtagctaattgcatcaaaggaaaacatgtgacttggaagaagaaacaacatgttgttaagaaagatgaaccagtgcagcattgtaaagcccgcttagttaatttggaaattatcagttaattatgattaatt

SEQ ID NO: 316271 - DNA, 758 bp, Cannabis indica
atacaactaagctgaacctaaccatatcaggattaagatccgtagacctaagatcaaccattgatgttaaattagaaagatataacgttaagtttatgatatcttatctaagttcaatatcggtcccatccaatgtatactcatgtcagtctaaatctagtgaactgacaaatcatgggaattaaacttttgaacatataatcatgattatattccattgtgctgacgatactataatcatgaacaaatatatatttatatatgttctggacttaatagaatttatacatgaaacataatcatgaaataaatcatgtgaaccatgaaacataaaatgatttctaatctttattaattagtaaatttgattattttaaaatgaattttatttaggtcacaaaacccaacagtttataatgtatcgacatctgaatcaaaggtttatccggtgctagccgccgtttaatcacatgtgctagaggtttttgaatatctatactaacacgaactttcaagaaagcactcgtacacataccatttggcccgtgtatcacttctaatatgtcaccagtcgtcttactcagttcgatgccccaagacttcgtcatacaataaactagcaccttgtgcatcatcgtgttccttatgggctaagagacaatgctcaaaaacccacggacgaccctccaaaacccttttgcgatccgtaatcaaattaaaacgaagcacgaaggtattcttgttggaaatattttacc

SEQ ID NO: 316272 - DNA, 2287 bp, Cannabis indica
aggcaataacaatttttttttttgacaaaaataacaattttaatgtaactccaagtaaacatgcattgcatgtaatatttagtatatatatgtatacattatatggtgttatgttcatatttcgagcagtaaatatagttacgacacatggacaagagtgtaaaaataaaaaagaatacactttttatatggtatttaaaagaataattaaaggtatttaaagtatcttggaaattactatacggttttgtatttaagtcttaccttcaaaaataattaaaggtgagtcaaaagtattaatcgttgaataggaaaccaactgtgatgccaatgttgggagagagtccatgtgtattgcggctctggctagggatcacataggatctgctgtgtgggttgttgttaccatgctcaactttagagatcctctgataggagaggcggtgacgtgtcgtcttgctttgggctcggctagtctcaggaatcacaactacgtcttgatggagagtgatttagaaatggttatcaaagtgctgaaaggactacactatttagaatattaataattatgtctctttatgtaatcaactctctcaaaactttttatcttgtaatttttcgtttatttctcgctgttgtaatttcgctgcccataatgtggctagatgggcattcgcccagaacatttcaggttttgtggagccctcctcgatacatgatgctatcctttgtaatgactgtgaagtctaattttcatatctatatataacgctttattttcaaaaaagaataggaaaccaacaagaacaaaataccatatatcacaatcatcttagagtaattaagtacataacatacacactacaaaagaaaatacaggatatacagaggtaagatgagtcactacataaagtatttaaaatgcgagacgaacttaaaaaatccacatgtagaactactaagagttatttgcgagtagcacagtacaagaagacttctcggtaaaataaccatttattgaatcaaatcaaataacggttattaggcaattattcatttttatcacacgtaattatatgaaatatggagattgtccacgtttcatgagcaattattatgataagtccaaaagaaataactgtcataagagaaatcctatatgtaggagggaagacaactgtgcaaaggacgaccaaatgattaagtaatcaccctgagtgaaatttatctttatttctttgtatcacttgaattttgtactctataaacaaaatagtagaaataagaatgactcgtattatgtagatttaactacaaaactacgtaaatatcctatgtttattattctaagtatttattcttcctcaaaagctttattaaagttatcttcttagatcataaaaaaaggtctcatttattgttaatgaaattccgagttaataatattgtgctttcattgagagtctttttgaagttaaaactctaaaaaaaacgcatctcctcataaaagaaaaacttgaaagtttttccataagggaaaataatcaacaagaagaaacactgcatcattcagggaaagaaccacaaggaactcaaacccaagacacaccgaatcagaggagggatcctactgaatgggattttgagagagatgttaatggggaagagattccaaaaaggaggagttttgatgcctatgaccccacaagatatgtcccaatcgtggaattggagaatcgtcaacttcggtagagacccgctgagtcaaactgaagaaaagaggaactagagagcgcgactactgctgcaagagtagtctcgaatgatgcaccacctttacaagatgaatctctagttagacgactacgaggaagacctcactgatcacaaaatagaagggcacgaggtcccaatgtaaaagagaacaatctaaataacctttctcactccaagaacaacaaccaaggaaaacaagggaagttcatgttgatagagaggatcctcaaaatctaggtgccacagcttcaagacgaacgtgagtaggagtccaaagatcgtctcataggaataatgagaattcatgtaacgccctaatgctaaagtacgctacagtactttttcaattacaatgcaatctttgctaatcaaagaattttctcaaaaaacgtgtcaaactaaaacttttatattaattaataaattttataatatattaaaatatttacaagtgctggtatcccctttttttaaacttttcaaacataatattccaaaatacataatatac

SEQ ID NO: 316273 - DNA, 1088 bp, Cannabis indica
tgctgaagacccaaatcttgcaattgaatcgaaactagaaccgattgcaccaatcatagagacgtctaaattagcagtccaaggatgcatagtgacagggtttctatcaaatttaataactctagcttcagagaccacatctctggtaattatgtcttagattcaccaactctgagtcacacaatttgatcaataccacgctttccccaaatacttttaataaatccatcaaaagtaaaacgatggattaaccccaagaacaatacatacaacagcagagccccagaattcagacaatactttcactttagagagttccaatttcgtaaaccactgaccttctttgatgatggattctgtgtagtgaagatgagcacctacgttgctagcttgagacttcagtactttagattgcatcaattgtaattgggattgtaattggctccccagattctccataacatccacccttgattgttgtgattgcctaggatcagtcgctgaaataacacactgcaaaggaaaaagacttcccatccagtaatgtgaattcgccatcaatcacatcttggacatcgatagactcagagatgagatcgtattcttgttctagttgatcgacaagaatatttttatttgaaggcagcttattaattacccgtaaaaataggcttcggtagaggttttatcttcttcgccatagaagagagacactactaaaaaatcctaaattctcgatggtttacactgtcggttaaagaattctcaacggtctataaaattgtcacctatatacgagcatcacgaatactaaatagaataggcaacagtggaaaaatgttaggggaaaagagtttcggatggtttaaaaccgtcgacgatagtcgatatgataggccacggttttaaaccgtcactagagttgattgccccaaaaaataaatcatcatcttcatcctcctcgaaaccacttttcgcatatgtcgcagccactccaaaatctttacaatatttattctcctccaccatcgttgtgctcatcttcatcctctcgaaattttcttttacaagcttcagattgcttttca

SEQ ID NO: 316274 - DNA, 750 bp, Cannabis indica
aaaaaaaaaaaaaaaaagcacaataaaactccagcatacaaacgacatatatttatagctagaaaatgtttggtggacaaaaaagctttctattcaaattgtagaaattataagatataagacacatgcaagtctcaacaaaagttgactaaattagctaatatgacatgggatatttgactaatcatcatcacttgcgcagaccaatgctaatatcttcttgtacttgcttttaccccgtctaatataattaataccaaagcatcatgtaactacgaactaccgtattactttttcatctcacagattactatactgttatacatatataaaaacatacatataagtaatatatatctgactctttttttcaacaatactatcttcacttattaagcgttttaccatcatggtactatgtatgcatgtatccactcacacgctcctcctccatatatattagatatatatatacacacaaaaaacacatgatgataatttcaaccattgatctatattatatacatacgagctgatacgatataaatatgtaatttgtttatttgaactaaatatatatacatgcaattaatatacgaccaacaaactcattcaaactttttcacttttcttaaattaaacagagatataaataatataatatggtttatggttttgtaaaaatggtatgtagctcttagcaaaaaaattaaaaacagaaaaaaaaaagaaattaaaagtaaatatttt

SEQ ID NO: 316275 - DNA, 2124 bp, Cannabis indica
tgaaaaaaatactcagaaatctgaataagattgactcgtggagtatgtagaattttaactgcaaaaccacgtaaagaaccctttgttcatatattatttttctatagcttttattttttatgtgtggaattatcatcgcgaggttcaaatttggctaacaaaaatcaacattaactattaataaagtcaagaaaatccacacaatgaagaagaggatcccccaacacaaactcttagagtttcctgcactgtaacaacgtagtacacccccaaagagcatatgagtagattcttccaacccacacaaaggacataatccatcagataatagaccatgaagtgctagattagttttagtaggaatccaattatgggacgctccgaagcaaagagtccaacctttgaaggaagattaagacaccatatctttttccaccaaccagatacgacatcagacagagaagcacgaggggcagcagaattgcgaaggcccagccgataaccactcttaacacagaataccaacctgaattctcaaagctccatattattttatttggcacatcatgtgaagatcgagggatagaaaggatagattcatcttcatgaggcaagaaaatggatcgaattaacacattatcccaaacacctgaatctttccgtaacaccgacacctttctagatccatcagttaaagaagaagcagacaaaacggaaggcataactgaaggaattcagctgttagaataaatagcaatgtcattcccattccctacatgccaaccagcccagagtcaaaaagttctttcccccataagatatgtttctacacaaaagagccactctttgatttgttgatctcgacaaaggaccgctttcaaaaatacaggccctttaacatacaacaagccaaacaatcaggaacatggtaaatgcgagaaacttgcttagccaagagtgtcttgttaaataaacaaatgtatctaaaactcatacctctatcttccttattatagagaatggtgaatagatttgtgtgttatattccatatattagtatatatttatatacaaagctaggagactaaatgggaaactactaaatacaaataggaaactattaaatacaatttatcctaatttttacatctaataatttaacattccccctcaagttggagtatagatgttaatcatgctcaacttgttacaaagataatcaacctacaccccattcaaatcctttgtaaaaatatctctgaattgttctctagtcttcacatatcatgtggagatcaggccttgttgatttttctcacgaacaaaatgacaagcaatatcaatgtgcttagttcgcttgtagaacacgagatttgaggcaatatgaagagcagcttaattatcacaccacgattttgctggaacagaagtcttaaacccaaattcattcaaaagctaataattccatattacctcacacacagactatgccatagttctatattctgatccagcactggatctagaaataatattttgtttcttactcttctaagagatcagatttcccccaaaaaatacacaatatcttgaactgggtcgtctacctacattggagcctacccaatttcatcatagaaacactcaatctgtgtatgttcatgatccttgtaaagtataccttgtcctggtgctcctttcaagtaacataaaattttctgtaatgctacccaatgatgaattgttggagaagacatacactgactaatgacactaattgggaatgcaatatctaaatgattcacagttagataattcaactttccaatcaatctgcgatatttctcaggatcttcaaattgttccccatcacgtgtaagatgcacaggtagattcattggagcattacaaggttttactccctatttttctttctaagttaacaattcaattcaatacttccttaaccttgtttacttcgagtaactttaactcccaagaaatacttaagcacctctaaatccttcgtgtgaaactgggtacgaatgaaagacttaagggatgagatgccttcattatcatttcaaataataacgatatcatcaacatacaccactaataaaa

SEQ ID NO: 316276 - DNA, 1618 bp, Cannabis indica
gtgcctataaaaggggtttagtacttagtgagaacctttttcaaccatttttactcttagaaaataagagcaaaagttttcatctagatcttctctcaaatcttcgaagaggtttgctgagaaatccatttacgctatcctccgagtagatcgagaaagctacaaacaacgagtaagtcacttatctctttgctttagacgattgcaaatgaatgtatgtattattttttggatttcttgccatgaactttatctgctctcgaactgttcttgactgattgtagaatagatagttctagggtttaaaactttaaccaatatttaactataacttctaattctctgactacgtattgattttgacctgaaatcattaatttccactcattcatgaaattttaaagattaccaagtacctttcgaagttttgaacttttgggtttggaaattccaattttgagtgaaactctctttttgtccttaatctgacatggtcggtatgtaaagtctatttttcatctctttctccatccaattcttatttttctcgtctctcatttttcgtagataaaccctgataatttttgagaaggcaaacaccacatcgaccatgacttactccaatttctatataaaaatcatccccgactccgtgcaagtttattttcgcctagtgacaatctctcaaattctaattttgaggattaagaaataagcagtgaacacacaatgtccattgagaatactttattaaaaattgatttatttaactgtcttcataatattatttttcagtttatgtttaaaaaaaaattatacatttttttgagttgatatatatatatatatttatatatattacacattgacctatgaatgtcaaaatcaaacaaaaataacatatcataattatacattgagttacctataatttttttatttgttaaaaaaattataatgtttttaatatccaaatactcaaacattataaactaattaaaatataattttttttatttaaagtcaataaagttaaaataatagtatatctaatgtaataagtttttaaactattttggatattaaaaaattatatttcatacaaattgtaatagggaaatttcatattttggccctaataaaacactcaatatcaaaatttatacctaattttttgaacaaattgattcctctaatttgaaaaagttcctaaaatacccctaaaattaaattttcactatctctctgactttccctctctctctggctctctgactttccctctctctcgctcaaagactttccctctctctcgctctcttcacgaacccacacgaaccagaccaacgtacccacggcgtcgaccacgaaaccaacaaacccacgccgccgtcgaccacccacgaacccaaccccacgaaccaaacccacgaacccaatcgacgaaccgaggagaaactgccgtcaccaccacgaggagaaactgccgtcgccaccacgaggagaaaccgccgtcaccacccacgagcaaaaaccgtcgcctacaccacgaaattcagtcaaaggtaagatttttttttgaaaaaatacatttttcatagatttggatgccaattat

SEQ ID NO: 316277 - DNA, 1371 bp, Cannabis indica
gaaaagtgtagagactgcatcattcattgtgacattaagccagagaacattcttttggacaaggaattttgctccaaagtggcagattttgggttagctaaactcgttggaagggacttcagcagaatcctaacaaccatgagaggaacaagaggttatcttgcaccagaatggattgcaggtgtagcaataacatctaaagctgacgtatacagctatggaatgatgctttttgagttcgtgtcaggaaagagaaactcagggcaatgtgagttagatgggaagataagttacttcccatgcttggctgcaagtgttgtcatgaaagaaggaggcaatgtcctaagcctgctagacccgaggttggaggagcaagcatgcattgaagaagttgaaagagtttgtagagttgcttgttggtgcatacaatatgatgaagctgataggccgtcgatgagtaaggtggttcaaattcttgaaggagctatagaggtggagcttccgccaatgccacgatcattggaagtttttagtgatgacctggagaatgttaggtacttttctgacccatcctcaagcaagagttctgaggcacagagccacatgtcacttcttttaggctgaaaatctaagactattactatgctctcatttgtccctttctaatatgctatgctattgtgcagtcttttttgttatgtgtaatatttggagttattttcaatccaataaatattgttttttttcttcctcctagtgtatataacgtttagtcttatataaaataaattgaacactattacaattcctgtgttttgtatgcatatggacaatatttaaggactcaaagagtatatcactattttttctttctccatggactgaattaatcttcttgatattctcacaaaaaaaatgactttctaacagttagttttatacctctaggaaagggtcgtgagttcagatttaattttctattatgctcaataataataataatataataaagtgttatagtttaaaaaactaaagcatttatatttcatgctaagtatatctcaaaaaggaaaaaaggtgtttccttatgcatacactttaaattttttagtcacataaatatatttttatacataatcaaagaaacataaacaaattaattaaagggctttttcatgtatatactaaaaatggaaaaaatattacataaatataggggaattttcataaatatgggaattaagggtatagtttacttttttatggcataaataaataacactataggtttatagattttttttatttttttatttttttactatttatatgagttttttttatatgacatatttttgtaaaaaaaaaaaa

SEQ ID NO: 316278 - DNA, 669 bp, Cannabis indica
tttaaatatataaataaataaaactacaaataaaaagttagactgaaaaaacttttaaaaaaaagagtgtagataattttagtcgaaccagctgagctatatgtatattttttaattaatttggggtaaaatatattactatttgtaataattttaataatttatactaaatatcacactaaataaaaaatattaatttaaaaaatttaacattttatattatttatatcaataaggagaattacttcatatactaattttttaaactttttttttttaaatttacggtttgggtttctaaagtggttgcagcgctagttgcaataagagtttctatacgattttttgttgcaatttaagttgcagcgctagttgcaatataaatttatatgtagaattacataaaaatgtaaaaaaattattttgaagtataaaaataaaaaaacccctattaataaacataataactatttttgatctaatgatatgtatactcaaatcatttaaatagaatgaaataaaatgatttgaactaatttagtatagatttaaaattcaatactattagaagatttttacacaatccacttaaaatttggcttttatttatttatttattttttatattttcacggattcatttttacagttatttacttgttttttttt

SEQ ID NO: 316279 - DNA, 2222 bp, Cannabis indica
aaaggctaattagaatttttgtcccctaaattttgacatgtaccaaatcatgctccctgaatttttaaggtcgttaaaaataccccttaaattattgagattgttggatttaaagacttttttctaattgtagtaaaaaagtctaatatggatgaaaattcaggggtcataatttagtgcatgtcaaagttcgatggacatgatttaattgatatcaaagtctggggggcatggtttagtacataaacaatcactgaaatagtaaaattaaatgaaattagacaaagtccttaaatccaacaatctcaataattcagagggcatttttaacgactttaaaagttcaaagaacctaatttagtacatatcaaaattcaggaaacaaaaatcttaattaaccttataaaaatgtaaaaacaataacacgctcgaaagagaagtactactcccacgacattggaatacgaacaaaacgacaggcacacaacccaaaacgacaaccaaaccaaacataatgaaaatgaaggaattggaaagaccttgaagacgctactattactacttagtgatctagttatacctaagttttgaacacttgtcaataacaaaaacaatgaaagcagcccatttggacacgtgtcaaacgacagaacagatgttgtcactttatgatgacacaatatgatgccatgcatgcattgcatgaacacgtgtcaacttaattactactctcttttgtataagtcacacaacaaaacttgttcatcttataatttggagtttttctctcaaaaaatttctagtactcttagcttcaattggataaaaacacaacaaccttaaacatgaaggtcttaacaaattgctgtcttttcttaatgggttttgtttaaagtttgaaactttttttgttttatgagaataaattgacaaaaacttgagaatgtgttgaagaaacaataacacttttgtttattaatgttatgttttgaaaacaggttcatgagacaaggtcacaatctcattcagaagatcatagtatgaagacaacaaagaaacaaaaggcagagaacaaagggcatgaagcagagcattcgccgaaaaaggcgaaaagtagtgggcattctaatgggaaaaatggtggtgaaataggtgctgagtatgaggaattttgtaaagcaatgaatgagcatctttcaattgatcatatgcgccaaattttggatgctaatggcttagattcctcagtttcttctgaggcctcacttgttagaacatggtatgatgctaattctcactaacacttgtacttgaagttgaagacaatattcaaccttaaaaagattgtttttttatcttaaagattgtatttttatcttaagagaatattaaaccttaaagatggtatgatgctaattctcactaacattttacttaagagaatatttaaccttaaagaatataataaagatttttttttttgtcttaaagattgtattttttgtctcatgcatgttttagagtaatagtacaattttctgaggagttgagtcttaatttgatactaacacttggattgggttgggttgattcataagggtgtgtttggttgagaaaaatgaatgaaatgggatacaatccatttttagaacctggaatattattgaaccttaaagattgtctttttatcttaaagattgtatttttatctcatgaatgttttagtaatagtacaaatttcagaagagtctaattttaatttgatactaacacttggatttggctgattcataagggtgtgtttggttaggaaaatgaatgaaattggatttcaatttatttttagaacctaagggagtgtggtgttgaagacttgatttttttttttgttcgatatatatatgtttagaagagtaatgatacaaatttaagacactaacaaatacttgtgttagcttaactcacaagggtgtgtttggttgggataatgattaatgagatgggatttagtcaaaactgaaaaacatcacacataagaacttaagagaatattgaactttaaggactttctttctaactcaatgtttagaggagtaatagtacaaatttcggacagtgacaaatacttgtgttagctgaattcataagggtattgaacattgaagacttgttcttgtttttttaatttttaatatatatatgaacccaagagaataatattg

SEQ ID NO: 316280 - DNA, 1105 bp, Cannabis indica
aacgatcttaaaagttcagggggtaaaaatcctaattagtcttaattagcgatactttttaaaaggagataagttgaaaaataactcttttttgtaaaactgtaatttttctctaatttcgtttgtacaaatcctgttattttcttaaataggccacatataaggtttagattcttgatcattaagtctaaacagaaacatgtagtatcaattactttcaaatattcctttaataaatttaaaacagagtctgtattgacaaaattgaaaaaaaaaattacagttttacaaacattaggtacttatgttactaaaaataagcattggatttataccgcttacaaacttaaaactttggatacttatgccgctatttatctttttgttattaaacaaaatataaagtcaataacttttacaaaatacagagtctaaaatagtatttatttgattatttatttggttagtgcggtatcataaatctcaacacgtaatttctctgttgagtaatacttatactgttaatttgattatttattgagtgaaaaagtaaaaaagggtgataatgtaaaaatgataaggaattaataataaatgttggaccgtgtggtgtggtgtggtgttattggaaaagatggaagtctatcttttcatattttcttttcaaattgatgtaataataataattaaaaatgaaaaataatacagtgacagtcacgtgaaacaaagtgaccacagtcacttcttcttctcagcagtaatagtaagagtaagtaatagtactatatgtataactatagtgttaacaaaagtgttcactcaaccttttattttaatctctttaatcaacttttgcctttaaaaaaatacatcttagaatatattttttttcttataaagtcattttaaatatttaagtggtattctaattttaaaaattaagtccctataaaaaaaaaggaactttttatttttacattttcaaacagtcttttttgtatttttacaaaattctacataaaaatctcaattacaattagcgctgcaacctaaattgtaacaaaaaattgtataaaaaccccctattgtcaattagcgttgcaac

SEQ ID NO: 316281 - DNA, 512 bp, Cannabis indica
gtgatcttgctttctattattgttaattgtccaaatttaaaggaaactaatagtaaatcgttcgattggacaactcataaccgaaacgagtgcttattattctttcatatgaatttgttcgatcatgtgtcacataatttatttatttttagcttaattaattatgtaacacattataactgacaaaatttggtgggtattttttcaccaaacctagatttatttgttttcttttttgaaacatagttaagttattatagttcttctaactagttctgaaaatgaaattttgggtccacaataatgaatattatttttaaagcaacaatatatatgaccaactttctgaatttggaaaagaatattgataaagattagaaatatcacctataaatgaggttaaataatattaatatgtaattacatcatcattagatgtttttttgtttaattaagcattaccttgatcatcataattctttatagtaacgtagagagagatcttggacttt

SEQ ID NO: 316282 - DNA, 841 bp, Cannabis indica
cttagttttttttttacttacaaaaaaaacttattttttttttttttagatttttatagaattctacgtaaaaacttacataacaattaatggagcaacctaaatcgcaaccgaaatccatatataaaaactatcggagcaatccaaactgtaaatttaaaaaaaaaatataatgagataatttctcctaaaaaaaattaagtttaataatctatgtagcatcttgtatgagtttttgttcattattatttgttttttaaaattttaaaattttatttaatttttaattagtgtttttatttaataaaaattttcatttcttcattctcattctatatttaattaacaatatttatgagttgagtataataattaattaaacgataaaaatgaagaaaaagcaatcacaaaattaaaaataaaataattaaattaataaaaacgctttataattaaaaatataaatataattatatattcaaatatcatattcaataataataacaatatgtttcttcacatataattataggttatatgacacaaatcttaagtttgtaaatttatgtaatttgggtcaatgaacactatatcaacatctcaaatgacagagttaggcatggcattggaagccagtggcaaaagcttcatctgggttgttaggccgcggatcgagtttgacataaacggcgagttcagaaccgaagagtggctgccaaaggggttcgaggagcgaatgagagagtcgaaaagagggttggttgtgcacagggccggccctgggcataggcgggctaagcctgtgcctagggcccacctagtccaggggcccaaaaaaaaa

SEQ ID NO: 316283 - DNA, 1793 bp, Cannabis indica
gtttttttttttacatttttatgggattttttcccatgaatttgtaatatttagtttttatacctataagatatttttacttctagcaaccagttttcacaatatttttataaatagatgatagtaactagtttcttgtttttttttaacataggtgtattttcttgagttgcatctccgttgatttttaatttagttatttcacgtaactatttttcgtgtgttagtttttaatttgataattttacaaatttattcacagaattaaattatcataatcagtcaatacaatttgggtgtgcactattacaagatgaaagtgaaataacatgtatatggttatttgagacatggcttaaagcaatgggagggcgtgctacaggttcaaaaagcattgaccaagacaaggcaatgaaagctgtaattggtaaaaaaatttcgcacttgccattgtttatgtatttttcacataaaaaagaaatttgttgagaagttgtcacatgagtattacaaaaagtcaaaatttaaaattgcgatgaaacaatgtatttggtcaacacataaaaatagaatatttcaatgagaaatggaagaccttaatgatgtaatatgttgtacccaaaattcggctggtactttagaggataacacgtttcaacattggggaatacgaatcaacaaatataatgacaattatgttaaaagatatcaaatagaataattcattaaatgcggagttaaaagagcatatttataacttgcagcctgcacagtcttcaacgagacatggatatacgaactattgattcacgtattaatgagaaactatttcgcataagaggatacatttaatatcccagaaaatttaatggtacttaaattgggcatattctattcaacatgtgattaagtgggtattagggtagacttataatcctacttaagttaattatgagttaattagtgaaatgtgatttaaaggaacaaataaagtgtaatttattaattacggagatttttatcagattatgtgggtatcgttgataccatatttaaaataaaatattattgggccaggcgacagtggaaacttggcggagtggtcagaaatgtcacgatagtgaagtatggattgaattggaaattgtaccggactagtttagaattttaggtagtcgaattggcgaatcagttagaattactaaaatgcccttgggttttaattttacgcatagggattttgaggggaaaaatggtcattatatttttagggttagaatttctattttgtcttatgtgttggcttaaataagtagtgtattaattaggttttatttttttattttttaaaaaaagaaaaagaaagactaaagacttaagattaaaaaagaaaagttaagaaataaagttcattaaccttcttcttctccttccttgttcgaacctgttgacctcacttttagccaacgacagtgaatctaaattgtaagcgataagtagtataataagtatgtaatataataaagacacaagaattttataaaggttcagtctcgagcagttcggtaataacctaatcttcctggtttgtattgacttaagaacaagggaaataatcccttttcttagagctcttacaatagtatctctgatatgaattcttagataagtttctccaccctttgtccagtgtgtatgaatcactatttataaggctatatgcttgggagggaagaatttcgtaaagcccgcttagttaatttggaaattatcagttaattatgattaattat

SEQ ID NO: 316284 - DNA, 924 bp, Cannabis indica
gcctaaccaaacagaaaataatacctaaacagaatctctgtatcatctgtaacccctgccttgataatccaaccccaaataaagccaataatatattaaataagtagttgcaagaggaacaaattaacaacttttaaccaatttattctcatcccaaaagagtgaaacattatattgtgttataggagaaagatcaagctcaacaaactcttttcaattgcagaattagtctaataactaaacaaatatatttattaatttgctagagtactttaagtttccattttatttgttgagtttgaaaaagaagaagaagaaggaaagagttttacactaatacactgttgaaaagggtaacatcacatgcatacctgagataccattgtttcccatgctgcaccagcaatgctatgtcaaccaaaaaatatgaaaatagagagtttgggtgagccaaagttaagaataattatgtgatgggttgtatacatgaagagaatataattcatcttaagacaaattattaaacaatttacaattaactatttctatcttcttcaaacctgctcaacaatttcatgtggctgaagattccttcaaaaaaccccaatttccagttgcacaaaatgagtagtgcaaagggcagccaacctaattaatcaaaggaatggtaattgtaaaaaaatttaccaaatatatatacatagagagacacagaaacaaaattcccaaaataaaatgtgctcaaataaaaaccaatacataaggcaaacagaacttttaccaagcacctcgacacaacattttaacaacgacaaaattaggcctttttgcaaagcagttaattagccagcagtagcataagaaataaaaactcacaatttgagttgaaaccacattccttttaacattacattatattcttga

SEQ ID NO: 316285 - DNA, 1351 bp, Cannabis indica
gtgttgttcctggaatggaagaaccactagttgtactttctgacaacactggtgctatagccaatagtaaagagcctcgaagccacaagagaagcaaacacatagagaggaaataccacatcatcagagaatatgtggcaagaggggacgtattggtggagaaagtggacactgaagacaactttgttgatccattcagtaaagttttgactgtaactacatttgaaaagcacagattgaatttaggattaattgaaatgtactgattgttttatgttagtgcaagtgggagtttgttgggctttgtgccctaaataaaactgtatttcaatgtaatcttttctattcaattatcaataaagaaacagatttaatttcattacttgtttaatgtgttattcaattagcaattatgaactatgtattgtgggatcttatgttttaaccgagtagtaatagttggacataccgagttaatatgatatctaccagtgtagacaatttatacgatcaatgaggatcaatagaatattagaaatatgctgtgatcataattgataaaggttagattatcttagaataatcttttccactgacgaagtatttgtctaaaagtgatgattatatgtactattggttaggtactttaataagtgtggtatgagaaagacgttggacacctatttactggagtaacacatgtgataaaaggacatgatgaatcgaaaagttctaaggaacttataaaatcatagagtgagttcgagatatatactcgcttcattgagtacatagaaaagctatgctgaattaaagcatagggatattaaatttcaagtgggaggatcagtatctctttgagtatcacctatgaaaggggtgcataaatttagaaaaaaaaatagaagattaagccctagatacatcgattcattttagatattggagtggataggccaggtggcctaatgattaactttaccacccgcattgtcttgggtgcataatgtcttccacaactctatgttaaggaagtatgtgtctgatccgacacgtattttgagttacgatgatattgaacttcagacaacttattttatgaggaagcaacttgggaataagagttgtagatgcaggagctgtatccctaaatcatctaggtaaatttcgaggacgaaattcttataaggaggggatggttgtaatatcctgataagcctaatggtaaataattatagttatatttatattatgggttaatcaggtaataagtgggattatgatcctactaattgttggaaattcattttaccaggatcttagatctactcacaagtatgttgtttaaaca

SEQ ID NO: 316286 - DNA, 1752 bp, Cannabis indica
ttttttttcttcaaaattttgggctatgatgtaaatttttcttatttattattattttatcatgtaaagtataaaaaaaataatataaatagcccaccatttaatgctatcacgaaatacgctaattaaatgaaaaaaattattatgaaattatggtgatgtaaattttgcatcgtagtaaatattgtggtaaatttgacacaatatttgctatataacaaatttgtacctatcaccttttgacacactattgaagtatgatttttgataagtatgctatattttagctttgcatcactaatatgcttctccattagagataatcttatactttcaataaggacaactcaaatggtaaaacctaaatttattattaaatcatcaccaaaagagtattgttataatactatttttttttttcaatttcaactacaacactataaattacacaaaaaattatattctttattatttttatatataaatatacaaaatacatatatacattaagaaaatttaattatttaaccattatttatatattaaaattaaaaaaattaattttagtgtgttctttagtgtcctactaataatagtaagatactgtagaaaattttatatatatgaattaatttagtaaaaaataacattaaatttgagtatttagtgtttctttaaaatggactaatactaattattgtataattgaaaaattgggtataaaatggtactctataatcattatagtgaatatataatataaaaaaagaaatcaaaaaagataccagtggtgcctagcaccctcttatgtgtcaatattgctattggtctaactaagtatcgggtcccatataatttaatataataacttttaaggagtatcactagctaatcacaacgcgacatgtcgagaaggtgctagacaccactggtgccaatgctataaaaatactaatccctttctaaaaacactattttattattttatgattaactttttgaatgttaaaccaatggttgcttaagcaaatgaacactttaaagcatgcaaggcacgctatccctatctatagtcatatggttggaacatcgaaaccaacattgcatatgagctcacacatggccgactcaaacgagctttgctatacctataaacaaaaaaaagttaaatcattatatatcttgtctcatccaatccatgaaagctaccacttttgcttttacaagtagatattaggttttttctgcttttgagtttcttgtttttgcaaggaagattattaagttgggtattattatcttatcccccattcatgctcatcacaataatcacattttaaaaaaataaaatgaaataattgatgctaacttatgtcatctacgctattggagtcctacaagcaaaccctatatattccttgactgcatagtcaaatgttatgatcatcctaaaaaatactaaatggatgctgcatcatttcttctattattacttccaatagcagcaattgccatatcactaaatggttttgtttgtcctacaattattatttttgatggttaagcaattaataaatgtggctaagtgacaattattaaacacattagtattgtttatagaggaatgagagatatgcaagttaaggatctgataattaatgcaaattctattaatcctatttcatttcaactcatttcccactttttcaagttacaaaaacaaaaagttaaacagaacaaaaaaaaaaaaaa

SEQ ID NO: 316287 - DNA, 572 bp, Cannabis indica
atttaataatattgactatgaaatgtagtcaattacgtgataaatataattaatatatatttaggtaccctttatgcaattcttcttaagtagaagaaggtgttattatttgtgtacactagcagacctaagattttgttcaagcaggagcggaataaaattaaatattaaaacaatacaatatagaaatgtaattgtatatatttatttagaagggacggacacctattttcttttacctaatttatttttactttaatatttttgtacacattaagaaaagaaacaaaaaaaaaaatagagcataggcaagagcctcgcctcgcctggtctttcattgggttactctcttttttgtctatcaatccggtcgaatcatccaccatgttagcgaccttctcttccatcttcggcgttgcaactcctgctgctacctccttcttccccctttttgattatttcttattcctctttaattaatctcccttcactctaaatagtctcctctcaaaatgttccaaattatttccttctgtaaatcaacctatattcaccatcaaactcataacttc

SEQ ID NO: 316288 - DNA, 881 bp, Cannabis indica
tcttttattttaaagttttttttatttaagtatttatatattacaatcatgcataacttgggactcgaacccaagacttccaacacacacgcatcctcctatgaccacttgagctagcctcatgtggttttattataaagtttttttaaaatatactattcatgttctagatttataaaatactaatcattggctaaacatatattattgattattttgagtttttttttagaaaaaacctatatccattaagaaaatatgaatcatatgtttataatgttctgcgtctaaatagtttcttcatttaagcctaaagcatacttagctagttggtgagcagcagtatttgcctctctagcgacatagctaacagtaacttgaggaaataaagacaacaagctatgaatattgcaaataaaatcatataaatagatgctggctttggctggatggtgaacactgtctacaagaacttggcaatacgattcaattttggagaccacgattgtgctgtagagataccagtttaaagattgttgtagggagagagcttccattaacaaaggtgaaaagacatcagaccaaggaatggaggctgccgtgattattcctttgcagttccgtatcacaaagtgaaggcctattttgcacatgtttatgtcttgagctgcatcaacattcaatttcaaagaaccagcaggtgagggcatccaactagagtggatgagcgatctgcacgggataaggaaatgtaagaaggttcattgtgcatctggtattgatgtaggaactactctgccccttgtagaaccaagctaggatcggtgttgtgcctgtgatgtaatatgtgttgggttttgtgccctaaataaaacccatta

SEQ ID NO: 316289 - DNA, 1417 bp, Cannabis indica
cagcaaattccatctaaagagagttgagagagcgaggaagcccgattacccacataaatcggtttctttttcagatcaagcttatgtgggactaaagctcaaagattcaattgttggaggtatttcgatcctatattcagatagtgtatatgtttatttattccacatgttttatacacatacatatgtttcagtttatacataataaatgtctaacagtgatatactcataatctcattcgtatccaatatcttggaattaggtatgtctttcatcttattgattttatagagtaatcttaataatttgagatgaatttaagatccatatgtatttctagatttaatttctatcaagtggtatcatgagccttgcttatgttggattattaaaattaatcatattgatggtgattattaaaattagatcaacatttgagtttgtattaatttaaaattttaattcatttgtgtaatttattaatcatgattatttgatcgttgttgaattaataaagtttattatatatatttcagtaattttttatatgtatatataagaattagactaatatagtatggactgatatatgtatgcatatacgggacgaaatcaatactcttatttagtttcgcgaaatgttgttcattttgtagccatagttttattactatgcatatttatttatatgcttttctgacagttttatggtttgagataaatgctatttatatatgataactgctctctttaattttggtatatgttttaattttggtactatattttgttcctgaattagtcaattctctccatggcaaagagatcttaaaaaattcctctacgaaacgacgataatattcagctaaatcaataaagcttctaacctcagaagttgtctttggtctcagccaagctctaataccattctcacagaaaatatgacctaggaaggacacttaggatacctagaacttgcacttcttaaacttagcataaagtttattttctctaattcgttgtaagacaatttggagatgttgttcatgttctacttttgactgagagtatacaaggaggtcattaataaacactatgatacaattatcaaggaaaccattgaacactctattaataagatccataaaggttgccagatgttaagtagttaaaaatgcatatttattagtgtaaaaatacaaaataaaattaattctatataatattttcgtgaaattaatgtaatatatttttatttgaaaatattatagtgttgagttaattttgtaagaaaataacattttatgacacaaataagagaaagaaataaataaaaagaaattatgaaaatgcattgtttttatttcaagaaatacaaattaattagatttttaaataaatattttcattaaaatt

SEQ ID NO: 316290 - DNA, 2492 bp, Cannabis indica
attttatctaattatcaaaaaaaaattattgaaagagtgaaggtagctaaatgtatacatatagttgaataaaagttttattttagtagatattttttgctcctaaaggttctgctaaaattcaattggttaggattacgtattattggtgtcttcgctacctagtgaaacaaaaactcataaataaataaagaaaaataaataaaaatatcagttatataggatggtataagggaatatttaatatcagttcaaatattaataagatttgttttattattattttattatatataaataatattttattattttattaaataaaaataaaaagtcgcccataaatttctcataaatttcagttatatagatacactttatataaaatagaaatagatatatatatatcattatttattacccgtataaatatatagtggatgatacacgttattaaatgtgaaaaatatatattaatgtgtacatatataaatgatgctttattggataattatgtatttgatagaaaactcatacatttaaatctcatttttaaaagatgtccaacttatccagcatcgaggggaatctgtacacatatgttgatggcttgctacagcagcttagaagtttaactagctatagttgtgtaactggtttgtgatatgtgtattggaaagctaatattgtggctcataccttttagccaattatactttgagtaacaatgttagtagattgtggagttactcccccttgtaatgacacaagagaatgaaaaatattaattgagattagcttgacaaaagctaatgaaaccaattagaccaatcgtttatttatactaatagagagtttgatacaattaaaataaagaaccaagaaagcaactaacaactaccataggaaagtagtcatgtaaagtttgaatttgaggtagttgaatctctctatagttaagaacatggtaagaatgtgtgccacttggtcaactgagggaacaaatcaaacagctaactggtgtgctatgatctgatcacgcacgaactgtaaatttatctcaatatgcttcaattgagcgtgaaaaactagattggttgcaagggttgtggcactttgattatcaacccatataacagggcaacgagtcatatggattttaagctcagttagtaaggatgtgatccatttgagttcagcaacagtgttagctagagctctgaactcactttctatactagaccgagcaacaacctgttgctttttggcagaccatgagatcagattgtttcctaggaaaaaaacatagcctccagtagagcgtctatcatccacacagctcgccgaatctgcatcagaatagctttctagaaccatttcaacagttggtcgaaatattaatccttctgaaattatacctttaaggtacctcagtagacatttgcagaccttccaacggcaagtggtaggtgccttgaggagttgactgagtttgttaacaataaaggccacatcaggtcttgttagggacagatattgtaaggcacatattgtacttctgtacaatgttatgtctgagaatggttcaccttctattaaggagagttttgtagcagcacttgtagggtttggagaattttttgcaccatccatataaagttttacaagatgatctgggatgtattttgtttaagagagatacataccagttgaatctctaaaaatttcaactcccaaaaaatagtgtacctcccctagatcttttaatgaaaactgatggttaataccattaacgagcttgttgatgggagatgtatctagccctatgactagcatatcatcaacatatactaggagaataatgagagtagatcttgagtcataaatgaataaggaagtgcctgacttagatgttgtgaattcccactgaattaagcattgtttaagtttaacattctatgcttcaggtgcttgtttaagaccataaatggccttctttaatagacaaacatgttctggtttgtctagattaacaaagcctgggggttgtctcatataaactgttccctgtagagcatcatttagaaaagtatttgtcacatcaagttgcttgatagaccaattatgtgacattgctaaagagagaatagttctacagtgaatggtttcacaacaggagaaaaagtctcttcataatcaattcctggtatttacaagtaccctttagccacaagtcatgactttaatcaattaaaagaaccatcagcattgagtttcactctgtgtacccacgtactgtctatgacatgcattcttggttcataaggaacaagtatccaagtgccagtagacttgagtgcattgaattcatcattcttggaggctagccatttatgattttgtagagcttctttggtattctttggtttagttgggagaagggattcaggcaatggatattttgtggctatgtatgtgttggaaattatttt

SEQ ID NO: 316291 - DNA, 948 bp, Cannabis indica
tttttaaaaaaaaaaaaattatactgtctgaggatggcttagacaatttaaaatactcaaataataataaatgttgccttattaccttgaaaagggataactcttgctctaaatgtagtgttcctccaagttcaatgttgagtttatgtgaaggaggcaatattgcagcatggtgtaacatattgttattctcatcatcttcaaacgttattatgatatccttagctgagccaatttcatgtatcaaactgaatatgttttcatggcgatttagaacagcaatatggaatatggttctgtttttttcatctacttcccataccaaatcagggtataaaccaagaagctccaccaaaaattgataattacctaattcagctgcctcaaataataatctagttggtgtgtttattagattatgcacctcgacattaggtaaacatactagaatctccttccatatgtgtttaacaagttgaagggcttgattgcactctgaattaaaacaagggattattttataaatatctaaaaatagcaaaaaaattaacatttttaccgatatatagctctttttttttatatctttacgaattttaatgctttttttaacaacatacaaaatgttatttttctattattttgaaattgaagttgttctcacattactgctataagaaagcaatgtaaaaatattgatttaaaaaaaaggtaaaaaattttgaaaaaagaaaaacataatttacaataatgtaaaaaaaaaaaagtagattataaatgcatctataaattaaacatggtatgaaataaaactatgatgttaactattaagaggacttgtaagcaggacttgtattttctctaatataagcaggacttgtaattttgttgcccataatgtggctaagtgggctttttcccacaatttggttggtgatattccggtat

SEQ ID NO: 316292 - DNA, 614 bp, Cannabis indica
taatagatcagtttcaatgggacctatgattggaatatagcaagtgaagtatttgatgaaattgtcaaacttcgaaaagtcttgaaataggtcgatattttttttatttgtttattactttataatatgtatatatgtttttttttttaaaatataaatatgcaattctatggttccacttaaaaatatttgttattaaaatataacaattgttattattatatatgtagtcttttgttgaaagtataataacaaaaactttattgaaaaataatgttttcgatcgagttaacacttttggaatctcgaggttcaagttgaacatacaagttggatttttataactaaaggtgatagtgggcaattttttctttccccaactatctataatatagctaaaggtttatagctaaccttatagagttattagaggtgtgtgtgggtcgaatcttaacttatataactaaaaaaaaaaatgtatatatataagacccttcaataaaaaaaaagaatctaatttaggtgctctaatagagagctttaacgtaaatatttttatatatactaggttattgttacgtgccaaggcacgtagtgttagttttatttaatat

SEQ ID NO: 316293 - DNA, 717 bp, Cannabis indica
agactgagaattcccaaaacccaaatacgagccataaggtccttgccaaagtctcatcgaaaccattgattaaaaaaccagatctaaaatggaccaccaaagaggaaaaactcttcttagaacgacccaacccagagccagcaccgctgaaagattcggcaaaacatgtgacccatcgcccgagaatcaacacgacacagccaaagagatatcgcaaccagcaaagacatcgtaggaacaaaaaggcaacccatgataatagccaccataaaaccaagtctcaaaggccaaacaaagcatccccctgaccatggccacacaccaaacccagagttggtgaatcatggtcgaagagggagaacgaagacaccaggccgcaacagatgcaaaacatagagagaaaaccttacgcgacatttatgataagtgagtaattatttgtattttaaagtgtgcagatgtaaatttctctatttcatacaattttttaaactattattcctcaattaattcaagagtattgttattcaaaggtaaagttgtacattcggggcaaactttttggcacggcacgagcaggacacggtacaaaaaaaatatgagcttcagtccgacatgacacgaataaatatgagactggacatgacacaactagcacgaatgtattagtgcaaaaacacgacacataaacacaaaataaaatcaagaattaaatct

SEQ ID NO: 316294 - DNA, 691 bp, Cannabis indica
agacctctaaggttaagaccaaggataaaatggagaccacacctataatcactctaaggtgtgcccgagtcgaggaaaacatcatctccatcttgggtatattaattcgagagttggtcacatcatcaattgaccaaagaacagtcaacgactgctacaacacgttgttgacagttgccaagaagacctcctctactgtaaagccgaggtgatgatgaagaactcctctactataaaaccgagaagatgatggggacctcctctgctataaagctgagaagatgatgaaggcctcctccgttgcaaagtcgaggggatgtaaaaggcctcctctattgtaaccgaggagatgatgaaggcctcctatgctataaatctaaggagttgacgaaggcctcctctactatcaaattaaggagattaataagagcacctttgctaaaacacaaccaatggaatgctaaagaacttcagggctaaaacgtaagagaagacaaaaactacatctttatcaacataaacacatagtgtgacaagagagataacaaccaaagaccaaagcaagtgctgacattctaatgttgacacattttagaagtatctcaatgttgggttttgtgccctatataaaacccattttgatataatcagatttacttattaataaagatcagaaataacatttaatgtt

SEQ ID NO: 316295 - DNA, 1204 bp, Cannabis indica
tgaaaataattttatttttattctaaaaatattttatttagattctttgtgaaaaattaagcaacttttgtttttacggaactcaatttcgataaaaaatgagagagttatgggcatttgaaaattgggtccaaggtgtgtcgagagctccacaccgcacgcacagatcctcggacaagatgaaggtgcgtgtacgtgcattagatagtttttgtttgaaaccctcggtcatgcccgtgttcagacacgatggcacgccactagaggctacacccgtcgagatttctcggcgcctcaccctacagcaagttccttccgcgtgcggatcgaacaggctgcttgcagcctatttcttggcagccttggtttttcaacccaaaatcaattttttcggtgattatttcacccaaatttttttccattttttaaaccctaatatcaatttaaaatattatttttaatatttaaaccttaatatcaatattataattaataatatttaattttttaatagattattattaatttatgatagtttgaagtttaaatttaaaaattaattattttattttaaattatggccagattttaaaaaatttgttaattctttaaaatttatatattatttaattataaaatcaaacattttaatattaactatattttaaattaaaagatagcattatcattttaatttgaaatattatattgaaattatcttataagatgaattaaataattaataaatttgaaattaacctaggtgtttttatagatattctaaccataatattttcaaattcaaaattagttattttgttaaatatttcattctttataaattataagttagaaaaatgacattttatatcattttacttatcagaaatttataaatgaaaaaatgacattttatatcattttacttatcagaaatttataaatgacattttataaatatttaaataacctagatattgaaattggtttatttagttattttaattttattaaattataagattagaaaatgatactgaaaatatctttttggttattttcaaatcatatatctattagatatttaatttaatttaataaaataattcaaataaacatagatattttaaattagttttattttttaattttaaattttgaaaagatatttgaggttgttttaacaaccttaaatttttaaaat

SEQ ID NO: 316296 - DNA, 530 bp, Cannabis indica
gtaaaaataaaaaaatcccaataatataattcactagttgtagccaaaaaaaagaataatataataaactatgaaaccggtaagcaaacattgtggtgatgggcataggcatagtcatagacgatcatgacaatatgaatataaatgtagactaacgaatcacattcgcaattgatgtcttggagaaaattatatgaattctacaatctaagcaataatgatacacaaagttgagtttaataaattgaatcaagtctactacgaatcaactttaccctacaataattaaatgagcaaaaatttagatattaaaatactccaagttgaacaggcaactagctagcctcaactgctataaaaaattataaatttaattaattatttttctaaatagtcacaaggctcaagatccacatatgtttaaagtaaacaatttcattttatcagtatttaatcttttgattttgttttttttttttttttgtataaatatcattattttatatatttttttttgacaaagtgattaa

SEQ ID NO: 316297 - DNA, 1164 bp, Cannabis indica
ggaccaataaaattgtgccacgtgtacactgtatacacgtgacattccaccatggcagttaacgtccaaaaatggacggaaagggctaactgctaacagaacttgagtttagagagttttaccgcaaaaattttagaattgggggttagttgcaaaaaccttcctactttagggggttttatcgcaaattactcaataatattattattattaaaaaaaattatacatatcatattaacaaaattatatacaaccataaaataattatagcatacttataaaattatacaccacgtttatatataataaaataaaaattaaacattcataatttaaaataaaataatatattataaaataaaatttatatgccatataacgaaaagcatatatcatacaacaacatatatatacctacaataaaaataaaataaaataatataatatcattaaaaaatagtatatactatattaacaaaattatatataattataaaataattatatcatatttataaaattatttataataaaataaaaattaaacatgtattatctaaaataaaatgatgcactatacaataaaatttatacaccatttaacaaaaaaaaaattacataacttataatagaaatatatatataagggactttatataaaacataatttaaggtttcacatccctcatatagggcaaagtatattgaaatgtaaactacttggtagagctagttatgaaacttgatagtacataatttgttgtcagttaaataattttaatttagttgacactactacaaaagtgtgtttttgcgtaggtcaacacgtcggtcaatgccaaaaatcgatgtaaaaaaactacaataaaaaattttgtcagtttggaaccgatgacattttgcgacgatttaaaaatgatatattcgatatttgcgccaattcataatagacgcaacctagcgtcaattaaaacccgacacattaaataaaaagaaaaaaagctcgactcaataaaggcccaattgacacataaaaccctacatatataaactaaatataaacctaaacctaaaacacaatcagtcgcaccccatttctctctcactctcttgacaatcggcaaccccaccatgcaccgtgtaacaccctaactatcttaggcg

SEQ ID NO: 316298 - DNA, 1247 bp, Cannabis indica
attattaaataataattttgattctatattttttttaaaatgaaacataataatattttgagatcaacataataatacaacgagcttgaggtgttatatatgaacaaattaattatatttttttacacctctttatggttagaaattagctttatattagttatattttagtcatattaaaaaaattgactaaatttaggctcatagtattattatgttttattttgaaatattataaggtctaaattattaatttataaaattgagagttggtccaataatttttataaaacacgaagtataaaataatatttattgttcatttattaaaaagaaaaaataaagaagtagaaaaataaggttataaataaatatacaaaatgatattgcgcaataaaaaaaaataatagatacatatgttgaaaatttcctcattacaagagagatgtggagaattttataatcaaattatatataaatgtattacatcgatattacaaaataattagcgaagaagaagaagaaaattggccaagcgacatgtcacatgtagtgtaaaatctcaaaaaccctaataactagtaaccaattactaatttattcagcattttgaaaaatactctaaagtccaaacggcccaaaacttcccagattgactttatattatttaaacaccctataaatgatagaataagttcccaacaattatattttcataactaccatttaattacatttaaacacaattagtaactcaatttagtaatttaagagtgatgaataatgatcatggagatgagttacaaattttaagattatcaattaaaggatttataactccttttagattatcattcatacatttgtaacttcatatttatatgttacaatttgacaaatattatttgtcacactaaattatttattacccaattatttaataacttaatattacgtatatcgtaaaataatataatatttcccactaaattaaatgatatctcattagtaacacaactttttatttaatcaaccaaatattatgttatagagtaatataatatttccccacttaactaaataaccccactctaatagaaagtattgcataaatgcataccgtaaaatatctttcaacttgaattttatcttagtgtaattaccacaaagtttgtcaaaattttggttatcataaattgaaccactattccttgataacaaacaagtgataatacacacacatttgc

SEQ ID NO: 316299 - DNA, 3004 bp, Cannabis indica
ggcataaaacccaacagagttactcgtcactgtcaccgagcttttagggatacacatttctagcagctagctacatttgaatgtagtactctcaaagagaataagcaagactccaatgggattatcaaatgggacaaaacccagtttaaaatattttcatatttggggttgccctgctcatgttctaaagccgaagatagcaaaactagctcccagtaggaagtgtgtatgttagtgggctattcagaggaaacttgaggtgcacacttttatagtcatgaatactataaattatttgtatcgacaaatgctacctttttggaacatggcttgttgaccccagatttggccaaccgagagtgaagtcatatttactattgatgcttgctacgtgttacgcaataagaacaaaaaattaaaagagacacaagtttttatagaggtttggccccctgagttattgggtaatgacctactccccatttggttgtattaatactagagataacaccactcagctcacaagggttgtggaatttgaagtggctctcttaagattataatatatgaatcaagtaggtaaatctcaagtgagagcgagagagccctagggcatgtagaagagagggagagagagagttagggtttcagactttagttgagagcttagggagctagagactttgaacttgagacttagaaaattaaggttaggctaataatttttatatggtagagcttacatcccaaatatcccttaataataggtaaataaagctatatttacataattaattaataaactttaaatgactaatttatcccttgaaaatagggaagttgctaatattttttgccaacttctatgtgttgtcaatgcccaatttgttgcttaacttgttgtccatggatgaagactgtgcaccaaaggcatgccaggtaaaacctggctagcgatgcacctgcaggtgcaggctgatcaacctcataatggctataggttagggtttggctgcccatgttcctgccagggtttggctggtcatgttcctgcaagggtctggtcggtcatgttcttgtcaaggtttggcaggtcatgttcctgccaaggtttggcaggtcatgtttctaccagctttggcaagtgttggccaacctttttatgtgttggccaaccttagtaggtgttggccagcctttgtacacctctttcttttagaggtaagacttccttggtcgaatgagcccctcattagtctgaaagtcacctttggccggccaacttgtgcccaaaccctggccagccatataagctcatcttggcaatcctatatactccatttggctggcaaaacatggtagtacatcttcttaatggcttgcttaactcctcttacttgttccttgacggttctgccatgccttgtaaggagacttttgtctaactattggcaagactgtattccatgtgtccttagtcttggcttatgtggacatgacacgtcaaatggacaaaattttggataacatttgtccctcaagtccctgttcgaacatctggttagttagggacttcctcattctcatcttgcttgaagtagcctctatcgagcagccttttctagccgagtattggctttttgcatggcatgcttttagatcttctctttccatatatgcctcatctttgaacttgccattgataagtttcaagatttttaagcttttagaaactatttgattctcacattagattgtaatctttttggtatttcgatctgcatgatagttttaggatgcataatgtgtgtcttgatgaaaaagatttgattttgtccttcgttgtgattcttaactcttttgagccacggagaacacatttgaagttttgaaaaaacacacattttaatccaaaactaaccctggccgaccataggggtcttgtttaagacttggccacctggccagccctaggatatgatcatgggagttggcttgccttagggtttcaccctaggaagctagtcgattcatgcttgggtcttgtgaccgtgaccggttcttagctgggtcatgggaccctggctgaccctctcaaagcttgggaaccttggccaatctaggacttggttctaagtgggtggctagttttctgtcctcttttaacctcggcaagaatcctattatggctttttagtcatatacaaccttagtctcgtatgtggttcccttagaaactctatatggaacttaatgataagtctattatagtcgaatgctcaactcaagactcaacatttgtccaagttgttacacttgagactatacttcgctgatacccaaccttgtataatgacattatatggcaagtaccttttggtacagttgcccagagttttgtttatggcttgaaacctaaaagaaactttactttttggcttgaaacctaccaagaacgctgccttgccttagagatttagctcgatacgtggttcctataggaactttgtccagttcttctctggctgtatagttctcacaaggcctcaaccttacgcgtttgaatcgcacggtagttcttataagaactctgtccagttcttctctagctgtacagttcttgcagggcctcagccttatgcatttgaaccaattttttattcatattcggtcttgaggctttcatgttcttgcttttggcctataggcaatctatgttagaacactactattatttagccttaaagccttttacgatggacatatgaccatctcgtctatcttcttattgccgacatgtaagtatttagatttactttctgttgacttcgcttttagccaacgacaatgagtcttttgatgagtgataaacgatatgtcgtaatgagaatatataataaagcaataataagacacaaaaattttatagaggttcaaccccaagtagttcggtaatagcctaatcctcgttatttgtattgacttaagaacaaggaagaagttt

SEQ ID NO: 316300 - DNA, 1899 bp, Cannabis indica
gagctcatatgagtggtggttgatggatcattaaaattatataaggaattataaagggtctgagtgcttatttcacaatgttatgagaacaagtatctataacaaatcaattatccttctaatttggaaaaaaggcttcacttatatattttgtgctctattttgaaacatatcataattttatgataacaaataagtgaaacttgatgaggtttatgtcccggtggatggcatcttatgtggcactcttagaatttgaatgaagcttttacatatctttttggcatcttatttgaccttcttagtgttgaaacacagaaagtgaataacttgatcaaacttgttacagaataaagaatgagtagtctcacaccaagaatggcaataccacttttctttgattgtagcagacactttcagattagtgcaccatgatagtttatataatttaaacatgcgttaagagtgagaaagtcacactaaagaaacactatcactgtatattatttttgtctcatctgcctaagtttgtaggcaagatggtttcttattaatttgtgctaattgggcagagcctttcactcgtccatttttacaatttgttcatcaaatttttgcccagctatttggcaagagatttgtatcggccatttcttaactccactctttcttgtgcttttgttctggcgatattccttggttttgtgtgttattgattattcccattttgtgttctatcgtgtgttttagtgtaatgattaagcaattgttttagttctattgctcttctcactgttttgttaattttgttgttagttgttgttgtattgtttgtgttttttatatggttaatcgcaaatttggttcattgtttgaattattttcgtgttgtgttgtattgtgtattttttttatgtagtagtttacttagttttgtattattgttttggtgtcttatgaagaaagtagtttgcttagtgtgtttattgtgctcaatgattaaccatattgaaaaaaataaaataaaaaaataacacgtccatatcttttcattcctttcttgcattttgttgtgtaattgagtaataatttttagaatgttattgaagtggtaaaattatgatgaataaatcttttttcaatcacgtatgcataatttgactaacataatatatattatatatttttttttcaaatataacttgttactaagtaattgtttgttgtatatttttactcatttggttgtaaaagtggttctatataatttatgcttccgtattgttgaaaccgattctctcattttttttttaattagaacaaatttttgagttattgtttgttatttaactttactcattttgttgtgtaaccatttcagttttaatttatgtatcaatatttttggaaccaattcactcttatattttttttaattataactggtttttgagttattgtgtgctatttatttttagtcattttgttgtagaactagttctactttattttatgttgcagatggttttttatttaagtcatttcagaagacggttcttgaattatttattttagaaacctatttttgatttaattgattcaaggaactggtttttaatttagttattttgggaactgatttttaatttagttaattcaaggaatcggtttttgatttatttattttatttaattggtttttgtatgtaagtttttatcttgattactttaaggaaccagtttctttgtctcagattttaattagttgataaatataattggtttcttaatcttatattttgagttattatgtgttatttattttcttatggaatcgattcaatttagatttaagcctcagtatttttagaattgatcctacttttttttttttttttt

SEQ ID NO: 316301 - DNA, 741 bp, Cannabis indica
aaaaaacaaaaaaaaaaatagaaaatcatggcccaattgaacaagaatttgaagataaaaaatctaaagataaatttggaagcaatctttctgcatcagcaacaactgagtcatacattaatggatcaagagagagggtgagaaggagaacctcgggctagaggtttcgaggtgcaaggaagcttggtctgcgttctggatcgtctataaatggcaataataggtccaccggagctagcaacggtcgcaggtgaggaatgggttgagggaaagaatatgagagaggggagggggagcaaaccaggaatcagtgaccacggtttatggtagctggaaatggcatgggcaggagctccgatgagaagagagagaagaaaggtagcagagagaaacaaatttaaaaaattagagttggggtagaaaaaaataaacagataaattatggtatttgaaacttataataacaaaaatatggcaaataaataccataaaagatgaaaagaattttaaaatgagtaatttacggcgtaaatacctaagttttatgttgggtaacagataagtacctaagtcatattttttgcggtaaaaataccttccgtcacatttctagaacttccgtagatacctcactgttaaatgccaaatcagtacttgcatatcactatctgattggtccacatgaatttttttaattttatattttaaaaaatcatttaaaattattgcaaagttaaaaaa

SEQ ID NO: 316302 - DNA, 1283 bp, Cannabis indica
tttttttttttcaaaataatatatacatatataaattgtttaatttgtcatgttaacttattatgatgcacagtagcattattataacaaatcacaacattattacaaacaacccaacatatatacgagccaattaatacgtaggtttgtacatttaataataataaaaaaaataataataaatggaattattccttgcaaaaaaatggaaaaaatataagtgtggctgtgtgtactctttataattttagatgacacatatagtgaatttgtcatgcatgtatatgttccaagaaagaaaatatcatatgtaaatagtttaatttgttcttaactttaattaattattttttggcctttacaagaaaaaattgatcaccctatatgcttaatataacattattattatcctcaaaagaaaaaacattattattaataattggtatcatttgaaaaataacattattattaatatgagataatttcataagtatctaaaaacaacaacaacaacaacaacaaaaaattaaaaaaatatagttgtacatcaattttatgttgtaaatttatcaaaaataatcatttgtatgaattataagaatttttatgttgtaaattagtgggacatatattgatacctggcaatgtaatgatgataagggcctttttaattatatacctgaagtgataattagaaaagaaaaaaaaatgttgtcatcatcagctagctaggacatcacagttatcaaattgtgtaattatatctatatttgtaatgtattgtacacatatatatagttttgagccatcatatcactctgaccatgaatgtagtgtgtcgtaataaccaggtgccttctaaatttgacccaattccaattttacattcacagcagttaaaggaaaaatcaaataattacagtgtttgtacgatatttaattataaatgttaagaaaaattattaatcaaaatatatagttggaagaatgtatagtgcaccccattaatttttttttttttttttgaaacgggtgcaccccattaattaaatgattatatattccggtacatatttttatctattttgatgtttagaaaagatttttaattagactaattttttttataatatatatattggagttactacaacaaatttcaataatagacaagactgccggcattaattaatcccggcggatttcgccggtaataatctgttggtattaattggtcgctataagtgactattagcgacgaaaatggtattctgccggtaata

SEQ ID NO: 316303 - DNA, 984 bp, Cannabis indica
atttaaaaccaatattaaacttaatttaaataaacaacttgcaatattacaaactttattttaaaccaaaatagttaaagttacatatctcggatcacgtaaaatttatttttgaaatattacaagtcatttctcacaggccgaccaaagcagcaaaattggaatttcaacacaattccctgttagacccaaccctcgtggtctagcttggctggaacatgtacaactcatcttcaaaaccctcgaactcatggttgaactgacaccactttaataatacctggacattagagcacccgtgggtcaaggcccaacaagacagaaataataatacaacataataagtataataataattaaacttcatacagtacgctactgtatatatattgtgccactgcactaaattatattattctatacaaaaatgtcaatataattaatgtctatgtaggatagacctatgtgttacgctcacacgtctattttacatttaaggccttactagggtttgtctcggttatagttaccgagtctaatctagttatgcattacccgcataactctactcatatgtagatgatccatacattattctcttatagtggtttatcatgatgatgtttatcaggtctaactcatttatgtcttatacacataaatcttgacatatataaatgcacataatacatttaacatatactctactatatgaagttttagggtaataaccctaactcacaacatatttaattagggtagtagccctaattctcatcacataaacttaggataataatcctaattcaccatacatatatttagggtggtaaccctaattcccaataaatatattcagagtaataaccctaacttacaacatatttacttagggtagtaatcctaattctcaatatatttacttagggtagtaactgttggaatttattttaccaggatcttagatctactcacaagtatgtt

SEQ ID NO: 316304 - DNA, 1358 bp, Cannabis indica
ggcctggagcgtacgatcctcggtacagcagcgcttttgaagttagtcgctgggcgacaattattttagaaagaattaattaacttttgtaaagtattttgtaatcgggatcccgagtattttgtatgaaatattataagttttaattaaaatcaacacacgaaagagccaacgattgtcaacaacactcataccaggttggcgcgatacaagaatccaggtgttatttttgcgcaaagtaaagaactcagtatccatggtagacttccagcgagggtttgctatagcagcacttgcactgtcaggttcaagctcagttattagagccaatagtgagggtgagaaggcagagaacagccgaggcttacggataccagctttagcccttgttggcatgttagggggaatggcaggtggggagttggatggcagtgaggtatggggtggttggcgtgtttgtttggactgagcgagaggtgacagtggaaggtaaatgtgtagaagtatgatggagtaggagtggctggaagtggaagggtgtttgtctgctgggctaggagtcgtttgttgtggggttgcagatggacttaaggatggattttctggcagggcagcagagtaattgttatgatcattcgttacaatgccatcatgacgatctgaagtcacagtggataggtatggtagccattgagggtagaggctaggttgtaagggtggctcaatgtgtgcactaggatagatgaagccactagcaaaggggaaatcaatttcatcaaatgaaacactacttgcaatatagaatcagccagaattatgaagacacaagtagcctttgtggctcggactacaacctatgaatacacacttggcagatcgaaattgaaatttattagtattatatggtctgagatagggatagcaagcgcatccaaacactttcaagaacttatagttggggttgagattaaagagttttttgatgggacatttatatttaagtacgggtgtagcaaggtgattaattagaaaagttgtagtttaaaatgcttcccaccaaaatcttttaggcatgctagagtgagctagaagtgtgagacccatttcgactatatgtcgatgttttctttccgcttttccattttgttggtgggtatgaggacaaggacgcctaaatggattggagatatggctcaaatttgcgatactcacctccctaatttgtttgtactgttttaatggtggtgtttagttgttttcaacttgaagttggaaatttttaaaggtggacagggcctcatctttggttttgaggggaaatatacaggtgtggcaactatatgttgggttttgtgccc

SEQ ID NO: 316305 - DNA, 1159 bp, Cannabis indica
aataaagcatatatatattaggcaaaagagttagatctcacggtcatcacagaataagttatttggtatggaggacgagtcaaccatacctgttacattacaggtaaaagcccacttgactatattataggccgtaaaattacaaagtttaggaataaatgaaaaattacaactagtaaaaaaacttgagagatgtttacaatgaagcgcattgttcctaataccctaaacagaataagttcccttcagtgtattgatcaccgtctcagaatcactctcaataattacaaaagagtgtctccaactaatagctgattccagggcgaacaagcaagttatagcttctccaacgagcggatcaaaaaagttgaaaatgttgctagctacccacaaaattaactccttataatcactagcaagcaccaccacacacattgaaaaaatgcattgttatcctaatagaaaaataatttttgtgcaattcaatgggaagtattcaagaaaatactaatgtctaatactaaaaaaaatatgcttgtgaatcaccttataatactaagaattgcaagcctttgctatgtttgagtttttaagttcatcttaatgtaattttgaaaaatttagaaaaaaatgatcatctgtgttttaagtatgaaagttttaattgtgcgacaaaaccaagaattatgttaggttttagctactttgtgagctattgtgtaagttccacattaattacaaatgagaatttaactcgtacttcagttgataaatatggtctatgcattatttgtaattatcttaaaatttaattctaaataaatatgttcttctatttttgagcgtttgtattttttgtattgtattaatgtttttttatttcaaaaaaattaatattttattttttaattttaccaccttaattttaaattaaaaatattatggcattaagaggaactcaaaatggcataactttatatccatttggaattaacttaaaagggacaatactcacatagttataaaaatctttaatattttagcgggagatagtcccgattcgaataggggtgttcacaaagtatccgatccaatccaatccgcacgatccaatcccatccaatccgcaaaatgcggatatccgcacttgtgcggattg

SEQ ID NO: 316306 - DNA, 808 bp, Cannabis indica
aaaaaaaaaaaaaatagagtaaaaaactctcctaaatgttaaactagataagagatctactataacatgataacacccttttagatagttatatgtttaaattaataataaatttgtttatatataaatatatattattttataattatgttatataggggatcaaaatgttttgggggctataagttataaccacctttatcatggttttggctccgttcctggtgtaattcttctctcttctacaaaagtgaacatttcttgaggttcgacctaattattcatatctacactatacatacacttatcaataagtcttccttgatatgagatcagtcctttaaggacttcaaaatgcacatttccatttcttaataattcatattgaaattttctaacaatttttactgtgtaaaatttgtgcaatatataataaaaaattagaatgtgggtttaagaaatttcgaattatgtaggcaggatgcagcaatgtggaatgttagatgtatagatatattgatttatgagataagagagtgcaaggatttatgaataatgtaacagatatatttttgtgttaaattttatttttaatgggtttaaaactagagataatcttgttaaaaaacattggtataaaattagtgatatatggagcataattcttggagtttgctacagtataacaataattattcccatttttttttaaaaaaaaaacaataattatgccaaacaactccaatgaggagacaaatgtttaggagatttttacacttgatgtcctttttactttttttttacattt

SEQ ID NO: 316307 - DNA, 1469 bp, Cannabis indica
tgtttaataaacatacttgtgagtagatctaagatcctggtaaaataaattccaacaatgggagtcatccaatttggtgtagtatctatcattttgatttcttctatacaagtgatactaggttcttttagaaattgaattagaaccaggttatttttatctattactaaactgctcgcaagctgcactagagcatcagtagttgcattttcttcccttggaattcgcttaagggtataatgcttgaattgtgcgagaatgtcatggatcttactgagataagccaccatcttttctccacgagtcatatattcccctatgagatgatttaccaccaaccatgagtcactctaaacttcattgtatttggtgcgtacctcccgagcaagctttagccagctatgagtgcttcttactctgcttccttgttggaggctttgccccaaatttaattgccccatgcagaggttgccccccaggtgtagtgagagaaattcttgcaccaaaaagttgatcaatggctgattcgtctacatgtaatttccaaataagtttgtctttattttcttctagtggggactcatgttttggtcttttatctggctcagggttatcttttgaactctctagttctttgcccgtgcatttagccacaaagtttgtcgaagcttgcccttttactactatgcggggttgaaaaattatttcatattgacccaactctatagcccatttgtgtagctgtccagaagaatcgggcttttacgaaatttagcgtaaaggttggttggtatacacccgaacaggatgggcctggaaatagggccttaactttcttatggctaagatcagacagtaagttatttttttaattagggggtactgaccctctgcctcaactagtcttttgttgatgtaataatctaaatgttgtacattgttttcttttcttataagcacgatgcttacagtgtatttagtgactgctagatgtattcctaattcttctctgtctaaaggttttgagagtacaagaggctttgcaagttgcttttttaattcttggaaagaatttttgcatttctctgtccattcaaacttcttgttacctcagaggatgttgaagaagggaacacacttgtctgttgaatttggaacaaatttgttgagtgcggctattcgacctaggttggcttctattcctcgagcattaacaatgaatccaagaaatttacctgagctgactttgaaggaacactttaagagattgagtttcatattgtattttttgagaattttgaagaattcatcaagatcctctatatgccctcagccttctttgatttgatgagcacgtcatccacatatacttccatgcttcgtccgatctggtcttttgttagctaacctttggtaggtagctcctacatttttaagaccaaatggcattactttatagcagtatagac

SEQ ID NO: 316308 - DNA, 928 bp, Cannabis indica
agtaataatcaatttttttttcttcacaaaatgacaattcaaaaaaaaaaaaaaaaaaaaaaaaacgcagttttgctcgagcaaaaaaagaaattctaaagtcaaagcaaacatacatttagggcaattataaataagaaaataataataataaaaaaaaaataagactactaagaatagtctcagggttgaaatcaaatagaattttcaccttcagaacgagaaatcgacgattttcaagtcgtgttatcgtatttgacccattttatcggccctatagaaagatcgcgttatgtagctgatactggtgtaagtggtttgttgtccagtgaataactaggtgaggattgaagactttgtgatggtatagatgttcattcctgcagtgccacaatttccacaacaaacaaagaaaaaactagagatctctagtggataaaagattagaaacaagatgtaaaatatcaagaatagataacaggttatatttagtagtatattcataaaaggcgattagtttccataccttctagacataaattttatttatcaaaggaaaaatttgaactatttcataaaagataaaggccaaagaaataattctttaggattaagagtgagaggtcttaggtatgctttcgtatgcattagaatagacacctgctgttgagtaggagtaatgagtaggtatcaaattaatccaaaaaaggaagattagaagacaatcaaatgaatcttcagatcaagaagatgaactatatgttagttgataagggtggtattttaatactcttagactacaccaaatcaggtttctaaacttgccttagtgctagaaagtctactgatgagatagtgattactttgggggtggaacagtgattttggagaagtgtaaaaatctatctaaaatctctaactctaccag

SEQ ID NO: 316309 - DNA, 2332 bp, Cannabis indica
atttatgaaataatcccttaattgttttgatcttttaaactaactaagtttgtgttgttttctgacatatcttatagatatttgtttagaaatatgaaaattaatgataaaacttataaaacactaataaatttgaataatcatactaattcatacattttaataataaatgcaagtattatttagatttatgatatcctttaaattacttcatcatacaaaaatgaatatgataatatttaacacactcaataagaaaatattatcaccaaaattaacttctctaaggtttcaaattattagttaaacgattttattctctacatttattacttcaattcacatgttgtttttaacaaataaagaatatttagttctattaggtccttgctatctgtctctggaggtgtatattttcaacatgtaatgcgaaatagtaataccgcaaaacatggtgagattatgcactatagatggaaaactaggtttttttggttggaagaaattttctccttgttaataaaaaatataatatttgattttcagcaataaaattagttaatatattcaaaaaaaaaaatttatgtttttaaaatatagaaaaaatttgcatgaatatttgatatctatggatcattatcctaaaaacttaaaaccatcaaataatattaattgaaaatgttgattttaattcattggttaacatggctaaaaaattgagctaataaacgtgcataatgtttatctatattaggataagttagttactatagtctgttatgttagttagcttttctgtttttgttataacaatcttgctttcttatgctaagctgtggccagcctttgtaactactcatcttaatattgaattcaatataaatgggagctgggctctctgattttcattcagagtcattttaccatttcttctttgttttctctctgcatcattcttatactttttccacatggtattagagcattaatggcgttgattggagctaactcatccaacaatggtggacaaatcgacggcaatggagcttctccgaacgctgcacaatcgatccatcgagcacaagaagttcaacaagtcgctcttccaaataacaatcttcttccccttaacttgcgattggaccgatccaactacaccttctggaggtccctggttcttgcagctaccagagcatacaacctagaagaatacatccttggaactatccctcctcctccccagattcttgaaggtaatatccccaaccctgattttcttcaatggcaacgatttgaccaatttttaattcactggttgatgaactccatttctgaacaaatgcttggtcatgtcatcagttgccaatcctcctctgaggtatggaacttctttgcccaactctttgcctcaagatccagagtccgtattctgcaaatccgtggtcttcttcgagccaccaagaaaggatcatcaaccattgaagaatacatcttgaagatgaagagctttgctgatgctcttgctgctgctgatcaacagattcggatgatgatctaatcttgtacatcttaggaggtttgggctaagaatatgaggctgtcattgttaacctcacttctcgagagaatcccctcagtttacaagaggttcagttcatgcttcatagtcatgaactcagactacaccaacacactactgaaaccctctcaaatgttcaagcaaatttggcaaatatgtcaacaagcaataataatcggggtggatacgatggccgtggccaaagattcaacaatagagggggaagaggctattcaagcaatcgagggggcagaggtaatagaccaatttgtcaactgtgtggcaaagctggacacactgcacaaaagtgctatcataggtttgatataacctatactggacctacatcttcaagcaactcaagcaatgaaacaaatgctgaaaatcctcaagcaaatcttgctgaaaccccttcaactagtgatatttctagagcttggtttctcgacaccggggctactcaccacatgaccacggattcacacaacctacagaacccaatggactacaagggaaaagccaaagtagtggttggtaatggtaattctatgcctatttttcgaattggttcaaattcaattaattccgatctcccaaatcaatttctcattctcaaagatattttacatgtcccaaatgtcaccaaaaatctattgagtatttcacaatttactaaagataataatttcactcttgaatttaatgatgtttgttgtcttatcaaggacaagacaacgaggcaagttcttctaa

SEQ ID NO: 316310 - DNA, 1357 bp, Cannabis indica
aaaattatttgaatcatacttaaactcatgtaaccacggtttttctccgccacaagtgagggttttcattatttatcggataggggccaacattggcctctgtctccttttcaaaaaaaaaagagatatgtttgtgattttatgcaataggcctatccttgaagagaggggtatagaatttagtcccctgccgtgggaaaatcaaccattgtatgagcgtattacagctgagattattagaagataatgagattaatttgtggacattcctgttaaggccaatattactatgacttaaaatttttttgctaactggcaagagagagaatgagtatgttaaggtaagggagaagtgaaaacttgtgactattgaagccatcaacggttgtattaattgcctagttttcctgtagaggaggaagtgcttgaaattttggaagcagatgacaatcttgattttgtggatatgtcggagactttgggtattcctggagttcggtttcatttgaatggtggggaaccatattgaatgtatcattgtgaacttcatcaggtggttagaccgtggatgtattcttgagtgcccggttgatacctaacaaccattatttggataactttgtttgattgtttgaaggtggcatatgttattttgaaaggtttcaatttgaatgatgggaaatacatttgggagagtattgaacacatgatttaggcactactattggaggattggaccttgctagtctcattactgatttatgtgttacatatggtgtgcaagagtacttgactggcactaaagtgccgccacaaaggaagattggctatggtgaaccaccttagatctctacatacatatggagctttggaggtgcacattacattatcatctaaattatgttacttaactgattatgtgtatatcacatagcaggatccatggggccaattagtacagcggacgcctcatcattatcatctaattgtgactgatgttggttttttcctctttgcacctctagggctctatatgtatgtagaggtttaaggtggtgaggtatcggactcctagctccacttgagaaaaccattttttttctcgatctttttgtctttttttcttaaattttcttacaagagtcatagcccctatagtggagccgcaactcttgggtcatttttgttattttgtctctcctggagccatggctccagacttcggagccatggcctcgactgactaatttttccaatttttgtattttttttccattcttgcttccgaacatcgataaactcaccaagatgaaaaataactccatttaagcccgcttttctacaaatttagcttgtt

SEQ ID NO: 316311 - DNA, 1714 bp, Cannabis indica
aatagcaagaagcttacaaggcgtctttgggtcgaagcaatcaacactgcttgctatactatcaacagagtgttcttacatacatgtactcacaaaacaccatatgatctggaaaggtaagtaaccaagtgtaagtcatttccatgtgtttgtttgcatttgttatattttgagggatcgtgattacactggaaatttgatgcaaaaagtgatgaaggtatttttataagatatttcgctaatagtagggcttattgtgtgtataatatgagaacccaaactgttatggaatctgctaatattattattgatgatttaatggatttgtttggttttcaacagaagaacagattgaagaattattagaaaagccttctgccgtagaaaaagaatttgacagagccacaaaagctgttcctaagactacattgtaggactctgttgctacagatgcaaattttcctgattcttcaacaacaaaagaaattgagcatccttcaaatacaatcactaatccaattcagagggaaacatcctcaagggttaaaaagaatcatcattctgatctcatccttgaaaacttggatgaaaacatggtaacaagaagaaaatttgctaatataattcaattgaagattggttcctagcaatgcaagatgagctaaatcaattcattcaaaacaaggtatggacaatgattccaagaccgccatttatgaatatcattggaacaaaatgaattttcaaaaacaagagtgatgactttggcacaatcattcgaaacaacgcaaggttggttacctaaggatacactaaggttgagggtattgactttgatgagctccaatagcaagactagaatccatcaggttaattctttctatagcatgcattcttggatttaaattgtatcaaattgatgttaaatttgtattcttgaatggttttttgaaagaagaagtttatgttgaacaacccaaagggtttgaggatcccttaaagtgtacattgtaatagtaaatgtaattttcaactgtgttttaaaaaaactgaggatctcgacctataaggttatataattattttataataagattaatttttgtttagaaagttttcaaatacgggcgttacagtttggtattagagccaccaggttgttcattgaatgccgtcaagatatgtacaatcaacgctaatgtcgagctcaactcacggttccgtaagctttactttttgcaaactgtttaagatgtattccatatataaattgttgctaaaaccctaaatgcggtcttaaaaatattttgaccactatctaacctacatgccttgtgggatcataggctaagtcctaaataatggacgcccggtgaaacgtcagaggacagggcgaaatggttgagaccggaagtggttggggtggtagaaacccctaaaacccccatggacgtcgtagaggccacggtcgtgctcctagaggtggccaagagaatccacctcaggctccatttgtttgggagcaaaggtttgttgagatataagccagaattactcagtaagaagaagagatttgaaggctcagacaacaagatgcccctgctgagcctcccttgcaaccacctgctgctgtggttcctgcagtgccagtggaacaacctgttggtggaaaccatatggagcccttatatgagaggttcaggaagcaagcacc

SEQ ID NO: 316312 - DNA, 500 bp, Cannabis indica
caattcttagtatttttttttttgagcagtggtcaatatcattgataatcaaaatatcattggtaaccaaagaatatcgtacaagctaaaggtctatgcatcccaaaaaataaaataataaacagttatctagccaaacaaattattacttatctgaaaatcatacacaactaatttatgtgcaaccacattggccgaccgatgtatatggatctgggacaatcctaaaaatctagaaaacatacttgttatgtcctctaacaatgatcttagatcaatgtctcctagcaaaaacacacaattgctaagggatcaaaatcaacagacaacaaatattgaaggaaaatacctatccaatgtcactaaaattgccagacagtatgtttaaattaatggaaatctccatattacactcctaagttaacagttgatgtttgttccgcttcgtccaaatgttccaattgaaaataagatgttccaaactgctggaatttatttta

SEQ ID NO: 316313 - DNA, 525 bp, Cannabis indica
cacaacaaaaagtattgaattagttatacttctaaaaatataaataataaatgttatatattattttattttattaaaaaaaaaaaccttattgaataaaatattaatcacttaccaataaataatacgaacacaataaaactaagaaatcaaaatgacataataaaaacattattcataacctacatgaataatatttgaatagtttttaagccatgtgagctttttagatttaatttatttgtagaaaaaataatatttatagttttatatgtatagtttatttcttaacttatttatttatttatttttaaatagaatttatggttttcttttaagtaaattgaaaaacctcacaaagtttttgaaataaaatgaaaaaatataagagcatgtttggtattgttttctgttttttgttttcaaaaaattgtgtttagaaatgagaacaaaaaatagtttttgaagtttttaaaaacaagtcatgtttggttagtgttttttaaaaacaatattgactaaaag

SEQ ID NO: 316314 - DNA, 1535 bp, Cannabis indica
gtatctacttcatgccattgaactattaaaattttagaatccacttttaatatttcgaacgttgcgcatcaaattttaaagagctttgtaaagggattggacatcacggtggtggtctggcatgcaggactgtgtaccttgtgctactgtgtttcttatttgattttttatcgatcataataaattagcataatctgctggtcatgtggatcagcatctttccaataggtatgtggtgtggctcaaatcagtcctttttgtatgggtaataattgtgttcactatcacagcaccatcttaaaaatatgtttaagaagacacaagcagcacagacaggcacttatttagggaactaatatgacttttttaaatagctgtgatagtagaacgtacctgcccaacttgcaaaaatttgagaagaattaagacaaatgttgttttgatctcatatcttactttccatgaatcttgtaccaataacaggttgacatggttataattccagcaactactggtcagatgggtgttcttcccggtcatgtatcaactattgcagagctgaaaccgggactcctatcagttcacgaaggaaatgatgtgacaaaatatttcgtcagcagtggttttgcattcatccatgcaaattcctacgctgatataattgcagtagaggctgttccactcgataaaatagatcttagcctagtccaaaaaggacttgcagaattcaaccagaagttgagctctgcttcaactgacttggagaaagccgaggctcaaattggagtggaggtgcatagtgccatgaatgctgccctcacaggctagtgttacttactactggtcccttggtcaatttgctcttgttaatttagtcataatatctcactttcatgcaaagttgcatcctttttttttttaattctgcctcattttgtcttctggagccaaatttgtctctgaacattttatttgtttctatgctgaatgtggaattcatattaataatgttgattgagtatcaggctttcacaaatagctgagcaaacacttgaagaaattgtacttgtatttaccggactcgtttatttttataagttttatacagctttatgggggttttcattatattgttggtcactgcaactgtggagctgtataactcagattcgcacaaactttataccgttggaaagattttgaaccttattaccttaatgacttgtcaatttcctctccaaaaaggggtaacaatgaggtttttgatgtgataaattcagatggtaaacactattagcgtaagctaattgtgattgtgtcactttacacatttagtagaagaaaaaaaaacaacaagtagtgattattagaacacagataatccttttaatggttccacatacatacacgtaattagcagtcaaatatttagacggttttattgtttttgagatttttattcaagttattttataggacaatttttcctgtaaaatacatatttttaagcttgtataaaaatctataaaatttat

SEQ ID NO: 316315 - DNA, 1249 bp, Cannabis indica
gttattacttgataagatatacactgttattaatgagccctctgacagctcatttgaaaatattagtagcaaaataaaatcaattttatgaatatgtcagccatcaaaatagtaactgctaaaaatcaaaattaataactctagaagttatattcaataaaaaaaaataccaagtaaattttaaaacacttgtccactccaagttaacctcttactcatgtatgaagaaatccatcatattagaacttccagcaaaactgatttttcaatttttcctaattttttattttttttttttcctaataagctattatttctaacataattggtatttgaaagagaataccaacatttagtttttactagcaaaagaaaataaaacagaaaaaaataaaattaaactaagatcaaaacaggttccaaaattaaaatctactcgcatctgtgtgtatattttcaaaacattgataagagtcccatatgctacctcgctatgtttgtcatactgtcatactatgtcgatcaagacaaaagtttccaattaacattaaatctttcaatcttgctattcacaatacagaaaaaaacaattttgtattaaaataaaattttatttcacaaactgaatttattataccagcgaaaaaagacctcaatggtcttaccaaacatttcaccaccatactggtttaccaaaaacaaaaccaaaccatactggcttacataaaattgcaaaccgtactggtcgtaactaatgaaacacccaaatgtgtaagccataaaataaagcaaacatagcacaataagaaaacactgtgaaccaaaagagaagaagccacatatcctttaaaaagctcataaggggaaaaagtatcaccaaaaggatcaaacactactatacttcggtaaaaacaaatgacaggaatggtgctattatgagatgtaataaaacacctcaagtatttcagaaacaaaattctgggatttaatttctataatttggaacaacagtgcatgcttcaaaactgaaatgaatgcaatattctgagtttccaaataagaatcaaccattcacaataaaacaacatccatcaattgcaacagagaaaacgagtctcaagatccaaaaaaactgggatatcagatttagcaatagtgaagcatatacgtgcaaataaaacacaaattcaaaagaaacctaactcaattaaagttatacatcaaaacttttccaaaataaaataagaaa

SEQ ID NO: 316316 - DNA, 1126 bp, Cannabis indica
ttgttgttgattttttatatgttatttttgttgttatttaaatgttattttcatattacatttaagtaattttcatgttatttttgtgttgtttctgtacaaaatcgtaagaatgtaaaaattctttaaacataaaaatataatttttttttcaagaaatagtgcttaattatccataaatataaaggataagttgaaaactacccatttttattacacattaaccaaatataactctaaaataattttaattaataaatatcctcttttataatcaaagtaccatatataatctcacaaaacttatcaaaattagacttcttaatgcacataatgggaatataacttataaaagtgggtataaattaaagagtagtaaaataaaggtaaaaattaaaatataaaacaaaaagtgagtataaagtgtaatttcctctaaatataacttccgattgagaatacccccgagtgattgtgttgacttagcccaataggaaagcccaattatgataggaaacccaaaaccaaagtcatatttattagggtttcgtctccaaatgattttcagcattttccatcacgcaacctgaccctagcttctcaatctcctactacaacttctctctctcgccttttctttttcgtttcttctctcactaattcatcagctgtacctactctacatagattatcaacttccttcactaacctgatccgagaggagaaattccttttgttgagtataggcttttcgattgtagaactccggttaattactacctgcgcttcattcactgcccggataaacaattgtttcactcacaggtatggatttgaggttgctgacgaggattggttcccaaacattgggtctctgactcgtgtcttttttttttattcttctgtgaatgagatcttattttggtttctatttactattaggtttattttcatgtataaaaaattgtttggattttctaacgcgtacgggtttgagggttttgtgtgtggaggttttacagagattgatttttttcccttttcataaatttttggtttctctccttgggttcttgtttttctttgaaattagttgattagtagttttgaaatatatgctaatatt

SEQ ID NO: 316317 - DNA, 1074 bp, Cannabis indica
aacatttaaaataaaaaaaattaatgacatggaccaatgaacgagtgacacgtagacactaacttggcacataacggagaggtacctacggaagttccaagagtgtaacggaaggtatttttaccacaaaaaatatgacttaggtatttatctgctactcggtataaaacttaggtatttatgccgcaaattactcttttaaatttaatgtaaattttaatttcttgctttatttagtcacttttttttttaatataataactaattttattgttaagtgtcaaacaatacattagttattaaataaggaggaatttcttccaaccacgaaatcttattttctatctgtagtgcatattatactcaccatgctgtgatattaccatttcgcataacatattgaaaacatagacccggaaagacagataacaaaaacctaaacgatctaacaacaggcccactcgaagacaccagtagaaaaagaacggataaaaatcataacacctttagaatcactataaaagaaataaaaacccagcaacgaacaactctagacgggaggagatcgtctaagtagcatgaaggtgaggagcttgtgctcatgagaattgagtccctcgaagaggaaattttttaactacaaataaacaaaatatacattagtgaggaaaaaataaaataataataatcataataaataaataaatattattgaaaattttacaatatattttcactaccaattaataattatattgaaaattattaaatattcattctatataaaaagagaaaatttatcttatcaaatgtagttgatgtcggcactagatcttggacagagactacttcaaataatttaataacttgaataacttaataactttacaattttattaataaccaagaactaaaattctccaaaaactaatgccactaatagtcataataaaatttacctcatatataattaataatttatacaatttagtatggaaatttaaaaactaacatagtaagctaatacaacaaaaactaacacctttaacaacaacaacaacaacaacagcagca

SEQ ID NO: 316318 - DNA, 982 bp, Cannabis indica
tttttttttttttggtaaatttacatatgaaaaaaattaatttaataaaaaataagaagaaaacaatttagggtaaccaattgccaccttagctaacagttgtcttatactattttttcctttgttaaaaagtcatattttatcaaaattttgccattgtcggaaatttgatcttttattttctctgttatcctcttctaccctgtatttcttttcaaaaaaaatttaccaaccacattatgaagtttaactttttagagatatcatttatttcattatacatagtgataattgtagagaattgaaaacagagcaagacaattttgagagaaaactaatatggattagctcaaagaaagcttaactcgatattatagacaaaatgaattcaaaattacaagtgtaacggttcataacagaataatttacctctaaaacaaagtaattaactaaaccaactaactctagttagtagtactaatagtgctaacattcctctcaaaggaaaaggagtttgagtcattttcaatttggatttgaggtttagtaagaatatcggccacctaattaagagaaggaacatatcgaagagatagtcttttgtctaggatgtgatcacttacaaagtgtaagtcaatctcaatatgctttgatcaaacatagaaaacatgattttccgactttgattgtcaacccaaataacaggacaataagacaatgtgatctaaagttcactaagcaaggaaataatccacttgagttaagcaactatattggccaaagctcttaactcactttcagtactagaaagccacaacttgttgtttctttactaaccgagagatgagattatcacctaagaagatcacatagcctcttattgatcgtcttgttagaaaaattaataatatactcaagatctatttgtatataatatagaacacaatagtaatatataataattaggtatgtgtacctgatt

SEQ ID NO: 316319 - DNA, 2939 bp, Cannabis indica
  modified_base (440)..(440): a, c, t, g, unknown or other
ttgctagtagtatacctcaaaatccagccttctttatctcatacgttgctttaaactaagaaaagtattttcctttttttgaattttcccatgaaatgatatttttaaaaatgtgtaatttttatgtgtgtgtgtgattagttataggttttttgtggggtctagtgttaactttctcgaatagctgctgtgattgctttcacaataaaaaagaaagttgatattcagtagtagaatattaatatgttaaaatcatgatgaatatagtcatgaatagctgctgtgattgcttttaaaagaccaaaaaatttgataattcttcaaagttgtgaaagcagaatcttcatgaataattttaacaattttcatgaaaagcacagtgcaatacatacgagtcttcgatgtatggaaaaactctaaactaaatgattcaagattcnatagattttcctttcttaattactatcactactgaattagagaaatactattgttctgtttccaaagcttatactatattgttatttttcttttctaataatttgtcaacaattttgacaaacaaaacttaaggaattctgctttagcgtttgcgcaatcagtttgttgtctacttaaactaaaagactttgcttttgtcatgattaaacttagtgctcatcatatatcttgattttatcttctatattctttgttactaacatcaataatattttatcaagcactgagtatgacttttctcttatagtgatattgttttttcttttaatatccatgttgttcgacaatcataataatatagttttatttttttcattctgttggtgtgtcgggtcatatttatgaacttctgaaaatttgtcatccgattgtacaagttttttcttcttccttggcatgttgagtacacttctagaatgaattaaattactctgttgttggttgagttgtaccttttgcataactttcttcctcctatttgctcaagcactaaactaaaccagagatgctaagggtttgtaataatgcaaagcttccaatcctaggatcctaaattattatcattatctctactgcaatgcttgtaaaattcttttctcacttatgcaaataaattatttgtgtattttttaaattgatttttgcgttgatttggtaatgtatttttagtgtttggtttgtcgactgacaaacatatttcttatgttattttcttaggggtttacaatggtatttacacatatactctatgatgtgctggtgcaaacaaagagtttgcaatgatctctcaagaacacaaaaagtagtgcaaagtggaattgatatgatgaatggtcttggttcatttgttgtctcatttgaaactgacacgataattttttataaaagtaccttaattcagtcaaaagtactcaaaaatttgaatatttatatatattctattacatgtgtttccatagactttaagttacacctaaagtttttatatgttgttttgtaatactaatttggtcaataatagtctttggtaattaatatatgtttttcagtttaaggtctctctatttgttgtggtaattatttcttttcatgtggttatgaactcatactaatgttgatcatgtatattatgtataaacaggggcttaggaagttcgaacataccgacatatttttgaagaatatctgtaggtgcaagctaattcataatcatttcgcgcacaatcaagtttagaattgtagtctgccaaattattttttgccatattatattttactttctttttatttgtgattttaagtagtttatcgatctacagtatttactaatgatttttttttgttctttcatgtagtggtggaatcaatcatcatacaatagctttcatcaaaatatggttcagatgagatttgcactgtgactagctatacatttctgcaacatcattttactaaatatgcgttagaataagtgtattagtgtgtatttatatgtaatctacacttgacaactttgtttagagaaagcttcacaaaagtttagagtcaaaatgttaatacataagcaaatatgtatgttcggattctatgtatattaatattcaaattctgcatcaaatttcaatattttggtatttaaattttcttacatttttttaaatcaaaaaattgatatatatatataaattctaataattattaatttttttctcaattataaattttaaaattttaattttaattaagcaacgtttgaataaaaggtgttgctataggtatattttttttaatataaaagtagtattaaattttgagaataaggtaacacttgtaaagtgttgtcttaaaaccatacttttagtaacagtctaggaggcaacacttttataagtgttgcctttaaatattttttagttaaattaaagtgttgctaattatattttttctagtagtgcaagttcaatatcggtccagtccaatgtatactccatatatctgatactagtatgctttgccaatgccctagaaaggacataacacttatccaagatgtaagtaaactttatcgttgactatcacatcagtgtaaatccaggcactgatgaattatgggacatatataatattttgaagcagataattacaattacctttcactgtgttgacatcactataattgtgaataactttatgttctggatttaatagaatttgcatatcaaaccataatcatgaataatacatgtaaacataaatgacttttaattttctattgataacatataagattatattataatgagttttatttagggcataaaatcccaacagatttaactacaaaatcaataaaaatcatcttgctatatttattattattattttagggatatgattttgttccgttattgtactttcacggattgtaatccgtgatg

SEQ ID NO: 316320 - DNA, 638 bp, Cannabis indica
ataaaattaaaagtcacccataaaattctcaaaaaccaagaatttcagttatataggtatactttatatagaatagatattgaattaagatggagagagattttgaattaaaggaccaaaagaaagaaattaaggtaaagggccaaattatatatgtattttttaaaaagtaaataaataaacaagaaatgttaaagaaaatagaacattttttttttagaaatgcgaggtctatgaccatcctttgcataaaggtgactagggcttcacatagtgacgagctaaaatttatattttgtgagagcttattttttataagagaaaattacataaaatgtggtaaaaaaatgtagcagaaatttttaattatctttttcttgcatttgttgaacgttgacatatggtatttgttatacccgaaattcagctacgtttcagagggtgacacatgtcaattagtggaatatgaaccacttggtataatagcgttatatcattcactactaaaaaattaggttttagtgacacaaattgagtaactctaaaagtgtatagtgacacttcaacgcgcgtcactaatgaggttgactggaaagacagtttttagtgacactccatacgtgtcactgaaacctttt

SEQ ID NO: 316321 - DNA, 1184 bp, Cannabis indica
aattttgttactataacgtttttataatagatttgtgtatttctgtattttatttgtcaaattttaatgttttgatttttataaaaacaaatatgttacatttatatataaaattatttaaaaagagaaaaataattaacttaaaaaattaattataaattatttgttaaccattaacattaacattattattattattattattattattattattattattattattatttaaataaacttcttattattaataatacataacaataagtcaaggattgaagttgttctctctctcatctggtctgcagcctaacccacagaagtcagcgatctattgcggcaatatggtccaggaggaggtaaatagagtcttattagcctcgggttttactcaaaaaagcatgccatttacttatttaggagttcccatttgtgctaaaagaatttcagggaatgaatgcattgctttggctgaaaagatgactgctcgaattagaacctggagttccaggaatctttcctttgcagctcgagttgtgttaatcaattcagtgctgatggctattcatgcatactggtgtcaagtactcattttgcctaagaaagtgattaggcaattggaatctatttgtaaggcttttctttggaaaggccaagcttgtattacaggaccaggagtgattgcttgggaatctctttgtcaatctaaagctgcaggtggacttggctttaggaaaatccatgaatggaaccaagctgcaatggggaagtacatttgggcaatagctcaaaagcaggacagcctatggttgaaatggatcaatagtgtctacctcaaggagcatgaatggtggagttacaaggctccccctcagagtagttggtactggaggagtcttgtgaacctcaaggatcaatttcatgagattgcaggccaccagaattgtactcagcaacaaaaataccaggtaacaaccagttactctcttctctgtccagttcagggaaaggttcagtggtctcagcatgtgtgggggcggttaaataccccaaaacactcctttatttcatggttagcaatacagggaaggcttcataccaaggatagattaaggaaaatgggaatgaatgttgatgagcattgtgaattattgtaacgccctaatgctaaggcacgctac

SEQ ID NO: 316322 - DNA, 586 bp, Cannabis indica
tttacaaaaaaaaaaaaaatatcccatataatccaattaaactaatagatgtaacaatgacaacgtactaaaattaaaatgttagtagtgggatttataagtgttaggttttttttttcataatttagttatcaaaatattatttaagttattgtgaattaaatgatgattttcttgtgttaaatttattgttttgattgctctatttatttttaaggaaagttttatttacagttgatattttttgtttagaaaacttgttttacaagagaaaaaaaaatatgggaatttacctatttttagaaaaattgtctttcacttttctaaatattaatttcatttttgctacgtatataacaaatcaaataatttctatttagcatgtattgaagaccaaatcgtaatattggttccttttgaaaaattttccaatttgcagtagcagaattcgaatttgatgctacaaataaatttttttttttagaaaagtcttgtatagctttgaaaacatatgcagtagcacaatccgaatttgatgctacaaatcaagaatttttttttagaaaagtcttgtacagctttgaaa

SEQ ID NO: 316323 - DNA, 1904 bp, Cannabis indica
gtttcctggtcaggatatatgggtcgatttccacatcttcgaattcctctaccggccttacatttgtgtttgattccctaagccggggatccatgtcctcgtccttgccttgggcaacctcctattgggcaatactttttcctttccccgaactctggctggaggtactttcctttttaaccttagttagggcaaggttatagcatttccgtgctattctttggttccttctgaggtaccctacccaatttttgttggcaacttgacgcataaatgggaaactgatgtgacaacttttaagtcataatagagctggttggcataacatgacatggaaagctgatgggacctgaattatcaaaaattttgccatcacagttgtgctcctcgaagcttgtccaacagtgaggggtagacagatttgctctagaggtgcaatgctctagccagagaaaccatatatgagttgggtacaggggattagatctttaagctgaagccccatcttctcataggttgttttaaacaaaatgtttgaagaggcttgattgtcattcatggtctgtgccaccatcttatttgcaatctatacctcaacgacgaagggatcgttgtgtgggaagtggacataattagcatctgcttcagtgaaagttattgtgggctcccctacccgtggtatttttggctttctctgctctatggccaaaactgtttccttttgttcatactacaaggctcaggcataattttctcgatctgtgcctgagtctctagtaggacatggacccccaataataacttgtaaatgcccatccactcgtggaggcatcaattggttctagttattatctgtttgggcagccctctaattctgatcggccttgacatagttttgcatgtgtgggttattcttcccgattaaaaattcaatttctcgcttcaggttattacattcgttcgtgtcatggtcgtagtctgcatgaaaacggcagaacatggatgtgtctattttactcacatccttcttcatgggagcgggtttcttgtatgggactgtagactgagttgttgcatatattgtctctaggtcgcctgttaggatagattcatcagtaaactttgaggcattgtccctagggtgctatttggaatttctagcgaacttgcctttctttcctttgccctgcctgctgctgttattagacctcttcccattcgagtttgaacttccaggatactgtggactctgagcggacgctcctatttaggtggtacgtgggtggctcttattttgtctgatggtgtgtacacgccgaacagcttctttgagcttaataaatacattttctcggtccaaaaattcagccattgaccctacgatcaacctcttaatatccttccacaattctccaagttgctcaatgccccccagtatggctgctagccttccttttttggttaaccccttaactttggtagcctctatcatagatctacttagataagctctgagagcttcccctagcatctattttacctcgaccaggtcttctagatgcgaggggagttgacaagaggaagaaaactatgcgtggaattttgagagaaagcattccacgaattaaacctccctagaggcagcctaaagtaccactactgggtggcttctacaagtgtagcagggaatattctacatcgaacatcacctcgtaccctttgcagatccatctgcattttgaaatatttcagatgtgataagggatcatatttccccatatacatcttccaggttagcatcttgaactttgcgggtagttcaggacttcaattttagggaagaagggtgatctgcgtgcccagtcaagttcgagatcagtgattttttggccggtcaagccttg

SEQ ID NO: 316324 - DNA, 1414 bp, Cannabis indica
aaagtttaaataatatatatgtaaagattgtcttatttatgtattattagagtatctttaatggaggatcaaataaataatgcaaatgtaaaatatagttcactttgtcaaaagtctactttaatagtatgctaaattatgatgcaaaaatctcacataatcaaaagtgttataaatttgcatcacaatatagcatgatgcaaaatttgcatcacaataaatactatacttttatatttactattatatcatttttaatattttattattaaattttagctaacatactcatttctatggtttgtaatattattatcttattattaaattttacatttagatttgcattattattattattttcaaattttttttttaaataaattatgaagtgagcattaagtaatatattaaattttacatcaaaatttataattatgcattagagtacaatattaaaaattaatataaaaatatcacaaaaactattttttttgtacaaatagagttccatttttgcatctcgaataataaatgagcatctattaaaagatgtaaattaaagtatatcaatgccattagtattgtttgaaatctgaaaaaaaaaaccataaaaaacgctatagatgttagcaactgcaatagaagagttgcaatgcttatatgggtgaatgtcgttcaatggttatgttattaattggtaccaaacgacaccattgtccaaacaggcaaccaacactgccgttctctcacaccagatcttcaaatgtttttcatagctatttttggtttgtcattgcattttttttttggatcttggtggggaaagagaaatggtcctaatatatatgagaaaaaaaagtggaaaataaaaacaaaaaaattgtgtaaaaaatttcattcaataagagttagattggtttgttattgaaaaattattttttctgaaaaaaaaaatgatttggaaacaaaaattttaaatttgtattgatttgttgtaatgtgatattgtaatttaatatttttgaattttaaaaaattaaatttgtgattggttgaaaaatatttagggagttttatattctacctgaaaaattgtgtttgtacaaataccgataattttattaaattttagtaaaaactcaattgtaataatttgtaacaacatattgcaatcttatcaccgcaaaacacaaatttgtagaattaaactagaaccaaaaataaataaaattacagaatttaaaaaaaatttgaacacaagagaattatacgtgctatcagtattttttcaaaacagttcctagtccacggggataaaatcaattagtaaagtctcaattaattacaaatacaatagacttaacagtgaactcccattgtctttgatgtgtgagtgcttacttcctcccga

SEQ ID NO: 316325 - DNA, 620 bp, Cannabis indica
ttggccatggagatttcgctgacttcattagggtcgagccagaccttcttcttgccacacttgaggacgctagcggaaagccgcttctgcagcttcaaggacaccattgatacgcttctctgtgtcctcttctactctctccgtttatcggcaactggagatattagagattatatactaggggtattgagctaagagttagggttttgagcgagtgattgagtcactgagtcgacgaacgagtttgccgtggcccatactattgtggggcttttcggccttcactaccttttaaagcccaatttatataaactacattgataagggtaaatgccaacaaaagaacatgctactcacaaataggcaactcaagccaccaagttttagcatgttccatggtatgagcaagtttacaaattttgaactaaatcatttaatcaatttcaaaaaaaaaaaacaaaatcattaaatttcttcttttaacatatataaatatcctcaagaaaaaagtgttagtagctcccttttattttttttttgaaggaacaaacgttctattaagcaaaggcaaaagtgggaattacaggaggagttccctctgctgggttttatgccctaaa

SEQ ID NO: 316326 - DNA, 673 bp, Cannabis indica
aaatattttaaaaaaatgaaaatcattaccttgaatcacttggggctcctgctagttagggcaccagatagatgaaggggcacaaggggctcgggggtctgctccttatggtgcctgagagagaaagggcacggggtcggtctgctggttagggccgagttttttggttcaaaaattaaaaaaaaatataagggaaaaggatgaatctcagaaggggtttgggtctggttctttccacacctgctggttatggcgtctgagagagaaaggggacagggggtttgctggttagggccgagtttttttcttaataaattaaaaaaatatatgggaaagatgattcacggaagggggtttatggtctggttctttgcacgtctgcgacaaacaggacgagacgatgaataattaagggctaagagattaagagtggatttttagttttttaatatgactatatggggatgggcattgtgtgtatgcaaaagtgtgtaccgacaagctatgtgcatcgctaaagccacgtgtttgacacatggctttaacgactcacatagtgtgtcagtacacacttctgcatagacgtaatgcgcgtctctatcggccatagtttttttattgaataaaattataaattttgggttttagtatttagtgaccctctatattttta

SEQ ID NO: 316327 - DNA, 658 bp, Cannabis indica
tataccatataaatttccctaaaaataatataattacaatctcacacattattatttaatatataccttaatttttagctctaataacgttttagctttaattttttattaaaaaaataaataacatcaatgctacaacatagcatccatactaattttaaaaaatgcattattttctctccaataatataacatcttaatattttaccacataatataagcacgtcaccaaccatcctctaaagtttccaaccatcctctaaagtttttggctcttatggtacaagttttgtcaatttatactcttcttcgtccattgtatcacaaatggtcctacctttagtctccggaagataaatcacaaacaatccaaaacacattatcactactccaaacactccatacgacacaaacccatctcctctcccggcggctgccagcactggactaaacactccgccgaccacgatcgcttgtctaaccatcgaaaccgccgagtttcggacacaagtagggaacaactcaattgtgtaaatcagcaaaatattgaatgcagaacaagcactaaaaaacgacaccaattcaagtccaatttgtaatgtcttcgtatacctctttacttctttcactactgacattatactacaaatcccactaa

SEQ ID NO: 316328 - DNA, 984 bp, Cannabis indica
tttagatctaaagtttttttttcttattctcatgcgttaaatatatattaaattaattaatatattttttaaataaaatattttaaatatataaaattgtaaatgtatattaaaaatatataaatataatttaatgataattagattatatcagttcaattatttattgtatcagatgtctcattcaacaaccaatctgatcgattgaatttttaaaatttatatcacatccgatccaattatgatagatattcatgagttgtattaaatccgtcgattataattagattagatgattatctgcgtactccaaaatatataataaatttatttacacatataatgagaatagattaattaggaatcaaatttattttcttgaattgatgaatcaaaattagatcatataggttgtttacttgcaggatttgaaatcgaagaagtagtatttttattattttaaaattagaatatattatttcaagctacaaacactttcctgtattaaagttttatatttagaatttttttagttgaaaaaatcattaaaaaatgatagaaataacattttattattttagaaagaatggaagtgataatcccaccaactttattggattgccaatttcattccttaatcttaaattactgtgagactcacatattttattcttattctggcaaaattagaaaaataaacatcaatctcattccacggctagtaattcaatatttgaacacatacataatttaattcacttaacactatatatatacgataaattttgaatcacaatataaatttcttttgtaattaaatgtgacttttaatcacaataaaatgttacttttgactaaaacaaaaaatttaaatacaagttgtcactaatttaattttaatcataataattattgtgactataaacatatttagtcataataaattgtaattttcgtgactaatacttttagccacatattttt

SEQ ID NO: 316329 - DNA, 543 bp, Cannabis indica
atatgtgagattttcgtgatgtagttttggacaccactaattaataatgacatttatgcatgtacacgatatctcattaatagggatatgcatgcatgcatacttgatgtctcattagtcaattgttttcattgaaataaaaaagaagtcattgactctctcttatatatttttgtaattaaagcaattgactagttaaataaaaaagacttttaactcattccattttgtttatatctttttttactgattagttgaaagattatattttatatatagttaccttaattatacatacattaagtcatttttctgttcaagaattaaaagttaataaagaaaaggtaattagcattagaaagtgacgtttaagtcaaagtttcagttcctacatttatggttgtacgcctttccacaattttccacatggtcacgcacggtcaagctcaaatcaaagaccaaataaaattaaccagaattattgaaagatattattggtggttattacttttttttatattttattgttattggtgtaattaa

SEQ ID NO: 316330 - DNA, 1883 bp, Cannabis indica
tttctgaatttctttcatattttactgttttttttaaatcataattgctcccgatttactgaatagaatcataagtataatttagtggtacttaatccaattccctgtgggatcgacctcacctgtgtgagatttactacttgattgcgtatacttgcgtagtgtttaaaattatagcaacaagtatttattgataggctatcaacacaatatctattatagatggtatctagttatttacctaaattattttatcaattaagaatttattaataggttatcaacataatatctataatttattgaaggttttttatttgtcttaattgtttttgtcaattttgtatttgtatttattgatagagtattgataagttatcggtaatatatcggtagtttctagtttgcttaaattattttatcaattaggtatttattagtaggtcatcgacttaatatttatagtttatcgatagtctttggtttgccttatttttttgtcattttgtatttatcgatagggtataaatattttatcgatggtttcctgttcgacttaattattttgtcaattttatatttactgataatgaatcgatactttatcgatggtttctactttgttgtatttttttggttcaattggtatttactgataaattatcagcaatttctcaatgttttgtcgatatttttttatttatagtaatctatttaattatcgatgatttgtcgatagttttttgatagttcatgctaaccgtatttttttgtcatttgcatatgcctccaaaccttatatagttccattccctaagtattttacagatagtgtgacatatagaaaaccctttcaatcaattttggagggttggtactttatccttttcttcggtgtcatttcattgattgatgcttcataaataaagcttgatgttgagaaggcagaagaaatgaagttttacattgggaggaataaaatcaaatttagggtggtcaagtttgcacaaatcacaggcctcaacttcacacagggactaacaaatgaggagaagagtgcccactcagtgcagataggttgataaacctctatttcaaccgatctaatagttcaaaaacggaactagttcagagtaagttattaaactttgatattctgaaagacgtgtacaagttagggttgtgtttgtttgtggaggcaatgttattggatcgtgagggaaacactcatattttgtcttatatacttagatatgttaaagatcttgactttcttttcaagattcattcggggaagtactcatttgcaaccatacaaaaaacatgattaaatagaaggcaaactttgagaacaagttactgctagatattcagcacaaatacaagtatacaatataagcttcgcacctatattatagtattggacctatgaggccattctaaaaggttgggaagatgtatgatttgcctcacggaattcatttttccaggatgcttagctggactaacaaggctgagattggaaagaaggaccttagaccattattttcaaaacgggtatgagccttttcttatgttgtaaatagttagttatatcatttcaatagtatcccgatatttttttgatagtttttttacacattttttttttgttgttattaacacttcttttgttgtgcgtcttaaacaacaactggtatttgtgaagggttatgtcctcgcccagataaagaggcatatgccaagaccatcacttactaatgatgggtattgatgaggcacaacccaaatatgacacccaggaccctgcttttttcacaagacaagcaaaaaaagtagtggaacattgtgttgggttttgtgccctaaataaaacccattac

SEQ ID NO: 316331 - DNA, 2057 bp, Cannabis indica
taatataataataaagaatatttttttagtgtaatttttggtgttatagttggagttgaaatattttttgacaccaaatttgatgataatgtaacaccaaatttggtgtgtctttggaaatgctcttacattctaaactctttattcttaagttttttttttttcacaaaagaatatttggttagggtcgtaatataattcgggtaagttttctgaaatttatgaataatttgtcatataaaaaataaagattatgatattttagtttaatttttccaaaatacatttcaaatatttttatttattttttatgactatattttcttcagtataatatattaaaatatttatatatttgtacaaaattatttaaattaattttgtatttttcgctaactatatttaatcacaaattaatatgtgataagagtaaatattataaatatggtcagcttttgatttatcgaatcattcatttctcgatttgattttcttcattaattatcgtaatgtacacaaatactattatgaaaaaaaataaactaaaatattctatcgaatgtcgaaatggataagacataccagaataattctgaagatgtattatagatttttcaagtaatactataggaagcttctacgatacacttcaaaaaaaagtgtaccgatataatcactctattttggcatgtaggaaaaagattaatttttttatgatcatatataagtagttttttttttttttggaaacatcatattgtgtaaattgatttgtgtttatttatgtgtgtgagaaatatgaatgtgattactaataatattttattattatatttaataaattaatttgggcactttactgaaaaaaaataatattttaaaacaaaattggccaagccaactaaaaacctaacctcacctagaggtgacaattcgtgttcacgggtcgtgttcatgttgtgtcgagactcatgtataacagatatatgttcaacccgaacacgacttgtttaataatcgtgaccaaaaaataaaatctaaacacggcccatttataaacgggttgacacgacacgactcgtgtaactcgtttataagtatattttgtttaaatattttacctaataacacgtttatgaagtattcaacaagtttataatttatttatgacatattaaaatactaaaataactttaaatatgtcattaacgggtcaattttatattagctgtgtcaactcgaacacaacccatttattaacgggttagacaagtcaacccgaacacgacctgaacccatttaagacaaacccaaacccgctaactctcgtagagtttcgagtcgtattatcgtgtataacctgttttgtcggccctaatctcaccccaaccgaacccgtcctaacccgcacttgaacccataaactcgtactcccaaacgggtggattcggtttgcacttttcaatatcccaaaacttgaaacccgcactcaaaaaaatttaacccggtcaaatccatccattgtgcacccttataagacatctttcaaaattttcagaaattcaaaataatttataatataaaaattaatgtttaagtttattttacacgcctataaaataaaagagacatgtcttgttttcagagtgttaaatttttttgaagtttttaaaattttataatatgtattaaataatatgcccaagccatagaaaattagtttataaaattttcccctactgaattatttaagaagatttttcttacttaaaaacttaaaaaataaaagtgaaaagttcatctaaccagaaataagattggatttttttttattaaaagaaagttcttaaaaaataataaaggaagatgatacatataccctaataattatatatgttagggttctactcagggtcgatcctaaggtataggcctaaggcgaaatcaaattttgggtcccctatatatatagtttaactattataaaaattataattctagtgcttagtttaatggtaaagctttttaaaaaactcttaagagctctaaggttcaat

SEQ ID NO: 316332 - DNA, 1203 bp, Cannabis indica
gaagtcgcttcgacgatccttgatgcccagacaagagaagtcacgttgtcttcttaagcttcctaatggcgttcaacattattgatgtgcctcaatcgttaatgaggcagctgagctcaattctctcttcattgatatgaggcccaattattttgacctaacccttgatggcccattaagcaaaagaaaaagcccaaggtttatttttggtcacacatgggtcacgtgggatccaagtaagcttttcatatttgcttcttctaatcgcacgaagcatggtccaggactgcgactggacgattacgactcccagccactgatgacgggatggaggacggtgggcactgtgaggacagatggaggtcagcaattcaggtacatagaggatgtaatgtaacttcaccatccactcgctggtctgtggcagagagagaagaatcacctttagaaagtgtatcttattcaagagaaacttatcttctcactttgaggacaagtcgttaatggcgaacgtaggaaaatcaatatcagattcacttaatgtttggctaacataggaaaagtaatacccgagcaggactggatatgaactccttcttttgctcttccctcttcatctgagggcactccctcttaaagtgtcccatcttatcacactggaagcatgaattcttgtttcattatcccaggtgatgtttattacaacaaggacattctgggtacgtaaacctaacttgacaaccaccactccgaccttagttcccgtagaacctcttgttctatctagaactgctcgttgtgaaaggatctcctcttagaatcaaaaactgaatcactactactcctacccaaactagaaggaggaggagtagtgactccattaaaacactaagtcccttagggctcatgcaaaaactgtactgcaccttcggctcggagagccttctataccatcagtgcatatggtagcatcatcggttgtaattgtcagatcatgatgaatcttggcattaaaccaaattgccactagatctatcctacgagggaacaacccagttcagattctcgaaagaaaggacaaagttctatgtaaaaagactatatccttagtcaaggtactctggaagaacaacaaggttgaagaggccacctgggagttagagtctaaaatgaggattcaatatccagagttattcaggttag

SEQ ID NO: 316333 - DNA, 1128 bp, Cannabis indica
gggcataaaacccaacagtgcatgtagttacaatatttgaataaactatgactttctgtatcactaagatgaatatactctcactaatagtcttattaatcttcaatcgcacataatcttatttttataacaactaaccagaatgtctatatagcacaagggtgtaaaagtaaaacattttttcttctactctacaaatttacacaaatttagcttttataatgacaaaataaaaagaaaaaatataaaataaaccatttttattataaaaattacatttcctcttaacttattttgtacttggaaattaagttgatgaagctccctcctcaatataggaatccgaccccaatacttgctaccaaactcgctagccatagtgagctgaaatttcattaaagaaagataaagcatacactgatttctaaatgcagctgaacaaagagcaagttgatttacaattaaatccacatttacatataggaccaagtttcaaaagagttggaaattaatttggggtctttatggcaacagacaatgagtctattctaaaccaaaataataaaattgataagatttgacttgtacaagcctgttaaacttccctcataacttaagttaatcatgcaccgcaacagaataattgaaataattaaatgttgagaagttgtttccatacacaggataatctaaaatagaaacccgaaatgggttatgctaatgtaatattttcctacctcatctttgagagtagagagacaaccctcccattctctgaacaaaaaattcataatggttctgagtggtgtattctttctttggaatcacaaagattaactgaaactactcttcatcttcttcatataccttgttaatagtgtgattccactatagtatcaatcataagagagttttgtacatatcaagtaaatttgttaagacaaggaaaaacatgataattacagaaaataaagtatgaacatgaagacttactgttaacgtagattttcgttaactaaatttgagcctcacagtagtaatttaatacagaaaaaatgaaagctataaaaataaaagtatgaacacagggtttttttacgtggtttggcagttaaaattctgcatagt

SEQ ID NO: 316334 - DNA, 1271 bp, Cannabis indica
tattgttcttattgtgtaacacaatcataaacattaaattcgactctgttgtcggttggccaaatttgaggtcaacacctatttcaaactatgaatctcaatttatcgattatctcaatttattatatcatttgtagtttcaagaatcttaatttaatctactaacctctctcaagttatgatagaattaacttaattaactaactagatatctctatccaatgctattaaattaagcaataataaagcaatatgagtctctttaaatgaatctcatagaattagtagaatctctcaatctcacacctttcctatgtcatacaattataagtctaattttagattacctctcttaagtgtaaaatctgaaatatttatgctaattaatggtgatcaagcattaacaagatgataattaatagaaattgcataaacaaacaataagaacaaatatgggaataatctaaaatagttcgatcaataatactgtagtgttatcccaaattttgttcatctgacatggcagatccacgtaagccaagatagagtacatgtggaatatagtcttacaaatagcaagataaagtctccttacaaggtatggcaaaacaatcaagcagcaagcaaaaggagttaagcgagccgtcaaggagttgcaccaccaagtatagacggccaaggggagtctataggctaggatgagcttatatggatggctagggtttgagaaaacgatgtcagaccaaaggtgaatctcacgccaaggaaaggtccatttgattaaagaagcttgacctttataaggagaaggcgtacaaacgatggcctccacctacaaaggctggccatcaccaaggttggccataaccaaggttggccatcacctactaaggctggcaaacacaagtaaagacctaaaaaactcttgacaaagctagtaggaacatgacctgccagccctagcaggaacatggccggctagacctcaacttccaggcattgtatggccatccatcttgcatcgtgtaggtgggattttgatgtgtatctctcattcatggatagcatttcaagcaacagattgggccttaatagccaacaaaagtagagggaaaatatttattttcgaggggcaatttagtcatttttactttgttaattaattatgtaaataatggctttgtttaccgatttctatggatattaggcatgtaagctctactatataaagagcattagcctatgtctaaaaccttaagtcattaagcctc

SEQ ID NO: 316335 - DNA, 1507 bp, Cannabis indica
caacaggaacaattatatatgaaatggtgaaattacatcctggattttctcactattcttattttgttcttaacctattttgctgcctttctgtgattgaaactctcatgatgctcgttgcatttatggttccaaatgtcctcatgggaataggacttggcactggtcttattgtaagtttatatatatatgcatatttaaaatataatatatcaattatattatgtatatatatatatattactgaaattaatgatatttataacacaacatttgtataatattcattactattgctattaagacattttaaggcttctagtattaaaagaagtacattatcacggctgaacttggactaagataggttaggcttgcgtctagagcccactcaattcaggaacaacaaaaaaaaaaaacttaattttattttcaaaaatatcgttaagtactttaaaaaagttactttaattaagatttttctttgggatatcaaacattgtgtatctcaatttttgacaatatagtttattttttacttacaaattattatacctaaattaatgttgtaattattatataaatatatttaggtgtttatgatgatggcatctgaaatctttagaccaatatgtgatcttcccaagttcttctggcgttatccaatgtcttatatcagctttgcatcttgggcattacaggtacaagtataattataatatgaaacatgttttattattgaatggtaaatatgtacacttgtcattaattttaatgtataatttcagggtgtgtataagaatgatatgattggtatagaattcgatccattagtaggtggaaatccaaagctgaaaggtgaaataattctccaaacaatgtttggaatgcctttggatcattccaaatggtgggatttggcagctcttgtgtgtttgttaatttcacacagattaatattagttttggttctaaaatataaagacaccatttcactccacaccaacatatatctcaacaaagtgttccaccaaatttccaagagaagatcatcttcatcatcactacaaagtagtcagcattttaatgtatcaaagagaaaaaatcatcaaactctttatcccttgtcttctcaattggatcttgcatctcctatcagaccaagttaataataataatttagttattattaatcaagctggatagtaattaataataatatgtacctataatattacatattgcaaatatagttattctagacttggttttctataagttgtgttatctgttaactcatatcgcaaataaaattatagattattcaatcatataattaaatataataattatagatgttgtgcaatgatccaaactactcatgtttgagccagtcttagtgacgaagccagaaatttagttgagtgagggcttgaataaatattaagtcaaaactaataaaaataatgataaatgtatctttcaaattttcatcttcaacaaaata

SEQ ID NO: 316336 - DNA, 1040 bp, Cannabis indica
ccccacacgatctgaatgtatgtactcaagtggctctttggtggtgtgtttgccaatgctgaatttctgtttgcaacattttccatacacacattcatcacagaaatcaagcttaccacaaagtttcccttaagaattccctatttttctaactccaacacacccctttggcttacatgaccaagccttaggtgccacatttttgcttggtcattgtctcaacttgatgaaacaatattgacataaccaggaacagtttcactaatcatgatatagagaccgtttctaaatccccctttaatagccattttagaattctttaagaccttgagaaacttgtcatcaatttcaaccttacaacctatttcagtcaatacaccaatatataataagtttcttttaaggtcttgtacatacctaacattttgaatcttcctcttgactctataatgcattttgagcacaattgaaccaattctatgaatttgacaggccttgttgtcactaaaaagtattgttccccctttctttcttcaagatctttgaacagttatttgattggacacatatgaaacgagcatctaatcaagaacccattcatgaccaaaaacttcatttgaggccactaacacatctacagattcatagccatctgctacaacaccaacttcacctttctctctattcttcttactgtctctcttacatttggctttcagagctaagcattcatctaaaaaatggccttcctttttacagtaaaaacacttcttgtctgtaattatccttcagtcatcctttgactttgttttttggtttcccttatagcctcctttctggttcttaaaatctttcttttgtgactttcctctaatgaacaagccttctccattatcaccttgattgtcctctgttttcttctgaattttattagaatttagagcagccttaacttcagacattataagaaattctttgccataaagtgtagtatcaacaaaatgctcataggatcttggcaaagaactcaacagtataat

SEQ ID NO: 316337 - DNA, 907 bp, Cannabis indica
tttaaaattttaatataaactttatttttatattagggattcctgctccatccccgttctattagagaatttttcaccccgcccccgataaaaaataaatgggaataataattaaaatttttaacgggaataaaaaccggagagcactctctcctaattctttgctctgtgtgcttccttacttgtgtcgtactcatatctattttatttatttatttgtattatttattgtcgtatttagttcaaattttttcttcaacctcttataattacaactttttatggggtgcttataaaacactatttgattttgaaccctcattccccatcccattgtatttatcccatttaataaacttttactaattggaaattagtagtaaaattaagacttatttaatgaaaaacactacattgatcaagtcttaacggtcaaaatatcaaataataaagaaaggggcaggagtgttagaatgggccggggcccacaacgccgaactcttgtctgggccttctttgtcttctctacctctactacccactctccaacaagtaagcaactattagagtgttacttactcaatttactattatttttttttcaaataatgatcaatatcattaatttactactactattattattattttagaaaaaaaaacactattattattattattattattattattattattatactttaaataaagagaaatattaattttattttcaagtcttgtagtgatagcttgaaagccggtttcttgtatttcttgcatgttaagtactaataaatataaatattacacaatgcatgtttcatgcatagtaaaagaaaaagaagaagaagaagaaaactaagtaaagaaggacgataagtagtacatacatgaaagaaagaac

SEQ ID NO: 316338 - DNA, 1000 bp, Cannabis indica
agagagagagagatagagaaatgtgaaatgtataaataagagtattaaaacatattaaaacaaataaaaacttattgaaacttaatttctacaatttattttatttgttgttagttatgtgaaaaaatatttttataataaataatttaatattaaaaagtaattaattaaaaataactgatataatttgtaattcggattttattgaatttgatttgaaagaattaaattaaatttaaaatataaaatctttacttaaaatatatcaaatgtattatgagtaaaatagtaaaatagtgatgattgaattaaataaataccctacaaataattaactattggagattacaaataattaagggatgtttctagtatatttcttgccaaatagattattatatagattagttagttagaaattgaatgtgatgtataaatgtgtacagggaatattgcggcacacattaagacagaagtatgttcttgtgctataaatgagagagagttcacgccaatggtaatgtaggcacacaattacctaaccttctttcttctctatctctcattctcacttatctaacattttgaaatggcttcaccgaagagcaagatcttgttcattggcggaacaggttacatcggtaaatttatcgtggaagagagcaccaaggccggacacgagacctttgtcttggtgcgtgaatccacgctctcaaatccagacaaggccaagatcatcgatgccttcaagtctttggaagtcaaaatcgtccacggcgatctcttcgaccaccatagtttggttagagcgattaagctagttgacgttgtgatttcgactgtcggccttgctcagttagccgaccaaattaagatcatcgtcgccattaaagaagctggcaacgtcaaggtacttttcaaaagaattaaaacttggagaattacccatatacggttttttttttaacttttttaaatttacggtttgagtttctaaagt

SEQ ID NO: 316339 - DNA, 899 bp, Cannabis indica
tgatataagcaacagttggaacactgttcacctaagacagtatcatttctaaactttcaaatttagtttaaatttaagcttaaatttctatcatattcttttcaccttactgacttaagcatcggagggtcgacagtaaagtcgtcgaccgcgccccctaacatttcaggatccaactacaaacgtcacgagaccttggtaattgaccgtcaggtaaaaaagtttcaatcaattgaattttacaataagatcccaatactgacttaagcatcgaagggtcgacggatttgttgtcgaccgcgcctttaacattgcagggtgctgcttggaataatatataagtgtttgacgaaagatgcaatgatccagatacgacaaaaatccaagcatcgacatagtaccatgcccatacttggattggggaataagatatgagcatttgaacaattcaaaggagtaatctcacaaaaatatgaggttagacaacttttataaaattaacatttagcactaagttagttcaatataatctttattcttcaaatgtgttattttacaagttcttcatatatagtcaaatggtacagcctaaaataacttaaggcgcgtaatcaatttttattataccttcaagaatccccattttttccaaagttctaccctttcaagtctaagacggataggatgtcctagagtggcactctttggtacgtgacatctctaggacggatacttatatactatgaaggatgcttgaattccttcacggtggaacgtcctagagtggcactttttgctacgtgacatctctagaacggatattcaaatcctatgaaggatgcttaaattccttccacggatgaaaagttctagagtggcactctttgctacgtgacatc

SEQ ID NO: 316340 - DNA, 1166 bp, Cannabis indica
ttattaaataaaaataaaaaatcacccatgaatttttcataaatcaagaatttcagttatataagcacacactttgtatataatagataaatatgtgtgtgtgaagaaggagcaaaatctagatatatagctgtgagaaacacacccaatgactaacttgataatgttcataagtcttttagacgacccatatattaaccttaaataataaaattatacatgtgcaatgattaattaaaagttatatactacatgtaaaaaaagaagataaattacacacacatatgacatatgtatatatataagaatgtggaataagtgtcccctatggaatttttcatcattttgaagttgcctcgattggacaagcaaaccctagatgccattcaaataatattctatatatttatatatatgatatttctttttgattaatggaagtttatatatatatttctaaaaaatattatattatattgaccctgctactgctgttgttagtgcatggttgaagtgatgcaccgccctaaatagtaacttggcaacatcacacttttttgacctatattattaataatcccaattccaaccctttttcattattttatgccataatccacatgctcatcatcataataattaattttaatatatatttttttgaaaaaaatcatatcacaatatgaaaccctttacttctaattaccaattaatgtataatattgctttcctttcattttatattatataactctcaaaatgaatggtttaaaatgggaaatttgattttctatgcttaaaaaatcctaaaattatattcctaaacctaaatgttataacataggcaatatatgactacttttgctttatccctataatacccctcacatttgaaccaaagcaattgtctctctctcggccaaaacacctccaccacctcctgcaccacctccaacgacgacgacgaggaccacccagccccctctgtcggacccgaagccttaacccacccagccccctctctctcttcgtctctctcggacccgaaggcttaacccacccagccccctctctccgtcgcgaagcctcaaccccgaagcctcaaccgacggtgacggcgcacggcgcaccggcccccatagcccccctctctccgtgcaccagcc

SEQ ID NO: 316341 - DNA, 737 bp, Cannabis indica
gcagtcaagcaagctgagcacggtactccacagagaacttccactgattcgaccatcctagaatccaacattgatgagaaactttggtgttctatgccaaaaagtgatgaagaaaacaattctaggccacaatcagacagtaacagaacaccacctgaagtgtgtagaatgagggaaagtgaatgtaaagaaggatatgagagtggagattggctaagtttgagaaaaggagtgaggaagctttgcaggcaccctgtgtttcagttgaataagtctgcaaagaagactgcaacacttgagattgtaaatactaacactagggaacggcacagagaagcttgggcctagagaagaaaccccatctaaaaattccgtcgttgttcattcattaacagtctttttctttttcttttggttgagatttgttatagttctagatgtgtttggtttgaacttcagtctggttgatggtattaaacctgtttgaaaagcactaactaaggtagagctcttagtaaaaatggatatacatagaacgagggtatttgtgtgtgtgtgtgtgttgagactaaggtacaactttgatgattgtatgaataactttgcagctatggtgatgattctatgggcatataagtatatatatacataacttacaactaaaactatactcataaaatcacattattattcttttaactgacctaataaaataaaagggaattaccttatatact

SEQ ID NO: 316342 - DNA, 607 bp, Cannabis indica
taatgtaatgaattcaaaatgaaaataaaaagaatttttgaacttaaaataaatattttatcaaatttatactttatattctataaattgtataagacatacataaacatagtcaaccacatatagatgttaagtttataagttattagtgaaggtagttaggtagttaggagttagtttttactgtacataatctgttatttgtaagctccttttcctaactgaattcagttagctgtaacacttgttctgtgcatatataatacaacagagagtctgtgtttgagacacagcttattttcatcaaatctcaagttggtatcagaacctttggttttttttttctttctttgttctttgaattcttgaagcttcttcgatggcgtcttcatctggtcttaggcctgaaggttcctcctctttcgctccacaccacataccacagagctccatagtgcaaatcatccccaatcacatcgtacccctcaatcttcgcttggatcgcaacaacttcttctactggcgatctcaagtgctatccacagtctgcgtgtgtaacaccctaactaacataggcgtgttatgtgattttttaaacatactgtgc

SEQ ID NO: 316343 - DNA, 1592 bp, Cannabis indica
aattcatattaggttgttaatgaaacatacatggtagtaaatctagatcctggtaaaatatttccaacagtcttggcttaagaaagactttagaaatgaatcaagccttattggcaaaatggggttgggatcggattagcgaggaccaatctccgtgttgtaaagtgtaagagctaaatatttgaggaatagaccttttttgaatgttttgttaagagtttggactcttaattttggaagaatgtggtaagatccaaagctatccttaaaaaaggtgcttgcaatctctctacccgaagcctatctctactagcactgagggtgtggagaaactagctaacttgctcttggaaaatggggattggaacattccaaggctccaatctctctttgaccctcagacaatcaggaacattttgaaaggtggcaagccaagtggtcagggtaagtatggatgggtttggactaaagaactgagtggtattttctcttctaaatctgcctagctgattcaagttttggatcgtgctcttttgtgcaatgttgcccctgccttatggaacaaactttggaacttgaaagtgttggagtggcataaggttctttggtcaagcattctctctaatgctttgcctattcgtgccctcatcgctaagaggatgcatattgagatggttacttcagcgatctgtggaaagggtgaggagtcaatgaaatatcttttcctctattgtaactttgcttaccatctgtggagatcattcccgagggggattatccttgttcaggagtcaggaggtcgagtttgagattgggtcaatttctttggaatctaaagtctagaggagtcgatgttgagagattatttctttacacctcaattgtggttgatacgatctggcgagcccgtaatgacaaagtacacaataattctcagagtaacattacgcattatattgattttatttctacttgttacgcaggttatggatcttgtttggttacctcgacgaaggttgttgtgtcccccaattggtctccaccaccggaagattagatcaaagtcaactgtgatgttaaagttggtgaaggttcaatgtgtgcgatggccctagctcgggatcactttgggacggttttgtgggtggcgtcaaacatgctcaaattcgttgatcccctaattagagaagttgtggcaagtctaagctttgaaaacagctatttcgttgaagcaccattttgtagtaatagagagcaattcgaaaacggttatcaagacgctaaagggagcctgctctacttggggtattgataactatgtgcatcaatgtaaaatactctctaaccttttgataagttgtaatttttcttttgttatgagaacttgtaattttgctgttcataatgtagcaaagtaggcatttgccagaggtgtgtatggcttaattaatctgtcttctattccaggcaacatcgtttgtaatgatcatgagatctaactcgtatgttttggtttcttcgatctataaacgtcttagggtgattctacaatgcacccccttaaaaggaatatattgatgcaccccctactt

SEQ ID NO: 316344 - DNA, 1679 bp, Cannabis indica
ttagtgatactcagctacaaaaaatgatacaagggttagagatcgaagtgggaggagtcatttaattccgctgcaacaaatgtaaggtttcttgaactttatatgtttttaaattccattgttttagaaattcatatttaggatgttaaataacatacatggtaataaatctagatcttggtaaaataatccccaacaccatccttttcagtggcctctaggatagagcaatttggataatatttatatttcaaaatttgagcaggcaaagaatctggatatagaaataatctccacacttgtttggtcaatagtgcttgattaaaaagatgaaaatcccaaaatcctagcccacccatcaccttaggcagacaaagcttttcccacttcacccaaggaatcttcctttgatcaccagatgaaccctaccagattgtctaacaatagactttaatttttcacaagttgacgtcgggagcttaaaggcgcccatcatataagtagggatggcttgtaagatagatttgataagtacctctctcccactggctaaaaagaaactctgtttccacccgcaaacacgcttcctaaacctctcacagatcccctcaaatgcctgctttttgtttctaccaatcatcgtaggtaaccccaagtacttatcatgtgtagcctctaaagtcaaccccaatactctcaaaaccccatcttgatccacctattgcacattcaaactagaagtgatagtagatttctctaggtttattttctgaccagacacatcctcataagttagaagaatacgctttatagtttcagtatcacctccattcgccctaccaaacactaggctatcattcgcaaaaaacaagtgagtaacccgaggtcccgatctagaacatctaaaccccatcatttcagatcttgcctttgcatgagagaataatgaggacaacgattccgcacagaagaggaataaataaggagataaaggatatccctaccgtagccctctaatcgaagtcactcgacctttaggtcaaccattaattgaaaaagtatatttagtttcgtcacacaatccatgacaactctaatccaagccttagcaaaaccaaactgtcgcatcatactggccaagaacctccattccacccggtcatatactttactcatgtctagcttgagcgccataaatcatctgttaccgttatttcttttaaacaatgaacgatgtagctcaaaattgaccataacgttgtcatgtattgagcaccctgggacaaatacactctggaacgatgagatgagggggcgaagaacatgtttcatccttagtgataaaacttttgtaacaattttgtacattacattatacaaagcaataggtcaatactctttaactaatcttggtttttgtacttttggtatcaacacaatttttgacttattaaactattgcactgataattggatcggtttggtcggttatctactagattagatgtcccatccaacaaccgatccgatctgattggattttcaaaatttacattcgatctgatccaattatgattggatatccgattctattggatcagttgggattggatcgatcagttgtaattagatttgatgactttctgcacacccctactggggagcatgatttagtacat

SEQ ID NO: 316345 - DNA, 1507 bp, Cannabis indica
aaataatttccaacaagaagatgggggagtatcaaggttctcgacaaataacacccctgaatcctccctgtgaagagctttaacccaaaaaaatttggaaccctcatcacaactcaaaaagactgagtctaaaatggtccaaggtaacttgagagaaaagctctgccagatgagcacgatcgagaaacgaactctctcgatagatttacttcaaagcaaaaagaaaataaagccagccacccccgaacctacgagaaaagctagctaaaaggaggaaggagatagataaggagatggtggatcttcgacggaggatagcatcagctacatctaaagattgtaactgggacgaggatgagtttgatggagaatcttcattttcaagggagattttagaggagagtctacccacaaactttaaaagcccaaaatgtttccttacaaaggcataaccgacccaaagtaccacctagatgcttttaacaaaataatgaagatgaagagggtcacaagcaaagcaaggggccagtgctttatcgtgacgctcataggtgcagcgtataagtggttcaaacggttggcacctgggtctatcccctcttggaaacaacttttagacaaattcctccaacaacatcatgctgcacgtgataacattatgcgtatcacaagtgtcaccaatgtgaaaaaaaaagggacaagaaactttgcgaagcttcatccaacacttcaacaccgaagttaccaaagtagggaaggtaactaaggatgaatgcaagtctgccatagttgctggggtacaacatgggagtggattgtggaagaatatgttgaaaagagagttggatggcttagacaacttttacaaaagagtggagaaatacatctgtgtggaggaaggaaatagagtcttaagagaagacaccagttagtgttcttcaggaatctcatcagaatactacaagttttattagttgctactctcgacgctcataaataaatacaattaagtgaatcctccaacccgtggcctgtaaaaatcaaacatccaagatgctccttaaattgaagttccaccataagaaaagagtgaaatgcaaaagataattccacaagaaagagcactagcaataacgagggggatgctcctcaaaattaggcgtaaagcgtgtgtagggaaacaaacaaaaatcagcaaaaggtcgagttaggttattgaactatcatcttgcttaaaaatcgaaagcaaaaggttgagtcagctcacagaaccatcatctcccttaaaatataaaaattaaaagcaaaaggttaagtcagttcacagagccatcatctccctaaaatattaaaataaaaatggaatcaaatatgactctaggagggacacctcactaaaaggagtattcattctctaacattcaaagtgcgttctaagtgccacagatacaatgtcaggggctgagcgcagcctaagaggccacaagcttgttgggttttgtgccct

SEQ ID NO: 316346 - DNA, 2209 bp, Cannabis indica
agattgatctgtaagatcagtcaccagtgcagaaaacatccctagctcattgttattgttatttgtgatgtttcaagttcaacctttgcagcttgaggcaataacttggccgtccaagttgtagtgtgtaattattgtggaagtggaagaaacctcttcaacaatttcatttgatttttctatgtgttgggacacataacataatcaaaatcattagcattgtgatatttttttcttttgaaagtattgggattatgattttaattaatatttttcagaaagaaatatacatatacatctattattattaaactgatggtatgtcagtcttaatgtatatgaaacttataataaaattaattttcgaaatccctacataaatagtttaattattattaaaaagaattattttaatactttagtgtagtaataacacttttcaaagctctttaagagttggaagttgggaatttatctcataatctcttaatttaaaataacaatctctttcgcgtcaaaaaaaaaatactctctaccactacactgaatattattctgttatattgtcttattatttctgtaacgttttcgctttaagtacgagtacgttattctagatgttttctgcactggtgactgatcttacagaccaatactagcacgtttaattgtgaagttttttcatgataagctactaaaaaatatatgcacattattgatatagtatcaattaatctatttaagtcatctgtgtagtctcatacctacacagaattatcacacttgacttttcccagcaggcagtgcaggattgcacaatttactcaacatttctccttacaaatcacggaactactgacagttacaaattcctttttatatattattatataatgataattatcttttcataattttgaagtcctgatcgtttgggaacttaaggcgcacgccttgactcatctcgaaatcagccctattcataaacttgtcccaaatcatgacataatttaatatttttattaactatgaactttcattgaatataatcaaagtttaatatattatctaagaataaaaaaaaatcatccatattgaaactgatgccctcagagtcttccaggctttaacatcttcatcaagggttttatctagtttttcgaatttaatctctgatgttcgttatcttttatcctttttctctgaagcatttatctttcatgtcaacagaaacgctaaccatgctgctcatggtttggcgaaatatactttagagttggatcaagacgtttgctagttaagggaaattccctttcctattttcactattgttgttaatgattgttgttgattaataatattagtgaatttttctaaaaaaaaaaaactcaccatctgaatgtacaaactactaatttacgcgaccaaaataaccgcagtcgaaagccaaaaccgaatatacacatatattatcagaagggtaattgagtaatttcaggaaaacaaaggagagttcgcacgtgtggcgtcgtaggatttgggttcactgattgagtcattttctcgcatactcacacgcttactttcttcttctctctcggcttggcgctctccgctgcccccaattctcacaggaggtaattcacctaccataaaaccttctcttccagatttccattctatcaattctggtttaatgcatcaattacactctatttttacttcaatttttcttgattttcatttgtggatcgtctacactctgtttgtttcccgagaaaacagaggaatcacgagctatcgatgagtttaggttttgtaatcgatagtgtggtagttgtgatttcatactgaatactgtttggtgtatcttaggcaatgcattttggagattggagtttggtcaatttctttttggatgatttgttgttgaattttttcatttttttggaaaaagaaacgagaaaaggaaattgcttttgtgttttgacgccaggaacgattgggtttcgaaaaatattgtgttttcttgtgaaggaggcactactaaggattctctttgttaatttatgagtttctttatgtcaaattgtaatttcttttccccttttcagggaacatttggtttgggacaggagattgtaagagttaagaaaggtatattcttttttatttttttattattgtgggtgttgatgatgttttgtcg

SEQ ID NO: 316347 - DNA, 2095 bp, Cannabis indica
attttttttttatttttcgaaaattaaattaaattttattttaatttaattatttattttaatatcttcttaaataatttattacaaaaataattatgcctttatattttagttaaggatctctatatgtaatattttttttctttttctttttttttttattaataattatgatttttatattaacataatattatttaagttatttttttttattagttgtgtacattatagttatttaggacgacttgtaaatttttagaaaattttaaataccaaaaataagattcaaatattttgttgcacgtgtgactgcttcttcttatacatgtgataagtaattgtttaattattattttcggcattgtaaactatttagaatttttaaaaaatttacagatgatcataaataactacatcatacatgatcataaaagacacttagaattaaaaaactttcttaaatactgaaacatataatgcaatttactataacacctgtttagggagtgtgttatagattttctctaagttttttttattaatttttttttaaataattacaggttgaaaatttaatagtatatatcgtaagaagctattctatggtgcactccttaaaaaagaatgtaccgatgcacccccttctaatttttttccatggtcgtgtacgtaatatgtttaagacatcctacaaaattttaaaaaattcagaataatttaaattatagaaagcagtgttcaaacaatctacaatatttatttaaatgtttgtcctttactattctatcttcagtataataataaaatatgtactttgtaacttgtactataattaaaataacatgtaaaaattaaattatataaatttttgttataattatttgtgaaataaaaatataaataaaatgcaataagtagagctaggcacgtgcattgcgcacgtgctacactcacctagtatatatacacgtcactatgtctaatttttggatgtatattttaaatatacatttcaaaaaaaaaaattgttgtaatttatatctatatctatatatatattttgaatttcaaaaaaaaataaaattatatccatatatattcattaataaacttttttttggtcttattattttgcagaccttttattttttatggaagcgtgaaatatttgtgaggagactaaagtgcaaatagaaataattccaggggaccattatgtacattttttaataaaaaaattaaaatttacaaaaccataacggaaaaaagtacaatctaattttttttaatatgatattatataatatagttatttagaaaatttcttaggaaattctaaggatgtgtttagaagaaattacgctatataatataatgtgtgtttggatatattaggtttagagagtgaaaatgatttttattgatattgaagagctattcaattgaattacaatggcaagagtgaatgtttatataggaaggaaagtcggttaagctagtaaccaactaaccgaacataactaacaataacaacctataactaacataactaacttagcctcttggagacaatgtcatggaaatgagtggggaatagaggcttcatgaggatgtcaactaggttggacttggaggcaatgtgattcattttgatggtgccattggtgatcttttctcggatgaggtgacagtcgatttcacgtgtttagtacgctcgtggtagacgagattctctaagatttgaatggctgcattgttgtcacaaaataatgttgatggaatcctattttggatgccaaagttgtgaagaattgagtggagccaagttagctcacaggctgcattagccatggctctgtattctgcttcaacagaagagcgagataccgtgtgttgctttttggacttccatgatgtgagagattttccaaggaagacacaataacctgagattgatcgtctattgtccaagcatgctccccagtcagcatctgcgaaagcttgaaggtggattggttcaggttggatgccacaaggaatactccttgataagttcgaataattctctcaagaactcaagaagaaaacctct

SEQ ID NO: 316348 - DNA, 771 bp, Cannabis indica
ttggtttaagaataaaatattagggtttttaaagtatagtttttcaaatttccctttgtagaataaatgtcgattattggatttgatgttattggtataattgtcagtttaaaaccaacacaaatgtatcttttttatagtaatgaataaagaatacaatgatatgatggatgcgtcacacaagaaatattgtagttttttttttttccctaaaaatatctaatttcattttcgttccaatccacgcatattatgttaaaacaacaatgttgattatgattaactcttgtgacaatcgaaaattataaacacaatatatacttctttttttaattgaacgcgagggagaggaaacctagctagctatgaatataattgtacaatcaaactaacttattttggacaaaaatgatctcatttcctttctataaatgtacatatttgtccctatagatacaaatatagcatatttattggctgatcaggctacaaaaggaatctgttctatataataagatcctaacttatgtataataattaataagaagatataaaggctgctataattgacccataataccctttcatttttatatgactagacatatatttcacgagttctataactatgtctatatgagatttattttactttcagaaaaaggaaaaactatacgtggttgcaaggccgtcttaaatattttggaggctctgttataattttgaaaattgggctagagatggaaatcgggcggttaatgtacgggaatg

SEQ ID NO: 316349 - DNA, 1082 bp, Cannabis indica
ataattagaacatgtatttatttcaagcatgcattgttaaattttctttttttgtgtttgattttgcttgtacctctcggactcgtaccaattttgtatcgtatcaaaaatcctgacctatatttacagctctaacatctatccaattcgccatcttgaagagatttttagtatatttttttattatcgtatacgttaaatttatttaggattatctataaatttttataaaattttaataatttacaatataaaataaaattaaaatattttgttatacgcctgactattttcttatatatgtagcaaataactatttgaactttacttttgtcactgtaaactatttcgaatttttaaaaatttacagataattttaaataattataacgtacataatcataaaaaatagactacgaaacacatagaggtctgccaaaacatccctttaagggagtatattgacattattatcattgttcaatcaataaaatgttattgagcaccaatggtacctaacaccttttataggtggtgccctacgattgattaacgatattcactaaaagctattttttaagttatataggacccgatacttaattacaccaatagcattatgacactgaggaggatgctaggcactagtggtgccttttagcaattctcaataatattgggagcttctatgatgcacttcccaaagaagggtgcaccaatacacccctcacagtttcaatatctatttttttattatcgtgtatgttataattatttaaaatattatgtaaaattttgaaaattttaaaataatttacaatatagaaataagtgcttaaacagatcattttatatgtatataaaataaaagagtcacacgtgtaacaacctgtttgaacactattttttatatattaatcttttttgaagttgtcaaaatcttacataatattttaaataagagtattgctaaaaggtatcactggtgcctagcactctcttcggtgtcataccgttattggtgtaattagatatcgagtctcatataatttaagaaaataacttttaagaaatattgctaa

SEQ ID NO: 316350 - DNA, 1017 bp, Cannabis indica
taactaactccctaattttgatataacaagagtgactattacaaaaagcagagtagttcccaatttcttaatgaggatccaatccatttcataaccactattgaattactttccacaataataaagttttagcatttatctttagccacttccaaagccaaacaataggctacgacttccccatacacagtgcattagaaaactctaaccttaccgtatgcacccaagtcaccccactaaggtagtttctagccacaaccgtgatatgtgatatatatgctttccatctctactttaataccacagtttaacttaatctactcttgaaagagtggtcgccaaccatccagcaagatcgaaaaaggaatagcgaatagagaaactctataatttgcataagagcaatgaatagagccaatacaatatttcacaataactaaaattttattgtgtatcttattattttgagtctatgatatagtatcaataacaattgacgcatgaattacttcatattaatatgtcttgtttttctagataaatttatcatatcaaacctaacaaccccaccgagaggactgccacaaacaaaaagctaaattacaagtgataataggtaccactatttctttttattgtttgaataaatacaaaaaaaaaaaaacaaaaaatctgatccttgtatagttttttcctttgaatgttttctttttttttttacaaaaattctacaaaactataaaaattgttacatgtatcttttctttaaaattttgctacaggtatacaatagtttaattaataactttaagctattgaaaatataatgtattgggtacttctacaatacacctcccgttaaaatgggtgtactactgatgcaacctctaactatttcggtatttataagtattttttaatctaaatttttttatagtcgtgtacgttatagttatttaagacatcctgcaaaattttgaaaaattcagaataatttacaatatagaaatcaatgtt

SEQ ID NO: 316351 - DNA, 1565 bp, Cannabis indica
tgggattgtccatattttatgaacggttatgaaaataagagcgaggaagaatagctgtcaccttcaaaatattataaataggagaagaatttccgaaaaaaactatgaattttgagaatacaaatattctattgatcaatactgttgggtttcatgccctaaatattctattgttgttaattttttgttatttatatattattttttatgtgatttttttgttattattttcatataattttattgttattcttatattatttttatgaacaacataaaaatatatatataaaaaagttaaatataaaagtgttaaaaagaattaccaaaaaatagtagtttatagaaattaatttggattttatttttctttgaagcaagaaaaaaatggatttattgcatacattaatgaatttattattgcattttatgcatttataaattgtaatgataaggatttatgctttcaaggattttgacagctaccatagtcaatgggtgacaaagtcaagctataataacaatcaagttcatctaatcactaataactatttatataatacatattgccatattgttataattaattaatcaaaacatttattacattataaacactcattgcaaaactaattacattgagagacaagtaagacactacataaaagtactctatttttatggtcaaataattatgaataatttacgacataaatacttaattttaacttacactttgtaaaacttctataggtatataactgttaaatgttaaataaattatcacgcgattatccctaattggtccaaatcattaaatttttatttaaaaaaaatagtttaaatatactaataaaaaaataacacgtgaataatgacttgacatttaacggtcaaatatttacagagttctaaaaatataacttagaattattattgtaaaaattgaacttagtatttatttacagtcaaaaattaaaattaaaaatttatgccgtattactcaataattaataataatttaatcatgagtattttaagctatctttaaatatatatacatttatatatatatgtttatttcaataaaaataaaactaaaaagtccaaacacgttgctccatgaaattgaccaaagaggaactatccttgtgaagtttcttttcttttctttttgtcaattacgttttgttttatccattttatagatttgaagtttctaaatttatatatcgttgaatatctttcttcaagaaaataagtcaaatgttgtagtgtaattttacaaaatataagatctatctttattttttaaaaaaaagtgtttggaaaaatatatgttttctagttgttatttatttaattttaaaaaattctagaatacatcgaatgcactaatgtactcttatttattttagcattcgaaataatttttagtcaaaatttttttaatgatcatatatgttatagttatttaagatatcttacaaaattttaagaaatttgaaaaaatttaacacaccgaaaataggattcaaaaaatgtgttacacgagtgactatttt

SEQ ID NO: 316352 - DNA, 926 bp, Cannabis indica
aataaagtctttaaaaattttattctaccatgcaggttcaaaaacttttaatatactttctgcactgtaaattatttgtaatttttcaaaagtttacatggatgatcttataattataatgaacattgccatgaaaaaaattgaaacaaaatattccgacatgtattttcgaacacaaaagttgacaaaaaaattataatagaaggttgacactctaaatttaatttttaagaattaatgcatgttagagagctagaaaaatgattaactactctaaaaagttcctttttttcattttaacttcattggtgattattattattttttaattttaattttcaattttttatatgataatatataatttatttagagtaatttatgagaaaaatactataaattttgtatttatagcacttaaatatacctaagtctttttttgggctaaatacatttcgctacaataatttattagcaaccatagctatcttgacattaacggccatataatacatacgtggcaatcgctaattagttcacattaataaaataatttaaaatttcattaaaaattaaatttatttaaaaacaacaaaaaaaattaaaaatatatatatgtatatttaaaactcatattcaattaatcacttgaaggctagctcaagtggctatataaagcgtattgggcgtgtgtgtgtgtttaggggtaggggtcatgggatattttgcctaaaatttttcccaaaatacatggtagttcaggagggtctacctggaggatgagtggtactttttgtctcttcttcttcgtaagtgagttcggccgagagaatgtgtagaaagacaggcagagcgtagcacgctgcacaaggttaaagtcattgtatatgctttttaatgcggtatgggggaagatcatccaacac

SEQ ID NO: 316353 - DNA, 798 bp, Cannabis indica
ccggaaagataaaagagagatctagaacttttatgctttgattttttcaaaaatataatcagaacatagtaaaattcaagcttgaaattttagctttattttcttgcacaattttctctattttatatatcatctttttgtgagatttttttaaacttttttccatcttattactttgatattttctaatcttcttatattttaaatctacaaaaataaaagataaaaagcgtaaaattgctccaaataagagtagaactaaattaaaatatactaaacttaatccaaaattagtactaaaaataacctaacagctttccactttctgttgggcccactaccgatctttccaacaagacaactgggatttcctcaaaaatggggacttcgagagcctatctaagaggagtttaaatctctccttctccacaagtttttatcttttatctcatttttttctctccccttatcatcctcttcctgaattatttgtcttgcaggcatcgctcttttctcacttagctcatcaaagaggcctttagagaatcaagcaactgaagttcgagcttcgcacaaccattgagcaacgtgaagtttttgtgaggcaatggaatgactaccggactgaggtaactcgattaatgaaggaagctgaaaaacagaagaaaagccataagactaatcttgaaggtgctcaaaaagaggctaaggatctccatgaagctcatcaaaaaattagtaaagagcttgacgaggcgaaccaaaagcttaatgaggccaacaagaaacttgaagggg

SEQ ID NO: 316354 - DNA, 1016 bp, Cannabis indica
tggagaaaattctcttttattttttctgttcttataaattataaataactctttaaatttataataatagatttttttcaaaaaaaaaaaaaccttatttacataatatattatataaaaaaaactgaaaataaaacaattaaaaaattataaaaaattacttactgacaataaaatttaaataatttgttatacttatatctgtattttttttaatttttatacaccatgtagaaaaaattatttgaatcttattaaatcattcagagtttttttaaaataatattacaaaatatattaagtaatcataatatacatccttataatataaatatatatatataattaagatttgtattttttttagtcctcaattaagatttgtatttaattcgtctgcatcgttatcatagataattactaatgatggaagacactattgcaaacaaaaaaaaaaagttgagaggccaatttgctaaaaaaaaaaatattagagatcaatttaacaaaatttatatatatttacttaggaaaatttgatttttttttttatgtatgatttaagagttaattggttaggaaaacttaaactataggtaattgttagaatatgtctgctttacttaaattccaaaattacccctatcaaaatcctacacccattctctctccttccctctattctctctgttcgtcccaacccagccctcccaaccccagccgaaaccccaaacgctggccacacacgcacggaggagacccaccagcccacggcgctcccccaccgacccacggcgcaccaccaccaacccacgatacccacggcgcaccaccactgttttttatttttttatttgtattttgtttgtgattttagtgttaaagatagattttgttagatttaggttttaaaatttcagatctgtgattttgggcaaggtccgatgtaggtctgatggggtcccatagggtcgaatgaaaactgtgagttttcgaggtaggagacgtaggtccga

SEQ ID NO: 316355 - DNA, 1040 bp, Cannabis indica
aaaatgtttaaaccaatgatataagaaaatagggaacttactagggattggtcactggagttaataacggttcgttgaagaagaaagccttcaggttggcaatcataactaaacaagttgtctatcttattcttggctaatcagggacttaattctaagcaattgtaaatagtaatttgaattgacaatgtggagttagcaaaattcggtttgacaaatccttagatagtttgaaaattagcttttgttaaattacagttataaaatatatgggatattcttaattattgcaattttcccaaaaaaaaaaagtagtagtccttaccttgtgaggaagaggaaaatcccctttgactttccagaacccatgtctgacgtagcagtcggaggcagctttcctaagcacatcaatcaataaacccacgaccatattagccacatctttcgagtaagagttcccaacattggccaccgaaaccactcggcgacggcactcggccaagtcgacctgattgacgcccgcactggaagtcaccaccattcgcagtgttcgaagcagttggagtaggtcggcgttgacggaggtggcgtggctggcaatcatcgctcggactgagcttgcatttctctttagaaactggtccagaggtagctccgactccaacactttcaccaatcggaacttttgatcaagcaatggcaataaaataatgggtagcgtctttacaatcagtaagagttgggactgatcgtttggaagagccactgaagagtaaaaacctttatttacataaattcagcaacaaaaacgaagaggtaggaggacagtaaaaatgaatttgaaaagtcaaaaaaatatttatgtaaataaagatttatagaattaaaaatttaaaaaagagaacgtaaaaatgaaaaaaaagttgaaaaaggtggtacaataacgtgaatatattttttacgcactgtaaatagagatatttttttataatttttaattaagtagttaaactaagtataataatttaaatttttttatt

SEQ ID NO: 316356 - DNA, 1572 bp, Cannabis indica
ctttgagccagctttgatccaatctatcagaaagttaagatgagttcaacttagaacagattttcaattggaaaaatgccattaaacacaaataaagaagcttaccaatttggtagttggtttaatcaatcagcaatgtaattaacaagaccttaatcaaattagaccaatttgcaagtcttctctgttttattttttcctgctacaaatcagccaaaaaaacaaatcttcattaagtactcaaacttcaagatcactgaaaaagttggtaactaaaagggtagtattaccttcaaaaatgaatatcttagaaccaagagtaaagtgactagctaagaacatgagcaggtgaagcactggcgagtttagaggacattctcttgacatttccatttacaagaatatcgtaagtgttgttatcgggtttgagacctctatcgagcatctcatcatgcaaccgaaaggcttcttgcaaatttccctccttgaagtgcccagcaatcaagcaattataaataagaacgttcggggcgagattcttttgatccatctcgtccaagaccttacgagcattcactagctgtcccttgttacataggccgtttactaaaaccgtgtacatgatgatatcggggacaatacccttcgaaagcatttctgagtaaagatctaacgcattgtttaactctccctctttaagcattccatcgattaatgtagtgtaagtgagtaaatcgcaaggaatcccttccttcaccatgcgcttgtgcaaaccgatagcttgttccatgttacctatattccgaaagccacaaatcatactattgtatacagctgcatttggagatagaccagtctcaagaagttcagagaaaagttcagaagcagttaccatgtcttgtcctttgctaaatccatcaattagagcaccatatgcagcaatatctaactcaatgcccttactaatcatctcattcctacttttcagagcaagatcaatattgttgctcttgaaataaccattcatcaagctagtgtaagtgactacattcggagaaaccccgttttcagacatttcttcataaactgcaattgcagaattagcatcgccttccttgataaacccgtctataatgctattataggtcatggaaataggaacaaatcccatctcaatatatttcttcaacatgtcctttgcttcagatgtctaccagctttgcacaagccattaatgatagtgttgtatgtgaaatctgtgggggctatattacttgctttcatttgatcgaaaagatcaaagctcgttcggcatcacctttataaaatacccatcaatcaagacggaataagtgatcacatttggctttaaattcttttcaagcatctccttaaacaagttatgtgccacatccattgcccctcttctgcaatggccaagtatcatgatggtataagatactacattaggtaccattcccttactactcatactatcccatattccacaagcttcatttactctgcctttattacaaagccaacataaaaggttattccatgtgaacatgt

SEQ ID NO: 316357 - DNA, 1248 bp, Cannabis indica
taaaaccccaccagtgggtccaaagaagataatttgggccaagcccgagtcatacaagatctttcaggaaagaaccttagctttgtgaccagatgagcctctgccaacgacagtccgtatccagaagcaattccagtatcgtgacgctagaaggttagatagagtattcctggaagacaagttcggtttccttttttattcaagcatacagaataaggaatcatatgctcctcaaatcttgacagaagatcctattaatctaaaaagggaaactacctaaaatggagatcaagcaattaattcataattaattatccataattaaaggacataatattgacaactaaatcgtatccaacgtgcctattcagtaaatagatcccttaatgggctagaccttgttaacctaaaaaagtaatcaaccgaaagcggggtcgtatggatctaatgcttgccacatgttacacaaatagaatagaaaagtaataaatacacagatttttaatagaggtttgacccccttagttagcgggtaatgacctatctccttttagttgtattgatacctagagataatactattcagatcactataggcgggatctgatatagctctctataaggatacaaaacatgaatcagtaggcaggtctataatgaaagagtgatattgccttagatgcctgtgaaagagatgaagagaagagagggcccttgggggcgtgtagcagagagagaggaagagagactagggtttttgacttagagtgatttggaggcatagtgactttagtttctaggctagggttaaggcctttatatagggggcctaaaccctagattatattttaaatccctagatatttgtataggttattagataattacaaaagactaaagtgcccttgaatctagatattactcaaccattctattgggcttttagggcctgattcgtggcccatgacttgttgtccacgttttgggctgtacatagagtcctactaggttaatcctggccgcccaaggcctgcaggatctggcaggttaaggcctccaggatatggcaggtcaaggcttgtaggacctagttggtcattatagctccaccaagaggaggctagcctttgggtgtggaggctagccttttgcaagttaaggataactttgtacatttccttgtagagaccaggttcccttggttgaacgcaagccttcttagtctggaagtcacttcttggtcggcca

SEQ ID NO: 316358 - DNA, 979 bp, Cannabis indica
ctttaatatgtactaaatcatgccccttgaactttcatccatgttagaattttttactaaaattagacaaaagttcttaaatttaacaatctcaataattcggggggaatttttaacggcgaaaaaagttcaaggggcacaatttagtacgtcaaagttcagggggaaaaattactaattagcctaatttaaatggtagttttgaattatatttagtttttaaaatttaattattactgcaataagttggtaatttcactttttttttctcttatgtatatgaataagttaattaataacaaagtgtctaaactttctctctcaaagggataataacaagggaaaaaaattaagattttgtgttcctaaatctatagttattagaggttgtcatttttctttagcctggcccgtcgatttttttgggcttgggtgtggcttggtcggaattgtattttattactgcaattcaattttttctactataattagtcttgctcctctgatatgattttgagtgttttagtcttgtctctataacataattttgagtacttttgtcttatttgtgtgacatggttttaagtgttttagtcttgtatatgtgatctagttttgaatatttttcgccttgtctttgtgacatgattttgagtgttttagtcttgtctgtgtgatatagtttaattttatttcgttgttggttcgtatgtcctcatcaaagccttgccatcaaatcgttgttagtggttggaaataacaagttatctacgactaaatggatttttagtagtgcggttacgtacattacacaataattgggtgctcaagctacgaggttgaatgaacctgctgcaacattttctactgttgttttttaattttctgagtgatggataaatagtatataagtgttcttaagattaattgtaatgttgcaatatttttcattttgatttttatatagtttttttttttt

SEQ ID NO: 316359 - DNA, 1090 bp, Cannabis indica
aatatgaaaatgaagtaaaaaaataataaaaaattaattaatttaatgaaagagagaaagaaaaagtataaaatatgttttacctcttcactattcatgagctaaatgtagagaatttttttttggagtttgggaagagttataatagctaagagtttaaaacatttgttagagcttaattttaagctcttagctatttttttttttgagtgtagcgtaatggtttttacaattatatattagtttaatagcttaaaggtcctgagttcgaacctatgacctttccctttttcccatccctccctcaccactaagctaaccttaatggctttcttagctatttttttttttagcttttaactattatagctcccttgttgtgagtgctctcagtactactacaagaattgaattaaatataaacaaatagtgacttataccctaaatttgatttgcaaatcatatgtagggcattagatattgcttgacttggctcataatccacttcttctacacaaaaggagttaggattaagtcacctttaaagtacttgatttcgatttcaggttaacattatttggtaattttgatctttaatttgctgttgaagaaaatggaagataaagaatgtattaatacatctgcaaaagttatcaatttcttttaatagattttaaggtagatataattttagattatttattttgtaaaataacaagttcaacttgtattttttttttccaaaatcttactattagagcattggtgatgctttaagaatgttttgatgacattgatatatttttgacatcttttaaagattgaattgaaaaataatgctaagaaaaaatgtcatacataacatcctttatatattctctttcttattttttattataaaaaaattaattttcaaatatactaaatatatttttaaatatatattaaaaactaggtaattaggatttttgccctctgaactttgacatgtaccaaatcgtgccccttaaacttgttggaaattattttactaggatattagatctactcacaagtatgttgattaataccctaaatatgaacttctaaa

SEQ ID NO: 316360 - DNA, 1107 bp, Cannabis indica
ctgactatataatgctaattgagcatgaatttggtcaaactagaaaatttagcatagaagcattatagataaacaaatgtcacatggggactcaagtgttcacaaatgacttacagcatctttggcttcaagtttctctgcccagccatttaaagcaaacgggtcattcacagctacacaaattacagaatcaattcctttagccttaaacttgtcaatgttgttcttgtaactgggcacatgttgctgagaacaaactccagtatatgcaccctggaatgtgataaatgctaagtctggtaaattgaatttgaaacattaacattaaatgagatcttctcaaacttaaatacctattaatcatacacaaaacaaaatactattcctaataatcatagcagaaaatccaatattgagagtactcaactaaacccaaggaaatggaagctatgtgaatgtatgtaacactgtgatcaaatggaaaaatgcccatatgggtgactttcatattcctaaagtaagaagaatgaactaaattaacagcatagtatttccaataatagaagtaataaaagtgttgagagtaacttacagggagcccaaagatgacaactttcttgtcctaaatcaaacaacaaattccgcccaaaaaaaaaaaaaaaaaaatcagaattttgagtattatatatatcaaacaaattaaaattcacaaagggtaaaaaataaacgaaagagtgtatgtaacattgtagctgaagaaatagaacccagaaatgaccttaaagatatctttaagaggagtagttgagaacttggtggagacaccttcgtcccagctgcgagctttctggagggaaacatctggtgcggccgagactatgtcagtcccaactgaaagcgatgcataggacctaagtccggttgagagagctcccaccattgatctcattcccgagtaagagcttcgcttcagaaccatagacgccatggctgtgactcaaactcgctgagtcggttcggttgattgaaagtttctgcttctgttcccaatttctttgaaagagagaaacaatggagagagattggctaacgattggcccacattta

SEQ ID NO: 316361 - DNA, 3168 bp, Cannabis indica
cctgttaccttcgggagacctaattgtatccattcactggattcggtccttgtctttttggattgatggttatgagttaactgccaatctaattgagttacaactatctgcttttgacgtaatcatgggaatggatttcttgtttgagtatgcggcaacaatcgactgccagcaaaagatggtggtgtttgaacccgacagtgctaacccaacaatgtttgtgggtaaagttccggggatgcacatacctagaataacacttttaaaagctaaagatttgatgtgcagaggttgtctgggattcctagtcactgcagtggataccagccaacctgtgtcatctagatctgagaatatgagattggtgtgaaaatttcttgatgtatttgctgaagacctactgggattaccaccttctcgagaaattgaatttttaatttagttagttttgggagcggaaccagtatcaaaggcaccataccgaatggctccattagaattgaaagaattaaagatccaactccaggagttacttaacttggggtttattagaccgatttactctccttggggtgctcctgttttgttcgtgaagaagaaagatgggtcactgcggatgtgtattgactattaggatttgaacaagcttactatcaagaacaagtatcctctaccctgaattcacgacctatttgatcaactaaagggtaagacggtcttttcaaagatcgaccttcactcaggttaccatcaactgagaatttgagaggaaaatatcccgtagactacgttctgtactcggtatggacattatgagtttctggtgatgtctttcgtactcactaatgctccagtggcatttatggaccttatgaatcgggtattcaaggattacttggacaaatgtgtgatcgtttttattgatgatatttttgtttattcagggtcagaacatgaaatacatctcagattagtattacaacggttacgggatcacaagttgtacgctaagttcaaaaagtgtgagttttggttgtcacgtgtctattttctggggcatatagtggataaagatgggatcatggttgatctggccaagatcaaagctattcgaggttggccaacacaaaaatttgctactaaatttagaagctttttgggtttagctggttattatcgtctgtttgttgagggtttctcaaagattgatgtacccttaacggagctgacccttaagaatttgtaagtttgtttggactgatcagtgtgaaaaacgtttgcaggagttaaagcagcacttgattaccgctccggtattaacacttccttcagataaggaaaagtttgttgtttattgtgatgcctcaagacaaggtctgggttgtgttctttacaaactaggaaggtagtagcctatgcttctcagtagttaaaggagtacgagcagaggtacccaactcacgacttagaactcgtagcagtagtatttgcgctaatgatttggcgacattacttatatggggagaaatgtgcgatatacactgatcataaaagtctaaaatacttcttcatctagaaagatctgaacatgagacaaagacgttggctagaactggtaaaggattacaactgtgagatttttttatcatcctgggaaggccaacgttgtagctgatgccctgagtagttaagggcagagtcagatgaatactatgaagcaaatctccaagcaattagtagatgagatgacccaagctttgttgtgggccagttggctaacattaccctgcaatctactctcttagaatgaatcaaagaagcacaattaccagatccagagttgggagatagcgtttcggcttgaaagactagtaactttatagtggatgatatgggaatgctatgatttatgaatcatgtttgggtgcctatggatgatgacattaaaagagaaattttgaatgagtctcatacaactccttattcagttcatctgggaacaacaaagatgtaccatgatcttaaggccatgttttggtggcctggaataaaaaatgatatagctgaaaatgttgcaaagtgtttaacttgtcatcaagtgaaggctgaacaccaaggccttcaggtttcctgtagccattgaagcttttgaaatggaaatgggaagacattgccatggacttcgtggttggcaattaagactataggacagtaggactctgtgtgggtcatagttaacaggtttacaaagtgagcacactttttacctgttcggacgaatttctccattgatcagtatgcagaactgtatgttagagaaatactttgtctccatagtgtcccaaagtccattgtttctgatagggatctgaagttcacatcaagattttgggatagcctacatcgagctatgggcactcaattgaaattcaacacaccatttcatcctcagacagatgggcaatccaaaaggaaaattgatgagattttagaggacatgctacgggcatgtgtgttagactttgaatgatcatgggtaaagtaccttcgcttgatcgagtttttgtataacaatagttataaagcaataatcgggatggctccttatgaacttttatatggaagaaaatgcagatcacctattcactgagatgaagtaggtgagagaaagttgttaggtctcgaagctgttcagagaacaagtgaggcagtggataaaatcagagcgcaaatgctcacaactcaaagaaaacagaagagtaacgttgatccaaagcgtcgtgatattgattttaaggtcggggatatggtagttctccgagtattgcctatgaaaggcattaaatgctttggaaagaaaggaaaaattagcccaaggttcattggaccttttgagatccttgagaggatagggcaagtagcatacatgtttgctatgcccccaatgctggcagctgtacatgacatgttccatgtttcgatgctttggaagtatgtcttagacccatcccatattctgagttatgaagcattggaactttagctagatctatcatacgaggaataaccagtccaagtacttgatatgtagaaaaagtgttaagaaacaagacaattgcactgatcaacgtattgtggagaaacagtaaagtagaagaggcaacctgg

SEQ ID NO: 316362 - DNA, 844 bp, Cannabis indica
  modified_base (59)..(59): a, c, t, g, unknown or other
tgcctagctaatattacatgaccatttcttagatgagtccgaagtttaatttatttaanaattgtatatatactcacacactactataaataatataataataattaattgtaaattaatataatagtacgactattatcattgacaaaaataatgatgatcaatccgacggtgaggatctattaagtggggttgtggttttcccatataataacttgtagtaactacttgcgacaataataaaacacaataaaacataaaatcgagagagaaaacaaattgtgtatatcttacttaatatataaatatttatataataacgatatttgttatgatttaacagattatttttagaaagtctattatttttagaaactctattaacagacgtctgtgacttttcaaaaaggtccaacaaaaaaacaccactactctataataacacttcacataatatttatataataaatattgactcatcattttttttaattgggtaatttgcggcaaaactctttatacttttatatttgttatagtttaatataactcgaaaaaaatatggatatactctgtggactcgataatacttttgttatgtagtccttccgtccattttggtttgttattaaatgcaaaagttgactgccacacggtgtacacatggtaaattttcattaatgcacctaatattaatatttatatatatatattaaaaaatagtttaatatatttaaaagttagaaaaaaaattaatagttttttttttcttcttcatctttcttcttcgttcgttcgttcttcctagaaatcaaaccccccaccctcacgaaccccaaccaga

SEQ ID NO: 316363 - DNA, 1732 bp, Cannabis indica
ggaccgagacctaggactcagacatagacccgggacacaggcatcaaaattgggactgagacccaagatatgaacttggacccagaccttgacctaggagccagaccgggaccttgaaccccaagtggaactagacaaggactcgagactgtgatccagatctagacccagggcttggacctgacccgtagttagtgtttggatctagtacccatatgcggactcaaacccagacccggagtcaaaacaagaccctggcctagacccagacccgtacccaagaccaaggtccgcgtctgagtctaggtttgaattcgggaactagaatctgactaggacccaaacccagatccagatcaggacgcggacccagatcagaacgcttatctgaatcaaaacccagatcgggactcgagatacgaactcgaaccgagacacggacttggacctagacccaaacccaggacccagacttggatgggagactcagacctgcaccaaggacccaaacctagattggggacccaaactcaaacttagaaccaaaatcaagactcaagactaggactgaaaccaaagacccaaccatggtcttggtcccagacccggacacggacatagactgggacccaagatccgaatggaaatgagaccgggaccaaagattgggatccggatgttgacccacaacctggggcttggacccgacccgtatttggtgtctagatcttgcaatcgtaccaagacccgaaccaggaacaatttctagaccaggacccaaacccaaactcagaccccgagacccgaaataggaacaagaaccagaataagaaccctggaataggaattggacctcgatccaaaatcgaatcaagacaaggaaccgaacacagactcggacctagaatgggataaataacaggacccaggactgtacgctaacccagacatgcgccatgacctgggacctaagacccgtgacctgagacctggaccagaacccattcccgtaccagaactcgaacatagaccccgacccagaccaagaccaagacccagacacgaacacggactaaaaactgggcccacacccaaaccaagacctacacctggacctagacccggactcgtaccaaaactcagacacatactcaggactcagacccgaacatagattaggactcgaacttagacccagactaggaccgagacctgaacttggcctaggactagaacttagactgggactgggaccgggacccgatactcaaacgcgggacctcaaaaccgaactgttaaataaacccagaccaggcaaagacccgagacaaggaccagttccgaacatggaccgggacctacactcggactgggaccctaacccagatcaggacctaggaccttacctgaattggggacccagacccatgactcaggccgaagacccaaacctagacccaaagttggacataagacccagaccaagacccaacacatgagctagaacttgacgtggatctggatttatacccaggactggacccaagacccgaggtttggacccgacccatattcagtgtctaaatctggtaattagaccaaggttgggacctcaacccagacaagaactcgaacccgtaccaaaactcgaaactagactcgacatgtggtttgtgtttggatttgggactaagagtcagacctgacgtaaaacacagacctagacctaaat

SEQ ID NO: 316364 - DNA, 900 bp, Cannabis indica
ttttttttcttttttatatctttctctttctctctctttctctctttttcaaaatatatactgaaaaaacagataatgacattctctgatgaatgacagtgtatgtgtatatgcatcttatgaattttattattctttgtttagagtttagagatgggcaattgtgttccagttctgaggatccaagactcttcgaaatccaaatgcttgaaccacccaataatccaaacatcggtctcaatcgaatcccagcaccaaaaaccagaagaagacctctctgtgaagccccagatagctagttttccaaaacaaagtatcattctaactttttctttctttattttggcgtgtttgttaagtaatcttttctattattattattcttttttttttctttgagtgatcttgatgatgtaaatgaacatgtattactttttcaacaaaagtctgaattttggctgctttttttattattacaaaatttctgatctactgctatataaaaaataaaaataaaaaaagaagctctaataataaagtttctagagtttcaactccctgatttttgttggttcaaaatatttctgtattgcaataatcgatctataattcagtggttttttgtgctttgttgtaataaaacaggtagcacagaagagatgtattttgattctcaagcttggttagactctgattgtgaagactatttcagtgtcaatggtggtaagttagatcattttttatataagtttttcagtgccataaacacatacaattacaaatgatatgtatgtacatatatctaacagggtaaatgccattttgtatgtgtattttgtaaaagttaccaattggactctctgttttgttaaatgataaaatagaacctgtattttttaa

SEQ ID NO: 316365 - DNA, 2141 bp, Cannabis indica
tttatttattttttttattttggccgaggtcttacattctttgatccttaagaaaatactatcccaaaatttcaaagtgcaacctcaagttgaaaattgaacaagtgagaaaacttctcatacatctccgaccctaattttcaagttagcctctttttcttttacatgtttctgccataagaccttgactactgaaatctctctgttccttaatacttttagctatcttgccaagaatctgacaagttgttcttcataagtcatatcttcctaaagagagatagactcatactcaatgacaggtgacagaactagagtatatacttcctcatcatctacatatggaacacatcatgatcatgtcccaacaacattggtaagtttaatcgataagcgacctctccaactctctcaataacctcgaaaggtctaacataactcgggactagcttacccttcactccaaatctcattacaccacacataggagtaatttttaagagcacataatcaccaacatcaaactcaaattctcgtcgattgagatcaacatagattttgtgaaaactataaacaacattaatcttctcaagggtacaagtgataaattgggatccaataccaacatgctcatctggttcagcccagcaaagtggcgatttgcatggtctcccacataaggcatctagttatgcctatacttgcttggtagttatttttgtatgtgaattccaccaatgacaagtgttccccccacctacctcaaaatccacaatacaaagacaaaacttgtatctatagtttgtatgatcatctcagatattgtccagttatctgagcatgatgagagagaagtgcaacttagttcctaaagcttgttccaatactttctaaaatcttaatttaaactaaggatctctatcataaaaaattatttaaggtacctaatgaactatgttgtccacattaaaggcaactagctcgataagcttgtaaacaattctgattagaataaaatgagaaaacttacaaaaaatgatcaataatcaccaatacaatggctaccaaagaaatagcaaacattaagattataagttataccgaaattggatttcttttcgtgccatatgcgcttagactttacttttttcctctttttcttcatggtccaatatttgttatcaaaagtcttcatttttgtgtagaagcaaactctctaaatttatgacgaggctcactaaatcagcacattttctgtcagtatgtactaactacaatgcaaaatagtatgatgaattgtatgtcagagatattgtcaggctacatgtcccaaagaccatcgtatttgataggggttcagttttcacctctaagttttgagaaagtgtacaaagaactatgagcacaaaattaaagttgagtacagtgtctcatcctcagattaggactgtacataaacttttgtaaattgtctaacctaaataacatgctcaaactaaattgagataacccgataaaaatacaaaccgaaaaatacgacgagaatataaccctcctaatctttatattgggagagttaaaaataataccaactcgatttagagggtttttttttatatatatttatatatttttattatatatatttatatatcatataatttatatgactatttaaataatataaagttgaaattaatatattttattatggtaattgatttattgaataggttggtatgtacatattttagatataattgtcttaatttcgatatatggtttcttttccttattaggcatcgcaacttaatcctaattattttttcatgtgcagagaagcaaggttatagatgttctgtcacaagttgagcttgggcagagaggggtgtatcttatgggatcgtctaactaaatgtggtttggccatctttaatttgctaaaaattattttaaagttatttaaattattttatggatgttgtttttagtttttttttttttttttttttttggcatttacttaaatagtggcattttgagttagactgggtatccaactttgaaaattatttttgaatatagacaattttgacgcgagttcatttaaaatatttttattaaaataaataagggtgttt

SEQ ID NO: 316366 - DNA, 794 bp, Cannabis indica
aaaaaaaaattattaaaaaagtgttacaaagtgcaccttaaacatctcatttatttttacaacactattgtataccaattatttttaagagcttttagcgactaaactctccaagtattatttcacttatacttaattaatcttccaagcttaaattttggtggtaaatctgaactactaaatcgttaccaaatttaaggtgtcattcatttaccatagttaactgttaacatggactacttacgtgtacactcttatacatgtgtcacattcatattagtaaacctaatattattatcgaaaaattatacaaaaaaataattctgaaattaaacattttaaaattaaaaaaattacaatattaaaagataacaaaataaattaataatttatttttttctttaattcgttctcttccatgtttttttaactaaataaaaaaaaattataataaaaataccctagttttcttaatttgtctctttgaccctccactattacaaaaatgaatttttactttagttttaaagtgacacataaataatttgtgtcgattggggtaaccgacactataactgtaaacacaaataattatatttttttgcttcattttagttacgatgcaaaaaaggttttagcttcgcttgataaaaacaaataatattgcttattttgaattagttatgaagtgaagtaaaagactttgtatcaaacgatgaccgaagtgttggataaatctccatactaactgtcacatgagaaaaataccttaaacaaggttacaaggaaataaa

SEQ ID NO: 316367 - DNA, 598 bp, Cannabis indica
cacaacacatcacagtcaacaacgacactatatgtaagggaagcaacctatccattttttggtgtgtggtttttcgggtctgagatagaaaatagcagcagcaccccttttcataaagagataaccgcagaaaagagagaaaaaccagagagagaaagttagagttccattataattcatactagaaaaaataaaggaagaaaagaacaaaagcttagagattacctgctaaaatttgtggctaggaatctccaacaccttgtaattgttttgacatggatagtggagcatcaagcatctttaagggaagcttgacggagatgtacccttcattttgaggggaacttcaaaatcaaattattgtgatcttccttttatttttcctgctggtttttcaagtctttcttcaaataaccaacaaagatcttttttatctttgttgttactattttctgttgtttatttctgtgtataggttcagttgggttaaagctcttgtagagcttgaagaagaagaagaatagaagggctgaaggaggaaaaaaaaaaaaaccagcggtaggttctgttggattatattttaccaggatatagattt

SEQ ID NO: 316368 - DNA, 552 bp, Cannabis indica
acaagaccagatcttgcctacagtctaagcatggtgagtaggttcatttcaaatctttaaaatgaacattggactgctgccaaatggattcttagatatctaaaaggcacaatgaatatgggacttgtttacagtagcaacaacaaaagaactactaaagtagagggatttgtagactctgattatgctagaagcattgatactagaagatctatagcatggtatgcttttacaatcctaggtggatgtgtgagttagaaatcgaatcttcaaaaggtggtagaattatcctcaatagaagctgagaatatggctccaatagaagcatatcaaagaggctatttggctaagaagtttcacatcaaaacttggtttcaatgcttaagagttaagaccttatagtgcactgtgacaatcaatgtgcactacatttaatgaagaaccccatgattcatgaaaggtccaaacacatacacattaagctacacttcatcagaaatgttattgcaaaaggtgaagttcaagtgatgaagattggaaccaaagaaaacc

SEQ ID NO: 316369 - DNA, 1407 bp, Cannabis indica
ttcctcaattatacataattatctagttagggttttgctaatccatttcttaatttcgggtattacaatatatttgtatacatgttgtgaatgtaaaatatatatatatatatatgtatatatgcttttaaatatatatgtatgaaaattgtctcaaatttggaacatctttcaagaaatgggttagttttagttatatagagttaagatgtgtccgacccataaccaacccattattatatgacctattacttttcagtccaatgagtcatgacctactcttaacataaccctttactaaaaaaaataggttgggttggccgagttgaatagcttgacccatattttgtgcactccaactattatttcacttgcattcaacactctaggctcaaattttgaagtaaaactcttcaaacgactgaacggttagcaaatttaaggtgtcatctatttttcacagttgactgccacatggacaacttatgtgtacacttttatacacgtgacacgtttatattgataaacctaatattattatttaaaaattataaaaaaatatttcaacatttataatatcttttattttttaaatatttaattttttatttttataatttatttaattttaaaatgaattttgaactaaaaatatttagtttaccaatataaacgtgtcatgtgatgttcttttaaatgattttaaacaaacttaccacaatatagtgatccctaattttatacataataaaattttaataacacaactatggagcaacacataaataacgtagttgtaattttgtatgaacaatatgcttagatattattaaaaaaaattaacaaagtattattggattgatgaacgacttgtagtttgagaatattttgtgaagaaacaattgtaagagcactctaaatcaacataaactcaatcaatatttaaactcaatcaatattaaaatatgaacaaacaccatattacaattgtttttattgagaactctgtattgcattgtctatatgaaatacgtgcaaataagactaacaacaatgtaacctaatcagtgtgtaattattgacttatcaattatcagagtgtcaataaaactgatgactaattgtagtgcaacaatatagaaacaaaactacaaaaaaaaaaaaaaaaaaaaaaaaaaaaagaaagaaaagaaaagaggccaaatttatgatgtgggataaatgcgaatttaatttatttttttgcgattggatttgaataaatccaagatagaaaatatgaaaaataacgttaatacaataattagaataggctaattagaatttttgcctcctgaactttgacatgtaccaaatcatgccccctgaactattaaggtcattgaaaatgccccctgaactattgag

SEQ ID NO: 316370 - DNA, 658 bp, Cannabis indica
aaaaaataataagattcaataaatcaattaattagtatattgtgactggttaattaatcaatccattttttctatagtatctctcttgttcttccattgaagttgatttcttcacttacagatttaaaccctttattttaataatcctatttcagagattaaatcaaaaagaccaaaactccatttaaagattaaatccaaaagatcaaaatcccattttagagattaaaccaaaagatcaaaatctcattctaaagattaaacccaaaattcaactgagatatttaatctaaaaaacatttcataaattaaaaaaacttaaaaagtatattgagaagatcaaaactatatctagactcaatgcaaatgaacacaactaaatcaaatccatcaacacactatatcaaatcaaattattaaaaaaaggcataaaaaaggattcgaatatgaataagaaactactctctgtcatgccattctcatcattttcagataagtctaagagaaagagcaaagcctttagctgaagaaatgcaagagatgctgaaatcgtagagagtgcggaagcgtcaagagactttaatgtaaagaccacttagttttaatttggaaattagctgataaatagggattaattatgaaatctatgtttgattat

SEQ ID NO: 316371 - DNA, 929 bp, Cannabis indica
gtctattgtcgtagatctttacagtcatgtttttctttattattattaaaaaaaattattggtatatgcaaaaatacggttttttaaatccaaaataatcaattggattaatttaaattattatgcggatataatttgatcaaaatatgaaattcacacttaatacaaatcaaatgtattataaacaaaatagtgtagattgaattagacaacacatttacatcttgttatttaattattgtgaatactacatgttggtagttgaaagcacgtttaatgtgaggacccttttggtccagcattggctaggttttcaattctagcaatgaaaaaatatataaacataaactatatgatataattatgtgtatatatattaaattttttttctttgataaaaactatgtgatattactaaggatgctatttttgttttaatatatacacaaaagactaattattttatttattatgtgtaatattaataattaatcttagtaggtatgtttaattttcaaacaaataatgaaaattgtttgttgtaattaaaaatattagttaaatatttctaaatggagagagattcgattttggaatctttttgttaggtggatatgattttttgttattaacttaatagagtcaattgatactattttttgtttgaatctttataagaaactgtgtttctcacttaagagaaaatgacagtttaaatatatttgtgttaaaatttcatgtagttgcgaatgatatattttttattaaatatatgtattatataattacttactctacttttattgataattctttgtaaaaggatttcatttatcaaaattactgattggtggtctaaaatctcttactagatttctgaaaaatttcaattaaattgtttaagagtgtagtgatgcgcaatatgactt

SEQ ID NO: 316372 - DNA, 604 bp, Cannabis indica
agttacctataaatgatattttagtgaactaatataatcactaaaatgagcgctctttcatttatctatattaagctaagctcgaagtcgtttcacttctatgtccagatttccttgagtattatcagaggctattaggatcgaaaacaccaataagaaggaaggtatttcaatcagttgtggatcttgggcctaaaatcacagattgtcataaggagatcctattagcagagtacacagcaaaggaagtggaattaggtattttctctattgacaaggataaagaaactcgaccagatggctatggaagtgctttcttccaagataattgggacttggtgagatctgacttagtagaagaagttatctcttttttaaactttgggaagattttaaaagagataaacactactactattacactaattcccaaaacctcttgccctaaaagtgtggtggacttcagatcaatatcatgttgcaatgtggtgtataaagtggcaaccaaggtaatctgcaatagattgaggaaagtacttcctaatcttattgcagagaaccaaggaggatttgtgcatggaagattcattgctcacaatgtgct

SEQ ID NO: 316373 - DNA, 1441 bp, Cannabis indica
tttatatccatagttgacttctttagtgtttgcccttaccggataaaccccaatagttataggattctagccaccttcttcatatttttaccatcttaggaattggcctattccaactcctcatgagataaactttctctgtgacttaaaaaggagtccaacccatagagatcaaggcttttaccactttcaccaatttggccccttcatagaatacataaccaagagtaactgtggcctttactaccaggagtatttctatactcttgttcttttgtcaagacacattaccttctaaaaatctggcctttcaaaagacctgctcctcttattgacatgaagaggagagtcgatgccatgttgcttgaaattgatgcatgtgagagagaaggttgaatcctctttaatattgaaaaatcttcgaaaggtggggttgatcatgtcataccagagagtgtatgccaatgtagccttctctgatgaatcttggaccatgccactcgagcaaagtgataaagatgctcagagtgctactgttattctatctcaaactgtgacggaagaagtgacttctaatcaaaatgacatagaatattctgggagaatacctgtattcttagaccaggatgatggggaagttacctccgctaggactattctggagaaggatgggaaatcagtaggttgctgacactccatgttgtgatcttaacttgttgacttgtttctcttagctgtgctaacctctggtctttacttctttgcaaaaagtatgagcttcttggctgctataacatcttgttcaaaggtcaggaagagggaatatgttatgtatagatccatgcatatcgatgaatatagttattaaaatatcaaaaagaagaatgaatctaaagtctaaaatcaattataggtaatattaaaatattgattaattgatgagtaattaattattattcgaaattgaaatgggaaagagatgagagagagagtaccttgcgagcaagagaaatgttaaaagaagtggtaaaatcggtaaaatagttgtgagaatgggcccatgaaggagcattcacagacacgggcaagcatttgcaacatggcattcttctagtccacggagccacgcccagaaaataaaatcaattagtaaagtgtcatataattacaaatagtgaaatcctttcgtaatttacttttccgcaatcctttgtagtttactttgctaatatgatttctaaacaccaccaaatagcgaaatttcttcttctttgatgtgttgagtgcttactttctcccaaagtaaggttttgacaattcaatagagtccttcaacctattctaataacaatatgagaacaataaacaaaaactaaaaatttaagtagaaatgctctacattttaaacaaaaaaaaaaaaaaaaaaaaaaaaaaaactaac

SEQ ID NO: 316374 - DNA, 2925 bp, Cannabis indica
cataaaacccaacaccttcttggccgtatccatctccttttgtagattggtggttgtggtgatatttttcagggcagtagacttggctgaagaataggtgtaagccatctttaaattgagctgcataggaaaaggttaaaacttgcatatgtaaaaagacaagtaaaaactaaaggagaaatacttactcgagttgcctccttcaggagcccgcccatcagaagctccatggacatctcgtcccatctaaacagctggtcgttcacctcgggaagtagccggtcctggtagtgttgaagcatctccttgcccttcttggtctcaaggttcaacacgatgggagtgtttgacggtctaggcggaccagacccatccgtgctacctcccttggcacctttagacttgtgagccttcttggttggtgtcaccacctcagataccacctgctcagagaagtcgataggagactctactgagcttttctccttgggcagtatctccttgggtggtacctcattaccctttgatagtttgggcgaaggggtctgtccagagctgtcacccgacctcttcttcagagcctggaacaccttctgagacaaacatagctgtatatgaaaaaaataagaaggttagaaataagtgtgatataagccaagtcagatgacaattaaatatgagttaaaataccctaaacgtaggcaggagcattctcccgaacaagcaaagatggaggctcatcatctgaagagtcttctggctcctgctctgtaagaatggctttaccctttcctccttgctgatagaccattcaacaggcacttggctgcttggaggggctttcttcctctttttgctcggagtctcttgtttgggctaagcctttttctccttctttacaacctttagtacactacaaaaaatcttacttttagtcacaacaaaatttgtgactaaaagataaaaaagttgtggctaattataaattatcattattgtgttgtggctaaaaagttcgtggctaaaagtattagtcacaaaaattacaatttgttgtgactaaatgcattttttaatcacaatttttattgtgacaaaaactaaattattgacagcttgtaactaaatactatgttttagtcacaagtaactttttgttgtgactaaaagtcaaatttagtcacaaaaaatttatgttgtgactaaaaagttgtcactaaaagtaacgattttttgtagtggtacaaaatcagctggaaaaagtttatacttgacaaaattggccttagagatcaagagggagatgttccatgcagcaggaggcagttgaaggatattttgtgccctcttcttgagctccagtgtgaacagagggcgacagtaggacggtacctactagaagctgctatgaacggtacccattcctttgacaaagtagtattcatccaaaaagtaccatttcttagtcacctcgatagctgtggtgcccgtcaaccatttcttcttgatttgagaaaaatagaagtatcataacctgttctgcttgggacttgacttcagatcaaagagccagttagtatcatgcggggatggctcaccccacccttgtgaggcatagagaaggaatagggcggacaagtacttgatttccttgggagtgaaatgggtcggacttatatggtaatagtcagcaatcctcctaaagtatgggagcaagggcaacatagcaccctgcttggtatgaacgctcgaccaagtgcaataaccttcccctaggctagtcgccagctggtaggggagcaaaggaaacattcaacactccctaggtaaccatggttgagcaaattcttcatcttggccatggtgaccacaaatggtggagagatccattgatttcctagtgtggcttgcctcctcaaaggaatagccttggtgtactcttcaggaacgtggtcttcatcggcctccagaacctccccagcttcggacacgggttttccttcttcattgaagccaccaaatcacccaagctactctttcatctccttcggcctccaaaggagtagcaggaggacctcgccctggtcctccatctcttggacttcaacatccctagttgtgtcctcttctttagtggcaggcccggcttgttcagcatttggcaaagtggcgtgacgggtgatgagtgggtcgaacaatgaagatttccgtacagttttcttggttcgctttatcattctacatctggacggaactttgtttgtgtgcctagcaatagtcacagcaaatgtggcaacaggtttacctacaactgtagggcttggacggccttcgagcaaagtatcagccatgtctggacggactatatatgtacaatcagacggaagatagcatctccacccctttttgagttcccaaatgaagcgtctgtaaccttaaccttggatctagctgagataaaaatggagttgcacctcaggttctggggaaggcttgtgttcactacttacttcccagtcttcaaagctagaattagaaagattatcactggacgagggcacactggcatggaggcaaggttgatcctcgtacaatagctgaagcagatcctggtcgatatggtgttctcctccccaaaacccaccagggttcatctacaaaaggtaggagacaagatgagaattttttcagggcaacgaatggaaacaagttggttatactgaccaagtccgattgagagatcaaaaatagaaatttaattcagtaatggaatttttaacccaaaagttcaaaattttgaattgaagtttgattctcactaaacccaaatcgataagtgaaaatgagtatcgtggggttaaaatcaaaatgcaattagaatcaaacgacatggttaagcataatcgagatttctaaatctcaaac

SEQ ID NO: 316375 - DNA, 712 bp, Cannabis indica
taagtcatttgatcctaaataactataattattgtattaaatgcaattaattaactaatcattggctaccccattacttttatttgtttattagaattaggtaatatgttgtacgcaatatatgaaatgatggggtaaagattattaagttgactctttgttcaaatgaaaagacaaaaaagttcttgtttttgttattataaaattttataatattcaattgcctctcttcttttgtagtcctgaacaagaattgaacaagattgaagttgatagatttttttttttgggggggatcagattgaagttgatagttaagtattcaagtactcaagagttaggacccataaatcccttttagtaatgaataaaataatataaaatattaattgtgttggtaggctgtcattggtttctgtagaaaatcattattattatttgtaaaaaaatatagctcattacatattatctgttctattgtattcatactcagattgctttgagtattatatactcttggcaggtacatacattatactctttagatatttcttgagaagttctattccacaaaatccttttgtgtagctatatatccttctacgcatcaattttttggttttttttagaaatatataatattgtatgggcggtacaatccaatcaaattttaaagtttgttttaaataaatagtccaatttagttagcata

SEQ ID NO: 316376 - DNA, 1156 bp, Cannabis indica
gaaccaaatgacacactaaataagtgatgaaaatactactgtctctttattgataattgaaagataaagattacattgaaatagaattttatttagggcacaaagcccaacactttcttcctaagttctctttgcttaaccttttttctcgccttccagcttcgcagctactttcagttcagcttccacgttagtaagcttggaagagatatcttgttgcgcttgaacaacaaattctgaaagccactcaacaactttacctcttgttctaggttgtggatttaagagttttctcagtgatgccctccttcaaactttccaccttaggagtagcattccacatgggcctccaatacattagcacaagtcttggcttggttgtaattaactttataatcatcttcatgtttctctagccgatttaatccttgtaagctgatacaaccttgtttgtagctgactctagcctagattttgcttggagctccaccagcttcttcgattgggtttggtcactcttaagtttagtcaaggcttcttctctcttctagtttgaggcatcttttttagccctaagagtttctagctccaaagaaatcttagctactgcctcttagcatatttctgccaataagttcccttggaagaaatgaaataaaatcatgcactaatacaggtgttgatcaaaattattattaattgtaagtaagaatacttactctagcaagttggtgacgaaaagagtaagcaaggaagactagatcttaactagctgccatggcccacctttctacagctagctggtgaaaggtgtcaccagtttgctccagcaagtcattcacaaacggagccagccctgaatttaattgcctctgagactgtcacgtgagcaatgacgggaggatggataacaacatccagagttatcttagaaaattcaagtttttatctggaaccaattacattagttctttgacgaatcatatttgattcggcttcaaattgcttctgaaaaagctaagctgactcctcgagctggacgtcattttcttctagtatttccagtggttggataggaaaagttatagtggatggaggaagttgaggaattatcaactttgtggaaggattttgaaggtgtggctcaaaactaggt

SEQ ID NO: 316377 - DNA, 1534 bp, Cannabis indica
ccttcgagttaaaatagcgagttgtttgctgttggtgggctgcatttttcaaataagcctgattgcatttttcttctagaaaatcaagttgtagcaactgattttctgtattactgttgatgttgaagacatctcttctcaaagaccctgttccaacttcgattggtacccgtaagaaagtgagaagggagttcaccaatcgtggagcgaggtgttgtattatacggccatagaacttgtggaagttcttctagccaagtactttttttctcctcaagctttccttttattgtatgcttgatgattttgtcgactacttctatttgtccattactttgaggatatgcgaccgctgaaaaagctttctggatccccaagtcatcgcacagttgacgcatctccttacaatcaaattgcttaccattgtcagaaattaatttgtaaggaatgccaaatctgcagatgattgcactatagacaaagtcgcattatttggaggctgttatagtcgccataggcttggcttcagcccatttcgtgtagtagtccacgacaactacaatatattttactcctccttttccttttggcagttcaccaattaagtctataccccaaaccgcaaatggccaaggactagtgatagaattcaattggcttggtggcctatttacataagtcgttattcgctgacacttgtcgcatcttttggcgaagctagtttcatttgcccgcaatgttggccagtaatatccttgcctcataagggaattgccacaggcatggttaccgcatattccaccgtgtacttctcgaagtatgtaaaagcattcattcccatcgatgcatttaagcaacgattaactaaaacttttgtgatagagcttgtcttcataagtgacatatcaagcgactcgatatcgtagttttttggctttagtcttatcgccagggagtgctcctattttcaagtagtcaataattatggtcatccaggtgacctttttgctgtatcatcttccatcatctcatctcgatgaatagttggatgggttaaaacatcaacatgaattacgtcgagtaattctgcttctctcattgaggctagtcgggccaaagcatctgcatgagaattgtaagcacgaggtattctactaataattatctttttgaatttttgtaataactcacaagtgtaggaaagatatttggccaaacatcctcctctggccagatattctccattaacttggcaaattacgatttgtgagtcgctaaatgcttgaaggtattcgactttcatttcgagagcgagctttaatcctgcaattaaagcctcatactcggcttcgttgttagatgcaggaaattcaaatcttagggccacgtgtaccttgaatttgttgggacgtatgaggattattctaccacttgatccttcactattggatgcctcgtcaacatacaaagtccaccctttgcccgttggttgttgtataccaaaatggtacgttttacatttatcaactcgcaa

SEQ ID NO: 316378 - DNA, 1989 bp, Cannabis indica
tacagtcaaaatcctggtaagtcgatcatcatcaattcaatcaaaatatataatttacataccaatacaaaatttgacatttaatttagctatatatattgatttcatattgcgataccaatattctgattcttctttcttctctctctcaatctctcatatatatcgatctgaggcagccatttcttaaatttctattaaatatacatatgtatatgtttatttatgtaactatttgattcgaccaatgctagctcctttttatttcttgtcttcttctatgtatcatatattttaattgacttctcagatgataatgattttcacactaataataatattgtcatattcaacctggaatcgccaagtttacatacagagggttgtagagcgtttaaaatggttttcaaaaatatcattaataaatctattcaagacgatggtttggtaagctatattttataatttttattttctttcttttctaatatgagaataatgatgtaagatgggtgtgcatagcatgacctggttctatcagggaagaagttattgtcacaaacaaaactggctgaagaagacgctgagaggaatgtgaagaagaacatcaggagggaaaaacacttggtaaaatgacctttgtgtacattacatttgtatctgtttttgttttgtgttattaatctacatgtctaattttatagatgagagaaaagggacatgtgataccagcaaattatttggatgcacttgaaaagttttaattggtgttacaaaaggaggtagtggtttcttactatatatatagatatatgcagtagttctcactgtaaagatttattacgttgtttctcttactatttatgtattgtattggtggtgttttagcgtcatgctgtttaactcatgcttttaagttttagggttgtatttggctaaacaaatttggttagtgtattatcattgctgctacatagtttattatttttagctttataatgttaaatttctttttgtgtactttccagagcttctaatagtcttcaatgagttatatattggtataattagacttgaagtaaattttaatattgttgtttggtggatctctattttgttattattttagctagaactctttttaaattaagtgtgtttattatgtgcaatactttctattattagctaagagaaaagaaaataatagaacatattgatgaaatattataattatatatgtgttacttattttatattatattacaacataagtttttgaaaaatattcaaaattatttttataaaaatatcatcaatttgttaaaactgtccctgaaattattaacaaaagaaaatgaacaattcaattataagcacaccaaaaaaaatgaaagtgtgaactacgaacactatttgaccataaaaactaaaaaaacatatattattatgtcctcatttaatattcttaaactttaggaattatttttctcaaatttttaaatttttaaacaatatttttctttatttttttgaaaatttataaatcgttttctaactttataaaattttaacattattgtttttgatacatcttgctaatatttcatgtctaatttgcttctcttaaaactttatatagcatttttatttaattttctttttaaaataattttatgtttttagtattgcttatttaataacattcataaattaaaatacaactaattatataactaaaatacaaattatgtaaaaaataattaaatatataactaagtatacgtacattgtacgtaacatttatctagtatatatatatgtaactagaactaagaaaaaagaagaaaaaaaggttgactattttattttttatttatgagttattaggtgctgtttggtaacacttttattttaaatttttgtttttaaaatttttatttttgaaaaataaaaatacgttctggaaccacttttgttttttaattttaa

SEQ ID NO: 316379 - DNA, 1679 bp, Cannabis indica
caagggggagttttataaatattaataaatatatgtgtaaagaccgcttaattttaatttgaaattagtagataattaaggcttaattatgaaactagaatattaattatgatttatcattttatggagatttatatgaattcaaggtgtattatttatgccatatatgaaattttataattttttttgcatgttttgtgtctggatacattgaagcgcgacgtttggccagtagaatcacatgtagtatttttgtagtggcgggacaatatagacgtttgaaatgtcaagagttttcgatgtgtgtgaaatgaccaaattaatggtttagaagtttttttggtataagttggggtcaaagggtcattttgtgccttaagactcttttgtcctcttgtgggtttgatttttagattatatgctgatgttattagattgataatagatagattacatttattttcttttattcaagtaaatcaagaagaaaaacacataaattatcttctctctctttgaccttctttctctcaagccttaaggaaacccagcaagaggttgagtttcagctgctcaatttaagatttctagcaagtcttttgtgaatcaagctaaggtaaaactctttagcctctgtttttatggtttcttaaactttaagttaagttcttatagatgtttttgtaattagggttctgtggttttaagagttggttgattttgtattttgatgatatattgaggttatttgagttgttttgagttgttcttgttggttgttgtcgtgattgagcaaggtttgagtttatacactcaagctttgctctctaatggtggattttgattttggttatcttggattattttattgcatggattatgtttattatgatgtacatatgtgatctagaagttattgtgtggcttggaattgaattgaggagtgtagaaggctttgagtgtttcctgcactgaatcggtcgaccggttcagtgggacctgtaggaatcgaaattttggtggtccccaggaaacctcacagaatcaaaattccagttagggaactagtctaccgattggggcattttaaggaaccctagtttttcccattttttttatatttagggtattgccatgttattcatggataggaaaaattttagtttcaagtttttgtccccgaaaagtgatttagcgtgtcactcatcaagtttatgaataatgtgatttaagggcctataaatcgtcgtgcaactattggctgccacacctcaattcgaaagagaggtaagagtagtataatggttgcatatatgtatacatgtttagcgtacatgttagttgccgtcagaataacatatcagggtatcaatgaagtgtacatagagctgcactgagagaccaatatacatctgttaggcaaatcaatagccatcaaattagcatatcagggttttagtgaagtgtatatagagttgcatagagatgccaatagatatatgcaaggctatcagatagtatgaactaactgctaccacatcagtacgactagagtactgagtataagttggatttgcagttagtcatactttatcgagaacgttcctaactgagttagtagattgtgattaggtgtatgggcgcctggttgcggtttggatatatgtttatgtttatga

SEQ ID NO: 316380 - DNA, 2791 bp, Cannabis indica
agtctaatctctacagccacaaaaatgcaaaaccctacatgaaaatcgtctcaaaacctagcgttttcagtccaatgagtaaggaactgacctcaaacacctctaggttaacttggagttaaaaggcaacttgaaaagaaggatttgctgaagaaaattccccaaggctggctagttctaagcttgcacgaaggagaagaagaagttgaagtctttttggtgccttagtcttttaagttatctcatatattaggttttctttttcttcttcttttttttaattttataatcagcccacaacattaaaagggacaaagtacttaattgcaaaaagactaatctacccctcaaagaatagcctaagctttaaaaataacctagcgcattatggtaattttactaatccattaaaacaatattccaaaattctaaactagtctggaatacctttcaaaataatccatccattagtgtcgttatatttctcaccacatcgtcaagtttccacagtcgcctggcctgaaaaatatttttatttcaaaaatggtatccatgatacccccatatctcaatataatctacgtaattaataaagtacgctttatatattcatttaatagatttccactaattgatccaagtaagatcataatcttacttcattaccaaaataattatatatttaataaaatatgtctaattaaatatcaatttattttttgggatattacaaagacctctgtcgaaagtcttcctcacaaaattaatagtttggaggcaagttctattggtgataagttgataacagcaacacaaggtggtttcattggttggaaggccactttttaaaatttctcggagaagataattattacaactttttctttgggaggttaataacatgagtgactgggaacatgttatacaatagtggaatcgaagctttcttaatggatccaatattagtcctttatagtattaattatgggagtggtaatagtagttggatataaatctataataaggtataaattaactgtccacattgaattaatggtacataaagagtcaagagataatttgtagggtaaaacgataattttgacaacctctatttatgaactaataattggaggacaaattacttatattgattatattaatagactgcaagtaataagtttgtaaatataattctatattttcaaagagtgcaattccatattatattgaagtaataatagaattaataaaccagattattctattgatgagatacataataatgaagtgtttattggagctttaaaatataggtccatgatccctgagtcacctctatacaacattatacagggaaagatatatttgatgaatgaatttgagtgagaactaatttctatgggaaataaattcttaagggcaaaagagtaatttgtgaaattattgttttgaataattatgacaattatgaattgcataattaatagtatgttgtattgtttgatacggtacaagagatattatcttcttttcattattctaagtttctatatatataattttgaaatcattgggcttatggttcatattggataaaaactattgttgacctcgcttctagccaatgatagtgactcaaaataaaggaataaataagataaataatagaaaccaaaaatagtaaagtaaaagaacaccaaattttaaagaggaaacaacatgaatttataacaataaagtcccatgttggttacgaagcttgtatgctctttgtcagggacatgcatttttatatagttatattcagaatatgcgtccacgaacacataagctcgtgtccagcaattgcatacactaactggtcaatccttggtagtggaaagcaatcctttggacatgccttattcaagtctgaaaagtcgatacaagttgtccaagttcaattaggttttgggaggagaagaggattggatatccacgagggataaaatgcctcacgtataaagtcgttagccaacaacttgtccacttcttgcttgagtgcccctggtctctcgaaatccatgggtcgtctcttctgtctcttggctgggtaatttagttcaacattcaagtggtgacagataatcttaaggtcaatccctatcatatctgaatggctccaggcaaactgatcctgatttgccatgaaaaaaattattagttgctatttgaattgttcatccaggttcttcccagtgaatacacactttgtgggatttcttggatctagaacaacctcttccaatttctcaatcggtttcaataaatttcgttcatcttgaatctgaggatcaagatcctcatcccgcttctcgtcttccccagtcatgactgccattagctagtgaccgacctttctattctgcagccctatgcggtagcattcgcgagccaacatttgatcacctcgcactactccgacacctgtcggtttctgaaactttaggcataagtgctccaattaacgctggtcgacccagtagtatgttataggctgatggcaggtcgacaactagaaagttttgcataacagtggtggataaaggtgcctcacccacggttaatgggagctcaattattccttggctggcgatgctgtttcctgtaaattcagatagatttaccatgcaaggttttaatttggctttttcaagcccattttcattagtgtatccttataaaggatatttattgaacatccgttgtccaccagcaccctttttatccttttgttggcaagctggat

SEQ ID NO: 316381 - DNA, 1513 bp, Cannabis indica
taaaataaacttttttaaatttgttcaaattatttgtgctattaatatggtaatgagttatattaaaaaacttgtattattttatgaatgtgtatatataatatgtaaatgcatcaaactataataaaataaaacaatgaataattgagactttaaataaaaaagatataagtaaaactagtttaataaaattgtatattaaatatgtacaaaaataatatatattatatataatatatatgttcggtcggttctcggtttaatcggtcggtttgccattgacactaaaaccgaccatgttaaggcggtttttttgattttcaattttttcggtgtcagttttttcagtgttcggacagtcggtgtattcggtgtattcggtttggtcggttttttggattttttgctcacccctactcaacacagtcgaaagccttctccatgtccaacttaagaccaacccaaccaagctttccttgttttttatgagtaatggcatgaaccatttcttgggcaatgtaaatgttatcaaagataagccggtcagacaagaaagcactttgggtaggggagataatatctcccaaaacaaccttaagcctattagcaatagccttggcaacaatcttatacagagtagtgcataaactaataggcctaaaatttttgagagagaaagcattagcttttttaggaataaggacaataagagtattactaatagaagacatactagcattattattaacaatatctagaatagatttttcaagaccctccccaagggtgtcccaattcttttggtaaaaataagcattaaacccatctaaactaggggatttatccccaaaaagctgaaacagagcatcccgaatctcttcatcagtgaaagaggcattcaacaaattatactgctgatcattcaggttggtatcaacaacagaaagagtcaagttagtagcctccctataaaaaccttaagatctaaaaagagtggagaaatagtggcagacaactttctcaatgtcagccacattagagacaactctaccatcatcaaggtggagacatctaatgaagttggttcttttcctagaggaggccttattatgaaagtacttagtatttttgtccccagctcttaactaatgcactttagatctataaaatatcaattggttaccttttataaaacaatatactttaaaataaaaatattatatatgtaactttcaatatttcgagtagttttttttttaaacttatctgttcatttttaaattatattatattttttaaagataattttatgttactttcgtaaaaaatagtacatttactttattttttactaataaaataaaacaaatcacatagtttatttactaattatttgattataaactattacacacaaaaataacaatttaaaataactaagaaatagtggattatgattttttgtcaggttatcaaacgtggtgaaagctagctatgatgggctgacgtcatc

SEQ ID NO: 316382 - DNA, 803 bp, Cannabis indica
taaaataaattccaacagcagggtctcgagtaatattgggcccaaaaaaaattattgagtgcatgttttatttaaataaaatataaatattattggacttcattttataaaaaaaattcataaatactattctttttcaatgcaaaaataggaatttttacaaaaataaattaaattttgggcaaaaatttataattttactatcacacagatttttttacaaaaatactgtcttttttataaaacaaccgtaaaacaacaaaacagaacaattaaaacaacaatggaacaactaaaaaataattgtaaaacaacagtgaaaatttaacatagtacacagtataaaacaactgtgtatcttttaaaaaaaatcgcccacaataaaagaataaaaaaaaattgaaaatttcagtatgtggtgtaaaaactctaaaaaaaatatactatataaaaatttagaccctagatttgagtaggccctaagcatggacctagcccgtcttagcccagaatcgaacctgtataacagagtaattattcttagaggaaattagactttataccatttttatattatcctattttttttaaaatctatcatttttatttcttttttaaacactaccaattttacttctgtcacgtcaatatactcttcatgtaactcctttatgtcagaatattttgggtacagtacatataaaacgaaatatgtttcaattaaatataaattagtggtagatttagttatttgataaataaaataggtatttttcaatgtaccccttattcttttttttttt

SEQ ID NO: 316383 - DNA, 1016 bp, Cannabis indica
caaaataaataaatataagacgaacagcgaaaaaagaagagacctgagaatcggagggagaggaatgtttcttggaagcctttgaggttctccagcgctcactgagctgagcaattgtgtcaccagtgagagcaagggagcccgccgtcatggcttgcttcaaggggaaccattcaccggctctgctagtagcctgggcagattcggaggagttggaattaggtcgtcttctttggtttttggagcgaagccgttcgtgtttcctcggtggaaggttccaaccccataggccgccgaggccgcctcctccaccgcccaacgcgtgcatttttctcagaagaaaaacccaaaacaggctgccaaactaaaatttcgtctatttgtattaaaatctgatgtttggtttgttctaatgagaatggtgatggaatcaaattatccattacaatatttgttttgcttttaaaagtgatgtaataggattatattgtaatcataattacatttaaccatctaaattgattttttagtggtaaaagtaaaacctttcaaatcacacttttgttagttatttacttcttttgttcaaaaagcaatgttaagtgtcacggtggacatgtcacagtgtacacaagtgtacacgtggcaaatttctagcggaggttattagtggcaaagctacatgaactcttaaattagtgacacataaaccaattttttgtgataaaactctctcaacctcacttctgttagttatttactcatttcgttcaaaagactctattaagtgctctgggattggaaccatcgaatctcccctttccctgttctttcttcttcttcttctgcgacgaacccaccagaccatgatgaacccaaggacgaaccaaaaaacccaatgaaccccccaactacagtggtatcaacgaagagttgcatgagagggataatcagaaccggcgaggtcgaggcgagaaagagaaacttcaaagaagggttgggtctcggggcttaga

SEQ ID NO: 316384 - DNA, 919 bp, Cannabis indica
aattgatttgataaagaggaatataaaaacttatctcatcaacaggatatctgaatcttcattaaaaaaattaggataggcaataaatctttaacattatcacaacatcaaactttttttataactaataaaatttaacattaacaaaacacaaccgaacaataacaatatatgatttataatataacattttgatgtgtgtgtgttatgtatgcattttttcttttgggtgttggttcgataattgtattgaagataagaaggttgtttgtttggttagcttgattttcctttgataatcgggcctctaatcatacctttgctggggaggaatttttcaaaatgtgcgatcctctcctttcaacatttttttgtgcacgagtagactatttaggttcttcttttgtgggtaatttgcctttcttcatttttgctttctttgtacatcatgcaatttcccatcccggttacggtgagtttggtgcctaatactcagcccaaataatgattgggcttctgtatctagagggagcctattctcagtaattaaagggatccgaatttcgttcctgtcttcaaatgaacgacgcattgcgggagcttcattcacacagtttttacgcttgtgatcaagaaattgattctttgtaattagaagaaaatagaatagtgtgttcgggaacccaaaagagttcttctaagaaagaggaaattatcgcagcctcagtggtcccgctagtatacatttttcatggtatggtccttatgtgggatcatgtgcaccgagctattagatgggaagctgacaactgcagtcgtccatgaggtgcgtgttgggttttgtgccctaaataaaatacatttcaatataatcagatttattaattaataaagattagaaatcgcttttatgttgcat

SEQ ID NO: 316385 - DNA, 1973 bp, Cannabis indica
tagggttttttttttctttttaaatttataagaataataatataattataacatataagaataataatataattataacaaattctaccattatattaatatacatttttgtatgcggaaattgggaaagagattgaaaataaaaagtttacgcgaacaatactcatatagtaaagaataatattataagtggaaaaatacaccaatcttttgcatacacattaaggatatgacccaatatatactccaaataaaacaaataatgcaaatccttattgaccttgtttttgtaccactttcttcaagtccccaaatggacatttatgtaccaataccatgcactttcaaattcccccaaatataattatatagccatatttgtcaatgaagcaaattcaaatgggttgaaagtccaaattttaaccccgctgtcgtgttgcttgtgtaacatattatccctttagttgttgtttggcatttggtatgtaaaacattgctagaaaaaactaccttgtttgtaatttgtaaagcctctattctttcctaatggaaaatcaaagatgaaagatctatgagttagcccatatttgattaaccaaacaaataaatgattctccaattttttttctctctctctctatttatttttgtattttttctttacatacgtattataagtaataagttgttcacattaatgataaaatttttttttgaagattgattcgctatttattattctgtacaaaatgatctttgttaatttacttatttatcgagctaactttttagtctcaacataaattttttgtgattaaatataacttttagtcataacaaaaagttacttataactaaaatatactatttaaatacaaattgttactaatttaattttagtcacaatatgtattatgattaaaaacacatttattcacaacaaattgtgatttttgtgactaatacttttagtcacaacagaagaataataatttataattagtcacaaattttgttatgattgaatagagcattgctatgaggtactaagatgcctaacaccattatgagatgacgtcctataattagttagcggctctttatacaagcacaatttgaccaatttatatgacattttttttagttttaagtatttttatggtatttgatatgccatatatatgtaaattaggttttcaaagcccatatttaatgtttttatttgtttaggcagttttatttgtcactggtactgaaaaagtcgtcggagtttgctgtgagctccagaaaattcgcaggtgccggaaaagccaccggagttgctgccggtgccggaaaagtcgttgaaattggcattgtccctggaaaaatcaccaagaaagaggtttcttggtaatttttccagtgatttcgtcggtgacaatgccgatttcgacgacttttttggcgtgagcagcaactctggtgacttttcaaacaccggcagctactccagcaacttttttggcactgacaataaactctggaaaagtcgtcagaattggtattgtcgccgaaaaaattattagaaaaattagccagaacccggtttcttggtgatttttttagtgatttttccggcgacaatgccaatttccgacgacttttttggtgtcggtagcaactccgatgacttttccggcaccgacagctactccgtcgacttttttggtgctggtagcaaactttggcgacttttccaacaccagtgacaactccaacgatcattgtatttttaaaaaaaaaatatgaaaagaattttaatatttttttatggtaattcaaagtggcatgtcctatatgtgttaagttctgattttaaatactttattttttcctattaagatttcctactatattcatgtaaactagcttttttttttttttgtcattttgatttgattgtagcctgaataagcgtccatgaagcttaa

SEQ ID NO: 316386 - DNA, 673 bp, Cannabis indica
tttttttttttattattttaaaattaaaagtgaaaacatttttacataacatattttttcaaaatatttccaattttctaattaaaaaaaaataataaactaatgaaaacaatgttacaaaatgcacccatagtttctcatatattgtgagtggaagataatgaatttctaaattattcattagtatagatatatagaagggtataaaagatcgtatattataaatatcagctcacattttctcatacatacattcattgtaaagattgtgtaccaacctatttcgatctaccctttgatgatgaaccagaaataagaagccggatattatatatttatctgcctcaccttctattccattgccaaatattagatagaaaacaaagtacatctaagtgttatagtgagatttctctcacctagaaactcgagaccgggctcctatttaaaggacacgtgtattcagatttccaatgaaagctgaattgtccatgagagactactcgatgttttaacctcgcccaggataaaaccagcgagatactgtgaatacgacctaagtcgaatcgcataactttaactcacattatacaggatggatccgactcgcatgtgtcaggacagatgcgagtatcctctctatatttctacaaaagtatagagatcaactctc

SEQ ID NO: 316387 - DNA, 998 bp, Cannabis indica
tatatatatatatataccatgagttatcaccatacaattaaaaattgaaaaattattatattaaaatatgtaagagtcaatctagctataaaattatccaatattagtacaacgcataattaatggtggatgcctttaaaaaattttttagttaaagacaagatttccgattaactacgttgcaatcggttaagaattatgagaatttttttcaaagataaatggttattatatgagatggctcaacatttgctcacatattttgtgataatattgtccaacattccctttaaataatggttatttttcacttacgtaccatcttgattaatcttggtatcacttgacatttactcacttattttgtatgaatttcaagtatttttttttatatacaaactttctctttttctggcttataatatgaatagatatggatcgaatgtatgctcgctatatatacaatttaatggattagattagggcctagctaagcccataaaaaatgagtattattaagtgacactaaggtgctatttagcgctttataatttattagcgatttttttataatttttattaaaataaaataaattatactaacaacaatattatacctcacaaaatgttaaacaccataagaaccctttaacatttgtcatagaaaatatacactaaacaaagcccataaaagtaattttaataatctgaaaactaattcgttatgagtcaagtaattaatcacaaaatggtaacacttttgttttctaaatttttaatcacaaaataaaagaaatttttttttttgaaaaacaaaaatacgttctgtaacttatttttcaattttaaaaacagaaaacaaaaatgtattctgtaaagttcatttttattttcatttttttatttttatttacgtcgggtaggtccggggtcggattcgggttcaggtcagaggccgggttcagcgtcagggctgtgaggggatttgggtccgggtc

SEQ ID NO: 316388 - DNA, 1451 bp, Cannabis indica
agacagggttctcactgatgtgagtagcagttttattgtcacaatagagtaatgcaaggatttcgagagatatgccaaattcttggagaagagcaaggatccaagttacttcggatgtagtatttgccattgcacgatactcagtttcagtagaagattgagagacgacttgttgttttttggatttccaggagacaagagactgaccaaggaaaacacaaaagaaaaggagtgcctggtatcctgacatgttgcccaatcagcatcagcaaaaaaggaaacttgtacattagctggagaaaggctagtttctgcatagctgagacagttggggaagtgttggtagggaagaacaacccttgtcctggtgtgcttttgaggtatggcaatatcctgttggtagcttgaaggtgaggagcacgaggggcctgtaaaaactgactcaaatggttgacatcataagtgatatcgggcctttgtaattgtgagatatatcaatttgccaatcaagcttcgataggcagtaggatcagggagtaaagcccctttatctttactgagtttgaggttacattccattggggaggatgctagtttagcacctagattacccgtgtctttgagaaattgtagagtgaaaggtcgttgagagacatatattccttggctggtacgatcaatttcaaggcctaggaaaaaacgaagggaaccaatatcccttaatttgaacttgctattgagagaaagtttaaagttggatatggcatgatcattgttgcttgctacaacaatgtcatctacatagattaatatatcaagaaacatgttttgtgttcttttagtgaataaggaattatcatatgaggattgtgaaaatccatctgtgtgtgagtagtgtggaactcaattttgagtaccattgcctagaagcttgctttaggccatagatgctcttttttaagaggcaaatataattaggaggggcattataactgggaagaagtttcatgtaaacttcttcttaaatatcaccatgtagaaagacattattaatgtctaattggtgaacattgcaattattcattgcaacaagtgccaaaaaaacttttaatgagttgaacttagaaattggggcataggtttgggagtagtcaagtccttgccgttgattatatcatttggttactaaacgtgctttgaaccgacctacagctccaagttagtcatatttagctttgtatacccatttacaaccaatggctttttgccctggtggtagtttggtaatggtccaagtgtggttttttttctaatgcttgtgtctcagtatccatggctttgagccagtgagtgaagtgtgatgcttcaacatagtttttgggcttgatttcaaaatatgttgttaatactgcatctctaaattaaggactaagcttgatgtaagagaggaa

SEQ ID NO: 316389 - DNA, 2939 bp, Cannabis indica
tgtcaggattaagatcttttgatgtaagatcaactagtgatattgacttagaaagatacaacagtaagattataatatctttaccaagatcaatatcggtcccagtccaatgtatactccatacatccgatactagcatactttgccaatattctggaaagaacataacacttatctaaggtgtaagtaagttttatcgctgattatcatattagtgtaaatcgaatgcactaatgttatacgcgaaatctggttggcacttcaaaggaagacacatgtctctcttggagattacaaattaacaaatataatggcaattatattaaaataatattaaatagaataactcggagactgcacagtcttcagtgagacaaggatgtacgaactattaattcacgtgttgacgagaaaccattttgcgtcagaagacatgatcgaaaggatgaaatcaataatgcataaccgaggcatcaacctcgctatgtgtaaacgtgttaacaagacgtggcgactgttaggacacttagcgtataatatacattatactaactaagtataacaacttaaagaacccagataactaatagtgagacatccatcttgttataggaagtcttactcctagtatcttcactaatcagctcagacatctttcaatgagatccactactctgtcgagtcagctctctcagaaagaagctgacattcaaatgatgttggctactgaagttcatcttgttaccaagaactgcgattgtcagatggagcgttatgttttcaattgtagaaacgataagatttacattatcaacctcagaaagatgtgggaaaagctcaagctcgctgccagggttattgttgccatctaagttcccagcgagatatcccagcaagatatggtttgtaacgtatctaaatccacctcagtattgacccattaaaggcggataaatcacagctgtgtgattttcaaataataacctcatttatttacgtgggacgtaattaaatcccacaattgcaaagaaatattattgtgggatttgaatctgattgtaattaactaccaccctatgttactataaataagggcagaatatattgaaaaaggacggaaaatccttgagagaaaaaacctagtttgtatcagaataatctgaataagattgacttgtggactatgcagagttaaatgcaaaaccacataaaaacatggtgttatttttgctttattattttttcttagatttcaactaatttctgtgctaatcctatttcagaataggctaattatcgttaacaaaaatctgcattaatagtttggtgctttcattgaaagcctacgtgaaataagctcagaaaaaatccctcttgacaaaaagaaaaacttttccccatggctagtaacaaggaaaatgatgatactcatcctgaagagactactcactgtcttggaaaagagccaatgggctcatggaggcctcccaactcacgaacaacacgatctacacggcacggttaagaagggcccaacgtgaaggtggccaaaacccagaaatagggaacgaagtacccaacacaagtgttggtggtgatcaacccatggatgatggcgcctatgatcccacgaggtacataccgattgtcaagttggaatatcatcaactcaggcaacgtctggaagaggcaaattgacgaaacgctgagttcgaacgcgaggcaacctcagctagggcggcacaggaaaacaacgcgcaaaactaacctaatcctggagtgaggagaccacgaggtagacctcgcggctcccaaaccaggaggcaagagacggctcaggaggaccctcagaacgcctaggaagaacaacttggggaaactgaggctccccttaaaaatgaacaaccaaatgaccaaccagagccttctcgtaaaaatgagaacagaaggcaacctaggactagggaacaggaaatccctcgtgggaacgagggaaatcctgggacttaacctaggataggtgggttaccaccaagacatcgtcaacgcccttctcaaaccaacagggaaggggcgtatacaaaccccaatagggggcatgccacaacccgtacccaaaggacaccactattatgcaagactttctagttgtcgacctgccatcagcgtataacatattgctgggtcgaccatccttaattgaactagggacaattagttcaattaagcacttatccctgaagtttcagacaccgataggtgtgagagtagtgcgaggtgaccagatgcgggctcgcaaatgctactgcatagagctgcagaatagaaaggtcgatcactagctaatggcagtcgtgactaaagaagacgagaagcaggatgaagatcttgatcctcaaattcaagatgaacggaatttattgaaaccaactgaggagttataggttgttattttagatctagtgaatcccacaaaatgtgtattcattgggaagaacctggatgaacaattaaaatagcaactaataagttttttagggcaaaccaggatcagttcgcctggagccacacagatatgatagggattgaccctatgattatctaccaccacttgaatgtcgacccaaattacctagcgaagagacagaagaggcaacccttggattctgagagacaaagggaactcaagcaggaagtggataagttgttagtaaacgactttgtacgcgaggcattttaccccttatggatatccaaccctgttcttgtcccaaaaccaaatggaacttagagaacttgtattgacttctcgaacttaagtaaggcgtgtctataggattgcttcccagtcccaaggatcaaccatttagtggatgcaactactggacacgagcttatgtcgttcatggatgcatattcaagatataaccagataaaaa

SEQ ID NO: 316390 - DNA, 618 bp, Cannabis indica
tccttctctctctcaaaaaaaaaaaaaaaggataacattatccttaatcgtttttccagtaattttctctatttataattacattcattttaatataagcattattaaaagaatagttaatgtattaatttatataaagatatattttaattatataattttacttttattattttatattcaaattttttttaattattttacccatttaaaaaatgattattattttttagaataattaacatttttgttccttaaattttttacactaccaagttatgcccctataacatacgactcagtaataatacttaatcttcctattgtattttattcaatttaattttattcaatttaatcgtaaaacaaataatgcagtaaatgtgtggataatagttgatgaataaattcaaattaaatacctttcaccattttcttttactttaaatgattttaaaactaagaataatttgcggcataaatacttaagtttaactctcagttacaaataaatatctaagtttaatttttgacggtaataatagctaagttatatttctaaaactctgtaggtaccaaaccattaaatgttaagccattatatccacgtgtcatttt

SEQ ID NO: 316391 - DNA, 2014 bp, Cannabis indica
attgggaaggaccgtacaaaattcaggatgaaattagctctgggacctataagctaaagagaatggacgcatcaacagtgcctagggcctagaatgctgaccacctctaaaaatactatcagtagttaaatacaaagtttatattctataaaagaacctgttccggacaaatatatgcaacctcttatgtaacttttaaagctaagagacttaaacatttcttttcatgtcacttaggggggcatatcatacgggtaagaaataggatagatataaacaggatgaacataagaaaagtaaaagctaaatacatccaaagacgtacaaattgttcagaagacgaataaatccaaaaaagaaaagggcctggggccaggccataaaatgtctccccttaaaagaaaatagaattgttttataagaaaggggaaggataaaataaagaaacaaacaaatcacttagtcaacccgaggaggaagacggggacccctgcgttcctccaagacagcctcaagcttcttgttcttctcccataaatgggccagcacttccttaggattagggtagaaagggagacgaggttcaaagttaatagctttccagcacatgaacgctccatcatcaaaacgcttcaagcagtgttgacaagtgactggggccagtaaagcatccatctttgctttagttgcttctttgtgagcctactccctgaactcacagagctcttttacttcaacagtcaaactagttgttgtttccaaatcattctgctacagctcctccaaagattttagcttggcaacgagttcttgaacttcttccctagaatctcaaagatccctcttcgctgcagcaataacctcatcctttggccttcagcgcctccagatggtttcactccatgaggacctccttcctctggacttcatcccggattgccttcttctgcccctccgcctcccggagacacttcatcacttcctccatgccaccaaactcagacatggcgtacatgtggtcaatcagtgtctttaaaagacgatcagcctcaacaggaaaaaatattagaatcttgtataaaaaaataagaggcataagaaatctaaaagataagaactcactacagtgagggcaacgctcatgtcctggatttggtacacggggttagtagaagcacaggccacatatctcttcatggggagctgggtcaggtcggcggcaaagtgggtcatcatctccgaagaaaagggagccaagccaggtcccacaaagcggttataccagtcagtcaagggatccaaattaaaatcccagacgtctccagtgtattcaccttggaaagatccatcctgggcgtcccttactgatttcttcagaggctcggcctccccttagtgttctcccccaaggcatagttgtacttagaaatcccgagcttaaccctttcctcatcaggatgaacgggagtcaagataatacccagaggcacatgatactcatccaccacaaaaggaatcctttagtcagcgctgggagcaggagtatccacaaacctcggtttcttaacagcctccgtctccaccattttccctttacgtttgcgatccaagggagggatgatctctccttcttcctcttcctcatcaatcaagacgacttggtcctcaaaaacgtcggcagaagatctcctaggagtcaccactacatcgcgtgactcaggtaggccaacctcaggactataggtacatgcaaggatgttcaggaggtcctccattggcttcgctgtttaaggaataaacaaaggagttagaacattgctaaaaaaaccatgcatgcaagaataacataatgaaactaatcctactctggtgatctaattctggcctagcaaaggtatatattaaaaggctggtgtcgtcgtcccctagaaagctatcctatgagaggaaccaactggaggtcagataggctaaatgatcgaagaggatgggtaaggtgttgggttttatgccc

SEQ ID NO: 316392 - DNA, 1234 bp, Cannabis indica
cttctttagcttttaccttttttttttttttgttctgaatgaacttcttcattttaccgtattaaaggaaataagaacataagataaacccttattatgtccttattgcacgtcgattctggacattcaagtattatttgttttagtattaatataggcacatgcattaataattaattaatttagtaatgataaatagttaatattatatgccaatgtttatttatttatttatttttgggttgaggaggcccaaatgacaaaaggtggggttgtttgaggtttgattggatgggtgaagaagacccatctcattcacggggactggcattgccccaccatctgatcattgagtgtgtgggtccacgtgtacggcatgcattttattaataaaaaaactatttatcaataataattaaggattatgtcatactaataataataataattaagaattattgaataaatgagcaaataccaagctcaccgccctgcttgtggaacctttatttacaaataaattctaatttattataaaaaattatgttttaatttaaattagttataaataaaaataattttcaaattataattatttatctctaaatcttaaaaaaagtatataaagaataattatatcttaaaaaattatatataatttataaatttatttatcttattaataattattccaaaatatgtataaatatatttactcaaaaataattttattataatataatattaaaaactatttattgttaatgtttttacatttagtatttttaatattttaatttttttattggtatatttttatttagttataattttttaattagaatataatttatttcatcctaaacgttttaggtttggttaagactagtttgtagaggagttcagtctctagtgggagttgtagtgtagtaataggtgctgtgctatggtgctatggtgctatggtggtgttgttaaaaataactaaataaataaataaataaatcaaagggatattttgacttctcttaagacattttctctgttaagcacgaggttgtaaagtccttttttggcaagttagttgacaaaataatttttccttttatggtaagattgctttgcattcattttcgaaatcttacctcttttattcggttattagttgccattttccttgtttggaaagttgcactttcagctgaactttcctttgttgaaaacttctcaaaag

SEQ ID NO: 316393 - DNA, 1199 bp, Cannabis indica
agaatattattttttctattatttattaaaaacacatatattctttagttcacatttatattgtcacaatatcatcttctatatatatatatatatatcataaaaatagaaaattatgtgtcaaattttaatactattactttgtttgtaacacatacatcaaaatgttatattttaaagtatatcacttaataaatataaaaaatatataaataaaatattaaaaaagttggataacaccgtgcgaagcgcgacttagtttcctggtttgagttataatttagtgcatatctcaaaagtaatactgtgaagattctatactaattttgtaaaattgtagaccattaaatataacattatagtatagctcattgggatgctagatacccatttgcatttcccattataaccaggttagtagtacttaaccaaaacaggcatgtaagagtacgatagggtgtgggaccagaagttgagtactttttgattttattgagtgagagggtaagaatggccacatgttaatcttggagatcaccttaccaaaatcatttctgacaaatttcacacttaattttatctctttgctaatttggtccctccagtacttttctctttcacgtgaatccaaatacgaatacctgccacaataacttccctgtacttaatattatacagtaactagcaaaaatgaaaaccactcggtaattttttacttttgttgaaaaaaatgataatagaaaacagttaggtgatgtttgagaattgtaattagaatggcaatgtaatgaaaatggtaatagtcagttacggattcagaatttaagttgaggtggggcgacacttttttttcataagtgaggggtacatctttttttttcttttctacattgcataacatgttaaaaattaatgtaaatttatattttagtattaaatatagtataaagtaaaaacaagtaacaataaaatatatttggttcaataattaagacattaaatataaatattattggtagaggttcaaaaagtaaaataaaactattaaagtaaacatgtttttattaggattaaaactcgtgacctcctttatatgtatgaaatgactttaccattataccaaagcttattttatgtgtataattatcacttttatttataaatatatgttgtaactaactaaaatgtatatatatttt

SEQ ID NO: 316394 - DNA, 955 bp, Cannabis indica
aggttcccaaagaagttaagaatgaatttgtggagctcttgaaacaaaaaatattagaaaagtgtgtggctcaaatgaaattcaaagagatggttgagtcgggatcttattacactaagacttgtgctcccatgtctgctacaggtgtaataggaccaattaataggtttatgggtgatggtagtgataggacaaccgctgaacaaatccatataactcccgaaaatgagaaagaaatgcgtgataatgtttgcatggacattgggaggtgtttctttgagaatgctttgccttttcatttggttaagagtccttcctttaccaatatgtgtcgctcaattggaaattatggtagggattgaaacctccttgtatgtatgagcttaggacttgaatattgaaggaggagatactgacactataattgaggatattaaaaagacatgcccatcaatgggactttcaataatgtctgatggatggtccgacggtagaaatcgaagcatacttaacatcttgatcaacaatcctaagggcactgtgtttttgaaaagtattgatgcctcctcatttagtaaaaatgcagaaaagttgtttaaaatgttggatgacgttattgaagaaattggagagcatcttgttgttcaagtggttactgataatgctagtgcctacaaagtggcgggtacattattgatggagaaaagaaagcatctctattggactccatgtgttgcacactgtattgatttgatgcttgaaagaattggagagttgccacaacatgcaactgctttgagtaaagcaaaaaaattgagcaagtatatttacaatcatcaattggtcctagacatgatgagaaaatttgccaaaagagacattgtaagacctgctgccactagatttgcaactgcatttcttacactacaaagcatttatcaagtgagacaacctt

SEQ ID NO: 316395 - DNA, 1108 bp, Cannabis indica
gattgcgtgcacttgcgtagtaattaataattttcgcaacatttatgcttattatatataatttatacttaatttaaacatattaataataaaataatatatatatgtgaaaaaattaaattttaaataaaaattagaaaaaaattatgttattcaacaaaattctaaagttgaaataaaaaattataggaagtccccatgacgtcggttatttaataataaccatagtcataggattcctatgtcgtcggttatttctccccctctgcgacgtcgcttggaacagtgtcggtaccaaattttgccaaaactgacactatacgccccaaaaaacacatttaaagatgcactagctgagaagatggtgtccaggataagagcttggagttctcaaaacttgtcctttgttggaagagttgttctcatcaacacagtgttgatggccattcacgcttactggtgccaatttatggtgctgcccaaaaagttgtgtgaaattgaatctatttgtcgtgatttcttgtggaatggtaatcattttcttacacgggcagcagatgttgcttggaacaccctttgtctttctaaattttcgggaggaatggggttcagaagcatttttgattggaatataacagctagccatgtttaaatatgtttgggccattgccaaaaaaaaaagataacttgtgggtgaagtaggtacataatgtgtacgtgaaggaggaagattggtggaattagtattggcacaaactggttgccatcaaagaaaaagcaaggaatctatttaatacaaatcaatttacaaatgacaggttaaaatgttgcatggttatcaagctcttcacctccaatcaacaaagttacatggagctctattgtttggagtcgtcttaattctcctaaggatagtttcattccttggcttgctatgcttaaaaatatatttggaaaaaaaaataaccacaattaaaaacttaacaaaggtgggtcttggttcccaagcccacctatcattatgagtctaataacatggaattgccatgggcttggaaacccatgggccatccaattcataaaggatattgttatccaaaagaagccc

SEQ ID NO: 316396 - DNA, 1796 bp, Cannabis indica
tttattttttcacattttcatacacgtcaatggtgcatatggtagactaaacttctaaaaaaataaaaataaaaatagcctccttaaaacttctagaataagccaaataaaataaaatgcagaagagtgtcaggaaatactattaattaaataataatatctacctgaattaggtcaagtcaattttataatcacggtaaccgagccatgaaacatagtatcctcttacagaaaaaagtaaattgagctagagcatgtaccactctattcgctagtctagtaacttgaacaaaagaaataaaagcaaatttattacaataatcaataatattttttaatagagtattgctattaggcatcagtggtgcttagcacttttgttacatatcgcgttgcgattggctagcgatactctctaaaaactattatattaaattatatgggacccgatacttagctgtaccaatagcgatattgacacataagaaggtgctaggcaccactggtgccctttagcatttctctttttaataatatatcacaaataagaatacactatatttgttgatagcagtaataatagaaaggcaattgattccataatcaacttatcatatcccaactgaatgcacagaaacaagttatatggtagactatatattatttgttgtttacaaatgtataataaagtttaaaaagttacacaatatgctgtcgtttggtaacatttttattttctaattttttaatcacaaaaataaatgtaaaagttttatttttgaaaaataaaaatgcgttctataactacttttattttttaattttaaaacagaaaataaaagtgtgttctgtaaagtttaattttatttaagtcggtcttggtctgggtcgacttaagggccgggttcgttgctagggttggggctaggttcgagtatgttcgggtctaatcggagtccaaaatattcattaagaaaataaaactgtttaaaaaaacattcaaattgaattttttttttttttccaaaattttgattctcaattaaaaagctgaaaagtgaaaacaattttatagaatatgatttcgaaaaatatttttacttttctaattttaaaaatacaaaactgattaaaaaaaaggtattactaaacgccacctatatatatattatgtgttagaggttacattatatcatatatatatatattattgtaataaacataaactttgtgacatattagaagttataaatttaaaaatagattgtaacctaatgatcacatttgatactatgtaactgagtgagttagtatatatgaaagttaagaatcaatagaatacgtttctagctgttagaatctgttgtacaatacaaatttatatcatttaaataggtgttgagacattggacaaagatttggcttggataggagttacaaggtttttctggaatgattggttaatggcttatgacatgtttttttgtggttgttttttgatcacctagaactgatttttgaaaatgtccataaaaaaatatacattaaacatattttaagctttcttatccaacgtttctatcccattaaaaaccttgtaatactggtataaccatatggtgaaaggatttttgttttcaaagtgatcctcaaacatcattatttattgagatttttaaaaaccaaattaaaatatgattgagctaaaggaattatgtttatgaaataaataagatgagatttttaacgttgttgggggtattaaagaatcttaatccctaagtcaatattattaa

SEQ ID NO: 316397 - DNA, 2252 bp, Cannabis indica
ggctgttaggagtataaccttttgcccaggtatgaaattataagatacatgtcatcgagttcactgccacatcatagtgcataaaataggataacagtaattgtgtttgtgttacactaatagttttattacaaaatcattatttttctttaatattaaaatattaattattgcgagtcaaagatgaaaaaagagatcgagaatgagataggagagtactaaaaaaagttttacaaattaagttctaaaaattatgttagggagataaaatttattatatatgtacatgtattttcttttaaaatagatgtaaatataagatgagaacaaaaatttaactcttttatttatatttttatgtgcgtattaaatttaattctattttttcttttttctattttcattcctattcatgtattattttactagctagtaaatagttagttacaactactaactagttactaatttttattcctattcatatatttttattactaactagttactgattttactagctagttaccattagtaacttgtcagtaatacattactaacttaattttttaataataaattaactaattactcataaattataaaactagcaagtagttaaataattaaattattaattttgtagtattttcttatgttgtcagattttgtagtatttttttatattgtcggttgtgaggtcaatttacaaggatctgacttatttggtgttaattaatttctagctagcaagaggtatacattcactaacatttgttataggttaattatgaatgcttagaggagtttggatatcttaatattcatctgtagtggtgtaggttctgtgatttattgtactgtagtcgaatgactggaataatatgcatgtttgatgagtttgaatatcttccgtagtgaagtaggttcaacaaatacatgtactactgtcggatgtgtggaaaaaatttgtattgctaaatgttgttgtgattattttatctcattttggattgtgttgttgttattaatagttttaaattttttgggaacgttcatttatatctgttttgctgctaaaattttaatagaattatgactagttactagttagtaatttagtatactatgattagttactaatcagtaatttagagtaagattagttactagttagttataaattatataactagtaactagttgtaagaaactagttagttacaaattatataactagcaactagttttaattagttactagttagtaatatgaaagaaactcttccctctattgctaccatttttcaaaaccttagggttatgcatctcaatcaataaatacataaaaaatatccaaagagtttgagattagtggttatttcttaaaaaaatgtatcttattttaaatttaaggcacattgagattgagccactaattaacaatttagcactaaatatttactagttagttacaaattttagaactagtaactaagttgtaaattaatttttagttttgtagtattttatttttatgttttgaaattttgaattgctgaatgttattgtgactggtttatcttattttagattgtcttttgttgttattagtagttttaaatttttatggaacattcaattataccgttttgctgtcaacattttgatgaaattaggataaaattatttgatttaagtttctcttaaaatttcttattaggatttttttgttaatttttgttatgaatatatcatggatgcgcgaggagaaagagacactgcaatttcaagtaggattcgaggattttatagagtttctcctaaagaattctagaaatctcgaatatatttcttgtccatccgtagattgttgtaatggatcaaaaggaaatattatgatgattaaggatcatgtgtattgtagaggtttcaatagaagttatactacatggtattgtcatgaaaaacatttaactgatgatccataaccattagggaagtgagggtagatgatattgagggtaatgattctgataatcatccaatggacttgtttgatgaaacataggaggaatttcttgtatgatcctgaaaaaattcgataatttgctaagtgatacctgataaaccctcgtttgatggttgtaaaaaactaagactacaaacaatgataaagttttaaaaaatcaaagcaaaaaaagagtaagcgataaatgttttactcaatttttagctatttttaaagatat

SEQ ID NO: 316398 - DNA, 763 bp, Cannabis indica
ttgtaaaaaggctaaagtacgatcaaggaaatctgcacgacaagctaaagtatgttttaagctttttatgaaactagtttttgagctttattgttttttttactctcttaattgattttaatgaaactaatttctatatatttttataggatgtttctgttgaaaatgaaaatactgttaaagttcaaacaagaaaagctcccccaaaacactaaagtatgttctaaggttttattgaatctggtttttgagctttattgttttttttcctttatctattaatttttttaaaaccaatttttatatgttttttaaggctgctactgttgaagaagaaaatcccgttaaagtacaaacaaagaaattttcacgaaaagctaatgtatgtttcaagtttttattgaaactggattttgagctttttttttgttctgttcataattgtttcttaattgtacatatttttagtttttctaaattttgtaccaaaaaatctattttttatatttactaggattattgaccaaaatgatattgtgtaaaggtgtccttatggttatgaaccttatggtgaggtcgaaaccaccattgcatgcacctttatttagataacaaaatgttaatatactttgttgttcataaaagtaataataaaaaattttaatttaataaatagagaaggttaactgtgtagtttacataatagaagcccacaaccattctcatttttataagggttaatttcataaatgcacaaaaaaca

SEQ ID NO: 316399 - DNA, 864 bp, Cannabis indica
atatatatatatattaatatttgactatgactattaataaggtgaacatctcattaagttttttttattatttatttacaaaagtctcaaagataatgatagtatggacatgtgtaagattattgttcaaaagtgatcaaattcatttttgtcttgttagctgttaattgggttgagttttcaccaaacgatttttcatgtgtggtcaatcatgctaaattagaccatgtctaaagtgactagtggccggaataaataatgattagagctacttaattgtgtattcatcacctcgtgtttcttgttaaaataatttaacacaatatctttatatataaaactagagaattaaatcgtgctttgcgatgttgcttaatttttgtaatcttcttatatttatattatactcattgagttatatagaatttaaaatataataatattaaaattagaaatgtattttatttttttaaaaatatataaaaagatagtgatattatttgtgacaaatgctaaaaatagtgaaattaacatataaattacttctatgttcgcaccttagcttcaacaatgtggaggtcaaattcgattgtcaacgtgttattcatatcctgcagaagagaaatttattcttaattgagtttgacctaatttttatagatatttatgctatttgtaactgtgttaatgtttttaagtttctcttttgtaattgttctaaaaactctttagctaacattctctttaaacttgcaatgtttttggatatgacaagtaggggtgagcaaaaaatctaagaaaccgaccaaactgagtaaaccgactgtccgaacaccgaaaaaactgacaccgaaaaaaccgaaa

SEQ ID NO: 316400 - DNA, 1302 bp, Cannabis indica
aaaataatttccaacagtattaaccacagtaccatcatcagacttgaggtacttaatactattagatttcttacgaaaggaagcatgtttgtggaaaaatttagtgtttttgtctccagctttaagccatttgattcaagcctgatgtttctaataaactttctctttatacagcatagcatctaacgtggattgaagttgtgagatgtgacgtttatcagcatcatgaaggatcactttatttgaaaattattaatgtcgtgagtaagatgttgaattctagttttaaagagacggttgttggttttattccaagttgtaagagaagagatacaataatttttcttagagatgaaactatggaagtggttattagaatgattcaacataagacacttattccaggttgtatcaacgagcgcgtagaaactagggtcctcaagacaaatgttttcaaacctaaaatgcttattcacaaagttaatagggttaggactattaggggctaacacaagctttaagacacgatgatccgaaccataaaaacctaagtggtgtaaactatgattaggataaaggtcactccaagaatccaaaacaacagcccaatccaaacgttcactaaaagttttattggtccaagtgaatttattactaacataaggtaggagggacaacataaactcactcaaaaaacttgtgaaaaaagatatattatgttgagcgggaagattttcaccaaacttatcactatgaagaagataactattaaagtcacccataattaaccatggaaaattaggagcattatgaaaaaaattatgtaataattttcaagtaaactgcctttgagaactaacaggagagccatagaaacaagtaaaatgccacatttcattcatgttaaaaccaacattatagtttatatgattaaaggaataattcaaaatattaacatagacatcaaccctccacaaacgaagaagctccccaccaaaatactggctagagacttcaaaaccacattcaaaacttaaggacctcttaaacctatatacagaatgaggcttaagcctcgtttccataaaaagtggatagtaggtttgtgaatgttcttattattattattactatttttaattcgaaagtttttttaaatataaaatttttagggtaaatactattttggaccatgtgttttgtaaaagttacaaattggaccctctgttttgttaaaatgataaaatggaccctgtatttttcaaaattgtacaaataggaccatgaactgattttttgtca

SEQ ID NO: 316401 - DNA, 1901 bp, Cannabis indica
atcttcatcaaagcttccaagttactatcataagttaggggtatgtccaaaagagtagagttatctattattaaggattcaaggggagtttcttgaggacatggtggatgaatcttgtcaggaattgttaagttatttagagtcaccatacactcttctctccaagcgccattccgtttagatcttccctgaccatcacacttcatttgatcactacaacctgctatattcccagcttccagaaccattggaccttccttcgaaaaacccaggggctcatctattatcctgccctttcctttctccaaaatcttcgacccaggattgtaagaaaagatgccagaattttcgaagcctccatagtgacaccagttttgaattcgggtatgggattgatcccttgtccgccaccagaatgaattacttccgaagtcgatgaaggtttttccttgaatccaggaggaggaaaatttgatgaaaaaacaccagagggattcttgatttgtgaataaagataatccttcttttcatcaatctttagccatgctccatatcccggaagttggtttccaagtccatcttcaacgaatttcattggttctgcacaaacccgagtatcatgccccacaaaaccacaattaaaacacatataaggtaaacgatcgtacctgtatgggagccatagttttcgaccttcaaacggaaagaggaagcctgggcagatgggctttgatatatcatacatgactttgaaggtgaagaaacctttggaaaccatctttggtatatcaatcttttgaatctcgagcacttcaccagcaaacccagatagtcgttccaagttccctttagtgatcgatttggcagggagattgtgaattcgaccacttaaagggaattttgagagaccgttttcccaattctgtgggataccgttaaatctttccaagatcagtataccattgttgaggaaccaaggattcttggccaagatccgatttaaatccttagtcgatttgaaagagaagaccaagaagcttgctgttgctgttgttagcttaatttccacactccaatctctgtccgaaatgccccaaacacgtcctagaatcgttctcaatagagaacgactcattgggcgattcgaacaccatcgtcccatagcgcaaagagcattcacttctgatcccccagattcgttgatttcccagccttcatcatccagcacggtcagattggttgttctgttcagcaggtcttccatggaggtatcattgttcgtcatggtcacgggcttttccagcatcttaggaaggctcttctcaagagagagcaaaggtttttgaaggtatattcatatttttatatattaagataattacgcggtaatactcaataagtggtagtttatttcgtcaacaaaattagaattaaatagaaattagatagtctgatagtgtttattttttggccaataaaattaaatttagtaaaaattacataatatgatagtgtcatacatgtatttttaggccaataaaattaaaattaaatagattatatagtatgatggtgtgtatgtaatgtatgcatgcaattttttttttctgatttaaaaaaaatggctgttttatatatataaaaaaatatttctttaagaaaaatataaagaaaatattttaggataattctacaatagacaccctaaaattgaatacatcaatgcacctcttaaattcttaataattattggatgtaatattaagtgtacacatttgtaggaattttcttggtgaaattcctagaatgccctacaccaactcaagtatatagtcaaaaacgacagggataaaattgtcccagaaaattcaacttaaaccaaaaccaaacgacaaagaaac

SEQ ID NO: 316402 - DNA, 698 bp, Cannabis indica
caaacgctacaattaaaaattcacccccaattttgactttacatatacaagatcccatttccaaattcgaaaatgcataataataataataaatgaataaaagaattacggaccacatggaaaagggaagcacgaagcaccctagcttgctcctcttggtaatccggtatcgggttctggctgcgatggtgggaagcatcctgagcagaccaatccgaagaagaggaggtggaggaagctgaatctgaagagttagtgttttgaaacttatggtgatggtggtgttggtgttgattaggggtttgattggggaacgatagagaatctacggaggagaaacaacgaaagggagggaatcgataacgggaggtgccattgccggaagcagaagaagcgagaagtaatcgcttggctgccgtacgatacattaaaacgacgtcggttagagaagtggaatgagatgtgaagtgtgcagtagtgaggttttggaaagaaaaagatgattaataggatccttggtaattataaggcgtttcctccacgtagcctagtttctgtgcttccacttgtactctcatttggccgcaggccaagtctaatataccgtgatcaatttatgatgtcccccaaaaaaatattaatgcacactatatttttaaaaaaaaactgctgcaataaatttttctgttttttttttt

SEQ ID NO: 316403 - DNA, 1009 bp, Cannabis indica
tttaatttaataattatagattaaaatagtggaaaaatcccaacaaaattaaataaatctaataagagtcaatataatatatgtaaatattttttaataatataaatatataagccccaaatagtaaaaatttaggatcctcatcaaaatgtgatgtacatatgttttggaattatcaatagctaatattcttgtacattcaatataattaaacccttcttttacgtaatttattgtatgcatgcaattaatatgtgtatataaaagtagtgatagatattgatttaatttatcaaatccaaaaataattcttatcatctaagtagtatattcacatactctctagctagatcaatctcaatggcttataattcctatcaacaacaacaaaatccaataatattgtatcctccatcaccacaaccaccaccatctttgcctcattattattactacaatattcctagcaataatatgaacccatttaattataattacacatattatccaccatatgaatttaattataacatggtgccctatcatgatcttcacaaccaatatccctactatggatcgagaccaacatctcatggcttttgtcctcatgaccaccacatgcccccgcaaccccggccaccgccgccacctggcagtggtggccgcctttcggagaggctatcttcttttgttaaaggtgccacagttgggaggctagtgcatgaggctgtggtgtttgtggccggaaaggtgtgtttggatgatggtggtgacttcatcaattttgacacgtctttttatgatgatttaataatgaatcggtaagcaaatatagatcgaaattattatatgtattttttaattttaatatcgattattatgaaaaaagttaacatatataattaattaataataatccgtaggtatatatatgttctatgtggtgtgtaacttgcagttatgtaatatatatatatatatatatatatatgtgtgtgtgtgtgtttgt

SEQ ID NO: 316404 - DNA, 1487 bp, Cannabis indica
agcaacaatatggtgttgacacgtgtaaagaagctgaaaaaaaccagccaaagttataaatcaataattgcattcaaacaactcacctcaaaaaataccgttagtagaaatattcgaactcccccttttaaagataagggcgagttatgaataataactactgattgatgagaccaacgagataaacaacaaataaataaggtccatctcgggatacacagaatacacaacagaatgacaattcttagaaaggataaataatgaattattcaaagagttcgtagctcattgaccacatactcgtgagtatgttgaaagattaagggcaatatttccagcatgattcatctcgaaattatcatactgtgataagcgtctcgcatttgcttcattcaacatttatagaaggacgcgataagtgttacttgaagtatacttatgcgctgaaaactctctttagaataaagcatagtcaacataaccgtttatagatggagacaaagagcagctataaaacttatttattattatctcatgtgatgtaaatatgaaatgtggggatgatcttcgtttcacgaacagttacaagaataagatctcaagggaataattgtcaccctaaactcctataaatagggacaaaccccaagaaacaaagaacgaccaatttaagaaatatagagatattatatcaatatttccaagtactcttgtattttgtatacaatttattaatagttctaatattttagtataatggtaaagcttttaaaaattttaaaagctctaaggttcaatactttataattacacattaaatattttttttttttaaaaaaaaagatagagattggagattgattccttaacttattaggttaaagtaagacaacactacactaaataatatttattatgtattttttatttaatattttatctatatattaataatttttttataatttcgggtcctgagcggtcgggggccgaggcccacggccctgctaactccactcggccaccaacgacaaagtggaagcttatttgactacctacttagttgtgccagcaattctcgtaggatatgttgggtccattagtttatacatgggttcgttgttattcttcggcgtaaagaatggaaaaaccctaagattttaaagaaaaagaaaaatggcaggtgagatagtggaggagaatgtaattgagtttcctcattttattcctcctaaactagacatgtcaaaaatatttcatttttttcaataaaaaaaactatttttaatttttatttatatcttcatttttacaatgaccgttatacttagacatgggattagtaagacacttagcactaattaatatgactatgtgattatttatatgttttattctttatagactatattttcacgaaaatatgtgttatgattattatttcacaattccagagattttattgaattatatgtgtgatatgcatg

SEQ ID NO: 316405 - DNA, 779 bp, Cannabis indica
cctggtaaaatattcccaaaagagagcatacaagacatagttggttgatatcccttaaaatgaggagatatcacctatttgttacactttaaattaataagaaaataacttgttaattagtcctaaagaataggtaaataactaatgttaatctcctattttcgtgggttgttgaagcccaatccatagttggaagtgttgtccaagatgaaagttgcagaggcaccaaaagtgcctgcctaaagagagcctggcctgcctaccctttactggaggctggccagcccttgttggcactaaggccggccaggggtagtctggcaagaactctctggtttgctagtttgttctctttttgtcctgcttaagtatttggactcctcatcaactagtacgttgtgcatggtgacttggtcttcttactgacaaattgtactctacgtggcatcaatcttgcctatgtggacatgccatatcatgtggacaaaaattaggataacattatctaataagacaatattttcatcattttctaataagacaacctttttattacataatggtaataaatatattttactcttgatatcaatcgattcacaacgataataattgtattctaacataacatgctatgtatgtagtacaaatgtacttttcttacctttaatctagattcatgcatgttttccaacccaagtggagaacaattccaattgatctcaaccctatgtcacacaagggcaaaccaataagtgtctatcccaaaatactactta

SEQ ID NO: 316406 - DNA, 1665 bp, Cannabis indica
aaaataacttccaacaaaaacatctatctttttcagtaacaataacacggagggcatgaaaacaggcattatgaaaaatcttggactcaatctagcctcttccaacattaactacctgggcctaccactatttcaatccaagaataaggatgcggactttaacttcattcttaataacctagtcgcagagcttcatggttggaagctaagatctttcttaaaagcggggcgagctacttttatcaagtctgttgggctagctatgcctatttacactatgcaaatgaccaaactttaaaagaaaaactagcatccaaaattgatgggatgatcagagacttctggtggggttgtgaacaaggaaatcgaggcttatgcttgaaggcttgggaccgcctttggctcccaaaatctagaggtgggctttgttttcggaagaatcttgaaatgaatcaagcgttattggccaagtgggattgggctctcctcaatgatgagcaatccttatgttgtaaagttcttaaagctaagtacctaagaggaaagccgttcttggagtgctcttttaaaagttcggactcttagttttggaagaatgtggtgaagtccaaagatatcctaaagaaaggtgcgtgtaaaaagatttccgatgggaaagaaacaaatatctaaactgacccgtggattattcacggcaaggggttctaccctaaggccaatagccacaaccaaggaggggtgactaaagtagctgatcttattcttgataacggagattggaacattgcgcttctccaaaccctctttgattcaaattctattgccaacatcattaaaggggggagaccgagtggcctcgggaaagacaagtggatttggacaaaagaggctaatggtcattttactactaagtccgcttacctgcttcaagctttagagagagatcttgattgtgttgttgcccctactagatggaacaaactctggaactcaaaaattctggagaggcataaagttctttggtggagcattctctctggtgccctgccgactcgtgctattctctctcggagaatgaacattgaagacacaactttccctctgtgtggggcgggtgaagaaacgatggaacaccttttcctatattgcagcttcgcgtaccatctttggcgatcttccccttggggagtttatccggtgcttgagtctggtgcccgggtctgggattgggttacatttatctggaactgaaagtctaaaggagtggatactgacagattgttcttgtatgcttcgataattgtggatacaatctggaagacccgcaatgaaaaggtacataataattcctcgagtaacattaatcatgctatagattttatctccttttgttacacagattatgtgtcttgtttgtttgaaccagtggtggctgtggtgtctcccagttggtcccctcctccggtagactggatcaaaatcaaatgcgatgttaaggtcgactgcaactctatgtgtgtggcggctttggcaagggatcattcagggacagtttgatgggttgctgccaagcttatagactttgtggaccccttgattggtaaaactgaggcatgtcggttggctttaaaatcggcggtggggaaaatgttgggttttgtgccc

SEQ ID NO: 316407 - DNA, 784 bp, Cannabis indica
tgatatgctagtaaatattaatcgaccctattagtaccaaacaagaaagaaagttagtaaggaatactagaaagtacaaactgatgttacatttttttaactgcagacagttaccttatattcagcagtaaaacttcagcattgaataggctaattaattaaataaattcatttctcaaaattattctagcacagtagcagttacttaacaatttttacagtttttggtagtgaaatataaggttagttggggtacttaaatagcaattgttatggaagcttagtttgaatatgaaaaagcagaagcaggctgtatgtgttgtttgtagatcaagttttggagaagtttattgttaatgagtttaatgaaacaggttcccaatgtaactgatctttactgactatactcagcacatcaaaatggacaatacatatgataacaatcaatcaagaatgatatattattgatttgatattcctcattcactccttaaaacagtctcatcaacggttctgattgaaggccgttattaataatgttgtggcactgctgctctttttcttctgagtacgtattgtgttaaatctttttcttttataggaacgtatattatattagttattactatattaatataatgaccatttatatggtgggggcgtaccttttgtccatactgatagtaggagtgatctattttgaaacttgaaattaatatataaatatatatatggatgactatttaatggttacatttttcttttgacctgtaatagcaggtta

SEQ ID NO: 316408 - DNA, 725 bp, Cannabis indica
ttcattcttctctaatcaaaattttgcccaaactttgctacaaacctacacatccatttacaaagaacacaaatctattatatgtgaaattatattttagttatgtgagtgtgtgagaataatttgggtacaatacttataaaaaaagatatatttaaattaaattttatttgaagataaatttagttaatgtatataaaaagtggatattcatcgattaaaaaataaagagtattgaatattattaattttccgctgtgacactttaacattatagtattgaatagttttaattagagcataacaattaagtgtctaatatcatgttaatgtggcacaagctaatgatttttaatattatttattaaatcaaaatatatgagatttcatattaaattgtaccaataacagtatacccatctctaatgttacttaatactttacggtaccccttaatatttttcttttaattaaagtattttaaatattttaatatataaataaattataatttcttttccatggtatagaatagaatgtagttatacttacttttctataaattcttacaaaattcagaatagtttatatttatacaaataaagtgtgcttgcaattagttttttaatcttaatttcagaattttaaattatataaaagaattaaaaaatatagaaatccattatatataattagtattaggggcttttttattttttacactt

SEQ ID NO: 316409 - DNA, 826 bp, Cannabis indica
ctgacactgtgctttaaaaccctggctggcttggctgcatgccagccagtctgattgagtgtgttgctcacgctataatatctatatccctacatctgttttcccaacttgttgccttccttagcaattagcatattctctctctctctgtataaatatacatagctaccttcaattttatttttatatatataattcatttatacgacgtggacgttgtaatttttatgagagcaccagtaaattttgaaatactatttataaaatttattatatcacattatatacgatttaatatttaattatattaataatgatattatatgttaaaaggtgaggatatgtattaatagcatgatataataactatatttttaacgtattcaatatacttttcaattgttcaaatttatacatacatgacttacaaaatcagtctaacatgcatactactacgtcgtgaatttgaatccgatgtatacaaatgcttcacagcatacagtggcggaaccagacgacgaaataaggagggaccaaataaaatatattttcacctaatttcttttagtatgtaatattttataaattaatataaaaagttaattacctttatacaatgtatataaaataatgaaaaataataaagagcgccttatagtgccaagtactaaaaaacactataaaaactgttacttttagtgacaaacttttagtcacaacataaatttgttgaagttacttgtgactacaacatagtatttagttacaagttgtccctaatttaattttaatcacacaaatattgtgactaaaaacacatttagtc

SEQ ID NO: 316410 - DNA, 1049 bp, Cannabis indica
tattataaattattaaaaatataaaaaaaattaaaaaaacatttaacggcgaaaaaattgcgtcgacaaaacttactcaatcatcaataaaatatggcgagtaagccttttgccaacacataagtgcgcctgcgccggtataactaattcctgccataatcctattggcaggtaaagacaaaactgttacgcgccaattagaaaaaaatgtgcaaatttttaatcgttacatatctgcgctggtaaaaattattttcctcgtcaatggacggatttaggcatcttttaacgtcgacgttgaatttttttctagtgcgaaaactcaccggtaaaagaaactttagttggcactattggctattgcaccggaaaaaattgttttaccgactgagcattgcagccaaattttttcaacgcgttgtgtctagttttgctggcacaaatatgcgccgacaaaacccttcttgtagtgttttttaaattaatgttttcacttagtgatttagcaaaaaataaaataaaataaagtaaaatatattttaaatattacgacaaaacaaataaaacaaaagatatatgaaattttattaagtaaaattattacacaattttaaaaaaatatataaaagcaaactaaacgtgaaaaaaaaaacttaaaatatatatcttaagacaatttttaaaaactatgttaaatcaattctatttaataactattttaacatttacttttgaaattattttttttaaatatattaagactaaataaacaattttgttaggaaaatatgtatattctttatactaagatccttttggcatacctacttatatatagtcgggtgtaaatataaatgttttttttttttcgtttcaagaaaaatatatatatttttttctggtaattctacaatgcactcctttaaaagggatgtattgatccacccttaacttatttcggcatttagaaaaaaaaaattaatctattttttttttcatattgatgtacgttataactatttaagatatatcctataaaattttaagaa

SEQ ID NO: 316411 - DNA, 1060 bp, Cannabis indica
ccaggcggtgtgggattgcacagcttacccggtgttttgccttacggatcatgagactactgactgtcacacgggtattattaagatgtaccaaaatctgaaacctctttattggaggagcgaaatgaagaaggatgtagtcgataatgtatctaagtgcttgacatgtcagcaagtcaaatagaacatcagaaatcggcaaggttactataacctttgacactttctgagtggaagtgggaagatgttatattggactttataattgagttacctagaatcgtgggaatgtatgattcggtagtggactcttttataaagtcaactcactttttttggtaaagacaacctatacagtggattagtatacagagttgtaagtaaatgagataatttgtcttcatggagctctaaaatccattattttagacagagattcgaaattcacatctaaggtctaggaaagtcttcagagagctctgggtacaaaactgaagttcagtacaacttttcatccttaaactgatggacagtctgagaagacaatacaaatatttgaagatttgctacgagcctgactatagactttgagggttcatggactaaatatttgcatttgatagaactatcttacaacaacagctatcatagtaaaatagggatgtctccctacgagatgttgtatggtaggaaatgtcgttccttgattcattgagataaaactgaagaaagaaaatatttgggtcctgaattagcttagtagacccgtgaggcaatagaaaagatcaaggctcgatgcttgcctgcaaagcagacataaaagttatgctaatcttaagcacagagatatagaatttcaggtaagagaacatgtttttctgcgaatctcaccaatgaaggatgtcaagcgctttggaaagagggacaagttaagtcctaagttcatagggtcatttgagatattcaagtcatggtgatctccactaatctacgctcaagattgtgaatgagagtttctatatatattcttcttcttctacctttcttatatatatatata

SEQ ID NO: 316412 - DNA, 1992 bp, Cannabis indica
tgtatttttcttggaaaatctctaatttcttggaagagtaaaacgcaacatgttgtatctagatccttagctgaagccgagtatagagctatggaaaatacctcttgtgagcttgtttggctgttgtctatgcttagagttaagaatcgaacacaaaggtctcgcctggctctaatgtgatccagtttttcatgagagaataaaacatatagagattgatttccatttggtgagggaaaaagtgcaggatggagttattaaaaccagtcatgttggtactaaagattaggttgctgatatatttaccaagacactttttcctactcaatttaatggtttcaaggacaagatgggactgattagtattagctccccatcttgagggagagtgttaaaatatgcttgttatttggcttgttttttcctttactcagctgttactaccactggatttgtggcttctttcagttgtattctattatgttagttacattggttagttgtttcttgtaactaactttgtaactaactgcctattgtaatcttcttgaatttgagctatatgaagctcattcccatctttgattcattaatgagaaattcattcagttttccttcttctctttttctctcgctttatattttctagtttgtaatattgtgatatatttacattaatttttagcattatattctaatgtataattacaaaacttgatgtaaattttttgtgatcattgttttttttgttataaatgatttgtcaataagtaccacactatatcttcgtaaatataattttttttaaaattttataaatatatttaataaaaataaaatatatcattataacacaccaattttaagaaaaattacgtgcttaaagcacgttctcctcactactatatatttttatattatcctattatttatttattatttattatttttattttttaaaaattatatatgtataaacaataattaaaaaaaaaatcttccaatagttgcagttgcctacacctaagccatacgtgtcaatatcaagtcattcaatttaagaccattgatctcatcgaactatatacgcccgttctgattttgccacgtgtaataaagtcaagccgaaccaaatcattccttgaaaccagtcccgctcatcttgaggaggaggctccacagccgttggatctccccaaatagatcatcggtaggaagctgaaacctacagcaaggacacgtgttcctcatcttaaaccaaggaaggatacacttccaatgatacacgtgtcgacacggcagctcacacacttctctcctttctctcatctcctccttacatatcacacactcaacgccaccaccgaccaccgtcacagaaggcagcgccacaaccgcggacacggaggctgccacgtcaccaccgctaccgataacgacgaacctcaaacaccttgcaaccatttctatgtaaggaaccaacaacgacccgttgtggactccaatgcctacagagccaaacgacaagagagtctcggtgtagagaccgcggagggttagtcgccagtggtggaacggcaacgtttcgagcgcttccgggttgtgctggcgtacttcgcataagtggaggagtagcaaaacggcgtcgtagtctcttgttctgagagaaaaagtattgttattagtggttttgagggtgaggtggcggagagaagagaggagatagcgagcgatgaggagagtcttgtcttggagagagaggtgatgaaggcggtggagggttaaagagaaaagagttggtgatgagagtatggcggcgagacgacggcgctggagaagggtttcagagaagatagagcgagtgagatttgagagttgaggagctgggagtgtcgctagtgctgccatgattgcggtggtggtctcatccatttctagtgatcagtattgagttttatgaattatgaagttattaacttatgagggacgttt

SEQ ID NO: 316413 - DNA, 1347 bp, Cannabis indica
atttttgtaaaaaaaatagcaaaagttagtatactatgtaaatttccctaaataattatgttttaatggccaatggcgaaactaaccgcttattttaaataggggaaaatattctttgaaataggatatgaacagaaaatattgttaatttttataaattttatagagataaaaataaaataggtaaaatataaatgaataaacatgcaaaatatgtaataataaaaatgaaaaatataaatacataataaggataaaaatattaaaaattaattttacggggaccgaaatttaaattataaaataaatttctataaaaatataatttattaaaatttgaatgaggtcattggccgaagatcttttgattattattattattattattattattattattattattattattattatttcaaaaagaaaatatgtgttggaaattgcaacatatactttgtttttataattaaatataatttttagtgctatagttcgcatgtaattattgagattgtcaaatttagttaagggataaagaagagatttacaccatcgtaatttctttaattagttatgaaaatataatttatatttatgagataaaacttatttatataactaaaataaaaattatttcttctcatatatataactaaaaatatatatttagtcataagaaaatgttttcttaattatacatgaatcatatatttttttttaaataaaatattaacttcattaaaatttagaatacaaatagctttaaaatcagctcaactattagactcaaaaatactagctacaattaaattgataccaaaatttaatacttatagtgagttgttcggtttacatgattaattaatacttattttatccaaaattttctttatgttttaatcatgatttgttttgtttgtaatattaattggtttataataatatgtagggctaaggaatttggatggccaaacacatatgtattcacaaaggcaatgggagaaatgatattagaagaagaaaaggcaaatataaatgttgtgatattaaggcctaccattgttacaagcacttacaaagaaccctttccaggttgggttgaagggattaggtaataattaattaacccatcattaattaattataacaaatattaatagtttatgtatgtgtaatgctaaagggcaccagtggtgcctatcaccctcctatgtattaatatcgatgttggtccaactaagtatcgggtcctatataatttaatataatagtttttagagagtatcgctagtcaatcgcaacgagacatgtcaagaaggtgttaggcaccactggtgcctaata

SEQ ID NO: 316414 - DNA, 1305 bp, Cannabis indica
agttctccctttcttttcttttttatttaatcaagttctccctttcctaattttaataatgtaagaaaacaaatgtaagggaatgattaccttaccattgattcccattacttattagtaaatatgacattatggctcgtttggtacgtcgtataagagtcgtattatattaaataataaagaacactatttttagataaagcaatatattgtattaatttttacgaccaaaatttttaatacaatgtatgttgtattatttaatacataacaaattgtccgtattagtttgtattataatatttacaaaggattcggggtcaacattaatctccgacccgaacctgaacccgaacccaaactcgggacccggacccatgacccatgacccgaaacccgaacctaaacccggacccatgacctacgactcgggacccggacccggacacggacctaggacccgggacctaggacccggactgggactgggacccgacccgaacttggacccggacctgtagttggtgttagggtcgagtgtattgaaaatatattataactttacacaatatattaatacaagtcaatactaaatatagtattgcattaaataatattaatacaatacaacataatccaacataatataatacaatacaatacaatacgacgtaccaaatgaacccttagtgtctaaaataacttgggtgtttaatgaaatagattagtatgcattctaaaatgaaatagattattgaaaggaaaaataagcgtgcttaaagcttaaattaataattttacaatctattatatatttttattagttaatgggtctttataaaattgaaacttatacatggtgaagtgcgagtataaaatataaaaactccatacataataatcaagtttcacatggttccatacttcacttacaaattttcaagacatatgatataataattaaaatcgatgtcatggaaagaacgtggttactttattttcaattttcaaattgattaattattatttttgaataaacaataagcaatagtatccataaccacaatctcctctccatgtgtaatcgccacatgatcctatatgatatcatctacaactccatatattgtggtcaacacttctcctcactatctcagcaccaactaattacttatataattaagaaatattatatatatttaaaatatcaatatatatatatatatctttatctttatatattaaaagtgtctatctaacggcatttcttggtttaacagaatatacttaaaaataaaagaatat

SEQ ID NO: 316415 - DNA, 910 bp, Cannabis indica
aagtttttatgccatatatatcaaaacatatcttcattttcttatatttttgtaaatagcccatgatataatttccaacgtcatggttcaaatctctttttgagggtcccaaaatttaattgactatataatttcacggtgggccctggacacctagtgtaaaaatttgttaaaatttcctaaacttattatacaattaaacataattattgcagttttgtcccacaaattaaaatttgaggccactgcttcggatctgcaacaaatgacgctttgtcgtaatgttatgcttaatgagagatacaatttgtcatgtttattatgtccatataccgttacgagtaggtaatatcagtctcatacttctcgaattatcattcttctaataaataaataaaaatgacaaattggtggtgaggatttaatacatgtaccaaaaataacatttcataattcgagtactcagtaggtagggctatggaagactatctttcgatattaattttctacgcatttattgtcaaaaggtacggttgccaacttgccattccaacatatattaaaaaaattaataataataaaaattttattttcagttaccaaaattaattaacaatcactatggagtctctgttaacttattctgtactttaaaagttgttctcttttgagagtaaccagagtttgtgtatcttattaactaggttatgatattcttatgtgaaagtttcttctgacaattatcttaagtaggggtgtgcataaatcgatccaatccaatgagaaccgaccgatccaattacaaccgaccgccaaacattggatatccaattgtgatcggatcggattggatgtaatttttaaatatccaattggatcggatcggatggtggatggggtgtctaaaaat

SEQ ID NO: 316416 - DNA, 1373 bp, Cannabis indica
actgcagtttgatcatgagaggaaatgtatttgatgtcaagagttttagttagaactttatctctaataaaatgcacatctaactcaatgtgttttgttctagcatgatagactggattagaagccaatgcattagctcccatgttatcacaccagataattggagtgtgttgaagaggaaactgtacttctcgaagcagagactgaatccaagcaaattctgcagcaacttgagcaagagctttgtactctcattcagtgtttgatcttgagataacagcttgcttctttgaagaccatgacactaaggagtctccaaaatagacacaataaccaactactgaatttctatcatcagggcaccaagcccagttagcatcaaagtaccctgtaagagccagtctgtcagtatacttgatatgcaaaccatgatcttgagtaccctttaagtatcttagaattttctttgctacagaccagcaaacatcagttggagcttttagaaactgacttagtttattcacagaaaaactaatatcaggcttggtgtgtgtgagatattgaagagccccaattaagcttatgtgctttgtgagattttcaaatggtgtgccatcttgtatggacaaaactttccctactgtcataggagtaggacaacatttaagatgtaccatgtttgatttcttgagtagggttgttattgttgggggttattttaccatgatctagatttactaccatgtatgttatttaacattctaaatataaatttctaaaacaatagaatttaaacacatataaagttcaagaaaccttacattggttgcagcagaattaaatgactcattccactcagatctctaacccttgtatcctttctgtagcatagtatcaccaagatctgactccgattctccttcaattgatttggattcttcacagtcttacacattatgattgagtaccaacttgctatgtgtgggcatgtactctatcactatagggttcaaaaattgaagagagaaagagagaggaaggattcgaaatagagagagaagagaaggctcaaaatttgactgaaggctagtgaatgcttaagctgtcagttttgagtccatcactatctattcctgctaggtttaggtttgaattatttggcattataaaattgataaataaataataaaaacaaaccttagtggccagccataggatgcgagcccaccacttataattttgccatttttcaactattcatcatattttttcacaaatgccatatttttcaattcaatcacttaaatgccataactgtttatttaataattaaaattaattatcaaataaaattgtcatttatgtaatttatt

SEQ ID NO: 316417 - DNA, 1919 bp, Cannabis indica
ttttttttctcttttccatcttataatattccttattataaaggccaataataacatttcaaaaaacattagaaattattgtactaatttgctgtccactaacagctttttcattgctctcttccttgccattttttttactcattattgtcttttggttgagtcactctactgatatgagaactatttctaacatttgcactatattttttttttgaataatgttgtatattataataattaaaagttataataataaaaaaaataaaaatgtaactaagtatacgtgcattgcacgtaacttcaatacaatattgtgtacttttttttttaattcaaaagctctttctgatctctctctctaaaaaaaaaaaaagctatattatctactctcaaattacatcttaaatgataatgagatgcccttgcaatataatgagcaacactatttacagagcacttaacaaaacgtaaagaaacattggacaattcgaataataataaacgacaatcttcaaccgaaaaactaaattgagagaccatatgaactatactcgataatacttgaacactcacaagattatcgaactctacaatcacattgcaccagtcttgactcatgatctcaagcaacacacccgaccccaaacttagtcttattttcgaatatagtagcatcaacattaagcttactaaattatcacaacttagttaccaaattccttgccgacctgactatctctaaagtcggtacaaacgttccaaataaaccaacaaatcattgcaacaacttccttccaccaaaaccaacaatcttcctcaacattattacttagttgaatacttttaatcaacacatgatctctctcattgcaaaggctcttagtaatatattattattttcatcccaagctcgatccattttaaaaagagaacaccattaataatattatatatagtgccaaatgagttgtatgtatgtgacttaaaaatgcattacaaaaaatgaaagacacaaaatcaagtcccacattagtttttttataaggaaacccatcatacttactataaatgattctagttatattattataaggacgtaagaaaacctaaggacgtattgatcgtggaatttaatattgatattaataatatcaacgcgtttttaaaattatattattattattattattattattgaaagtttaaagaaataaaagatattaaaagtgcttaatttattggtttaagagaattttttttaattttgttaagttttttttctcaaaaaattatttctgttaaatttgacagatagtaacagagctgttagtgtaaataatttttgataatgtttaagataaataacattaataataggatatttgttattttaaggattgaagctaaagatgtatctgcgtttaactccttcatagcttaatcaaataatgccttttactatataaatatatattttgtgggatattttaattctaattaagatgttaattactccttattttgactattatagtattaatatttgtttaaaagtatatatgagatcacacgggtttttgcactatttttgatagttttgatatcttttacgactttcgtaccttttatggcttttgtgccatttttatagcttgtccctatttgtttagggtagtttttggtcaattggcaagagaagtgatcatattcatgatttctatttaaacgactttttctcttttgaaagataagtatttcaagtttaagtccattatattaaatatggattagtttactatcgttatttcacattatctttttcattatattgtgtggtaatagagttttattttttgctattttgtaggttattttgtggagggcgcctacaattacagagaatttctgataattct

SEQ ID NO: 316418 - DNA, 3266 bp, Cannabis indica
atatagtaaatgtatttttataatttttattagttaatttattatattttgttattttctaatttttttttaaaaaaagaaacatttactaatttagtttgtaaatttaaagtaattttgcatctaacattctttttctttcactggatttattattatgtatttattatttataacacatgcattctttcactagaatttgtatgaatttaaataaaaaaatatataataataacaaaaaaagtatgaatatacaggtgctattttatctcattttaaaaagagtccatatagttaaataaataaaataaaataaaaacctaatcttagcatttatctggtgctctaatactgcttggaccgacataatgatgtcacatcacatgtattttttttttttctttttctttctttaagggatgtcacatactcacattattaatgtataattagttcttgaagatggaaaaaattatctataatttgaaagagacatcctgattaattcacataccataactaatagatcagacaaaaatagtaattaactcaatcaaatactctattctattatttatagctcatgtgctgtaatttctaatctactataagattcgtatgaaccttcaattttttttcatttcatgtttttacaatatctattctctcccgtttccttttgatttctttaattttgaacaaaaagaaatcatgttccaccaattaataggattctattgatttacaacctccttatgtcatacattgtatgcaagcttttattggacttagtgaatccaaagttaaaatgtctatgtataagaataaataagaattttgtctcaccttacaaatgaataaatacgaattttgtctcctgaatgacattaatttgttatgttacaaaaattcatcttggactatacaaatttttataaatattcctctttagttatattttgctcaccttttaaaataatttacttatgtaactataaactactggtataattacaagacaaatatcagtgattgaaaagcaaagagaaagaaatagaagaaaggaactgaaatcttattcaatgctcaaaatgaatacaagctaagactctgctatatatagcagcagaagttagttacattgatcaaactaactctcaactaactaataactaaccaaacagactctaacaacttgatactccccctcaagatggacaatatatatttttcaatcccatcttgtctttaatgtaattgaactggttgggaaataaaggtttggttagcacatcagctaattgttccttggaagccacatgaacggttttgatcactccagcttggactttctccctcactaagtggcaatcgatctctatatgcttcgttctctcgtgaaaaacgggattcgctgcaatgtgctgagctgatttgttgtcacaaaacaacagtgctggcccttcatgatgaacattaagttccttcaagatagaaatcagccaaacaacttcacatgtcgtattcgccattgctctgtactctgcctctgctgaagatctcgaaactgtatgctgtttcttacttctccaggatatgatagaatctcctataaaaatacagaaccccgttgtcgatcttcttgtgtcaggacatgctgcccagtctgaatccgtgtatgccctcaactgaattttagatgttgcaggaaaataaattccttgtccaggtgtggcttttatgtactgcaagactctaacagctgcattcatatggctagctcgtggtacagtaagaaattgactcagtttatttactgagtaggaaatgtctggtctcgttatggttaagtactgcaactttccaattattcttctgtatagtgtcgggtctgccaatttttctttatcattctgtccaagcttgagatttgcttccataggtgtgttcataggcttgcatccaaggtgtcccaagtcttcaaggagctgcaaagcatatggtctttgtgatacaaagatacccttttgtgatctagctatttcaagccccaagaagtacttaagatttcccaaatcttttagcttgaatcgagcatttaatctgacttttaaggcttccaattcttgtagatcattgctgacaagtatcacatcatcaacatagaccaacaagaatataaaatggtcaccaaaatgcttaatgaacaatgaatggtctgtagccgaatgattaaatccttcatcaaacaatgcagtagaaaatttggcaaaccattgccttgaagcctgctttagaccatataatgacttctttaatttgcacacagcattgtgaggaagctcccccttaggtttataaccttgaggaagagtcatgtaaacatcctctttgagatcaccatgcaagaaagcattattcacatccaattgatgtaaatgccagcccttaatggcagcaagggcaatgacacatttaacagtcacaagcttagtaactggagcaaaagtgtcagtgtaatctatcccctcctgttggttgtaccccttggcaaccaaccgagctttgagcctctcaacactcccatcagcattgagtttgattttataaacccatttacacccaataacatgttgcccttcgagtaaagaaaccacaatccaagtatcattcttctcaagtgcatctatctcattgtccatggcattgtcccactcgggtatgccatgtgcttgactaaaaaattcaggctcaaaataactcgaaatggccaaaactgttgcacgaaaagcaggagacaacctgtgataagataaaactttggataaagaataaggtgtattggattttccctgagatgaagaaacaaaaggattagcagcaagataacaatgatactcattcaaataagatggtttttgtgtgtgtctccctgttctagtgacaacagatggatggtgaacctgatcagaaacagaaaaattaggaatatgttcattgcttataacagaaccaggaacattatcagaaaaagaagctgattcaggactctgagtaggtatagcaattggttcagaatcaggttcaaggcagggagaagaacactgagtagagtcaggtatagcagaaaagaaactatcatatgcagcaggaagactctcagactttacaaagggatccggttcaaatagaattcatacattatatatatataatcatgaaataaaccatgtgaaccatgcaacataaaatgttatttctgatct

SEQ ID NO: 316419 - DNA, 1766 bp, Cannabis indica
aaaaaatattaaaacaaaatagaattttgtaaaacgtaaatttttattatttttagatatgtatagttctagaaaagtatgatatataataggcgcataaataattaggtcatatcttcgattcaattggtaagtaacactaaaaattttaaatacttatgccacaatatttataagcacgataaaattatgatcatattaacatatttttttatacacaataatttagtattaccattcatattttttatacacaaagtagaagaaaaaaaatcttgcaaactacaatagtaaggaatatatatcaacaatataattggatttaatttaattaatagttattagtagctgcaaagtaacaataataaataaattaatagtcattgacttatgttttagtcaatgacaaaattaattggacagaatgacttgtaaattgaacttaataacaatgcaagattttcttataacatgacactatataatttatttcgaaacacaaagaataataagaaatcattaaaactcagtgaattttcttaaagttttatttctcacaatattaattttaataattttcaaactttggaaaaaaaaacaaataataatggttgaggaataattctgttatgtaatatgcttttggattgattattgaggactattagaggcttctgttttgagatattcaatgtctgtttacattttgttaagttgtctgcgattcgcatagttcatctcttagctcgagcttcagggtcatatgttgattgcatagcaatgctcaaattgatattttatctgccgttttaattagttgatatttaattaaagattaacatactattttatatattgtattttgtaaaaattactgatcagattttttatttagcgtaaaataaaaaattagatcttgtattctttaaaataatacaaaatagtacattgatctcaatttttcgataatatattttaatataaccaacttaattttagtacgaacagatacagaaaatgtaccaagttttgtgataacaactctatcgactattttaaaaaatatagggtccaatttactataggcgtggatcattaaacgtacctattcataataataataataatgtataacatgagactagggttactctttctttcttagtaaaagtatgtataggcttaataataaatatcttaattaacttaacattattctcactaggaagagatcttatatatatgctatgcatattctcttattcattgcattatgtatatatattgttgatatttttgagaaataacacaccattattaattgttaatggaccactaagaatattatcttattctttgcattatatgcactatatcttgctaattttgagacctatatatatataacaccattgttatggaacaagactcactagctagctagtagtacaaattttcaatcacaaactacttttggacaacatgtgcatgatatagtagaatatatttatatatatatatatatatcatgatcaacttcataagccgagtagacctaataatatatgtgcatgcatgcaccaaatattcatgtagcaagcatttctaagttagtgggtccatatgtacatttgaaaagacttgctatacatggagggttcatttaaaatatagtattaaattgtattgtattatattgtattatattgaattgaattatatatcatatttttatataatactatgttaaactttaatttatacta

SEQ ID NO: 316420 - DNA, 1252 bp, Cannabis indica
aaatattatattttagattatatcactcagtataattacaatacatatacgtaaagattacaaaaattaaacaacaccgcgcgaagcgcgacttagttccctagttgataataaaagtagtcttttgcaaagttgtctttgtttatgtttaggccacctattggaagcagtctagaaattaaaacttaagaccatctccaattaatgtcatatctaaaatgaatttgtgttatatttagtattatttacttagtaaaaataataattaattatattgatagtcatttcatattttattaaaaatatacaaaaattattatattttatttttttatagcttagatgatagtaatacgataaataaaagatgtaaagtttaataaaaaaaagtcaattgatcataataattagtgacattttagtgcgtaaaaaagtaatatttattatgagctaaatttaacagaatgctacatcatatattaaatttagcacaacttttagcatgtgtcaaatttaacatactttttataacactattggattagtaatttttgttaagtgtgctaaaatataacaatacaccatatttttaacactctattaaagatgtctaaccaactgtctaaaatgtcaaaaattattttataagaaattatcacaactaaaccagtgcaaaataacttcgaaaaagatattattttgccaaaggattattttgacaagggtccttaaaatagttgatattagatgtatatttgtattttttctaaagaaaggatattttttagaatatttatatttaaggcaatgtttggtagctggagaatataaagaggatggagagttaatgaaggatgtagaataagagggagggagagtgaagtaagaatccttttaagttgtttagttaaaagaatggagtgataaaaagatcagagtatttttttttagtgtagtactgtaatgatattttaccatcaattaatagcttaatagcttaaaggtcttgggttcgaactcatgacctctccctttttcccatccctccctcaccactaagatagctttaatggcttaaaatataatggggtgtttggaatgggttaaagttaacaagggaatggtaatgtgaaacattaccttgtttgttttgagactttagccttggaatgttattcccttagtattataactacccttgaggagggtaatgttgatactttaaaaaagggtaggattgaatcattacctt

SEQ ID NO: 316421 - DNA, 1097 bp, Cannabis indica
aactagggttccctaaaatgccccaaccggtagaccggttacccaaccggaattccggttctgtggagtttcttggggaccaaccggaatttcggttcctacaagtcccttctgaactggaatttcggttcagtgcagaaaccaccagaaactacctacacacttcaattcaaacccaaacctcacaataacttctagatcacctaattataccataacaaacataattcatacaataaaaccaacaaatatccttagaatcaaatatcaccattaaagagcaaagcttgagctctaaagctcaaaccttgctcaacataaacactaagcataaaaccatacttaaaacatcataaataaccttaaaataacctctgaaaatataatccatacataaacaaactcacaacacctaaaccaaagaaaatcatgtaaagaacctaactttgagcctaagaaaacaaaaagaagggagctttgatgttaccttgggttgaaacactatgatcttgctagaaaaccttgacttgagctaaagaaaaccctaaattgctgctagttacaatggaggtcgagaaagagaaagattgaagagagagaaaaagtgttttatgtggtttattcctaatttaggttaaaggaaaataaatcaaaacttatctaatatcaatcctatagaataacttggattattctacctaatcatcccattaaaggacaaaataaactaaatggcaaaagaccattttgcccctatttacaccaaagagcatccttgcccccaagggatattttggtcatttctaaaatttcaaatattcccgatattcctaatgtctaactaagttgccccgctatcactaaaatactaaaatgtgatactattggccaaacgtcgcgttccaatattgtcaggcacaaactatgaaaaacataaatttcatatatggcataaataatacaccctgaattcaaataaatccataaaatcataaatcataattaataatctagtttcaaaattaaaccataattaactagctaatttccataataaaactaagtggtctttacagttatcccccccgttaaaagga

SEQ ID NO: 316422 - DNA, 1168 bp, Cannabis indica
gtaattaataaattacgttttataattattcaataaatccttactaattaccctaagtaagatcataatcttacttcattaccaaaataattacatatttaataaaatatgtctatttaaatattattttattttccgagatattacaattagtatacccatcggttataaactgttgagaaaagatgcattttatacctaattattgatagctcaaaaatttgataaatttggttccaaaatttcacacgtctctaccaaggaccccaagactcgaaaaatttcagatcaatgaccctaaggctcgaaaatcttgtttctcttgtggctgaatccacaaggctcaaaaatttccttgcgacaaggatactctgtccgacgaggatacatgcttttggtaagagaaaataagtttttcgacaaaagtgtaagaccttgttcaagttttgataatttttctacttatcatttatggttgtgatgtaaaaatctgaatcacatcatttatataattatatatatttatatgctatttgatatattgtgttgtatatgttatctaggattatattgtaatttcactattacttattttatgtatattttttttatagtgtcctaattatatatatttaatcaaatgttattattattgtattttgtgtcgtaaagttgtaatcttatttgatatttccattgatgcttaactttttccaacagagtctatattgtacgtttaacctatttatgaatgtattaattcgagtacttcgtatgaacaaatcatgactcattgacttgttattttgaggaacatatataccctcgattatagatagagataattataggaacaaaccaagtttttcttcattgcagtttgcacatgtcttcttggaagttgttcatttaaatatgaataaaataaaagtgtgttgccctttcaaaatatataataataataataataataataataataataataataataatgcttgagtagatgtattaaaaaccactttatgaagattaattttttttagagtaaatactattttggaccttctgttttacgaaagttaccaattggaccttatgttttgttaaatgacaaaatggaccctgtattttctaaaatagtacaaataggaccctgaattgattt

SEQ ID NO: 316423 - DNA, 1454 bp, Cannabis indica
aatggaatagccattccaccaaagtggtggaaagagcattccattagaatgttattccaatactttaaaatgcaaccaaaaaaaagaatgaaataaaaattgtttcctttccattctattccatttcattacctccaaccaaacgccacctagtttcaaaactatcattataaaaatgtaaataaaaaattattattaaaaataaataaataaaaaataccatgaaattatttatttttagaaaaaaaaaaaaaactgcattttctgtcttttactatagtttttttcgagacaatagtttttttttctttttgaaagtctttttagaccatgtttaagattgtttagaaaaattgtgaaaaaaaaagtgtttagaaaattttaacccaaacccaaaatgctgcaataaaaaagtcctaactcaaaagatattttaaacttttagacattgtgtatttgtgttttactattattatggtttcactaataagtaattaatcgcagatgcctatctctttctgttgcccattttttccttcagtcttggtttatatatatacatgttaaaactctttaagcatgagttgatagagtgtaacatgtaacgagtctttcttttttgctatttttatctatttatacatacaattttttcaacagtatgattttggttttttcttcccttcaatttctttatttttccctatagagtctatttttaattatataattaatgtaagcatgatacaaataaaataaactaaattttatttttgttctttgaacgcttcaattataatacttcaaattggagatgagattgtcatttgttttttctattcttttttgtaatcataattttagaaattaaactaaagtatatctaggtgtgtgaacattttaaagttcaaattcttactaaatgaatataatttcttattttcattttaaaattcaaattcttactaaatgaatttagtttttattttcacatcgttatatattgtgttgttatcatgataattatcatgaagaataacttgctatgtaattaactttgttgttttcataataacattttttttttatgtaaatgggtgcattgcagttatagttgcctcttcatgagaggataagatgcaactattagagcatatttcgtattattttttattttttattatcaaaaaaatatttttagaaatgagaaaaaaaaaaaatttttgaagttttcaaaatacaagttgcgtttggttagtattttctaaaaacaatattaactaaaagtgaattgatttttattttttgtaactttgttttttgaaaattgtttttaaaaaaataaggccaaacaagcttaattgttttccaaaaataatttttatttttaaaaataaaaaacaagtttattaattatgatgacaaacatacacttaataattaaaaataagaaa

SEQ ID NO: 316424 - DNA, 1689 bp, Cannabis indica
tctctctctctctctctcccttgattatagtagtgacttgtttgaaaggtgttaatttacgaagcgttttcacttttgtagttgcttcatgttataggtaggttgaaaaataaaatgtgctaatgaacactgagtctacttgctagaatgtacaagtggcttgatggtggagttgtcaaagccttttggattaggtgattttgtttaaagttcaaattactgaaacttttagggttcgctctgaaaaattaattcagcacatgtatgcataccttgaaaaaattctaatatatatagacttttgaatattattatcttaaaatttatgtttagaaagagtttttttatgtctatggatttcggtatgttacatgttgtcaaattaatatatatttaaattatatttttttaatagttatttattaaaatagaattagtatttaaataaaaaattattagttgtcgaaaaattaaaactaaagtcaattgaggtccattgggttgataaattcaagagaaaaaatccaagcccaatttaatatagggttcagctctgaaagattttttttatgtcaaattatcttttatttttaattaatttattagctagaaaataaggattagcctagtgatggcctacataaggaaatggatgtgagagctcttaacctaaactatatactctcagtttcttgccataaaagaaaactcttatcttttctctattgctacccgctaccctagtagtctctctttctctatagttttcgttaatatagtgttgagaaagagctcacactattctatttgacatctatatctctgagggaaccctaaaccctaaactctaaagcagtttggattccttgcaatacttatcatcatcataatgggaaaagggttaagggattcaaatggtggattcattaacttcactacatgactgtaagtatctttagtttaagctctattatgattaatcaataagaaacaagattttaggttatattacatgttcattttttaatttataaaaaaaaattgtgaaaataaaatctaccctagtatgtattttctcgcaactggtatgaaagttattgattcatattttatttccatgcatgaatatattaaaaattgttagtgattcgtttatttattttttttttggagtgtttcgtgtttaaattttaaagcttattgatttttttttttttttgtaaaaattagcaattttaggttttttagccttgattctatgaaaattaatttttataattgatttggtataaggaactaatactcataatcaacgtgaccctggggtaagaagatcgcgaggcagacctcgaggtttaagaaccaggagacaagaagaaaatcaaggaaatccccaaaacaccaaggagaaacaacctgggggtactagggatgttccagcggatgaacagcaaaataatcaagaacaacatcaagaagttcctcaaagatcccaaggatttataaaacaaggcaatgaacgtaatgatgtaccagaggcttctcgtaggaatgaggacacgagatagccccaaactagggaacgaaaaatccctcgtaataatgagagaaatcctgggactcaacctaggacaagtggggtgccgctgagacaccttcaacgtctttctcgatcagagagggaaggtg

SEQ ID NO: 316425 - DNA, 1191 bp, Cannabis indica
tgtgttgtgatgtgtatgaataaaagatgatactgaaacttgctttcctaaaatcagtcttaacaatagttttgatattgttgcttactctagaggtaaacaaccacccaaacctaaaagtaaaacctatttatcagtatataaacactactactgaacacattcaagatgatatttgtctcatgtaaatttggctttctttgcttcgaaggcatgcaaaaatctcatgtattctatacagttgatagtccagtagaaaattggaaagtgggcaaaagttttatctcaaaggagtcttggtgaagactctcattcttgtaagtgttactttgaaaagtttttgtatagatcaaatctatattcaacatacttttatattcaacatacttttatacactataagacagttgctttttcccgattcagtgctggttcgattagaattattcattatgcaggatactttgcacatttgtatgtaataagtttatgattgaacttgtaattgaatttacaagcaccttgacaagtaaaacatattagaattcctttagtagtaagaattgtatgtagcagttcatttttaaattcatttcccttccttctgatgcaactttttatataaatgtacaagtttgaagataaatatttattatacataaaaaatacatgtatatcatgtatgcagatacttttcttacttgtgcaggtatgtggcaagactggtcagaaagagaggtataatgaccatatttatgcttcttgcgtttgagtggtggttgttatgtctgtttaccacacaaaagttattgatattacacttttacgagttcattgatcttttttttttcttgcaggtttttggcatacttaaagaacttggttatacagaaatggtttacaaattttgagtgacaagagaaattggaaatattatttttcactctttgttatcaatgtaacctatctacatttgaaagctgccacgattaagatttgttacgaaaatgagaagaaattatgagtaagttgtagtatgattttaaacttctgaaatcaccacatcatttcaagttaagtttattttgatgtgtgacacattctatgtcactgtgagtatttcttaaaactttagataatatttaaatttaatttactttttattttaaaaatcaaaatacataacttaaa

SEQ ID NO: 316426 - DNA, 1982 bp, Cannabis indica
ataataaaaatcttattaatattattaatatattattattattaacgtttatcagtttatatatatacattaaaaattttaaaacataaagcgaagaaccaaatgaaatccttcacctccttcgacaaaaattttctcttctcgatctattttcttcaatttttaacctgaaacctaacgatctaagctcaaatagcagcgggatagcaaatccttcaagagggaaagcttaaggtatggtttaattttcttttaagtgaaaaatgattggtttcatataagagttttgtgaattacaatagttatggaagttctgagcttataaaattattctcgggtagtcatgtgactagtttcgatattttttttgttgaatttgatgagattttgagttagaattttgagtttagaaccctctatagcttatgtccaaacgttaatggcgtttttcgtttaagggctcgtttttaattttggttagtttggactgtagtatatataatataaatgtgctacatgaagtttggagtaacttggatagatttcaggggtgtttcggtgagtgcgaaattgagatttttttgcccaaaatcagtcggccatttctagaaattccagggagatctcaaatcatatttttgtcataacttttcactcgggtgtccgttttggacgttctatatgctgttttgaagcttgcaacaagctctaaattatggtgtatgatttagagccaaaatataaaatttattttagtgtatttgaactacagggtttggtaggaaaccctaaatattcttatgcgagtgttaagcagtgttttgggatagacacttattggtttatcgttgttgtgacatagggccgatgtctaggttaacatcataactcaatcaatattgatccgattaatgcaattaaacttgcatttcgaagataattcaatgttctatcatgtctcacacttcaatctccattctgaaccatcggttaaaaatttcacctccaagaagttacaaaaataagtctcgagttacctggaatgggtcccgccagcctccgaaaaatgactgtcgccatcaaaagttaatttttactattggatcatcatctacggtcaaaaacatataatttatattttttttttctatttttgtgtgcctccttcatctataaatggagagctccctaagctcatttttcaaattcagaaaactaaccacaaggtcaaagcttctctctctaaaaatcaaagcttctgacacatagcctttttctgtaaaccatcttatgagaaataaaaactcgaagtagacgtagctccattactgttctacgaagtgaactactataaattagttatgtctcccttataattacttaataactatttcattcttgctaatttagtgagcgggtgtagcttagaagtctcgtccaaatttttgagtcaatagtataaaccgtagaaatctatcactgtgttgagtcgattctactcgtttcaagtctatgtgagttttctctatgtaatccttaaaattatttcattgatgtgggggattgttggaaaatcatattaaatatatgataaatagcacatttgaggttagtgagtgaatgagaaattgatgcctaaatttgtggtctattgataactgttaataaatggagattttggtcaagaatgtaattaccataataatggtgaatattataattgatatatgaaattacggtgaataatataatgaaatttttacactaaaaatctaaaatgataaatttattacattaatacctatacacggctaaaccaacttttttacacatcttttatattttattactattttaccacatgcacacacaattcaaccttttttgacacgtgattgattgattgatgcattacatcaatcactctatacatcatttctctcttttttctcttctttttccttttattttctatttctttt

SEQ ID NO: 316427 - DNA, 958 bp, Cannabis indica
gctttgtggtaaattatccactttaatcaaactacaaaccataaaataatataaagatttggtggaccaacttagcagttaggagtagtagtagtagttgttgttgttattcttttttaattcatttaaattcgttttctttttttaattttttttttttaaattatttttttggcattttctttgtcaaaatcccaggtgatgcggatatgccatgttttgagctaatatggccaattgtttcatatcacatttgaccaattaaaatactaaatatgtttattaaattattaattttgttggattttcaattattaatatatttataaaaagacaacgcctaatttcttcttattttaatatcacttactacagagtacagtgtggggaacataccatttacaaaatccggaccccttgactgttattatttattttaattattttttcaaatatttttttttggtaattcctttaagccattttactattaaatttttactttcttatttgtaaattaacatagcattaatttaccaaaataaaaaaaatccaaaaacttgatttatgcccttttatgtcattggaaaaaaaaaaaaatccaaaaacttgatatatgtagaaaagaaaatctaactaattttagcttatcattttttaactctatttttcttttctatttttgcccatatcatggttttaaattttaagactaaatatatgaaatacatttttttttgccatttataattaaaggccttttaaaaaattattcaaaaagaaaagccaattaattaaaaaaaaagataacattttcttcctaaaagaaaatattttcttaattgacacgcagacacacgtgccacaatcttagtttgtacatatctatagtatatagtatcacaaaaaattaataataataaaaaataaaatcgaaggaaaagaaaaagaaaaggaa

SEQ ID NO: 316428 - DNA, 1669 bp, Cannabis indica
ctcaaaactaagcaagagatttcaaaactccataaaagtttcaaattaaagcaagagataaactctactctgaattaaaaaaaacttaagcaaaaagttttagaccttgtaaaagtcccaaaatcgagcaagagacataactttactcgagtaccgcatgagatattagatataactcaacttacattctagggagaagccatgtgctttaaaaactccacatatataagtccaaggacattcttcatgcccatgcacacctcttcacaacaattaatgatattgttcgtgctaatgcacacatctctaaaagagaagtaacattcatgcactccgcaaaaaagtattttttgtgcaagcctaggaaaaagtgcaaaagtattgcttgaaggcttacaagtaaatacttttgggggcaaatattattcccaatttttgcaaaaaaataagatgaccactcttgcacaggggcccacaagccaagagtaccttgaagacactcaagtcaaccaagcaactttgactaagatttacaaaggctaaataagttaagatatcctatttgagggtcccatgacacctctaggaaacttatgagaatattaactaaccatttggtgctgggacccacacccaagtgtgcccaacctagggtttatggacttgcgcaaggattttcatcctaaagaccccaatccgacaaggaaactaataaggacataatttattttggcataaaaggctagatgttgagcataaagtcaagattgcacaaggaggccactccacaatgcatggccgacctgtgccatcttttggcacaaaaagatggcacatgtctctactctcaaaccaccaaaagaaacttgtcaaatgtagtccttcaacaccaaggagtataacacaagtgaaagaaactatttttcactcaataatcaagctagccaacctatgccatctttgtgcacaaacaagtggcacaggtcgaccacaccaaatgggaaagatattcttttccaaaagtactttttcatcattaagacatcaaaaccaagtaagggaggccaccaggtggtgtagaaaccacctagctgacatgtgctatctttgtgcactagaaagtggcacaatttgaccacatcaaatggggaagagtttttttggccaaagtatatttccaacataaaggtaccaaaacacaagtgagaaaagtcaccaagaggtgtaaaacacctatggtcgacttgtgtcatctttgtgacttaaaagatggcacaggtctctcccaccaattggccaagaactaatgtgaacaaagtggttttctagcatccatatgaccaaactaagcaagaaataccatcaaaggcttctcataagacctgactgacgtgtgccatcttttggcacgaaaagatggcacaagtctctcaatagggtttcagacgttgacatgaggttgtgggatcctataaccccaaaatatgaatcaccataaaaataagtaaaacacacaaagttgttcaacaacatgcatggctgacctgtgccataatgaggtggcataactcgcaatgacatggcactagtgagatttagagctaaaatgtacttacaacccttcagtaggcataactcactcaatttttatccaaatgacttggttcaa

SEQ ID NO: 316429 - DNA, 632 bp, Cannabis indica
gctgcctgaaaaggtgagcccgtgacaataagcattgatactctgtgagactacaagagcaccaattcaataaagtagagaaaacaaccaatatgatgtagccagtgtaagcaagaggaaattgctttagcttcaatctctttgacttgtaaacagcctagacttatttagaaatggctgccacaacattactaaaagagttcctaacaataccaccaatacacataacccctatagctgagtcaaggccaacatcaacattaagtttcaattgtcctaaggaagtggatgccaagcttgattgattgttgaggtagtgtgagaactctttgttgccgactagtatggattcgaaacccaccaagaaagttgagagcatttttgttgatcttgataagtgaacaaccgacagtgaggtcgtgcaaatctgatgcttgccaagtgtgtgcacaaataagaataaaaaccaatagacaacgggatttgttatagaggttcggcccccttgtgatagcgggtaataacctactccccttttagttgtattataccgagggaattgttggaaattattttaccaggatcttagatctactcaagtatgtttattaacatcctaaataagaactttc

SEQ ID NO: 316430 - DNA, 1447 bp, Cannabis indica
agagagagagaggtggggagagagaatgaaaggatttttttgattagttaagtcacctgaaggcttaccctaacaagtctcatcgctttctttatgtaacactcctattaggtttaggttagatcaaaataatattattttgataaggaatatattttaaatcctttaattaattataaaatgatataaaatatttttttccatctaatcgaaattgttatcccaatttttttcccatgtgatgtggcatattcacgtgagcaagactagagccatgtggagtacaacatgtcaataggctagctaaatcaccatgcacaacatgtctattgacgagggatccaaatactcagtcaggacaaagttacaagaaaattaaaaaaccaagagggtttggccggacaacccttggccggctaagggacaccatgtgccagccaaccccaagtaaaggatctgtcagctagtacacgtaatgggtgtcctaaagaagttcaatcaattgagatttttgcagccctcatcctggacaaaccacaacttgtcctctgctgcgaaccactccaacaacccacaaaaatagggttacaaccccaaaataattacctatcttttaggaatattaattagttattttttgtaagaccgtgaagtttaataactacattagcaatcctaactaggttaattaagtgttaatgagaaattaaattattatatgatttaatatgtagaattattatgattaattgcattttaagatcccgttggcatgtcagggtcattttagtatttttgacccgtgaagggtaaaatcataattttatgatatattgtgtttatggactatactattatatagtatgtttatcctatctttctgcaggcaatttctgacaagttggtacggtatagtcacaattgggtgttttgggctgaactaggttcagagcccaacatacacttttgggatttagttatggcttatatgtgttatatgagaaagtatgatttatgcgatgtgtgtgagtggaaatgagaagtttaccccttttaagtgttgttgctaatatatgtgccataagggcaatatggtcatttgaccaaataagcttttttcataaaaaaaaccaattttcagcaaaatgtaattcattttctgggttctatcaactctaaatcgtcctctctctccctctctccattatatagttttcaaacacaatcttgaagaaaagcttgaaattggtgtggaattttgaggattcttttgttggagcttaaggaacgttgggtaacttgctttaatctattttgcttgctttaatttttttattttcaagcattatcgtcatgttcttggtgttctttagttggtggttgcatgttgttgtgaattaggagaaagtggtggttttggttgttggaatttattttaccaggatct

SEQ ID NO: 316431 - DNA, 595 bp, Cannabis indica
tatatagtgtaatctcacatatttttcatgcataagtaatatactcacgttagcaaatagtttatgtcaatttttttttcttttgctgtatatttttattgtactgcaactattttcttctatgattttattaattttgtagttttattatactactgctctcatgttgacttcgatttaatttttggtgtttgtactttgtatatgtaatgttagtaaattatggtgtgagtattaaggtgcataaatagagtttttgtcttgctatgctttaagtaattttatgaagaaatatggactagctgctgaaaagagcagtgaaacaccatatacaatgtaagttttatataaaatgtaagttttctttaaactaccatataaaatgtgttagctgaaatgtacgagttttctttaaattatcatataaattgtcatttggaggcatgagtttattgtccttctcaatttttgaacaatatcctacatatattaaaagagtcaataaatattactattcatgaaaaggtcaaccaaaactaatggtttaatgggattgcaccttttattccttccatgcacctatatatatcaataa

SEQ ID NO: 316432 - DNA, 553 bp, Cannabis indica
gttaatcatgtgtgactttgtttatcgcgtcaaaaaaaatatcgaatttcacataatttgatttaataattaatataagaaactactaatcaattacaaagcactatataagtatggtattaaacaccacaatatctaatagcaatgctttaaaagaaaaagactaaaataatcttagttaatatttaacacaaatgatattttgtatataaatatttttataattttcttttctttacaagtgaaatgacataaagtataagaggcaaaatgactactaccaagctaattgtttgattagatatagaaattcataatgagttttctaaatatttaaataaaataatttgtgatcacccaattgacatgtgtgaataaaacaaattacttaggactcgtttggtacgccgtataaggatcgtattgtattaaataataaataacactatgtttggattaaacaatgtattgtattaattattacgaccaaattttttaatacaatctatgttgtattatttaatgcataataaatggttcgtattagtttgta

SEQ ID NO: 316433 - DNA, 2319 bp, Cannabis indica
attctattaattatatggcacacaattaagagtgcctcctcccataatttagatttttactttgagtatacaatcatataatttaccattttaagaatattctattctttttttttttggctacaccattttattgtggtctatgtggtaccgaacactcatgaattttactattttgctcacaaaaatagataaattattagagaagtactcacctcctctatcacttctcaacacttttattctcttgttgagttgatttttaacctccacttgaaaaatcttcaaagtatgaaagacttcatcctttttctttagcaaatacacataagtatgtctattataatcagcaataaaagttgtaaaatacattttaccacctctagttagaattcctttcaattcacataaatcataatgaattaaatctagcaaattagaacttctaacaacacttgaaaaatgtttttttaatcatttttgcttctacatgtgtttcacatttactataattttttatgtcacattcaatcatgccacattttttaactcttttatagtagaattacctatgtgagataatctaagatgccataaaaataaagaatcattctcaatcatataagttgatgtaaaagctttattgttgctaacattgaaaggtacatcattagtgtacaatttcaccattctcacacaagagtatcctttgcctacaaatacaatagacttggtaagtatgagcttaccggacgcataaatgaccttagtgcctatttttctaagtaagtcaccactaatcaagtttctatttatgtcgagcacatgaagcacattcactagtgtgactttcttactggaggtgagaaacgcatcaatggtaccttttcatagtatctttgatttgacttcattgtccatttgtatctcatggttaccctttgtctcttcaaaggacttgaataatgatttggcatatgtgatatgaacggtaacacatgtatcataccgccatcccttcactttcccttgcatataattcacctcactaagagcagcaatgaaatccttctcgatagcattcactttgggtcttatcaagtctttttatgcttacaatggttagcatagtatctacttttgccacagacaaaacatggaccttttctacctttgaattggttaggattaggctttggactcaagtttttactcttttcccttttttcattgttcttattaggaactttacaaattgcatttactttggaagtctctccattagacccctccataagcttatcccaacatatcaattcctcctctattcgaatatatttttggatttcttccaaagaataattctcatttttaggaaggattctcttcctataaatcttccaagatgatcataatttttctactattgcaccaacttggaacgcctcccgaatttaaatttttagcacttttaatttgttaataattacttacaattcatgaagtgcgggtagaagaggtttaccatcaagaaatttccaatcaaaaatttcttagtacctttctcctcgaccttgaacttcttttcaaggtgattccaaatttccttggcatctttagtgtcgctgcataggttgtagagcctatctgagagtgagttgaggatagatcctctacaaagaagattgtcatcttctctcttctttctttgtgctttcatcacatcgatgtccttgtcggtaggcgcaagcaaaggctccaaggtagactcaagaatgtagtcggtctttattgtggttataaggaacctcactttatcttgccaccaaggaaaattggtgctatcaaaatggtccaaccttaccaagtcttggttcatcatcttgatagtctctccttccattggaaactaagataagctttttgaatgttagaaaatatagagtttaattaaagaataatgatacaatcccaaatattacaactcttatccaaaatattacaatgactaaaaaaataaaataaacttacaatcccaaagcacaaagttacaagtaaatagaaaagatgaggagaggataagagtaacaactcaaagcaagaacacaaaaataaatgtaaagtaatatgagaatatgtataatagattatatatacatatatatatatgatatataagaaatatgtagatatatataggagtgtatatagtagaatatatataaatatactatatagaagagatgaagaagaacccaaaatgattaaaggatgattaccaaatagcttgaacaaggtttcaacacctttgtccaaaaa

SEQ ID NO: 316434 - DNA, 1026 bp, Cannabis indica
aacttatttccccctctactaaatacttagggttttatggaaatgcttctgaaaattatcaagccttaaagaactctctagattagtgtttgaagataggaaagtagtgtgtcaaagagtgaaccataagaccatatttatagtgtttaggagaactaaactttgaaattaaatcacactcaccaatggcagttaccaccagtgtagaagatcttttccatatggcttcaatgaaactccattccactttgtcgaatgccttagccatgtctaattttaaggccatccaaacttttttaccactcgatttgagttttatggagtaagtaatttcttgggccacaaggatactattagagaggagacgaccttggagaaaggcactctggttgggacaaattaatttattgatgactaattttaacctattagcgattgtttttgacatgattttgtaagagacattgcaaaggctaataggtctgaagtttttgactgcggtgggttgcttgaccttaggaataagtgtgatgagagtttgatttagcggggtgatatcactccctgcattaagggcaagaagaatagcagccaccacatcatgcttaacaaaagaccagttctttctgtagaagttggtattaaaaccatctatgctaggagctttatccattgggagttgaaagaaagctttttccacttcttcttctgtgtaggtttcctggagcatttgtatgtcatcttctgaaagagaagtggcaatgccatccaaggtatgatttatgtcttcgatagtggggttcgaagacatgaacaaagtaaggaaatagtgctcaatttctttggtgatatcctcaaaggatggaacggtcgtcccatgggcactttcaagattgtggatctgattggttttctttctagagaaagcatgatggtggaagaatttagtatttctatctccttgagacggccattgggttctggctcttgacttccagtaggtctcttctttgagtaagagtctat

SEQ ID NO: 316435 - DNA, 1691 bp, Cannabis indica
tgaacctttattaataaataaaacaaagtacaaagatttcaagctacaaaagaaggtaaagaaccattctatatatactcattgtctaatcctagacctgttcgagcacacgcatgagcaattttattaagctcacgaggaacatggactatgactaggtgaggactgaacaacaatgagtccttaatacaagtgacaatatcattaacaacagaattatgacaactagtgctataaattttatctattatacttttacaatcagtttgcagaacattaacaagaagctttatggcttgcacccaggaaataacagtcaatatagctttagcttccgcaacctcctatggaactgagcgtataataggaacaatcaagtcaaccttaatgtcatcattttaatctctaaccactattcccagactgtgcttcttagcagtactgctaacacccgcatctgtattaactttccatcctcaatgttgtgatatatgtacctgctcattacatctggaattcacattgtctggcttaaaaccaggaaggttagcatgctcatactccaataaataagccacagcttgatcataaagatgccagggtgacagcaaatttttattatgaaaaagattatttctttgattccaaactaaccagataaagcaaaagaatatagcactatcatatttatcaaagtgatcaacagcaagagcaataaagtcatagatacttagtcttttattattaatgtaaaaatcaaaatatggagaatgtttccaagccttcttagcactcacacaatcaaggaaagcatgctccacagtttcccacttcaaatgacaaagaggacaaatgggagaaggtataatgtgtctaaagaataaaaaggaggcaacagggacagaattagataacacacgccacaccaagtgtttaactttggaaggaacagatgcaaaccaaattttagaccagaaacattcacactaatcaaaagatgatgtagaaggaatatccctagaagtaacagctaagtgatatgcagacttaactgtgaaaaggccagaggtattcccactccatattagatcatcactacaaccatgaccagaaattggaacattaaggatatgatcaataagctgatcatcaaagaattggtgaagcttaaaagggtcccaagccccagatggggagagaaagaacgaaagagtagagtcagagggagggggagatgaatatgacttgatcctacagtttggaagccaatgatcttcaatagtgcgaatggtggtaccattaccaattttccaaatgaggccttgcttcattaaatctcttccccaaagaatactgcgccaagtataagatgggctatgaccagggccagcatcaagaatagaagtatgaggaaaataacgagcttttagaactaggctgagaagagaatctggacactttaagattcgccaagcttgcttagctagcatagtttggttgaaatgagttaaagacctgaatccaagacccctaacaaacttagactgacacatcattctgcaatttttcgagtgcactttacgaacctcaggagaagaaccccaccaaaattttgaaataagagactctatttctctgcaaatcttagtagggatgcgaaagcaagacattgcataagaagggattgcttg

SEQ ID NO: 316436 - DNA, 1120 bp, Cannabis indica
ccataaatttctcataaaccaagaattttagttatataggcacactttatatagaatagatatatagatagtagaaattacacaatatatgagattttttttagtttttacttttttatgacatttttaaataaattacacaatatatgggatttttttagtttgtacttttcatggcatttataaataaagcttatgtggtatgggtttttagttttattttcaatcataagagttttttttatgccatatttttgtaaacatttttcaaaatcccatattttatcttttctttttatttttgtttttcttttgttttaatattgttttaatattaagctacattagtagcttacttttcgcatgcccaactacgattagatgactgccattttcacctccattccatcaatcaaccatttttttcctttttgttttctttgtttcttctctttctattaggaattttgttttctttgtcttcttcttcttcttcttcggcttctccaattttttcttccttttgtgcgataactgttgttgcttcagattggtgcttgttcgtgtttttggattgttagagcaatttttgtgggtcgaactaaggtgtttgaacattttcttgtaagtttttgcggtaatttttttagtttagagcttagagtgttttattttgatttttgtttatatctttgattgtttttgatgttttcgggatgattggtggtgatttttgcttgtttttagtgttttagttatgtgttctgtatcattttttttttctaatttgttggctgatcactgtattatttcgtttatttttgtcttaaatttgtgtttgtgttcattgtttgagttttgcagatattcattgtttataacttctcattaaatttttttagggtttttttttattttttttttatttttttattttttgtttttgatgaatctgttaagtttatgcttatttttgtttggtcttattattgggttttaagccctaaataaaacctatttcaatataatcagattgactaattaataaaagatcagaaattttttttatgttgcatggttcacatgatttattttatgattatgtttaatgtataaattc

SEQ ID NO: 316437 - DNA, 1929 bp, Cannabis indica
cctggtaaaataatttccatcacatacctcctaactgaagccttgccaaaaggcaagaatgaagtaaacaaactaagaagaaaagctactacgtatctaatcctaggcggagtaatgtacaaatagagcctttccatgcctctcttgaagtgtgtcaccaaagccgaagccgagtaggtaatgatagaagtgcgtgaaggcttctgcagcaaccatgctggggggcaaagcctatctaagaagatactctgataggggtaattttggacaacaatcatcgaggactcgatggactatatcaaaaaatgtgacgatttttagaaattctcaaaaattccaagagctccacccagtgagctcacgatgatccagtctccttggcccttcgcagtttgcggaatagacctaattggtcaattcccaaagggaaaaggaggggtacagtttgttgtagtcacaatagactacttcagcaagtgggaagaaattgaacctctagtaacaatcatctctaaaaaagtccttaactttattgtcaagaacatcatatgtcaattcggacttccccagaagattgtatcagacaaggggaagtagtttgatagtgacatgttcattgatttccgcaacatgaatggcatcatcaaaagcatgtctattatggcccatcctcaagcaaatgggaagttagaagctgtcaaaaaaaccctcaaggacaccctaaagaagtgccttgaggaggcaaaaggcaattggcctgaatagctcacagaggtcctatggtcgcataggactactaagaacagccactaggcaaactccatttgctctagcttatggctataagacgatgttgcctataaagctagtgccactgtctcataggagaatagtctatgaccaataaataaacaataccatgctggaagagtcccttgataaagtagaagaaagaagagattaagccaacctaaagttacaggcctactagcaaaaggtagaaaggcacttcaataaacaagtcaagaatagaaaattctccgtatgagacctggtgctcctaggagtattcctaaacattaaagattcagcagtaggagtatttagacctaactgggaaggccactatcaagttatagagataactagtgagggagcctacaagatgggaaggtacaacgagaacatggagcttgttatcctaccatgatgctggaatggagagcacttttgcaaatacaatcagtaaccagcttacaaaacgctattctaaagtagcaattctacctactcaacattagagtacaaaacagctagtacccacagccttttttgcatggtctcccaccgttcttcagtggtggcctctactatacaaggcaatcaagggtagccatttgacatctagaagctaaatctatgtaatgtaagcttgtagattcaatttatgtaagttgcgtagcaacaaagaccaattaatgattaaaaaacaatttttatgttctatttattatgtgtaaaccacttgctcacaagattatcttctgaaagttattctttcagttccacatgcatacaatgggtagcatcccaagaaagaacaaggcatggtctgtgaaaattggtggatagcaagtgaccaagaactagactacatggtcactttgggggtacccataccatacaatgcatcaaacaagcataaagaacttatgcaaagaaattttaatgcttagaataagctcttaaagctgcccctaagtcgtacagacatacttcagattgacataataaatctagaccttcacatgtcaaggacataaaaagatagtcatgattaaagaccgcctggtcgatcacacaatccatgataaaaagcaacaaggctaaacaatagtaatgttcaaaaaaaaaaaaggtgtgtaggcc

SEQ ID NO: 316438 - DNA, 1694 bp, Cannabis indica
ttagcgacggtccccaaaaaaaatcgtttttaagaccgtcgcgaattcgaatatttgtagtagtgcttgtctacttttacatgcttcaagagagcccattagttcggttggtgatagagtttccaaatctttaagttcccctatcacaagaattattgaatcatatttttttgtacaaaaaattagtatcttttgtactatatgattgtcataaattatttttccatatgctctcatttgattcactatttctttaatcttagaataataatctttgcggtcttattatcttttattttaagatttttaaaatctcttctaagcttttgtagtctaactatgtgtaccttgactatcctttggaactcctcctgcagtgtgtcccatgcttcttttgtcgtcgatgccccaaaaaaaggttgtctgtcatagcttgttgcaagcaatataatacatgagaatctttttgttggctatcatccacaaccttcgtttgatctttcaaaagagatgtaatgtcttccaggatagtgactccctcttcaacaattttctatagattttgtgatcgataataggacctcattttgatggactaaaaatcatagttttttcatgaaaaaatggaagaggtaaggaagagtggttggaatggtaactaatggttatgagaaggaaagattacacccagtaatatgatcgaacaaggctctgataccactaatggtttgtttaattggaatatagtaaatagttatgatttgttttaggtgatagttttgtaatgtgtgtagcgactagtgtagtataatgatgatggtagtatggtgataattgttgggattttgtgccctgcataaaactcatttcaatataatcagatttactaattaatagaagatcaaatattattgtatgttgcatggttcacatgatttctttcatggttatatgtttaatatataaattctattaaatcctaaacatatagttattcatgattacagtgttctctacacagtagaaaataatcatgattatatgcttgtatttagtttcatgatttatcagtgcactgtatttacaatgacgtgataatcagcaataaagtttacttacataatgatatatggaatgttctttccagggcattagtaaagtacactagtatttcagcttcggtggtggaggtcaaggatggcatgagaaagggctgcaaagagtggtttatgttggtgacgaagagcttgtcactgtcattagccctgtcactcgccgttgatgagatctggatagatctgccacttttctctctcctagtgaagtttggccattgtctgtagccaagctgttgtcgaagcctcaccccacaatggttttaatctgtacacttttgaagtatgacgagccaacctccagttttagattttggattgatggtggtaaaaggcaagagaaggagagaaagtgataaacagaaagcttgaaaaagaaaggtgtccaattaagcagttagggatgagcctttattaatggggtttccatggccatggatctgtgctccacgaagaagaataagaagagagtgccatgaacagtcaagggagaaaacaaatgaaaaagaaaaagatttttttaaaaaaaaaaatttacttaaaaaaaaaaaagaaaagagaccacttgtcttagactag

SEQ ID NO: 316439 - DNA, 1013 bp, Cannabis indica
gcaaaaatggaggtttgcatcgtggagagagaggcttaagtgattcgtattagaatgcaatcaccctactcggttgagttgggttcatcgaactcggttgagtgctctgtgtgagagagaggcttaagtgattggttattagatggaatcaccctactctgttgagttgggttcatcgaactcggtcgagtgctctcagcccacgccatggcatgcatccacaccattttattgccccgcttggtcacaggcccacgctacttgacccggcgataactccttaaactcacacgtatttatacacttactaatatatgatactcccacgatgtgggataaaatattggttgtgtttcacacactatatcactaattaaaatcattatgacacgtgtcactcttataattattcttattagattttattcattttatctagatattttatattattattttcaaatcttattatattaatgcacgattttgttgatgacactacgttgacttttattaacaaaaaaaataaaagtttgataattcaaaaatatgaaatttattaattattatgatacacaactcaatcttgttttagagtattgtaggttatagctattaaccgtgaatgtactccttgcaatgtggttttaatctggtttcagggttggtctttttcttctggttttaatgaaatttcccttttatcaaaataaaataaaaataaataataaatagatggacctacctacacaaattttataaagataacacaacatagaaacactcgagcttttacttttgggccctaaggtggctgggccaaagttcagtgggccctaaacacgaattgcattgagtatttgagtatgtatgtatttctaaaaaaaacataaaaatacaaaaaaaaaaaaaaaaaaaattataaaaaaatatagtctgttaggagttttaatatttttacggttttttagagggaaacttacaaaaatgctggaatttcgattaacttttac

SEQ ID NO: 316440 - DNA, 1329 bp, Cannabis indica
acattaaagtcatatatatttttatttgtaaaataattttgcttgaagtattacaataaaatttgaatgttactgctagtttgtcccaaatagtctgaatgtctgctttggcaacgtcttgccaagtgacttactcatgggaatggtgttacgaacaaagagtttgaccatgttgttaaacttgttcccatagtcgtctattggggccacattctccgaatgccttcggaattttaattctggcccacaggctattggacaagtgcatcttccaaaattttccccttgtacgctcctttaatcccctctctcttattgttgactgcacctgcgccaaatattctacacacataacctatatttattaataataaaataagtaccactttacctttttcttttcttgcattggcagagagtcaatggtcctcttaccaataggtcgcccaacatgcttgaatataaagaatttccttttaggcaatttgggaggacatcaatattctggtctggttggttgaatcaagtttcaacttctcgaaagtatatagaatgaaatcttaatgccacggtaaccacataagctttacaaatagatccttttgattgagaataatttttgacatattttttgtacatagacattgctcgttcaattagatacatccacatgtactccactggtcccctaagaatcgcttctttagtaaaatgcatcactaggtgaaccattatgtcaaaaaatatcagtggaaaaatagttttcaatttgcaaagaatgtctagaatacttttctgcatgcactccaagtctccaacatttaatgtcttctaacaccgttttttaaaaatacttacagttcaattattgtatcccaaacttacttcttcaaaaaagtttgaataccgtccaacaacaaggattattaaaacacacggcggttgtgagacttcacttaagaaatcttgtccttattttcactcacattcttctctaaattggtgacaaatccgcctagaaactacatagacttgatattgttaggttttgtgccctaaataaaacccatttcaatataatcagatttactaattaataaagatcaaaaatcgtattttatgttgcatggtacacatgatttatttcatgattatatttaatgtataaattctattaagtctagaacatatgtatttgttcatgattatagtgttgtcagcacacaggaatataatcatgattatatgttcaaaagtttaattccttgatttgtcaattcactggatttagactggcatgataatcagcgataggtatacttacacctt

SEQ ID NO: 316441 - DNA, 1867 bp, Cannabis indica
attttttgtccctttttcgatcttacttgccactatttataatcacatagttggcagttaattacaaagttgactgtaatctttttacaacgattatcccctaaaatcatggggtttgattacatatcacgtagtgtaaatgtagttattatttaaaaatcacatagctgtcattttcccacttttactgggtcaaaagatcgtgtgttttaacacgtctttaattgttacgtccgagaatgtctcgacaggagcttgattccagtaatagcaagctgaagccttttttcttatctttccgaggtcgacaatgtatgccttgttgcttctttgttaaaaagcttatcgcttcatttgggacaatcgcaattgttgttaaaagagtttctcgaggctcatttgaatgttaaattctgactcgtcgggatttgtaaatatcactgagaagatgtctgacgttaactggggaaagttactagaatgagccttcccatagcgagataggcacctcgctcattgggtctcgagccaactcgattgttatacttagtttgtacgttatatactaagtgttttcgcagttatatgcgtttctttcatcttcccagatgtaacgtacttgatgcctcacaatatgaattcaatgacatatagtttctcgttaatatgctaagcaacaatttgtatatcttttcctcgcataagaccttacagccagcaaattgcatatatactctactacttacgctattaatgagtttttccataaaaagtaatttcatcgatccatattccctttatcttgacacgtgttctccactgagatgatagctaaatttcaggtataacaatattaataataatataattaatattaataaaatttttatcattcataattatcttatcatttcttagccactaagaaatttatatttctagggtgctaagtcaaatcccacaaactcctaattaccccaatacctatattatcaacatatcacaatattaccattaatatcaattaaacccgttatgatatttctggtctgcgatcgagtctctaaggtcgccaaacgtgaaatatttttattccacatatagctcatattacattaacacatgctatataaatcaccgtaatttataaattacgtttatttactcacatatagaaaatttaaaatttatattgaaatagattagtaagatcgtaatcctaattattactttattaacccataagataaatataaaccctaatctaccattagccttatcaggatattacactcaggttccagtcacaactggaattccaatgaatatgccagatgtggtgaatcctaacaccacaaggggcaccaccaatctaaccgccacagcgggccaaactgatataggcatcccagtggatccaagtggcaggcccctgcctccaagagaagacctacaattggcgccttctactgaaggaaggacctaggggcgatagacccaccattggcgcctcatctctagaagccatgtcgaaaaaatagccttcaaattgttatcccaaattaaaaataaaacaattggagcgaattaccgaatgaagtttcagactgagtagctgactatgtcactctctttaaggcgttttgcggatctcctaaaatgtgcataatagtctatcaactacaacgtctgtataagattcgctctacactgaatgaaatcactctgtaacatccaaagaatatttgttttgacaaatcgtaaaggttttaaagagaaaactgttgggttttatgccctaaataaaactcatttcaatataatcaaatttacttattaatatagatcagaaataacatttaatgtt

SEQ ID NO: 316442 - DNA, 1709 bp, Cannabis indica
aaaaattcaagtatataagaaaaattctaagttgatgttgtttgctaattaaaacagtattttatagcttaatttttttttttaaaaagctattttttaactgcttactaaacacatttttatcaaacaaacttataaaggagtgaaaactcaacattttttaaataaaaatgttatttcataatatgttgaagatgtgcaatcaattaaaatatgcaatatggatgtaaatgctatgtgattcgaaaaactaatgcaacagttgagatcatagttaaattattccagtaatctaaataaaatttgatttgataacacaatataactacactacaatatggataatatcatcaagttttccaaaaatatatctaattaactttgataaaaataaatgtattcttatatttaggtcaatatcctactaataataatttttgcattaatcaacaccaaaacaacaaagacttaggagctcaattcttgatcatagttattagatgaattaatgcaaattgttgtactcaaaaatgtgttttaatatttatactcgtaaatgtacgaaatgttttggaatataatattcttgtaagtacgaggtcgaactcatgaaagttgactaacatcaaaagaaactattttaaacaaagcaagaatattttaacttagttccaaatatttgatgagatttgttttaaaaaaatgaaagacaagtaataaaaagatttaaaatgaaaaatgaatgaatataaaaatagttttgaaataagatgtgtaaaataagattattaagatatttgaactcacataatgtaagttcaatagtgtttatatgtatattgattctcaagtttaaaaagtttaaatatagttgaaataaattatattatattttctatttaagtaaaagttatttgaaaaaggtagaaattttcttcacttgtaaaatacataatttctaagcagtagttatgtcacaatcttataaaattacaaaaaatcaaaaaaaattatgtgtaggcaaaatttagtacttatattttaagaattagatgtaaacaatttaataaaagacatttaatcaaagagtatcatatatttgcagaatgaaaaattaagtgaaaacatgctttaacaatcaagaatacatgatattgaagataaaaaatacatatttttgatagaaaaatccatggacaatgttgtaagggacatcaacatacaaaaataaatcttatttaattacattttgtttcatcattatcttaataattttgaaaaaaaaaaagctcataactaaataaaaatagtagaaagagaatgatgtagaaaagaaataatagtagtgaagaggagagttgtgtggaatgaagagtgtattaaaagtggttttccaacaccatatttataggcaaaatggagtgattaaattaattaaaataaaataattaatttaattaatgttgagaagagatgagataaatagaatacatataagggtattagaaaaaataaatattttgtgaggatgtaatagtagtgaaagataaagcaaaaataaggaaaaatttgaattagtatttatacgtttgggcaaaatttgtacactaaatcttagtatatcaaattagttaaatgaaattttatttacaccccccaaaatttttaaaggcacccccattttaataattttaatttaatataaaatt

SEQ ID NO: 316443 - DNA, 1743 bp, Cannabis indica
ggcattcttcagtagggttttcaacattctcttcttctttattttcttctcttttcttaagttaatatgtgtgatttcgcttccatgaacatgagtagctagacacttaattagggtttagatggatactattgacattattttatggttttaatatgatttattttccctcagtttcaatgtattctatttcattcgtacttaattgttttaaattacctgatcaccaattaactgtatgattttgatgtgagatctgagaagtgagtgtcagttatgttatagtgaaatataactgaattttgatataggatgagagtacctatatggtttagatagcttataggatttttgtgtttaatgtctgttggatgtttaatttatcacgagagtagaaaatttgtatgtaattgagatttatataccagagaagactataaattatcttagtaaacctgctattgcatagaaattggtaatagaaagataatcatattaagtcataatcaatagaaacaattaaaatcgaaagccctaacttttattcactgttaatttcctttattaatttaattgcttcttctttcactatttttattattttctagttttaatctcctcttaaatattctatatagccaaatagaagtaaagatttaattttaaaatacttaactacaatcctcgtgggatcgacctcactctttgtgagtctataacttgttaatgatacgtatacttgcgtgttatgaataccacaacgaagacattaaaaatttttgagcattttgtttcgttggggtgatcctctacttatacaaatatgtgagtcatagattagaaaactaacgaaagggaacagtaatatagttaaaggcaattgatttgaaaagatttggacatccataaatatctattatttataacactccccttggatatccataataactgactcgttaaaaatcttaccgaagaaactaagtgggacaaaactcagttaagggaaaatagttcattttggaatttttagagatcttttaatcgacacattccaatcttgtgaacaatcttctcaaatgttgatgttcgtaatgtcttcatgaataagtctgcaaaactatcacttgatcgaatttgttaaagatcaatatcaccattttcttgaaggttatgtataaagaagaattttggtcaaatgtgtttagttataatctcttttaatgtcctttttgttaagcgatgcaggcaatattattttcatggagaactgttggtacttctttattggatgttaattcacatgttcctcgaatatgttatgtcattgatcttaaccatacacattcttaacttgcctcgtgaattgcaagtatcccagcatgatttgaggaagtaaccaccagagtttgctttgttgacctccaagatatagcagtgtcaccataagtgaatacatagctcatttgagatctagtcttatatggatcaaaaaaatattctgcatttgcgtagccaatgagttgtgacccacaattattagaacatcgcaatcttttatcagtggaacttcagtattttattgagttaggagcgttgtttgaagatgttatagctttattgtctaaattttcggggacagttttgtcccatggggctcgctctaagattttagcggcccatggttggcaaagcatgctctgcggttagacgatgagctatcctggttcgaggaggttccag

SEQ ID NO: 316444 - DNA, 870 bp, Cannabis indica
aaatgaaaaaattccttttttttggcaagtaacgaccaatatcattgataaacaaataataaaaattgacccgtctctagccaaacaagttgattatttatccgaagagcatgcacaactactccatatgcaaccacattggccgaccgatgtatatggatcagggacactctgggaaatttagatcacaaacttgttatatcctctagtaatgatcttagaccactgaaaagagaatgtctcctagcaaagactaacacaattgctaagggatcataatacaaattcaacgaactttgaagaaaaaattatccaacgtcactaatatatcaaacaatatacttgaattattgataatcttcatcttccactcctaatttaacaaccacttgttctacttcctccaaatgaaccaaacatcaatgaacaactgtcggcaggaatgaaatctacgcagcataaatgtaagaatcttgtgaggattgacttccttgaagagagaaattattttaactataaataaacaaaaatacattagtcgaaaggaaaaaaataaataaataaacattataacaaaaaaataaatattgttacaaagtttataatattttttactacagataaacagtgtagataaatagttacaatagtcaattttgagtggaaaataaaaatacttatcttgtaaaaaataattgatgtatcgcaagctacttcaaataattcataacttaaatcacttaataattttacaactctaataatcaataataatacacttaaataataaataactagtaactttaatagtagtaataatatctactttataaaaattaatacaataaaatctaaaaagtaaccttaata

SEQ ID NO: 316445 - DNA, 626 bp, Cannabis indica
ctcatatatgaataaaaaaattttatgatatttatatgtaaattaatcaatataaaagattaataatttaccattcatgcaaatatcaaaattctcaacgtttattaataataaaaatatctttataggctgttcaaggcataaactctaacaatctctgacttatcctaaaagaaaattgggcaactcccttaatctcatattagctatacgacccataaatgatttcgctagtagcgtctttgtgaatggatctgtcaggttatgttctgacgcaatctccaacactatcacatcacctctctctactatatttcttagtttatggtatttcctctcaatatgattgcctctcttatggcttcttgattccttacagctgtccaatgttccactattttcacagtagagcaccagtaatttttatacttttggaactacttctagatcagtgttgaatttcttcaaccaaaccacttccttagctgcttcacaagatgctatatatttaacttccatggttgaatctgtaatattggttttcttgatgcttctccagactacagcttctccactaagagtaaatatttacccatatgtcgactttcgactatctttgtctaatt

SEQ ID NO: 316446 - DNA, 2240 bp, Cannabis indica
gatgccacgtcagagtgcaaaaattgggataacaactacaaatttgataaagaatttatctatgtggatcaaagttgtatctctgtttttttttgttattttttagttttattgctttgttatgttatcaatagtaaagatatctttgattttggaagatttgttgtaatttgtatgtgaaagccttcttgtaatgatagttgttgttgactgggattttagtcaaccaacgcggagtcgtaataaatgagatttaaacaaaaattgtaacgataaatgtaattaatgacaccaaaaattacaataaatgtaaagaaagacactagaatttaaagaggttcggccccagatgccggtatcctacttcccttgtgttttattaatctgaataacaaaagtcaagaacatgctcttgattgcaaagaatgataaagtgtttatttttctaactgctcaaaattgtggatccccttcccaggtcatggatgaccctttatataggggaaagggtcgatacttctcgcttcaggagacgcaactaacgcggagctatctcaaccgttttccttgatttttggagatggttgaagtctgatttttatgacaatatctcgctatttttgtgggttgaaaattgtctttgagacttacatgggatttgaacatttaaaatagtcattgatgatgagggtctcctaagggcgtgatacggtcgttgactaccttcggggatgaaaaccattacttagggacgaaacccccgagtcccaacttgaggagggtgacaatcatcatttcgaggtgacaccccgagacccctttgatgttgtgggtagccttggtgtcatgaggatgcactatatcaatcatgtcatgcgtaggtggaatgcatttttttaccatgagggtgtaggaggtaggggtataccccttaggggtatacccctagacgaaccctttagggggtaaggaatgtacccccagactaactctttagaggttaaggggtttacccctagactaaccccttaaggggtaaggggtgtacccttagtctaaccctttagggggtcagtggtgtacccctagactaactctttaggggttaagtgtgtacctctagactaaccctataagggttaaagggtgtacccctagactatttccatgtagatcattgcatttgacgtaggggtagtagtatatacccccaatactggtttgactctcgtaggtttgcggtgatcgtttatcccacctctgagggtgttagtcgatcatttttccttcttagaggcacccaccttgctcaagctaggggtaaaggtgacagtctgacttccattctaacggtcatgaccacccttcatggttgacgatcatgaccacccttcattgttgacggccatcacaacggtcatgactctatatattcttcattaattttgttccaaaatttttgggtcatgtgttgctactcttgacacgtcatcgtcgttaaaatttgggtaaacacttgtaatttcaattatgaatttctagtagattttttaagagaatttgtagtggttttctatagtgtattttttattgttctatcaaatattttaataatttttttttgtaattttttaaaatttaaataattaatataaactaaatatttaaacttttaatattgaaattcaaaaacaaaaacaataacttaatgccagacataaaatattattacattgcatgtctaataaaactacatgcaaaagaggtacaagtagtgggaccctttctcacatctagctttactagacatgatatatttttcatgttcaacattgttggatatgaaaaatacatctttaatatcaatgtgttacatgccagacccaagtggacgtgaaagagctttcacgaccaactttaatggtcatggatgaccctttttgtagtagtgtcaaggacatgtcggatgtacgaccaccttgttagagttttatgctctaaagaaaactcaacttcaatgtaatcttattttattatttaataaaagatcataaattaatttattattattttatatattgcttgaacatgttactttcatgatcatatgtttgataaattctattatatctgttcacgcagattttcgttaaccaaatttgagcctaacattgacaatctcacacaaaaaaaataaaagctataaaataaaaagtatgaacacacaggattttttacgt

SEQ ID NO: 316447 - DNA, 1758 bp, Cannabis indica
ttttggtattattttattaatattttaataggaactccttccctataaatgaagagctcatctagtttatttttcacattcttctatgtccccataaggtcagatcatctctctctatattctctctctagaagttggagttcttgccttagctatttttcttgtaatttttgtgaggaataaaaactcgaagtagacgtagttacattaccatcgcgatacaagatgtgaactactataaatttcttttatctttttatttacttacataaaattatttgtcctctcgccaatctagagagcgggtgttggccagatttctatgttaatattttggtacttttattgggtaccacaacttgagatctcaatcatgatggttgaaccaagattaacaagtgttgaaagaagcaccacaactggtcaacccactaggggcacgccaattgttggagctggtgatgagacaacacctacatcccggatgccaggcaaggccaccaactattgctggtattgatgccagtaatcaaattctagctggagagccacacatggagttagaagaccctgagaaagtcgatccttgggtttcacaacttagccaattagtggcaaacttacaacaaaaactcctctgagagtctcttgataagcaacatgaatagttccaaacatggctcatggagcgttggagaaatgttgaaaatcaacgtgctaaataagaataaagaagagtaaatcttgcttagtgaatcagagaagcctatagatatgacaatagaatggctcctccaggagttgcttcaaatagagctagaaacatccctcatgtgccaactggccacgttggaacaagcgcttaaggggaaacctttaatgcggatggtacttctaccattcttggtaaccgtactatttagcatgcagtaggcaccaagaatccccaaagggatgcgaactacaagcgagtgtctgaaaagactcacactcgggagcgcagaccaacatggccttcatctgatgtgaaacgatcacgtgttagggaaatagtctatgagagagcatccaaaaggactcagacttgagaatgttgaatactgccacctatctgataggaacaaccataatcctgctcgaagtaatcaaaataatgtgggaaaccaatctcctctatagaattatccttacaggtccaatgattctaggccccgtgaccctgcaaagcggaagagacctacattcaaccgttgaggaaggactcggagactctaccatgaaatagcgtgttatgagatttgaagagtgagaaccaacgaaccgctcaacactcagaattatttccttgatgaaagggttattttgtataggtactttggtcgtggtcctaatggccagcagcatgagtacttccctcgagtggatggggaagagttgaacctgagtagtcagttcaactctcttcgcacttatgacgctactgaagactattttgaggggaatagtcactataatgctccagacaattgctctcatagcaattagtccaaggatgactttgtcatcatatggagaaatccccaacattgccttcacgaccctgtggtcaggaagctgcagccaaacccaagtcaacaaaaatttcaatcaacttgggaagtagaaagaccttcgcgacacccaaaataagaaatggttggtggaagtgggagctgttggaagttattttaccaggaacttagatctactcacaagtat

SEQ ID NO: 316448 - DNA, 732 bp, Cannabis indica
ggtcgtgtacccagaccgggatcgagactcgaacctgaactcggactcggactcggacccgaacctggacccggctctgaacctagacttgggacgcaatcccaaacccagactcagacctagatagggatctggatactaacttggactcaaaccgagacctggacccagactgggatcagaactcgcgacctagatcctgaccgagaccgtgacccatacacagacctagacccgcacctgagacctgagctcgtacctggacttgaatccagacccaaacaagaatctagacctggatccagacccatacccatagtcaaaccaggactcagactccaacccagacccagacccaaactcaaacccagacactaaatcgaaatcgatattaggactaggacccaaacccgaacatggacccagcccgagacctacgacccaaacttggatgggggacctagacttgggcctcgaaacccagacccagatcggaactcgagactcagacccgaacgtggacccagactagaacccagatctacacccagaccgagattagaacccgaacccaaactcggacaaggacttgaaccctgactgggtcttgtactcggatcgagacctagggctcggagctagatgggggacctcgactcgagacacgggcatcagaactaggatcgagaccccggaccggaccccgggcccagaccatgacctagtgttggg

SEQ ID NO: 316449 - DNA, 1410 bp, Cannabis indica
tttatttgattaacaaaaatgttggagaaaaagtaaataaactaaaacaatgatttaaacataaagaaataacaataataaagacaaggattattatgatttcaaactatcctttattttatatcctaatgaaattatccaatttctcttctttctattcaattgacatgttgagttaaatagtatataatttagttaagacttacaagcccaatgtaggtgaaaactccccatatagcattaagtaaggaaactaataaaatatacaaacaaccaaggtaattttgtcctaactcaatttacatccataataattagagcatattcaaatctcaccttctagaattttgattcaaactcatagataacaattatagatgactagtgaataattgcaaaattaaaacagattgtttgggattgaaataagagaagaagatgaaattgaataactacattaatccataaaataaattcaagtgattgacataataatccttaaaataaaattaactcataagagtcattctaaaacaacaaagattcaattaaacacataaaagataaagatagatgagaaataacattatttggacttctccaatggtgtcttctactcctagtcttccttctgtgctccaaatcagcctccaagtttgaatgatatgaaaacctagatccaaaaccttttataggaggaatatccaagcaaaatttccaaactgatgcaattctaaaagttttttctagaagtgaatgtatcatagtaaaaaataggcttcaaactttaggctttatttgcagtcacaaatggagcgtgctgagcatcgaaagcttagaatttttcatccattgtatcttacaattgaaaaattcacgataaatccataaaattcatattattgagcatatttcacctcattttaatcaacatgatttatttcaccataaaaacatgaacaaaaagaaaacaagcataaacctgaaaaaaaaaaaaaactactaaaatgggcactaaaaatgcttgaaaataaacttaacagatgcctccatcattcgttgagtgaagttctgtcacgccctaatgctaagcacgctacagtgctttttaaattatagtgctatctttgctaatcaaagatttatctcgaaaaaacgtgtcaaattaaaactttttataataaatattaaactttataatttacataattatttacaaacaccgggatcctgtatctaaacttttatacaaaatgtacccaaatacaatttttagatcgcacgacgactacaaaatataacaccagatgtcttgagaccgaaaactccaagtcgctttgccacagcatgtacaacctcattccagctgaggctctctcatgttcagctttcgcctttcctttacctaca

SEQ ID NO: 316450 - DNA, 1905 bp, Cannabis indica
tgtctaaaaatccaatacatccaacatccaatcaaattaattagtatttttatttagtttggataagtaattagattttgtattgttatacgtaaaatctatgtgtatatatgaaaattaacattaaaattgaactattttttcttggattggatggatccagtcaaatccaatacatactggatctaaaattttggatgaatccgatccgattcaaaaaatactaggtctaatatattgggtaaactcaaattaaactaataaatacatatgaaatatattcaatggatagaaccgatccaatccaacatattggatgactgaaattaattggatcagatcgaatgttaaaatctaacatcctataattggatcagatctggataagcctaaaaatattagatgtgattcaatgaactccccaccactagtattagagcatctccaaactccaatagaaatgctttaggttatgattggaagttgactttttgcgatgaaagaaaaaggcagagaaaatataggaaaaataatgaaaagaaaatataataaattcttatatttggtatataataaaaaaattgtatagaaaacacttcattcagccaaattttatcaaatttaaaaaattaattttttttgttctccacacttttttttcctatatttttcttatttactaaaatctaacttttaaacatagctttgaagaatgcttaatgacataaacatatttttttacatcttttaatggatgtttatcattgaagtaaagaaaaataggtaaaaataatattcttacttttcttttaaataagaaagaaaaaaaattaattatttaatatatattaaataatattttaataatttttaaaaatacctattgaaatattttagaatgaaaattactaaaaataatataaaagaaaaataaaataaattattatattattaggtaatacaaaaaggtgcatttttgttttcacatattagtttttttttgggtaaaattttcacttattagttattaatacataatttcccgccacatcttccataaaagagtgccaatttcccgcccccgcctcaccaaaacgacgtcgttacgtccacacgaattgacccattcctgcactctgcatttacttaaaaactttctaaaaatgacaccgttcaaaccaaaaatcaatcttccacaactaccctttctgaaatccaaatctgacaacaaaagcacacaccacaaagcgtaattttctccaactcgaatgtcctttttcgacccttgtgaaaaatcaaggcatccctaataaaatcttctagagcctcaaaatcaaatttctccccccccccccttaccctcttctctgttgtttttctctatggcctcatttccatgttccttttcttcgacaaatttatcaaccctaattcgccatatcgttgtccccaaatctaaccctagtttcttcttctttctcctcttattttgtacgatagatcaggcggagggtctctcttggcttaaattttgctcctacaagctgtagtctctcttgagtaactaaagttgccatttcagctctttctgactccctagaagcaacttgccgctacagggtctttatttgttgtacaacttcacttatatgccttgggtccttagagcgaaatgaaacttcttttagataaactaactcctgaaacttaagggaattagcatcatggtgattgaatggcgttctaggtacattgagtataattctgatgtagcaaaacctgttactagggctgtgcagaaatgatctaatccaatgagaaaccgatatttttaaaaatccaatattaaattggttggttggatgacatgttgttaggttatttttagtattaattttagattaa

SEQ ID NO: 316451 - DNA, 563 bp, Cannabis indica
ggcataaaacccaacacaagtgttctataaatccaacatgcagtatgtaccaaacccagcttgaactcaacatttctagcttaggcatgaaattgcataaaactctacagagcattgagatacttactagataatggcatgggttggagaagaatgtcgtgctaatgggcccaagtatacaatgctcccactatcgcgtagttgtggcaggttcggtagctgaagtcttcggcaaacatggggtagagtaagtcgaggcttccgagccttggttcaaagaaagcaggaaggctttcaaaggttgaaaatgttgaaaagaagatgaattaactcttgaaacctacttatacaccgtttgaagtccctgtcgtttgaaatgaacgactctaattatttcaatcaagaagtatcctctaatctaggggtgttcattggatcacatccaatatttttaggcgtatccagatccgatccaatcatatattggatgttagattttaccatccgatccgatccaattaattttgtcatcaaatcgatccaacatccattggatgttgaat

SEQ ID NO: 316452 - DNA, 586 bp, Cannabis indica
tttgatgatttcatgtgtcgtgcagaagtctataaacatctagctgttgaatttattgtttcccattatctaaaataattttttgtggaagtccatactggcatatgatatttttcactacaaaatccaaaactttcttggaagtgattgttgccagtagtttggcgtctgtccacttggtgaaataatctataaccacaactgcgtcttgtactccacattttcctttaggcaattgttcgataggatctattccccatatagcaaaggggcacgaactttgcatctgcatcaacttgttgggtggtgcttggggaattttggaaaaattttttggcattttttcacatttttttcacatgggcctttgaatattcaatcattgttggcgagaaataaccttacctttgtattttcttggataaacattgcccttgacatgattgacacaaaagccttcatgaacttcagataggagttgtgcaacttctttgtttgtcacacatcttaataatggcatagagataccccttttgtgttgggttttatgccctaaataaaactctttacaatctgattagttatc

SEQ ID NO: 316453 - DNA, 680 bp, Cannabis indica
tatgacttcaagtatcaaatctccctacacgacccataataagtaggattgccggtccagattatggaatctattccacgtgtcacccagatggatgccacatcaccctgtgtagaaatttagataacatttgccccccatgtttgcgtgggatcttcttggtcgcacttggacttactcaaccacgaaactgatcggatgggtaatgcgtgtctagttttttcctttgatccgatgtgactaattgaacatctcatcgatgtttggggcatttaatactgtcttaagagtgatacctcgagtcacacaatgacaattgtgtgacaccgcatgcatgacgtttgtactattttaatgaatactaacgttactttttgggggataaccaaaattttgaattttaaattccttaactatccctccaaacgcttataaaaaggaatttaagctttcttgacattcttttagccattttatttcttagaaaacaaggactttctcagaaaacaaggacaaaaatattttcctccttattcctcaaatcttcaaagaaattttcttaggatttccattactgaaaccatctgagcacattcacgagtctacaaacagtgagtaagttatttttttcttctcttttatacaatttcctttaaaatacatgttggaattattttacc

SEQ ID NO: 316454 - DNA, 1712 bp, Cannabis indica
ttgtgactaaatgtgtttttagtcacaataattgttatgactaaaactaaattagtgacaacttgtatctaacctatgttttagtcacaagtaactttttgttgtgattaaaagtcacatttaatcacaaaaaaattatgttgtcattaaaagtagcttttttgtagcgagcactaggttccctttggcatccatttatttaatcgagcattgttatgaggcaccaaagtgtctagaaccattataatgtggcgctctataaatacgtagctagtgattttctataatttttattaaactaaaatataaatggaactcgatattaaattgcaataataataatattacacctcacacaagatacctagctagcataaataatcaaggaaaaattaaatataaacacagtaatttataattttaacaaataattaaactataaaacatatatagatcatgagagatagtgacggactgagaattaaagttggggggacatattttgttttctgtgaagaatacaaaaagtaaattaaatattacaaataaaaatgttttgttagaatttgaactcttaacttctataatatttgtaagataacttaattattacgtcaaaactaatattatatttatatttattatatttaattataaatataatatgttgtaactaataaaaatacacataattttttatcaattttttttttttcaaaaataactgtcgcgccatgatgggagagcacaaaaaatactcaaaataatatactataatatatagacaaacacaacataaagcaaagaagaattaaagagggaggaaaaaggaaggattgaagaagaaaaagtgaaaataatataatttgatcaagcacttcacatttcacgcttagttagataattaattagacatataaatacagatatttagtttattaaaataaaaaaaggtgcaaagtgtcgaactatttttataaaaagaaatgtctcatattatttaacctaaactttattttatatatttgaattaaaaccaaatgtattctattctatataagctcaataatttattatatatatactttaatttgtaataattaataatcattaaatgaatccaattatatacacaattatgaaaatgaatggaatacattaattctgttaccctctatgtagtagtagtggacaaaatcaatataaaggacaaaattgatgccaaatattttatatatgaatttgttgttgttgatgatgatcaagtcataatcactcgtccccttgcattattgggaggttgatttgtagtttaggataatgacaaaacctttcggaacaccacaactagtcaaaataattccaaacccacctactctatagccccatatatatatatctcctcatcattttgtgtggcaatccataaatatatacaattaaattatatttattaaaagagtggactgaattaattcaatcacttgatcatcactattttccaattccagcacaccatacaagtacactacattacatatattattagatactgaataaataatattgaaattcaagatattggaaatatttatatgtggtgtgcaccttatttttttagaaaaaatttatttattataaactactatttttatttatttaatcaaaaatatatttacttaattagtaaataaatatattattttgtcttg

SEQ ID NO: 316455 - DNA, 1223 bp, Cannabis indica
ttatttgtagttatcactattgatcaaaataaatttgctatgtacataaaataaatcatatacttgagttaattaactactaacttttttatacataagtaaatgattttgttataaattctttacttgcatcatcatataatttgtgacctaagaaagaaagaaaaagaatattaccaaaaaaaatataaggtaataaacgactaaactgaaactaaaataaagataaaaaaaaaagattaaaaattaaaaaatcctcatcaagaataaagatttttttttaaaaaaaattaataaatctgtgaaaaaaaactcattatataatttgtggtctaaaaaagaaagagatataagagatattatcaaacggtataggataataaaagactaaaccaaaactaaaatagagatttacaaatattaaaaattgaaaaaaaattctcactgagaatagagatcttaaaaaaattgacaaatctataaaaaaaaatcttcacataatttgtgatctaaaacagaaagagaaagaagggttattgtcaaataatatagggtaataaaagactaaattaaaatagaaatctacaaaataattgataaaattgaattaaactcactatataattataaatgaaaagaactgtgagaatatagtacctcgaaatagagatttacaaaaataacgataaaattaaataaaactcaccatataattataaacgaaaaaaattgtgagaatatagtaccagaacttttaaaatagtaggcaatcaatttataagagactatatatcgatatttttttaattaatttttatatagatattttaggttttttattattttttaaattcttaaattactcgattaataagttatttgatttgagatacaattaaatttagtgttagttttaatagttttgatttaaaattgtatataaatatttttttttattaattgtaattgagagaattagataagactatattgagtgatttttaattggatatagatatatagatagatagattttttaattttttaatttttaatttttttaaaacttagttgttagatatttataaagtcttaacaaaaaattactgtgttttttatttaaaaaattagaaaaataaaagaaaataagagaatagataaataggttttaaataattagaaaaattagaaatagataaataggtttaaataattagaaaaaa

SEQ ID NO: 316456 - DNA, 784 bp, Cannabis indica
taaaatgaaaaatagataagagattaaataaaaaaaagtgatattttgcaacattaataacattgacagatggatatataaaagtctaaaaaaggagagggagatttactacttgtctgtgattgtatgggagcaaagaatatataacaaacaattgctacttatgcaattttgatatctgttttataacagctgcatacaatgaaaaatagataagataataaattaaaaaaaaaaaaaaagtgatattttgcaatattactaacattgacagatggatatatagaagtctaaaaaaggagagggagatttactacttgtctgtgatcgtatgtgagcaaagaatatgtaacaaacgattactacttatgcaattttgatactctgccacttcacagtacagaacatataaatatcatcatcacttacctttgtgccgaacgtaaacactaaatattatgcattagtggtcctgaattcctcatattgtactaaactttagaaaaccaataatgttatatatatttatgtatatatcaaattattactattccaactaacaaattaacaaaaatccaatcatttaattaacccaaatacatgtttgatattgaaataaaaaatcataaattacccacacaacaataaaggaaagaaaatttataaatagaaggataatcaggtataaaaaaagacatgtacatgtaatacatatatataaagaggtgcgaattcttttttggattgaaaaaaaagaaaaaagtaatgtagtacacagtaataa

SEQ ID NO: 316457 - DNA, 1974 bp, Cannabis indica
taaacaataccaaaataaaaaaaaatgacaacataccatttaatcttgcagtataatattttatgcaaaaaatattcatccattaagcaaatctgaaaaaaaaaaaaaaaaatcaataacagatcaaagattaaaaaaaatatacaaaatattaacccaagatctaaccacctgaaaaaaaaaattgaactatgaacatagagatgtgcgagagagatctgttggagagagcgagagaaatagtgattcagggcttcaggttcaactttgttcacttctctccgagagagatatagaccatcaacgtcggtgatggcctgagcttcgggtcttcagtgggcaccgcacgagcgaagaaaaagggaaagagagatcttgtgagcgagaaatttcgatgacagcctgagctccgatctacagtgggcattgcacgaatgaagaagaaagggaagagagatcttgtgagcgagaatctggtgatggcttgaactctggaatttagttggcatcgcacgaacgaagaagaaggggaaggctgatctggtgagcgagagaaaaaggggaagagagaaagagggaggctgagtagttttgatatgtgggtagggattttaattttggttttatattattagggtagggttttgaaatgggcctttttagttgggcttttttgttctaaattaatgcattgtaagtgtcagtttataactgagacaaaaggatcttttagtctcggttataaactgacacttatgctcaatctatatgtatatattttcttaaaagtttttttggtcttagttataattttagtgtcagtctactatacgacactaaaagtcattatgggtgtcaattataaattgagaccaaagatttagggttttctttagtgttgggttttacaaaaaatgtcattcgaactgacactaaaagtctattttgtagtagagtccagaagcatcaccaccatctttacccgactcatcaccatcatcagaatcagtatcaatattctctggatcagggtaattctttgtcatcattttcgtcatcatcatcatcatcaaagtcttgggtgacaaattcatcagatgacttaacctggttcaaaaatagtattgcaactgaaataaaataggataacaactaacaataacaggagaaaaaaatatgaaacaaaaactgtgaaaataaatacctcaactaaaggtcgaccatgaatgacattaactttttcttgaatatccttaattacagtcatgacagacttgaaattaaggtcaacaaaacacctcaaagaaataaaatctttggccaaggattcttgattggaaatgaccaactccaacttagatttcaacatttctatgtcctctaaatcagactttttagaagatgaaccactctcgaatgtttgcttagtggtaccacgatcatcaataaattcatctaaaaataagccttccaattgcaacttctgcctctcctcatcagatggacaaatgttcttaatcttcaactgaaaaacagaaacaaaaaacaaaacatgaaacaaaaaaaataaaaaaaacaaacattaataaactggcacaaaacaaagataaaacagtaaagaaactgaaaatcaccttgttcaacgacaaaccaaaaatcttgcctttcaagtctctaaaagttggattttcggtcccaacatcattggtccaatttcaaattcttagaatcctagatgaaactcttttgcaaaaggtgtttaccatcacaggacaacattcataaaaccaaactatgaacacccaaggacaacccaacactctgtaccaaccatcgtaggacttacctcccttctcctctttattttttattttaataccatgctctattctgcctttaaaagaatcaatagtcaactcaaacgactccctaccccacaatactcatcccatcgaccgctatcaacgacatcta

SEQ ID NO: 316458 - DNA, 1671 bp, Cannabis indica
cgcctatggtagttagggtgttacaacaagtttgaagacctcaaccattggcatacatccacaaatcttaacaggagtggcagcactagacctggaagcagtaaataaactatagaattatcataaagtaaaagaagcccaagaaattatcatcttcaacctcataattttgcatataatgtacggtgttaactcgaaaacttttcctagtgacatggacattaatatttgccatgtggcaagaaggatggcatcacaaaatttagtagacccgagttataacagtcgacttgggatgggaccctagccctgtggccaggttgacttcgggagctcatcaaaggcctgagagttgaaattacatatgaatctgcaactcggaagccaacctgggcacctagggtttcacctggtgcccaggttgacattctcaactagagttttagtttttgggaccttcttagtgtaaaaggatcaaaacttgcattggaaaatcaactagacgtaccacagacatatttgaggcatcagaattagaatcaaagcaaattcatttttgagtactcggggcctagagcatccaatgcccaggttgaaagtctgtcaatctgggaaccttccaagtatcagatcacaaattcaaccttttcatcttctttgtcttcataaaaaacagggaaataagtcttttagagaagaaacaacacttcctaggtgccaaagacgaggcccatcgtcaaggttgacacctagggttggcttagcgcctaggttgacattttgtcaacgtgagcccttttcgatgatattttttaagaactctttcaagcatcttctctaattttacaaaatattgagattcaacaatttttgaggactaaacagatttttttgagggccgaaactgggacccagtgcccaggttgatgtattgtcaaactgggctattttcgatcaagttcatcaaaaagtgttccaggtattttttctattataaaaaataatgaagattcaagcaaacacgaggagaaaatcacaaaatcaagcccctgtaaatgggtagattctagtccatatttctgagttaatattttggtactttcattgaaagccacaactcaagaaagttactagcaagatggttgtaacattctctacaagtgttgacagaggaatcccaacaactggccaagcaactaggggcatgccagttgatggagttagaaccaggactactcttgtgccccaggtgccaggagcaagcctcgaaactgactccttaacttttcctccaagtccatcatcaaacactcttgggactgacactaatgaccagatcccacttagagagcatgaagtggagattgaagactctaaggaggccgatatttaggtcgcttagctcaaccaaactatggcgacttgcaataaaaactgcgagactctctcgataagcagcatgaatagtttcaacattggttcgtggaaaactagaagaacattaaaagtcaacatattgagcaggaacaacgaagagttaacctgtctcaatgaattatggaagattttcactctaatcaaagaactacttctcgtagaagttttttcgagttggtgagagagattcctcatcaaccaattggtcacgtgggaactagtgctcaaggaaaa

SEQ ID NO: 316459 - DNA, 2652 bp, Cannabis indica
ttttttttttttttgttagaaaggtgtaagctgtttaataatgtggcgcatgcaaaatattttaaaatttgtgaaagtgatgaaagtgctgaataaggcagcacttggaaagattatatatataattgaaaggaaaaaaagaaatattatattgtacacgtacgtatgattagtcatcttattattgtgggaagtaacatttcacttgtattataaaattcaagggagtgtgcataccacacactagagcttgtggctctctagtctctgctaattaattaatgataatttattaccaattaaatgactaaaagagaactgatccattgaatgtatattaaaattctgtataaaaaatgtttaggtttgattgattttagattctaatatatattatttcttaaacaaaggccaagctggtaatgatatgttttggggaaggtcatacctgcatgataatctaagaaagaaggttagctgcccagctgcccttacttatctccatctaagtccgctaccagttccacaccaatgtgtttggaatattttggtgcataattgtcatatactccggaactaaaccgaaactaaacattgagggaaaaaaaaaaaaataataacaaaaaaattttgagggggcaaaataaaaaagttaatttgttataatttatgtcctaaaagtaaataattaataaaaaataatattaaaaaatatatgaaatacaattatgaaataaattaatattaataaatatttaaaaaattccttattcatattgttatcctaatttttacactctgacgtggcatcgcataaaggtgacatgtggaatcaacttcgagtatctactcggagagtatagcccgagcaggatgcctcgctggcatacttgaagcaaaccgatcagcgatccgcgcagaggaatcaacacttagcgaattcagctttcgcattatgagtcatcaacgaaatcccaataactcggggatcagattacagggatatggcatacacacgatcccacgatcagtgtattctgcgtcaatcccacgatctttgtactcagcattaatcccacgatcttttctgtttatatccattgtaacgagaagggaaacacttcctctccaagtttacagccctataaatagtgatacatgttcactgggcaaagggtcgcaaacagtttagtcgagaccttaccctaaatatattatctaagaattcttattcagagatactgttgtaagagctataagaaaaggaacctttctccttgttcttgagtcaatacaaataacgaggattaggctattaccgaactgctcggggctgaacctctataaaattcttgtgtctttatatttgttttactatatatcgattgctataaatcacttatcgcttactaaataagactcattgtcgttggctaaaagcgaggtcaacattttggtgctttcattgagagaaggatcaagaatcgctcctcattcaaaatctaaccacgaatacgatggtggtgcatactcgtaagggtcagggggatccagccaatccacagacggtggatcctacatcgcagaacccaggaaacacaaaggttttgccagctgttaatcctggacagccggtaaacgtgggtcacagtactataacaactgctatagatgaaatcaccagggcattcataacacaaccgttcaacccggtaccaacgttcaaacaaccattggagatgctactgagttacaaaatctccgtgacgctcttggactcatgcagggtcataacaataccctacatcatgatcaggaagaactccgcgctgccgtaaatctcgcgttcgaagaacaaaggcatatgtttgctgagtggagagatagagagatggaggcattaagggctcatcatacagattgaaaatcgtagtcggcaagctactatgctgatacgaaaggcctaccaaactgtaggtcagcaacctccgaatgtcattcccctaggtgagacggacgaagatccaacgatgaatacttcccagactgcaaatggtcagccgcccaatccccggtcacgagttccacttgtgggcgaagcggtaggcggacagaccttgtctagtaattcatcgggagagatcatacctgatggttccaaccagatcaatggtgccatcccacccgtcaaccaagaaaataaatcgctgaggcagcctggcgcttctgtattcgaaaggttgggaacaactcttgacctaaggaatgatctgaatagaaggagaggagtagacgattaaaatgtcacaacgaccgttcagcctggagcctgtgctcaaattcccgctcaaaaagatgcagacgtgattcaaattgaccagaatgccaagcaagttagcccagtcgtacaggcacaactagacgagctaaaaaatatgttctatggcatggctggacagagaaacaatgatattgagttagacaaagcacgtggcacaccaatctctcccgagatcaatctcctggcgctgccccacaagtttaaaatgccaacatggaagatgtacacagggagagaagatcctctctcccacctcaagtatttcgaaatacaaatggatttgcaagaagtacgaggggatgtgtgttgca

SEQ ID NO: 316460 - DNA, 450 bp, Cannabis indica
tattgaaattagttttatttaggtcataaaacccaacactaatgaagattactatttcactgttgtttatgggagcagtatgataacttaaagagaatatctttggtaaaggttagctgatttacatatgccactgaaactttggctaatttgtgggcactttaacactctgtttcatcacggtgatagaattagagggaaaccagtatcatttggggaaatttttgaaggcaataagtactggatgcctttgggcctcgcagatgagatgaagtgaaatagatctcattacacatggataaataaacatcagaatagagtaagaatctactcatagattgattgggtttttaaagatgaagaatgggttaatcttcatccaaacacataagctcattttcagtgggaagacatctcatatcactgttatgcaattgagtgggagcgcta

SEQ ID NO: 316461 - DNA, 755 bp, Cannabis indica
gtctaacgtattatattttacaattttgctcacatactgggaccccagacttcggacctcagacctagaccttgtaatcagacccggaccttagtccaggtctcgcagtacttggcctgggtctaggtctagggctgggtccgagtttagggtctaggactgagtttggggttcgaatcctgatttaggttcgagtttgagttcaagtctcggtcagggttcgggtctacgtctggggttaggtctggggaaaataggttcatgtcgtggctatgttttcagtgttttgagtttttagatatgcactttcaaaagtccaggtttaggttcgagtttgagttcaagtctcactccgggttcggtctgggaaaaatgggttcatgtcatggctgtgttttcagtgttttgagtttttagattttcattttcaaaagtgagaataataaacagtttttgtgattttaaaaattttaatggtgttttgcacaagtttttaaaaattatttttagatttttttcttaataaaaaaaattcaatattctacacaccataccatgaacccatcctgccccggacccaaccctaacctagacccgaatcatagacccagaccccgaccttgaaccccgaacccgaaccccaaaccaagaccctgaatctaaaactcgggactaggttaaggtccttggtcgggtccaggttcatagttgagtctgagttgttgggttttatgccctaaataaaactcatttca

SEQ ID NO: 316462 - DNA, 796 bp, Cannabis indica
aaatctcactataacaatgattataacattcaggctaatcatgaccatttctaactgtgactaagtaggacaacctaattgaaatttaaaattgtatgaactctgccctttagtgtctcatgcatgtttgttttttactactttcaaaaaggtacaccaccaccttttactgtaaatgcaaccaaatgcagcaaacacattcataaaaattaaactgaatcaacaaatgcagcaataaattgttgtcaatttgtgtgcggctttttataaaactatcttaaaaaaataattcaatttttcaacctcataaaaattacacttaatcaagcaaatcttttttcttttactaacactaacagtgtagttaaaataacatttttaaaatcgacattgctgataacatataatttgtcaaacaaatttttcacttaatttcgtttgtccttagtttatacccatttcatacattactcaaagttattaattaacctactaaaatgacatacttcaagtaataatctatgtaagaaacaaagatcacaaccaagttagatgatgtgaatctcactcaccaagaaattcataaattaatctttcacaaaattatgacacttgaaaacggaagcatagagtatgaatcactgttgtgtatcaatctttttcaaaacagattttttaaatttcttaaccttaataattattaactatttttataaacaaaatcctaatcattcgtttccacaaatggagcaacaaatatagatgacaaacagaattttaaatatacaaattgaca

SEQ ID NO: 316463 - DNA, 553 bp, Cannabis indica
tttttttatttattatttttttatgcaaaagaaaactcaagacaaaataatggtatagtataggtatgtttatcccgattggataacattggccatattgagcatctataacaacattccaactgataatgagatattctcaaaaaaaaaaaaaaattgattttgagataattcttggcaatcgccaatatttattaggtgttttcgctttataaaaaaaaaaaaaagaaagaaagagatgataataataaattaaaacaaacaaatgaattgtaatctattttctcttgttcttgtcaggggatcttttgtccccctcatatttgttcatcctgtgtgcagaaggtttttcggctctccttcgaaagtatgagaatcagggctggttgcatggatgcaaagtagctaacagggcccctcttatctcacatatactctttgcagatgacagctacttgtactgtaaagctacttatgaggaaacactcctaatcaaagaagtacttcaaaagtttgaattggcttcgggtcagagtagttaattttgcaaagt

SEQ ID NO: 316464 - DNA, 1928 bp, Cannabis indica
aatccagatagttgtaggatcttgttcacacacccctgctgcatattactgcagtagatagcagttttactagcattgggctacaaacccgaggtaagggagaaaagctttagtgcatgtaacatgtacaacacacttgtgaagtctccctaacggaatagtaacacatcatcagcaaaagctagatgattcagtttgagaccaaagcacctgtcatgaaagtgaaagtcttctttctcaccaatcttccgcattagcctagagaagtattccatacccaatacaaacaatagaggggacataggatccccttgcctaagccctctcttagattcaaagaaaccatgtaaggttccattgaacataagagagaacttatgagtagtaatgcagttcattattagatgtatgaaacttcttagggaatttgaagcatgttagaacttcctccaggaactcccactcaatggtgtcataggctttttggaggtcgagtttgatcatacaacttggcttgtttgctttcctgcaatagtgtcttaccaaatcttggtatatcattatgttgtgccctataaatcttcctttaataaaacccccttgggaatgggatattatctcaggaagaatgttactgattctagagctcaatagcttggttgtaatcttataaataacattgcaacaagctattggtctaaaatccttaatagagcatttgcactttggaaccagggtaataatcgtaaaattaatctccttaagaatattacctaattccaagaaagatagcacatcaccattgatgtcctcccctataatctcccaattgtcttgaaagaagctacttgagaacccatcaggaactggggatttgtttccagggatgctaagagcagctttcttcatttcttcaatggtgaacttctgaataaggccatttgcttgttctgttgttaatacaagacctcttgccattataccagcatctgtcttccttctcttctctaatttggaaccaagcagccccttgtagaactccaaaaaggcctctgttatcaaagcagggtcatgaaccctgctcccatcctgtatctcaatggatatgatacgattttgtctcagtctttgtttgatacaagcatggaatagggtagtattacaatccccattttgaatccaggcagctttagctttctgctgcaagaaagatgtgtagtctccttgcactttgattaacttgtctctaagctctttttcctgcaggtgcaagttaggatcaagaggctattgatgaatttggctctgtagcaggtccaagtccaacttaaccctggtgacagaattttgtagataagaaaatccctctttattaatctccttgagtctgagtttaaattgttttatcttagtgactacttgaaacatttttgtacccactacaggttgtttccaaacttccctcagataggtgtcatacctaggatgtgttctccacatcttaaagtatttgaaaggcttctttccacttactaaaccaggatagagagttaaaataccaggtgtgtatggtcaaataggccttcattgagaaaaacaacttgagcaagttcatatttattgatccatgcttgagtggccattatcctatctatcttctccatgttgtttatttgtccaagtgaaaaagttcccacttgctttaacatcctccaactgacagagatttacacattgctgaaactctgtatcaggatatgttttaactctatgtccaatcctctcttccttggctaagatatcattgaagtcccccattagcagtcagttcacattcgttctcagatcacataagtctttccataatatattagagattttattacaatgaaagaaaattaagacattacaactctattgcaatataa

SEQ ID NO: 316465 - DNA, 961 bp, Cannabis indica
tccaccaaaatctaacttccaaaataaaattgaaagagaagggccaaattgaagtatagaaatgaaagtttaattttgttggaacaagtaaaaattctatttattttattatatttactacgtgacaatttaattgggaatggaatcttagtcactatccaacacaatttaatatcaaatataaattatcatatttgataaatacggcaataaaatgtttttgctaatttctgccattttatccattccaaagtttgagtgatcaactctcaatatgtgtttatctcaaaaaaaaaaaaaaaaagtcagaatatgtggacattaatatttagggcaatttttacaaatatgtgcacataaattgtctttattaatttttttttaagaattattacataaaaaatgtatatttataatttatttataaaaatacttctataaggtctggacaagtttacacattttatgtgattttaattaccaaaatatctcttacactatcacttacacaatcagacaatagttgcagggtggttgctgcgcgcgtggttgcgcaatggttcagacgatggttagggtggttggctaaaggttgcatcagacgaaagtttctgagtggttgctgggtggttggctgaaggttgcatcagacgaaggtttcaatcggacgaaataactgttagcaaaatgtttatatgcaactgttatgaaacattaaaaattacaacagtatattcacgtacgtaactctatctacatgtctctttatgatttaatatgaacagattcaccattagaaatttgaaaaacaacgaaaatacaccaagataaacattttactatagtattgatgtatttttttattattattatacttgagttggattgtttgagaactccagttcaacttgttgaaatctgtctttcatggatctgaaaaattaaagtcaggacattaatt

SEQ ID NO: 316466 - DNA, 1880 bp, Cannabis indica
gcaaggtgtacggtattctggcggcccaaatccttcttaccacggtggtgtccgccatcaccgttctgtactcgcctgtcaatgatctccttaggagcagccctggccttcttctcttcctcgccatctttcccctcatctgtatgtatctccttcctaggctttctctacacaccataattgctattattattattatcggtctattcgattgttgacttgtcttttttatttataattatccctatattaatctaacaccgttttaaattatgtatagatagatacatattgttcttgttgattgctgattgctgatcatgtttgtgaaatatatcgaattaggtttttttttatttcatctttgccttttctgattcgttaggatttggaacataattagattcttgatcatgtcactgggctgttgataaattgattgagtgggttgttagtaactggtggagaagaaaaaatgtattattaaaccgtcgtatatggtgatcattgaatattaaaagcttaagatttactcatttctttgtgatggagatataggcctggttccccattttcttgattgtgatattgataacttatcaaaagtttatacgttgtggtttgtgtgcagtattgtggccattatatgtctaccagcaaaaacatcctctgaacttcatcttccttggactttttactctgtcacttagtctaacagttggtgttagctgcgcgaacacagatggttggtacacatacttttgattggaaatctaggctttatgtcatttttctttttcttgagtcctatgatttggctcattgatgtgtcttctaacatgcttagtttcgagtgtttattaattgcaggaaaaattgtacttgaagcattgattttaacctcagctgttgttacatccttgactggatacaccttctgggcttccaagaagggcaaggacttcagcttcttaggaccagtcttattcactggtctcataattcttgttctatctagttttatccaggtcagatcagatacataattttacataggaaactcaatcattcatgagtgtatttgtgcacgttcataatatctctttgtatacttgatctgactttgtaaaacttttgctggtttttttaggcattcttcccactcgggtcaacatctgttgctatatatggtgcggttggtgcaattattttctcgggctatattgtctacgacactcaaaatttgatcaagcgcttcacatacgatgagtacatttgggctgccatcactctttacctggatatcctaaacttgtttcttacaatattgcggatgctgaagcaatctgagggttagtttttctgtgaacataatagtacacatgaatttggcctttcttctgaaaggtggtacttaacgatacaaatgtcaaatgtttaaatgttttgttgcacttcttatcttttacatttgactgaaatgtcactagttacgaatttgtcagtacttctatcctttttcgtttgtgtcaagattgtttaaaagttgaataatgtttagatgaattgttataatgttcatattttggtgactcattacatcaagtgaatgttttttcttatataattttgtaaagttcccgaatctttttgtaacaataactgataatgtgctcaattaggaatgttgttggatcttgttgtgtggatttttataacaataatgttctctcaattaggaatgttgtgtggattttgtgtgggggtatgcctgtgtttttcgcattgttaggagttctaatcaaaattgacttgatattcgagaaacaagaaatgggaagaccaaaataatagaaaaagaaaaaaaaaatcagtggaaa

SEQ ID NO: 316467 - DNA, 1175 bp, Cannabis indica
gtttgaagcttgtacttttgaaaataatcaatattatgaatctaaatattataatataattgctacaaaaaatattataatataatttatttattttgacacacatttttaataattttcttttgtagtacctaacttatctaggtttctctttcaagcatatttcatttcaaaaaatagttgtgtttttaatagctaacactttgttccattcactcatgcataaactagaaatataagttgtgtttttgaggattatatcgaccacattttattccattcatacctaaaatttaaatattaattgtaagtgtagacaaaataaaaataaaaaaaaaaatgaattataaatgtcatatttggagacccatctcggacaataatcactctcattattgtaaatcctcaatttaaaatataaacaactatacaagataatctaaatatataaagttagtaaattgtaagtattaatttataaagtcataagtaaatatataaattatgattatagaatctattcaaagggtggatagaaatactcttattcacactatatatttttgaaatagaataattttttattaatcaaacaagcttcaattattataatagataaaatttaatagagcaatattcttattaaaaacacacgatctgaataaaataaaggccacgagcaacataataaacagttttatttacaaaatatttaacaaaacaaatcttaacaaaatttaaaatttttaacataagatgacaatcactagctaattgtccataatgagaagggataaaaatagaactaagcgctgaaccgcaactaaacaatccaattcaaactgaatatcttgccaattcttctttttgatctaacttaaaactttcttaataccaatcatctcaccaaaagaagcctccacatgaccaacaaaacacaaccaaaaaaatttacacaaataaataaaaataatatcataccataaaatttttacacaaatttggacacatatatatggaaataccattgatagttactgaataaatttaattataaaatattaattttaaaaatattaaatcattagattttgatcaaatgataaacaataaaacaaaattttaaatttttaattgcttaatttaactatttaattaagaaaatataaaaaaaa

SEQ ID NO: 316468 - DNA, 1477 bp, Cannabis indica
aaacattccatcaatcgatctcttgcaaaattcaatttctccccaagtttagtatgcctccaccaccttaattatatatatttatataacaaatcacttcatcagtataaataaatttaatccaaaaaaaaaaacccttcatttaattatgatatcattatcatcatcacctgaatatatgttttagatcgtcatgatgtgttgattgtatcatgttgaaatcgagtttagcaaactcaagcaaaataggattcatgtcttgttttttctcatacgcgtcgatgaaccacttagcttctgttcttgtagtcctccaatgaagtgggagctccaaagcgtgattcactatttcgatatcataatcataatcattatcattatcaatcattaactttctttcttgtgatatcattataatgtagttctttagatattgagttgtgaaaattctaacttcttctaaaatactttcgccttttttctcatagaatgaagcttcatataaggccaatacttccataatatcatcactaatcatgttcgttttgatttttcctatctcgtccttaaaatgattaaaaatctctgcaaataacacatgatcggatgaataatttggttaatttattaaactaaatcgaacgaatgttaattaatttataaaaaatgtataattctcaataaaaactgtaaatgattaattcccaaatctttgaaaattccaatttttttcatttgaggtacattgcaattttttttttttttttgttaaacaatccttcaatatatatagtaggatttgtttagtaggccgtataagggttgtattgtattagataataaataacactatgtttgaataatacaatacattgtattaattattatgaccaaattttttaatacaatgtaagttataatatttaatatataataaatggtatgtattagcttgtattataatatttacaaatgatataggatcaatcctaatttccgacccggatccaaggatcgaaacccgagacacaaattcaaacccagaccaggacttgggacccaaacccgggacttagacctaggacttgggatccaaattctgactaagatctagctagggacccgggatgcagaccgaatttggaccaggacctgagaatcagacactagactcgaccccaaacccaagactcaggacccaaggctcggacttggatctggacttgatacttgggacccagacccggactcgggatctagagttggaccaagaccagggacttggaacgcagacccgagactaaggacctggccccaaacgcgagccctagatcggacccggaccacagaccacggggcccgacccaaactcgggaccccgggctcggactccgaacctggagctggaccctaaatcgggacccaacccgagacctagactcggacgacagaccggacccgactcgtagtcagtgtt

SEQ ID NO: 316469 - DNA, 599 bp, Cannabis indica
ctagtctagacgttctcccctctaactttgaaagaagagtgtggagacaatccgtctcgtctttgagctcattgacctctttagacaaggcatcattgtctgcctccaactgggcagttgatggcatctcttgcgtctcctttgtcagctcttcaactcgcttattggcagtaaggagcctcttgttcacctctccgagctcgtttcgcacatcttcaacctccttcttacccgcatccgcctccctttacaaggtgttagtggtagcaaggttctttgccgctgtggacttggcttgggaataagtgtaggccatcttcaagttgacctgcacaggaaaaaagttaaaacttgaactggcaaaaaggcaaaacaaaagtaaagaatgaaacacttacccgagcagcctccttcaggactccacccatcaccagttctagggacagctcattgtccgccccggatagctgatcactcacttcaggaagtgaccgatgcagataatacaggagcatgtctttaccctttttggcctccatgctcaacaccacagtagttgaagaagtcttagtctgacgagacccatctgagatcccccc

SEQ ID NO: 316470 - DNA, 2166 bp, Cannabis indica
ttctacattactaaaaaaaaaaaaaaaaaaagaagacgtggaaaaaagaggactagaaagtcaaaaatcaaaatctaatgcaagaggcttagactacgttggcagttgggcaggaataaattatctgccaaatgacagatgaacctcatttactacatccaaacgtgacagttgggtcactatataatatatatatacacattaattattgttacaatttttaatttaacttagccctaatataaatattgccactccttttgttgcaccactactactactactactatgtacttgttcacacctagtgatcagttcatatatctcaaaaccatatagtgttcttctcataaaacgagctagaatgagggttgttgttgtttcatatttcttgtgcatttttcttgtttgtggcttaatattagttgtagccgatgataataataataataataacaaggttgatcatgataaagaggataagcatttgttccctcgtccactttttattaagcctcgtccattgagaccacgtttgaaacctcctcttcttcacaaaccttttaggcatggaattggcggcgggcttggcggcggcggcggatttggtgggggtggtggtttaggtggtggaggtggacttggtggtggtggtggtcttggggaggtggtggacttgggggtggtggtgggcttggtggaggtggtgggcttgggggtggaggtgggcttggtggaggtggtgggcttgggggtggaggtggtttgggacatggtggtgggcttggtaaaggaggtgggcttggtggaggtggtggtttgggacatggtggtgggcttggtaaaggaggtggccttggtggaggtggtggtttagggcatggtggtgggcttggtgggggtggtgggctaggtggtggtagtgggcttggtggaggtggtgggcttggaggaggacatggtggtgggcttggaggtggtggtgggattggaggaggacatggtggtgggcttggaggtggaggtgggctaggtggtggcggcgggcttggtgggggtggtgggataggcggtggcggtggtgcaggtgggggtggaggatttggtggtggtgttggaggaggtggtggttttggtggcggtggaggatttggagctggaggaggtgttggtggtgggggtggttttggtggtggaggtggtattggtggtggtggtggtattggtggtggtggccactgatgttaatatttatatataaattatatttatatatagtcttttaggttcattctttaattatctacttattgaacctatatatatatatagcttgtttattattagtagtagttattatagagctcaaatatgcatgcatgcaatatatatatattggtgagaagtgatcactttttcaatgtcaagatctgtccttttgaattttagggaacatttttagtgttcctctcctacctagctacaatggcattgtactgtaaacttgttatgttctcattactactataaataatattgtttgttattattctatggttttcttctcttcttttcgttttgataatctcatacaatattcaaaatgctttataagtttaacatgcacgtatatattttacttttatgcatgtacctttttttaccacttatatgttcatcgaattacatctaatttttagacctatcaaattatatattcgatattaagttttactttaaaatttgatccaattaattttatttgtctgattgatctaatgtctaattagattggtgttctatctaataaatatattttatctatagtaaatctattgcattgattcaactttatttaatattttagatctaatattttttaaattagatgtgattcatctaattttttagatttattatttattcaaatgtaatccaaaaaaaataaaaaagttaaattctgattttcatataaataaatatattttaagtataataacatgaaatttaattattcatctaaaataatttaaaatactaatgaattagattagatattggatgtattgaatttttcgtagaaccaaagctatttttgctcaccaatctggaatcgtacttactctataagtagtgtctatttgcttcgcttatatttttattttg

SEQ ID NO: 316471 - DNA, 606 bp, Cannabis indica
gagagctaaagaaagtagtgatatcgttcaagattacgttcagtaactatggtactcacccgaaccaaatctaattttcacttcactgatcctataaagggtaattttgatcccaatgctaagatgggagatgcaaaatatccaactgatgcaactagttgccacaagaaggatcaaactaacaaggactctattcctgaagatcgtataaaagaaggcaatgaattaaaggagactgattatgctcatcctaatgataataatcaagacatgcatgttgatgatgatgttgaaaaggaaggtgatccagatgagtcagatcctgtggtcaccatggccaggaagttgaaagaaactgaagataaattatcgttgcaagagcaattttctttgttgatgcatgaaaaaatggagagaatggaagctgtgattaaagcactaactactgccaataaagctaaccatattgctccatcaaataacactactgggaaagttgatcccaaaaatcctggaacctatgatactcataatgaaaaaaggaaaggaaaagtaggcaaaacttcaaagaaggttgcccatgctgaacaacaaaagaaatctaaa

SEQ ID NO: 316472 - DNA, 1480 bp, Cannabis indica
ttttagggcccaattcgcagcccaatcatacagtccacgtgtagaattgcacagaaaatcctgcaggccttctcttagctagccagacacctacagggagcaggttgcccggcagcttctgtgaagaagctggtctgtcatttgaggcttgtttgagtgtcgggtccccgtttactaaggtaatgacttggccttcttgttggtgagctgtactgccatgtgacaataattttttccacgtaaacactaccacatcaggtgagaaaaatcaagataacatttagcatgtttggcttgatggaaagaaagattctaatggaatcattattaccattacattgtttattttaacttttatagcttcgtaatgactttacattgtaatggccatcacatcatatattgtagttcccattacattataaaaccaatgtaattgtaattacatagttaggaaagacatattttacccttcttttttacttttatttaaatttaaatattaaaattaataaaattaagaatacttttgtcaatatacttcttactttatttgataacaattttcattacagtgttaaaccaaacatcataatacaatttatattacaattcttattccattacattgccattaccattcttattacattacattacatcaaaacaaacatcaccttacatctaaccatctaatatttactaccactagaatacaaacttacttcagctacaaccttaagtacaacaatacagcagtgatggtacatatccccacctaaaccaacatagaaaaattacaaaatatcctgtacttttaggtggcgtttcattgagagaaatgaaaatataagaataagaatgagaatgagaataaaatttaaaatacataaaagaaaatgataaaaaaatcattaatttttttctcatgttacattgaaatgatctttctttccgttttaaaatggaataattattccaccaaaatagtggaaaagacatttcattggaatgcattctaatactttaaaatgcaaccaaataaaaaaataaaataaaaattgtttcctttaccttccatctatatcattacctccaaccaaacctcaccgctgcatatcagccccgttattcacaccttgcagaatctacctcttcattgttccacctcaatgcggttacaagaattaccgattataagaggtaaacttctctacctccaatccaactaaccttccacccaattaccttatgccacgtcaacaacaaaagggaacccttacaacactaagtggtggacagtacagaagaaaaaggaattctaaaagagaaatagtagtgaatgaccctttatccttttttagtggaacttaatgtccctttttaaaaataatatagcatataacctttattattttttagtacctaaaataccctagttatataagggattattaacattatattaattctccaaata

SEQ ID NO: 316473 - DNA, 1653 bp, Cannabis indica
aactagatttatttgtcaattttatcaataaatatatttatttctgagtttacaaagttgaacaaaactacattggcatttgaatcataggggctatatgttagacatttattataataggaagcatatataatcatgtataaaatgctgaattaaatgaatatatacacaatttaactataggattgaaataccttagttattgattatttgagcttcaatcttacacgaattttagatttgtaaaaataaaagactaattagtgtgagtaatcagacaatcgggtctaaaatcgatttttagaactaaaaccactgtaatatttttggtctccaatcaagtcttcaggtcgtcgaacttaaaaatatttttatttcacaaataacttacattatatccacatatttaaaataaatatccgtaattaacaaattacacttatttatttattagcaaattttataatttaggataaattaagttagcaagatcataatcctacttatcactacctaattcatccataatacataataaactataattattcataattagatttatgagatattacaaatctcaagcgaatggaatcgtcattaactccattcatcttaaatgtcttacaaaattccataaaattagctaaatacatatttgagtcttctgaaggtagcccccaaactggattgttgattgaaccatctgaagaatagatgacttgatttcaaaattatctgtatcaacaatgggtggtcttatataagattggacccctatcattgtgggtaacacataattcttcaagcttctaccaggtgggttatgggcattatcctggtctactgcactctcattattcccattatgagtcgtgacttcttctagcctaacccctccagaagcagctatttctaacctctcattttttccattctttttaaaagtcttttctatcaagatcaacaagcactcttgcggttgtttcttgacgttgcataaactagttgttcctgaaaagagaaatatttacccaaataaagttagtttaaaggtgaaaaaaaaaactaaaattagaataaaatttaattattttaatattaactataaacagtccccaacaatggtgtcaaaaacttgttgtgagaattctagtacgaaagtatatgtggtcgaatcaagtaatataatgataaataaagtatcgttcccacaaggactgtaattaattaccaaacaattaaattcttaaattatatttagtgaaaacaaaaataaagaaagaaggtttaaattctactgaaaaagaaaataaataattaaatacaattaacaatgatcaaaccttacggtgattaatttcgattgaatctactttttatagtttactataatttaattccaaattctaatttacatgtgatagtagatttacaaaaaaacttatattcaggttaggacatataattctcaacctatatgcaaatttttcacgatttcgtgataaatttaaatgtatagaagacattaagcatgaaaattctaaatgttactgttgaccgaagttttcggcaaccaatcaaataataataatttagagagctgtaagaaattaagagagagatttttttacgtggttgaggcgttaatga

SEQ ID NO: 316474 - DNA, 958 bp, Cannabis indica
tcataactatagtagcatgatgacaatatggaaagcccttagacggcatccaagaagaatacatatcccaaaataatattacaagttcaatgacaagtaacaacattaatttttttgttaaaaaaaaaagtgttaatataaaaatatattagttttatcatcaatccaattataaggagacaatatcatttttttttaatcttgtacttcatctcatttgagtccatttgtaacaaacatctctagtactatcatgtatgaattaagagatgcgaaccttctcacttattgtttagctagcttattacatggctttttatactaaagcatcttctaggtagaatgtgaatatttcctcttaattaacttgcctattcagttataattgtttgttggtgctgaatggattttcctttaaaaaaaaatatcatgaatgaattaagagctttcttattaagatattattaaccttttttttatgttttttatttatttatggaagcttattaatatttactgacgttaaatttttaaaatggttgaactggagacacaagatattactgatttttctttccccattagataatgtacaaatgactaattttgttgccttatcaagtagtagtatctatatactctgtagcattttgaagaatgcttgatgaggtgaacaatttaagtacaaaatatagagatgttatactattaaaaaaaaatgctagtattgaaatttgtattgatgtcacattgcggcattgatcctataattttatatatatattattagttgttgcccttaattttgcccaaaatacgtggaccaatatgactacgacacgtggatctaaagggcgtaactcttagatcaatcgactaagtctcttagatcatgtatttcctattttgtatatgctggaaatatgtgcccctattgaaactacacaaaaagacaagt

SEQ ID NO: 316475 - DNA, 1885 bp, Cannabis indica
tgggggggggggggacattgatttgtggtgctcaccctggatccctaggctatcttgggatgattatgtggatgccttcaatccaagaattcgagatcctcagaaagttactctcaggtctctccttgattccaatggggttttgcgtggtgataccctgtgtagttggttcgtccctgaggtggctaatagattgggtaattttagatttttggaggacttatctagtgatgtcttggtctggagagattctcttgatgggaggtttttgattaaattggcatatcgtgtgttgatcaagttgagacttccgtcctcaattaagatttggaagaagatttggagggcctttgttcatcatcgaactaaatttttcctatggaaagttgctcgtaacatcctcccatgtggacaaagactttaggaggtcttggggtcttccctctactatgttttatgtggtgctgatgaggactctttgctgcatctttttttgcattgcttggtggctcaacagcgttatttgggtagcaattggggtattcgaagtggtatgctatccattagttccccccttgatctggtaaattggttttttgatccaggtatctctaatcatactctctccttcaatttctggcagtttttacattttgctactggtttgtgtgtggttttgtggtaggcccgaaataaggccttccatgaggggactccagcctatccttcggctttgctacatcaagtttcttatttggctagtgaggtcgaattatcttctgcattggctgcctctggccccgttcatgtcaatgcccccctcctggtgttgatttctctacttgtgagtttaatgtgttctgtgatgccactgtccatggagagattggtttttttgctgtggtggtgtttaacagtgaggaggttttgattgatgctttcacgactaaggcccatgtgactactcaccttgaagctaaggctctggcccttcaccatgttgtttctttttgtgccggtcgtggttgggcaaatgttgtgttttctcggattgctaggtccttgttaatgcagttttgaagaggatggtgcctaattggaagctgtctaatttgttcctttctctattttttggtttttttatcgaggggttgtttggtgttcattagatccctcacacagcaaatggggtggctcatcgccttgcaactcaggcgcctctttgaatgtttgttgtgtgttttctgtgggggaggttgcacccctgttgcaacagtgaaccttgttgtttggtgttttctgtttttcttcaataaagtttgtttcccaacaaaaaaaaaatataacttttttgtgactaaatatgatttttagtcacaacaaaatgttacttgtgactaaaatatagcctttagttacaagttgtcactaatttagttttagtcacaagtattttgactaaaaatacatttagttacaacaaattgtaatttttgtgactaatatttttggccagagacttttaattacaacataagaataataatttataatttgtcacaatattttttagtgataagtccaccatgatgatactactaatcgttttctagtttatatatgtataaatctagctaaacattcaatatatgtgtactatatatatatatatttgtacaaaagcacatgttaaattaaagaagttacttgaattgaccaggacaataatagtactctaattgatattttttgcttctttcttctcttcagttcgtagtgtggccaagattgctcggcataatagtatgcacctaaattttgtctagttaacaagtatccaatatatttttctgtaaatcaacaccataaccaaattgaaataaga

SEQ ID NO: 316476 - DNA, 643 bp, Cannabis indica
ttctaaatattggggtccacaaataaattaattcacaaataataataaaataataaaaattagtgctaattgcccttactaatccaaattactagagcggtcattacacaactggtcatagaagctattttacatgcataagaggagaactgagattcattcttggtgtctttcttcatcagaatttgaaaatctgcactacgaaaggtaaatttatgtattatttttcttttagatctattgtcgtgaacgagaataatctattctagttacggttgctagaattgaatttttttcatgaaaaattataaatttgtttttatgaagtttgtgtggttcatcattcccaccacactttcttgcgctgcattcacattatcataataaaaaacgaactgttggttctgttaattctaagtaggagtgtaaatggatcggatcgaatttaatctgactatgatccaactcaatccagatgatccgtcccaccccactagatcaaatacttggatcagattaaattcggctttacatattcagattaatgtatctaatccaacccgacttattcttttttatttttatttttattttttttaagtaattttagttttatattaattttaattttgtattagtatta

SEQ ID NO: 316477 - DNA, 621 bp, Cannabis indica
atatgaggtaaaaagacataaaaagtttaatattgtaaaggacaaattctgagtcatgtttcaattcaaaccaaaccaatccaatccaatcatcaacaaagtcatacaaccaccgagttcaactgtgtgagatatgtaatgtaagagagtgatcttttctttccaaaaaagaaaaagaaaaaaactaatgaaaaagaagatgctaataaaagtagataagaatttaaacttattatgcaaaggaatggggtattgggccatatatttagaaaatgaactaaaacccaacacattatattaaaaatttaatgtaagaaaaagataaacactattatggaccgactgtattttgcacaagttacgaattggactttattttccaaaatagtaccttgaactaaattttgtcaaaataaaatttaataataaactaatatagaggtattataacaaaactggttaccctttttatatctgtttgtactaaaaattgttttcaagttgattatattacaaataaaattgttgaaaattgaagattctactgatattattttagaaagggtaaatactattttggaccctctgttttgcaaaagttaccaattggaccctgtgttt

SEQ ID NO: 316478 - DNA, 1299 bp, Cannabis indica
tcaaatccacagaataaagaaaccaatcaatcactgcaattctctctaacagttagaaactaatagaatatgagaaatgattttaaaaaagaaaaatcatacaagaaacatacggagctgtagacactagaaatttcaaaaacctaacatctaaacccccttagatagaaatgcataaaaccctaagatttaactattggatcacatcaacaaaataagatatgcaaacacaaacaccttcaaaaacacaaagaaacaatgctttattttttaaaaacccaatcaattactcttcaagattacatcaccaacatatgtcactctcaaatttgaccaagatcacgaatatgtgtaagtgtaaatatacatgactgttggtggactgaagttgatagatttgaccaagaagacaacaagacaaaattaaattcaactcttgcacataaacttaatcaattattataataagcttaacagattcttacacattaataattaactagaaaatttgttagactaaaaatagagttggagagtagttcacttcagtccctatcatgattttgaatcaatgcaataacagaaaaactaaaacccattcacaaatatcgttacttgcagacattacaaggccgataaacaatgaaagagatccatacattgtccgataaggcttttaaagcgaaattagaagaaaagaaataaaacaaccttaccttacctgcgtggagggaaggtcctccggcgttgttgatctcgtctgtggcgaagactaggtaaggtcgatcctagggtaggggtagccccagtgagagagattgactgaatgagaattggggaagaaatttagaggtagaagagaagagaagagaagggtttgatattgtatgagctgtccttcattaaagtttttatttattaaataaaaaaaatataatccaatcaaataaaaggcttagaataaatgtttttggacacggaccccatagtaagagcactttattagaaaggtttataggagctttatttcggttggtttggacggtttatgatacattttatttaactcaatgtaatgatcgtgttacaaaaatttaagtgcactcggtacaatgaaattgatcgatttggtcgggttaacccgtctagaccgaccactaatattttttttatatatttaattgttatattttaatgggtaaataccattttggaccatctgttttgcaaaagttgccaattggatcctgtgttttgttaaatgacaaaatggatcctgtattttctaaatagtacaaa

SEQ ID NO: 316479 - DNA, 589 bp, Cannabis indica
aaaaaaaaaagaccaaaaaaaaacttagacagaaaaaaaattgaaatgtggatatatattattttatattaagtataaaagtatccgtattatttatattaaaaattatatcggtatcaatataaataattttagtattaagtatataattgaaagttctctttctttattatagtgatgtaaatcactatttgagttgtgttatctacattataaattatttataattttttaaaattaattaaatgtcttgtatatattacgtactataatatacatgatacatgcatcatcatataaaaagattttctagcttgacgaaaacaaaaacagctatccaagtcggaataaaattagtatcctcataaatttttctatatatttaataaaagagatcaataataaaaatattcatataaggtttaagatattataaatacttaaacgtaaaatattcatgcctaattgactgagatcatcatacaagaaattatttcagtttaggtatcgattcactacatgatcattttcccacgttgcaaaattgactttttttttattatttgatttttttgtttgacaaatattt

SEQ ID NO: 316480 - DNA, 724 bp, Cannabis indica
ttttcattcctctgtttttctcttttgctctttagcttatcaatctctacagtaagcatcataagaaaattgggactacaaaagctcacctcaaaacgaagaatatgatgaactacatagtcttctatttcatcaccaacataaatacatagtcctccaagctccaaagcctttataaaaaattcaaccatcatgtctcataacaagagagccacctattaatataatattaatgtatatgaatataataaattaaattattaaaatattaatataataaataaagaatattaatataattatttttctcaaaatataaaaattaaaaaaataaaactatttgaatttaacacaaaaatataaattaaagtaaggaaaataaataataaaatgtcaaaatctaatagtgggcacttaatattgctaaagaaataaaagtttggggatcaatttatcaaaatataaagtttggggaccaacttgccaaaacttatataatttggaaactaatttgccaaaaaataaaatttgaggacaaacttaacaaaacatgtatagcttaaggacctgcggtacaaataagcctacactaataaatatgtcttcaatcatgaaaaattgcaatgaatacttttaagagctttttataaaaatattggattttggagaaaaattttacaatattattgtcactataatttttttagggtaattatctcatata

SEQ ID NO: 316481 - DNA, 947 bp, Cannabis indica
gaaaaaataactaatactttaatttaactattaggtcgagtttattacatacgaacatagttttgtttttttttttttgcctaatgaggattttttgctttgaactttgacatgtaataaatcatactccatgaacttttaaggtcgttgaaaatgcctactgaactattaagattgttggattttaaggatttttgtcttatctactaaatcatgcccttcgaatttcgacatgtacataaattatggcccctgaactttcattcatgcatgttagacttttttactaaaattaaaaaaaggtctttaaatccaacaatctcaataatttagaggatattttcaacaacaaatttaggggcataatttggtacatatcaaaattcaggaaaaaattctaattaattacttttttttattgatatgggaaacaaattatcagtcaattttattttttttactaaataaataataaggaaagaaaatgacaagttacttttaatttttcaaatatgaatgggatatgaaaaagaagaaagtaaaaaaaaaaggtttggtgtaatagtaaaatattaatttaataaatattgaaaatcaattttcgtgtgtcccttcaaggacaattaatagttgtgttacctttccattttaaggagtttagaattaaagattttaatagtattttagttttagatgaaaaagaagtaaagattctagctgagtttatatggtatacagtatgtagtttaaagtaaattaataaagtaatcatcatgggtaactggaatataatctaatgattccaagggttaggggaaaagtagtagtagtaataaataataataataattacaagaagaaacttaaatacacatacataatacaaagcatataaggccatcttcaatagtagacaaaaaaattaaagttatatttgacttaaaaat

SEQ ID NO: 316482 - DNA, 1088 bp, Cannabis indica
gggcataaaacccaacaacaataccattatattatgtgacttcttatgatttctcttttagaaagcttcctacaactctcaataaaagtactaaaatgttgactgaagttttcggcaactattaattagagatgttcgtagtaattaatggaagttaaagaagagaatttttacgtggttaggacattaatgagccttagtccacgagtcacttttattagtgagtattttcttacagagagtccaaacaaattccctcttccatatatcgttagggttttataggctcataatggtgacaaaaaggcctcaatttttgtgcttgtataaaccatgctttgcacaatttcctatacttgattatagggcatgattgtctattctttatgatgtgtcgagggttaatataggtgtttggtgagactagactggtctcttgccaatgatttgatagctcataatgcagtcgtcaaatgatgtatgaggcatcgtgaaatcagagaaatatgagtttaaaccctcgagcacgtctattccaagtaatgtgtaggatgttcttccccatgtcgcattaaatgcgcgtatggtaatttaactttgagtagcatgccatgctctgcttgtccttctatctcttctctgaattaggttcacttacggagaagaagagacaaaactattatccttctggtggatccttttggaggtgactaatctcttagaaatcttgccaattaccaagctccagaggtggtttgatatacacgtcccgtagaaagggtcccattgccacatggcttactcttgaagtaccacatattttaggaaaaattctaggcaagaaatccaaaatatgaaatccgcatttagtgcacatcgcatgcactatgagcaaaatagtgtggattgaatcagatgaacacccctaaacaccattgccaaaatctaacttccattccaaataaacataatcttaaaaatacaaaatagataatttttaaaataggagtttcatttgcatcccaaaaaaattataaatacactccattataataattttattttacataaaatatatattttaatta

SEQ ID NO: 316483 - DNA, 801 bp, Cannabis indica
aaaatgggttaaaaaaaaagaaagctaaaggcccatattgtagtagtgcaattaaatttcaatttcaaaattaattaattaattacatataaatataaatagatgaatgcatattggtcatgctattgataaaaatttgcttacaaaatttaggactcatactcatagtaccaaccatatataaaatttggaattacatagataaaaagtattcaaaaattttacaatatactttcttaaaataggtgtatcgatgctcttatttatttccgtatataagaaagtacttagtcgaattttttgtatagtcgtgtatagttatttaattaagacatctggtaaaattttgagaaatttagaaaaatttaacacattgaaaacagtgttcaaagagtatgttgcacgcatgactttttttttatacgcgtgtgaaatagaccgtttaaacattaatttctacattgtaaattattttgaattttcaaaattttacaggatgtcttaaataactataacgtacacgattataaaaaaatttaaactaaaaaattcttatagataccgaaatatatttagggattatatcagtacactcattttaatgaggtgtattatagaagcacccaaaaatattttaacgtcgattttgaatgatatataaataaatttaaaagaacactagatttctagtgttcttctctcaaaatgttctactaaataaatttctagtgttcttctctcaaaatgttcttttaaattttctttaagagatttctgagatagtgatagtgtgcattatgg

SEQ ID NO: 316484 - DNA, 2615 bp, Cannabis indica
atccattctcactggaaaagggtaaaaaaagaattatcatagagagcatactcagagatttcattgtaagagctttgagagaataatcactgtattctttgttcttaagtcaatacaaatcaaggggagtaggctactaccaaactgctcggggccgaacctctttaaaaactctatgttctttatttatcttttcatattatatctaaattatatcacttatctcttacaattaagagtcattatcgttggctaaagggaggtcaataagattactaaaggtgtaatgggatctaatatagcacccttaaggttacaaattatgaataaagtaggtagatccctaatgagagagaggaatagccttataaatgtctgagagaggaagagagggagagagagagcccttgggcgcgtgtagcagagagagaaagaaagtctagggttcttgacttagattaatttggaggctaaggattgggcttagtgacttggtttgctaggttagaattaaggcctttatataggaatcctaaaaccctaatttacaataaaacccttaaatatttacatattaaatttattaaatacaaaagactaaatttccccttaaaagtggatattttccatcagtttgttggaccattaagggcctaatttgaaggtagcttgttttccacaatttattcagtacatagagtcctttcaggttaatcctagccgcccatagacctacaggggaggtctagccagccatgatcctgcaaggtcactcctggccggccatggtcctgccaagacctggcaggtcatgtgcctaccaggatcctgcaagtactatggctttaccaagaggaggccagcctttttcaagttaatgaaagctttgtatagcatttccttgtagaggccaggttcccatgatcgaacgaaagctcccttggtgcgatagtcactttttaatcaactagcttgtgcccagatattttccgccctatatgctcactatggctagcatataggcttctcttggtcggtcagggatgtttgcacagctccttgagagcttgtttcactctattcgattgctactttatagttttgctatatcttgcatagaggccctgttttgttattggcagggttgtactgtacctacactctatctttgccttacgtggacatgccacgtcaagtggaaaaaaattaggatgaaatttgcccgcaagtctctactcaaacatctggtcggatagggactttctagctctcgtcttgtctatagtaatctctgtttagcagccttgtctagccaagtgtaggctttttgcatggcatgcttttggatcttttatcttctttttctatatacatctgatcttctcttctagggtatctcttttttgtacctgccattaacaagtttcaagctttttaagcttttggaaactttttgattctcatgttagtttgtaatccctttggtatattgatactcatgatagttttggaatgtttaatgtgtgaatttttgatggaaaagatttgactctgcctttgttatgattcttgactcttttattcataaagaatataaggcacatatttgagttttgaaagaaaaacacacattggcattcaaaacttaccttggccagcctgggaggtcttcttggaaacatgggtgaacctaaggcttaatcatgggagtcggccagctttagggttttaccctataaagcttgtctgttcatgcgtgggtttagtgacactggctgattcctagctgcatcatggcaccgttgctgaccctttcaaggcttgagaaccttgagcatcacaggccttagttatgaggggttgtcattgttttgtcctctttttacttcaaaaagaattcgactctacaggcatatataaccttaaactcagacgtggtttccttagaaactctgtatgaaacttaatggcgagtctattatggttggatgttcaacttaagacttaacatggcttggaacctataaggaattctaccatagtcatagtgcggtacgtggcccctataggagctctgtccggttcttttttgactatatggttcttacagggccttggcttcatacatgtgagctgatctcatatctgaccttaatgctttcatgttttttctttggcctatcggccctctatttttgaacactactattgtttagccttaaaaccttttatgacggacatatgatcatcctagctatcttcttatggctttaacatgtaagggtctggatttattttgttaagtcgaagtatacttgcatgacttagaggcaagtttagtagcttattctaattgttaaaatttctctacataagctctttgtgcttgtttgatgccttctatgatatgggtgcctcccaagcgaccataagtttagtagcttatgctagtgagagtgcttaccgagatgttcgcaattttagtgttttggtaaaagttctaactccaagttggcagatctctgatgagagagaggaataggcttagaggcgtgtcagagatatagtgagatgagccttttgggcatatgcatgacagagagagagagagagag

SEQ ID NO: 316485 - DNA, 833 bp, Cannabis indica
ggccaaggggagtctataggccataggatgagcttgtatggccagccaagatttgagcacaagctggctggccaaaaggtaactttcagagcaagaaagagtttgcttgaccaaggaagcctaacctctacaaggaaaaggtgtacaaaggttggcctccacctttaaaggctggcctccacctctaagggctggcctccatctacagaggttggccatcaccaaggttggcagtcactaaggctggccaacacatgaaaagacctggccaactcttaacaaagctggtaggaacatgacccgctagaccctagcaggaatgtaacctgcgagaccctagcaagttgtagaacctgctagatcctggcaggagcatggttagccaattctcaacctgtagaccttgtatggtcggccaacctgcatcttacaagtacatggctagctaggttttcccttgtagaacattgatgcatatccttcatccatggacagcaagccaagctgttagttgggccttgaaagcccactaagatgctacaaaaagttctactttcaaggagcaatttggtcatttatatttattaattaaatatgtgaataatacctttattttacctatatataaggatattaggcatgtaagctctactatataaagagcattagcctatctctaaaaccctaagtctaaagtctcaaaccctaagtcatcagctctcaactctaaatctgaaaccctaatcctctcttatctctccatattacacgtccaaagggctctctacatctctatctctctctctctctctctctctactctctctctctct

SEQ ID NO: 316486 - DNA, 4659 bp, Cannabis indica
ggaggacaagccttgccatgaaggcttgatggcaagacagccagatattggcaactaggtttggggggcagggctagggatctgaacctctataacaccccaacttggatagcctctcgctggccaacctcttggtggtacacccttggctgactagtagggtgaaatcccatctcggggccttcgggagcaagtaacctaggccaatcttcaactggctaggttgggaaggtggaaacacccaaaacaaaaacttgagaagtgagtctaattacctcatatatctagatccacctaaatctagcaactggtgcgatctactccctgtcagcacactggttataccagccaatcagggaataatgggcggccaggcccaacctagcatagggctggttggccaaggccagtcaccctatctaggggtagctggctaaagccagctataggggacacggttggccggcctccaccatactctctcctatggtacggctgaccacaccctggcacattcaaggctgcaacccatttaagaagggctagtcagccaagtccctccaccaacggatccttctatgcaagcacagttggaccaaataagggacatgatcaaaggcctagctggtccaagaccttcagaccttgaactagataggtgaaggggatcaccattctcagcatatattaatgccttacccttgccaaagttcaagatgctaacatgaagatatataccgggcgagaagacccattggcacacatcaagacattgagatgcaacttgatctccaaaaaattactagtgatgtccagtgtcagatatttatggcaactttgtcagaaacagctcaacaataatactttaagctggctttaggaagattcaattcctagaatgagctttcccaagaattctacacacaattctcgtcctcaaggcttataccgtcgcaacaagaagaccttggcaaagtcaaacaacaacaaggagaacctttaaaggattacatcctaaggttcacgaccaaggctaccaaggtcaaaggtcttacaaaagaaggtcgatatacgaccatactagggggcatccttccactgagtgacttctggaaacatatccgaaggattttgaccaacaacatgaaggagtttctcgagtgagctgacagtttatcaagctagaagaagttgtccgacaagcccagacagggcaagttggcaataggcagtcgcatggcactttgcggtaccacgacttgccagaggttcatgtaggggccaacacttctgctcaaacctctagtggtaaaaacactgggggaaagcgcaacaacaatagctctggaagaaatagtggcaaaaaagggaactacaacacttcttcaagaccacgaaactagaaagacaaggaggagaaatacacctacttcaccccttctgacggaggccatcttcatgaccactgagggaacggtcccatacaagaatccccctcccatcaaaagggagttgagtaagagggatatgtcaaaattctgtcagtttcacaatggcttcggccatgacaccaacaagtgtcaaattttgaagagggagatcgaattcctaataaggaagaacaattcccacttgtgtcgttatatgcagaatgactaaatttaggcacaaggtgcttaaaatggagatcgtatgccacctctagtggcgggtcacttaggggtcatcattggcagaccccacattacaggcgagaccaacaaatctagggagcgaatgctcagacactccgtcacaaggctaaaagtgacatcttattcgtcgaagaaaggggatctaagcaaccaaagcttggatagcccactatctttttcatagaaggagatgctgctcaagtcagtttcccacacaattaccaccctaatcattactgcataaatcaggaatatgactgtggaaagatgtatggtggacaatagagcctcctccaacattcttttcaaattaacatacaaaaagatggggctccaactaactgatttggcaccctgtactcaaataatgtatggcttctttggccaaggcattgcacctatggggtacatcagattgcccttcactattggagaaaatccaaccactagagctctgatggcgcgatttatcataatcgatgttcccttggctcttaatgccatgataggctgaccagccttgtatgacctaaaggtagtgacatccatctaccacctttgcctaaaattcctaaaaaggcatgtggtaggatgtttaaggggagaccgaaaatctgcccgtcattgttacaacttggctttgtctaaaaccaagaaagagaagatgtccgccaagagctctgaagaagagcccaataaatggcaatgaagtctagcataaagtgggggcgcagacattgatcctcgctttggggatcctacaaacaactttggaccggtagaagagctaaaggaactggatgtcgatcccacttctccaactagaagattgaagattgggaagggtttagggtcagaaataaaattagtactgatgaaaattccaagggcaggcctggaactcttcgcatggtcacatggagacatggtcggaatagacccttccgtgatgacccatgctctcaacatcgatccaaactttcgacctgtacaatagaaaaggaagttattggacaaagattgtgcctaagcgctcagagatgaagtcgagaggctacgggcccatgacttcataactgaagtattctatccactttgggtatccaatcctgtgctagagcccgaaccaaacaaaaagtagagagtgtgcattgacttcaccaacccgaataaagcatgtccaaaggactactttttccttccaagaattaaccagctgatggatgccacaactgtccatgaaatcctaagtttcatggacgcgcacttaggttacaaccagattatgatgcactcgccagatcaggagcatacaagcttcatgatggacataggcctatactgctacaaagttatacccttcgaaatgaaaaacagagggaccacctactaagggcttgtgaacaaaatattcaaatatggaggtgtatgtggacgacatgctagtcaagtccaaaaaggctggggcatgtgaaagatctaaaggaatgcttcaagatcctccagaagtacaatatgaacctttatttcgataactatcttcgtgtgtgtttctattatgcgagaactatttatcgaaatttataaccttgacacgttatcttttttttttttaggagaacaagtccatctgtcaattaaatacaagattgtagaaaaaattatttgataacaaaatctatgaaatataatattctatattgctcttatacattagagcagaaagtgaatataaaatctttttcatattcaatagtattttctttaatagtttttcactctatcaattctctatatttctttgtaaaaaaaatactcaatatatatgattatgtttatatttaataatgatgtgtatgcagaaacgaagctacattatataattgggtgaacctcgtccccttaattgggtggcctggccctactttcactacataatatatatataatacttcttttcatttaagatgttccatctatattaatattttattatattttgacttttcaaaatctaattttattgataatcatgtatatatatatattttctaatttctaattatttataatttattttgtagtgagattcacattttttaaatgtaaaataaattattatttgaatgtaaattagttattaagaatagttgacccaaaattgatttcaatatttttactacaaatgtacacaagtcaaaatgcaatgcaatgtagtaaacgagtaataaaatataattaaagaagaaaaatatatggtggcatctagtaatatttttatttttaaattttttaatcataaaaataaaagtaaaaatttgattttaaaagatagaaatgttttctataactatttttattttttaatttaaaaagaaaaaacaaaagtgcattttgtaaattttatttttgtttttatttgttgatttcttttaagtcgagtccaggaccagggccgagatccgggtcgggtctaggtccgggtacgggtgtaggttctaagatttaggttggggtgggaatccaaataattgataaaaaaattgttttaaaaaattttgaaagttattttttttttcaaaactttaattctcaattaaaaaattaaaaagtaaaaatatttgtatagaatattattttgggaaatatttttattttactaattttaaaaacaaaaaatttaattaaaaaaagtttccaaacaaactttatacaattgatattatatattattaaagcaataagagcattaataaccatttaaacttttataagctttaacttgtgataaatttttgtttttaataaaaaaatttcgatataggtgctttggtaatacttttttaattagtaatatttttcaaaatcatgttctataaaactgtttttacttttcaaatttttaattaagaatctaaattttaaaaacaaaaaaaaaaaaccactttcaaaaaaatttaaacag

SEQ ID NO: 316487 - DNA, 1361 bp, Cannabis indica
ttttcacttttctacttttaaaaataaaaaactgattaaaaaaatattaccaaacgccaccttagttaaggatttcatatctcactaaaaaaaatattaattttaggttcggacatattcattttcgataaatagggaaattatatattaatttttaggttcgggcatatatttctatatttagtaataattatgaatttgaccttctcataaagtttttttacattctcgcccaacttaaaacaaaaatctctaaagcccttgatcgtgttagaatttagagatatgatgaatgattgttccatctcaaaaccaattgacaatggaaggggtagttcattcatctaaaatgccttgtctacaaatgttcatacaatacaaacaaaaataatacccttacctaaaaatttcacatttgaaacaaaattgtgaacaattgaaaataaatattactttcacaatgatttgtgacttaaagcactcacaacaagtgagttaaaataactaaaaaatataaatttagctaaaaatgttcaatatgccactatatcatgtgaggtataatacctcaaacttttagctcatcattttttttttttgctaaatatagctcaataaatagttgtgagtaaacatatttttaatattttttctttcactctcttatattattttacattaaatatgggtttaaggcacgacaactacatctggattgacgaaatgtacgtcgttcttcatagtgagggtatcagatgcgactaaccaaaatcgttcttgataaaaattcttttattttcaaaataaataactaactttttggaatgaaaatactctcattaaatgcaaaaatatcgttcctaaatgttttttgttttttttttcttcgaaatattaccatttaaaaggagtgagatgtttcctctctaacatctggcgcgacacatgttgttctagatactttgaaaagttgttctagatgtatcttttggaacaacatttaaaagtatatagaacgataagtgtagcatcatatacttttgtacatataaaaaaaaatgaaaacatagaaacctgtctcttccctcaacccttctcttttcgctgattgttgtggtaatttgcacacgcaagtgtagcgtatcgtaacaagtaatagactcaccaggagtgaggtcaatcccacagagattgtaattaagtacattaaaattaaacttttacttctatttggtcgaacaaaaattaagaataaattaatactagaaaacaataaaaacagtaaaaggagaagtaattaaattaatataagaatttaacagtgaataaagttagggcttcgattttaattgtatctattg

SEQ ID NO: 316488 - DNA, 1752 bp, Cannabis indica
gtttttttcatttggaaattgaccgtagtagtagaccctatagctttatttctctttattaaaaattagtgattgaggaacagcacaccttattctagttggtacctaggttactatgaaagtgtgtgtagtatacaacctctacatcaaagtttttggtatttgatttcaattcttgataataggctgctacatattggacagaagggttagaaaattgaaagaaaatagacatatttctcactgcacatccactgtaagtattcatcattctagctctagttatttcattcaatttagcacatattttaggttaattgatatttatgttaaattgtaatatactgaaaataaataagatcaagtatgggtcatatctaaattctaatccttgtatcagttgaagaagataattaagaattgaaccattctacttttttttagtcttccacaaagttctttgatcaactaagctagtgtgccttatatacttggaatatcaagagagagagtacttttggatttgatcatataatgagagcgaactttcgtaagtccattgtgtgccttataacgctaaagttacttatctatatattgtcatttagttacctgtttcagggaaaaattcccttgtgaatgaagcaaaataatgcttaaaattgaatatttcatattaatatatacttggaaccaaaatgaatcttacaaaatcaatattaattgatcatcgatgttgattaataaggaacatgagttggtggagcacctcttaaaaaccctttagcaagaggaccataggaatcgggggtatggttctaagaatagacactgcaattcacttggggaagcttggtctgagcaatattagcttcacttttgacagtgtccaactattttccactattgtaaatgtgaatttcttgcacgcactactacagaaaaaggcattttcgcctgtcaaaacatcattttttttttagaactgatgctattgaaatcgagtatcagtgcaaaacaaacgctgataaaaattcaataccatcgattataaaccgacgccaataataaaaagaaaactaaataaaaattaaaccaagtccatatgtcccaaccctaatatatatcaaatcctataatataatataacagccaactcgtttatagatctcaatgtctctctctcttagctgacgtccaaaccaacccgtcctcgctaccacttgctcagtcaccaccactccgacaagcagggccggccctgagttgagatgaaggaggcggccgccttaggcccccaacgctcaaggtaccatttcaaaaaaaaaattaaaatacagttagtgataaaataaataataatacttttaattctaaatatgtgttttaacaactaagagattgagggttcaagtctcaataatctcactttttcatggggcgttttttttgtttttttttttttacatttacatatttgtaaaaaaagatggaaatcccatatttgtaagcaataataagttttgtcgaaaaagtcaccggaaaagtcactggcgccagagaagctgtcgaaaaaactttcggcaccggaaaaatcatcaccgtcgaaaaagtcatcgtcgttggaaaagccattgtcgccggaaaaagttactgaaataaaagtcaccagaagtagatgtctcaaatataaacaaaaatagaaccagttataattgaaatataaccggttctgtaacacaaagaataaaa

SEQ ID NO: 316489 - DNA, 1170 bp, Cannabis indica
ctccttaaagtaggctaaaacctcctaaacccagcttctgttagcagttagccttttccgttcatttttaggtgttaagtgacaggttggaatgtctacgtgcacacaatgtacacgtggtacaatttaattagtcaacgtaataaatatttaaaattaaaatataaaaattaattattttaaaaataaacaataaaaaaatatttttatttaaaaatcaaaaaattaaaattaaaaaaaaaattaaataaatattagtagaattcatttcttggccctttttaagatgccacattttaatttttaaaaagattaaactttaatttttattgtagagaagaaagaagaagattgaatttttattaaggttacatacagagttttctatattattaattaatctcttctcatctaaaaacatactttctctctccttaactctgtagatgtagattgtagagtgagtttttagagagagaaagagcaaagaattgtttttttggttggagaaagataagagcattgatattgggagaaatactaaactgcactattagtatttagcacaaaatcaatatattaatctcgttattagtttaattaagtattgaattctatatggtttaatataataacttttggacaatatcactagctaatcgcaaggtaacatgtttacaggtgttaggcactactggtgtccaatagcaatgctcttgttattagatattaatggtgctcagtagcgtcttacaattggttagcgatattttttaaaagttattttcttaagcaatagcaatgctcttgttattagggatcaatggtgctcagtagcgtcttacaattggttagcgatattttttaaaaattattttcttaaggagaaatgctaaaaggtaccaatggtgtctaatattttcctatcaacattgtaattggtataactaagtatcgagtcttatatgatttaatataataacttttagggagtatgactagttaatcgcaagtgatatgtctaaaagtactaggcaccattaatgcctaatagaatactctttcttaaattatatagaatttgatactaaattacactattaataatataacattgaagaaaatattaaataccaataatattttttaacaaatatatataaaaaaaaa

SEQ ID NO: 316490 - DNA, 1601 bp, Cannabis indica
ttaccaaacggcacctaagttttttgagaaactaattatttaaatatgaaagttaaagaaatataattcaaaagagagtaaaataagaacacttaaggattcttacgtgtttagagtattaacgagcattagtcgatgagtcaatattattatgagaagctagacaagtctaagggattatagtaagatatgatcactctattcttgtatgagcaaacaagatatgattttttaaccttttacaggatggattcaatgagtatgtatagtattatagatgtcatactagttatctttctttctttattagggagtttacaaataatacattgactttaggcttatctggtgaaccctgacccatgggacaccttgtatatgctaatacggatgccacaccatatgatgctagatattaaaaccgtgtcctgtttcgtgggtaggggtattaatgagatagcccatccaatccaatcaaattcgcaaagtgcggatatctgtacttgtgcagattggattggaatggagaattaaaatccttatttgtgcagattaaatgttggttgacatgtaaaagtaatagatctaatccaatccacatatttatatatatatttcaatgtaaaaaataaaaatttaaatttttaatatatatgatataaatatatatatatttcaaaacttaaatgtatattccattcttatatataaagaaaatataatctaaaataaaattaaatatctatatatactaattttttttcttgttttaatttattattattatttatttttttttataatttgttgtgtgagacataatttttttttttattttgttgttaattatgcgaattttttttaatgctcactaataagccttaaacgtttacttagaatccatgtgctagctaccagaaacacagatagcatttacctccagctttcaaaacgttatgggttgtggaggcttgcttcaaactatgcagatggacaggtggaagctaaaggtgaaagttttatgaattccaaatatttattatggaagaaaacattccatttttgaatttaaaacaacatgtggcactgtgttattggtttgtgaagtgtctgtttactgaggaggcatttggagcaaagtaagtaaattaacggatatttacttcggcgcaattcttgataggaatttcatcatacgatttacctcggtcccagatactgcatttaatgcctatttaatggcattttggaccaatggatctgctttattttttctgtagagtaaatctagaatgtcgatccaagcttctgagaagagtcaaggctgcagccagaacttgggctgcaaagttaggcgcagttgtagaaggagcttgtaacgccctaaataattaggcacgctacccaagatacttacaaaaccctaatcccctaaacaggattactaaaaaaattagccctgaatttaaaccttaataacaataggaatgaaaataaacttataatactttaaactttataaactaaaagttacagaagttgagatccaaaaaaaaacatttacaaaatatattacaagttcttttctttcagccggccta

SEQ ID NO: 316491 - DNA, 853 bp, Cannabis indica
aacataaaatgttatttctgatctttattaatcgataaatatgattatattgaaatgggttttatttagggcacaaaacccaacatgtcagtcattacatttagacttatacccaccatatcagaatgtgcccatgcaaatacttcttgttgtcatgaaggatttgaataatggccttcttaatctccttattcaggtgcttcccaacctttataatttttgcttggttcattggggttgagaacaacttcttcaagttcctcaatgggacccaagttagcccagtcatcgcccacacgaggatctatctcttcaacttcgtgaacttctcttgcttccatgtcttccactttattaactttgtttacaaccaacatctaggcccctggttggggtcgtcccctcatgctacatcgtaacactcacgtgcagctagtttatctcctttaactattctgttcccgatagtatttgggaattttaagaccagatgcttgatagatgtaactacctcggatgtgtacaatgacaatttcccaaaaatggcgtggtatgcagaaagtagatctaccaccataaatccagtcatttgggcgactatcgttggtgcttccctgagtgtcaatgggagagtgattcttccagtgctagctatgctatctccggtgaacccaaagaaatttgtggtgcatgattgttaatcttgtgcacttaacctcattttctccaaggtcatcttgtactataggtttacgctactaccattatcaaccatgattctcttgttggaatttgttttaccaggatcttagatctactcacaagtatgttgtttgacaccctaaatatgaac

SEQ ID NO: 316492 - DNA, 1113 bp, Cannabis indica
acaaatcaaaaggcatgaggtaattatatacaattattaaataaggtgagatgaagaaatgaaaggttttgttaaaagaaaaataaataaaaaaaaaaaagtgaaaattagagaaaacaaagaaagggaaagaaatttcatagaaaccgctatgtcatcacttttgtgcattcctttatatatatattgattagaaaattatgtcgcgcttcacgcaattgtctagtatttattattttttatattattattttttaatataattaagtggtataatataaatatggcattatcatattagaattaataaaaaaaacaaaaaaaataacataatagaatgatagaattttaaaataaaattaatatttacaaaaatatgtagaatgatgatgggtttcttttttttttttttttaaaggagaatgatgtggttcttttgacaattaaagaattattgaaatagcatagagattatatgtatatttaaaattaaagaggagaaaaaagagaaccaaattattcaaaacatgctatttttagaaaaatttacatctaaatactttttataataaatgattactaatatatgatatatagtttaatgtaaccactttttcatataaaatactttaagtactagtatttaaaatttaattactattttattatactcgtttatttgtatatgttgtatttactttttatttatacatgaaatttattttcttatatatattttttgtaagtggtagctaaatatatatttagtttttgaatttcaatttgtaatatgtacttagtggtagataaatgtattttgtttaatttgtatactcttattacataaattatatacccatttggtaacccattacaaatatggtataaattaatcaatttaaagtaaaactactactttggtatccaactaaaataaaaatgataacacatgatttttatataaaaattatattaatctatacttaataattctaaattaaaataataacttgtgtaaaaaaaattaaaacaataacttctaactagtatctaatcgcttaggtaatttagtctattctatataaaatgtgcctatataacagaattcttggt

SEQ ID NO: 316493 - DNA, 871 bp, Cannabis indica
ggaaaaattaactccgagagcaaaatggtaactttatcgaaattctcaaaatgaccggaagtggattccaagacgcaaggaactctagaaaagactccatgaaagtttatttacatttcacaatcttgtacattgatttttaagtctataattaaaaagttctaagtgcgaattttagcccactaacgtatgcgacaagttatttcacaaaaatgatatattaaatttatacattgattttaagatacacatattatttaactaagagaatagaactggaatatcttaaatcagataaacgagtagaaagttatgcacgttttagagccaaaaagtggctttttgccactgtcctatttatggtctaccgcttttcacaatattctttttcgaaaagcgtggtaacggctagtttttgttcttacaatatataaacttactttcattcaaaataaagtttgtctgagtatttattccatataccaatcatattcaagtgattttaagagctcccaagtttaaaatccaacaaaatatttttcacacactttgagccaaattttgtatttatttcttctaagtgtacttgctaatcactctaagttcttcattgcattatcatacttctagagtgacttttcttgtaattctaaacacatttctaaattgtgattaaggtgaggttggcaccggtattttaaacaactccaatagagtgagattggtactacagcaatccgagaaagaggtcgatagtccttggtagtggaaaactattgtaagaggtttgaaaaattccctgttgtgagggttagttaagcttgttaacttggctcgataatggaactcaaagttaggtccatagctttga

SEQ ID NO: 316494 - DNA, 743 bp, Cannabis indica
gcaaactctggtgacttttccgacatcaatgacaaataaaacttcctaaacaaataaaaacattaaatatgagatttgaaaacctaattacatatatatggcatattaaataccataaaagacctaaaaacaaaaaaataacatataaattggtcaaatttaaatgtgtcagatttatcataaaaacttctaaaataccatagtaagtataatttccattgcaaaatattatttatatataaggcacaaaataggaagcccacaataaaattgggccgaaaatattgggccactaaacctaatatagatttctgctaccttggcagaccagaaattaagttaatttacttggttacttgtcattgataaactcaatttttttaaaaaaatatatatgtgctttatccaatagttgtccgtaaattcttgtgatactaacgacaaatataagaaaataataaactcattgtttatgttttctccaattttaatatgatgcttgatatgcttgtttgatataattagtattgtgatatgtacatgtaatacattgattattatacctaaaatgatatgttttctcttaatgggggctgctgttgttgtacaacattcctccttacgtacttctattgctctatggctttattactcaaagcaagccaaattttgtacggaaagttataaaaatactggaatttgagttaatttttacaaaatactgtcacacggaaattttttca

SEQ ID NO: 316495 - DNA, 795 bp, Cannabis indica
atatatagattacatataataaaagtatatatatatataaaaaaaactctcttaatcgggttggtcgggttagttcaggttgatattattttcaaccagtccaacataaagattgggcgggttatattttcgtcgtgttttttagtttgtatttttcgtcggattatctcggtttggtttaggcgggttgttcgagttgggcggtttacaaaaatttatgtacagccctaatattacccattaagaagtgttccatatatatgtaaataaatatatactattgatgcaaaaaaatagttttgtaaaaaaaaaaaaaactaagaactctcttatatatttatgtgtgtatttttattattgagttcgttaacatattaggtttcatttatgaagtttattttgattgaatcaaactattgtcttatgctaggcttaacttggcttagggtgcaaaaaaaatttacgataatttaattttagaccatacatctgatattagactttttaagtctatactttttagattcatgttttatttttattttgttttcagtctttttatattgtgattacaagactttgtcatcgcggattaattataccaattatgtttaattgatttttatttctttggagattctatactttatggtcaaattaatttctttaactaaaactattttcttcctcgagagttttcattttatctgatctcattgatttgtttttttttttccaaattaactaaatttactgaagtatgcgcccacacatatgttggaattaatgttacca

SEQ ID NO: 316496 - DNA, 1673 bp, Cannabis indica
atcaatacaagttctccaagttctgttaggtttcaggacgagaacaggattggctatccacgagggataatgtaatacttatagattaagaatcaaattagcaaaccctaacttgttaatgtgtatttatcatggagtcatattaatatataatttattatatgtgagttaaattaggaaatgacatgataagatcccgttggtgagccaggggcatttttgtaattttgacccgagaaggataaaactgtaaattttatttaattgtgtgcttatagactacattattatatattatacttgttttaacctatttcaggtattttctgacaagtcggcgcggtatagtcacaatcaggtattttgggccgaaccgggttcggggccgaaacatatttttgagattttatattggcatattattgatattgggataacctgaaatttatttgagaaatgtgtgatgtgataatgacttatctacccttgaaattgtgtatgtgttacattaaggccttaggggcattttggtctttttgaccctttaattttatttacaacaaattgaatttttgactgaaattagaagcattattttggttttctatctcaagaaccgactctctctttctctatattcatctctttattttgtggaatttttgagaaattggtcttgattcaagcttgaattttgtggtgttggcgcttggattattggaggtatttgagttagtcttctctaccatcttattttgaattttatgctactgaaactatgtttagaaacatgctttatttgtgatttttctcatctttgcatgtgtgaagaaacttgggcttaatcttgatgttcatggcatgtttgtgttgttgaattgtggaatttgtatttggtaaattcaaaggcgtttttagggtaacattgagtttaaaatttgattgtaagttctgattttggctgtgcagagcaagctttagttcattgaactcaagcttggagctttaatggcactttttaattcttggaccaattattgtgtttgagctgtagaatatgtttaatatgttacatgatgatgctctggaaagtttggtggtgattggggatgatttgagtaggttatgggggcttaaaagttaagattttttcgtgtttttctgcccagaaaaccggaatttcggttggtttagggctgttccaaccggaattctggttggactgtatcggggaaaaagctaaattttgttttggccataacttttgactcgagactccgttttggacattctttttatattgttggagagctcgttctgagctctatatgtttatctataatttgaatgccattttatattatgtgaaagtggatttagggattaaccctatacttgtgaatcccagaaattgtgactaggattaccgacacttggtcaggagcacccggagatttggactctccacgtttctgggacatcaggtaagacagtagttgcatgtagagatatgtgcggtgtcgcttatattgaatattatatttatgataaattacaaagccgagattagggttattaccctaaagtgagcggtttaatggcctagggttatcaccctagtaattattaatgtgtaaataccatgccatgctaaatatattgtaataaagaat

SEQ ID NO: 316497 - DNA, 1589 bp, Cannabis indica
ctcccctcctctctctctctctctctctctctctctctctctctctctctcgtacacgcccaaagggctcctctcacttcatctctcacacgcctctaaggcaattccactctctctcattagagatgccaacttgattcatgttttgtatccatatagatagctatatcaaatcccacctagaggaatctgaattgtattatctctaagtatcaattcagccaaaaggggagtaggtcattacccgctaactaagggggccaaacctctataaaaatctttgtctcatttactttattattcttgttttgtaataggtggcaaacatcagatttatacgactctgttgttggttgatcacttttcgaggccaataatttggtgcttccattgagagcaaggatatcatatctaatcaaatgtcatggttaacacaaaaagaaccccaatcgcaccatctgcatctttgggttcctcacaagacccacagactgtagataccgatgttcatgttctagctacaactggaattaccatgaacacagcagatgtggttaattctgcccccatagtaggcaccataaatctagccactactgttggctaggatggcattaacatcccggtggatctgagcaatcgacccctgactcaaagggaggaccatccacaggcgcctccaactgaaggaagaatccttgggggcacccccaggaacaacaatcgggtttcgtcccctgtactatgtaggagagacaagactaggaattggcgagccccacgtggacttgggagaagatctcaaattaacaagacttagagatatcgtcttccaagccaacataattgaagaaccacgcgctgctgattgcgatgtattcgtttagtagagacacgaattccttgaagaactacgcgatactggttgcaatgtattcgctaagcagagacgcgaatgatggaatatattttaccaggatatagatttatatgaatttctaaaacaatagaatctaaacacatataaatttcaataaaccttacattagttgcagtggaattaaatgactccctccacttagatctttaatccatattcctttctgtcgcagagtattatgaagatctgagcccgattctcctttaggtgttgaattcttcacagtcttacacactatgattgagtaccaacttgctatttgtgcccatgtactccatcactataagggattcaaaaattgaagagaaagagagagagaaggatttgaaatagagagagaaagagaaggctcaaatttcactgaaggcataagttgcatcaactgtctgtcatgtatcaatttgagtctatcactatctatttataggaatccttctaggtttaggtttgaattatttggaattaaaaaattgatgaataaatggctaaaaggactttaagtggccgaccacaggatgtgggcccactacttacaaatttgtcatttttcaacaatttatccttttctttcacaaataccatattttccaattcaaccacttaaatgtcaaatctatttatttaataatgaaaattaattatcaaataa

SEQ ID NO: 316498 - DNA, 1435 bp, Cannabis indica
tatttttcatgtccatcaatgttgggcatgaaaaaaattcatgtccaacattgttggacatgaaagtgggactcgttgggattagtgtatcacgtctagctttgttgggcttaaaattccataaatttatattattattatatttttgaagaaaaatattttacatatttttgactattaatttataaaaatatttttaaatttagcaattttaacattattattaaacaataatagcaattagaaaaaaaaattataaatagaatacaaaaattaagactaaaaaaaattgagattacatactcaaactcagtagcaaacatatatacaaattatgggacacgattttgtcccgtgatgtacttttcacggaatgtattccgtggtacaatagatgggtctcagggtacgttaccattttttaatcctaattacccctagatcaaccccaacccttagatcaaataacttccccatttaacggctgtcgtacatcatagaatacattccgtgaaagtacatcacgggacaaaatcgtgtccctacaaattatttatataactaaacacccctaaaataataataggaaattttataaataatgcttaaaactttacccaatattaaaatgtagcttcccaataattttataccaatatatgcctacttttggttcccctccctattctacccctttcaattaaaaaatcacaactctctatctccttcccttttctctctctttctctctatttgcttggcgccactaccgaaagccccgctctattcaacctcgataacgatgaaaccctagaagccccaaaaacccatatgaaacccaaaggcccgggacccgaacctccatagcagtactcactttgacaaaataaagagcccctgaacctccgtctccatcttcgtctatgagcatcgtccataacaagaaggagaccttgtctccgagcccgactagaagcccaccatattctgccttcgccttgttgttttttatattgatttgtgtttgtttgagagcttagatgctagtgtttatggtgttttctagccaaaacgtgcttattgataggttattgataatttattgatgattatgtttgtgtaacacaattttgtcaaattgacatttattgatagtttatcgataatttatcgatggcattttctgatgggttattgatagtttttatcaatttggtatttatcgataagttatcgatattcgatagtttattgatgatttatgtttgtgcacaaaatagcgaagcacaaacaaaaactatcgataaagtatcgataacccatcgataatcacattttggccaaaaaaccatcaccatctaaggtcacaaacaaacccaaattcaaaaaagagaaaattacacttactatgagattttgaaagttcttatgataa

SEQ ID NO: 316499 - DNA, 1441 bp, Cannabis indica
ataaacatgtggcaaattgatgaaagtatctttggagactaaaaattccatccaagatcaaattatattttgtgtggaagttagcccattcttggcttccaaccaatgcacatttatctttaagaggtatggatgttgatccaacttgtcaatgatgttttggtggagtttgagagaatatttttcatgctttatggagttgtaaatccaatcgacaagtttggaaactatgtggtttaagcaacatgtgaagcgtattggaaaggaggatacattggctcttttgatgaggttgtccaaggtatggccacgggagacttttgagtattttcttgtgctttcctagaatatgtggtttattagaaatgacacaaaacatgatggaagacccccaagcaggggcggatgtacactcaagcctatagtggccatggccccccccaaagaaaatatatatttacatattttttaacaaatttatattatgcaacttggtattaatgctggtttacaacttggtatttagagacgattaccctattttagtattgagtctgattatcttgaagctgtccatttgatccagagtaaggagaatggttgtagggatgtggatggggcatgggtcatattcaaaatttgttgctagctgataatctagatgagatttcttttgtatatcgtgaagctaatggggtagctcacgctttagccagttaaactttgtcaaataaagctagtgccatatagattggcgttagtctcccttgtgcgagcttagccttacagtgagactcgcttaatccttaatttgtaagattcttttgtatgtatgattttgtttttttttttaaaaaaaaaaatgtatataatttatagaaagagtaattgaattttatttatttattttttattttatttacttttaattaaccgtttttacttgaaatgtatggatatgggattttaaattaagaccttccacattaagaagaggtgtggtgattactacttattataaaccaagattcatcaatgcgtgcatgtgaaaatgtaaagttaggctttttttttctgcaaaccttaaataataatttgagatgaaaaagggaaacaatgaaaaagattggcattatatctaggtatgacaatttacatcaaagcttataatttttaattatattcttctttttttttctcgatacatcattttctatctcatcaatatataacacaatattacttctggtggagcagcagttagctttaagaatatcacacaagagcataaagggtaagagaatattaaatctagaataattatatttacctttaattttattaattggtgttaaaatgaaatagtacttcatatatacaaagaatattttaagtaagggtattactttaaacacttttttttattttttaattttcaata

SEQ ID NO: 316500 - DNA, 1680 bp, Cannabis indica
ttaacttttatgtgtttagtttatcgttttagaagttcaattttagattgttaaatcaacatacttgtgagtagatctaagttcctggtaaaatatatttccaataagaaactcccctagcacgacaacgatgtgggggagatctacgatcacaagtctctcctagtcccgggagttaaagccaaccactcctgcaggactaaagtcgaatgatcctataaagggtatgaatttctcacaaagtgcctgaaggtgccttgtaaaacacctggctgagttgtaaccttacttcgcagaggctttgctcatacatgtcagactatggatctagtagccaggctttttcaagtatggcgttaggatttatccccgacgatatgccttagtatagggcatgcgcgcccaatcgtacatgcctaaatgatccaacaaccattgacaagggaaattcaaaaaggaagcccctaagatgacacttgtatgaggtcggtttgtaacaccggacggcgttaaatgccatatgacaaaatggccacctactaaatgaacggatggatcatgtctaaaggtgatcaatccagccagcgcatggagggaagctagcacataaatacccctgcattctataagataggggcaacactctttgatgactaaaaaacactatatacttacttgaaaactctacaaaatttcctatgaagcctcttcttcttgaggaggaacgaaatgaataaagagtttcaacccattgtataccaatctgtatcaatattcaccagtcgaagtgcctaataaaatggactcgtggactaaggatacttaatgcctgaaccacgtaaaaattttgcattcgttgtttaacctattattcttttcttaagcttttattcagtttctaaaaatctaagcaaacattttggtgctttcattgagagttgaagaaagatagaaacattcatgatgttcaccgtcacaaatctggaaagaggagagcttacccaagaaaagaaggagagatgtcgcctgattatccattgggatcggcaaaagattagaggcatgcttgtcaagggtgtcatcgaaagcgtccaaagtgaaggtctgctcccctgtctagacgaagaaaatgaagaaggtgaacgcacatggtcttaaagttcccatggcatccatgcacctttgaaaagcttagatctagtcggccaactctctgaagaatcggctagccaccagtatcctcaaacctgggtcccccgctatccactaaggcatgaccatgcagaagtgacgaggtgcaagagatgttggggctaggtggagaagctatgacctgttgtgtcgacgatgaataacttatgaagggctaccaagtataacgacctcatctagctcacaacctcgatccctcaaccttcaatcctggcgtcagtgctgacgccagtgccaaatccatcgtcgatgactacttccactgccttttagcaaagctgtgaagtgggtcagaggctaacattgcgggaccctacgatggcaacgattggaagttttcctctaatgtcatcagccccagctaggtttctagtcaggcctagtgatggtattattagtaagactcacttaattaattaaccaattattattctaaattagactatgtcttatttatgaattttcact

SEQ ID NO: 316501 - DNA, 801 bp, Cannabis indica
ttgatctcatatttaagaatattatcatgcacatattatttattttaatattggattataaaacagattttcaaattatacatgaccagatcacccacttgctttaagtcctctatttcttttaggaatggtcttgatcttctgcatcaataataatggactcttaactatctatgtacgtatacagaattatgtaagttatgagtaatgagtcactgccagaccggtatttcatttcaatcagtaactacctggccagaagggaccttcgtaattccaattaatacagtccaaataaaatgacacatcttaaagaggtaattcttcaaaataattgtatttgtacataaagattttgtccttttccaatagtgttcgagcttttatttataggaaatagaaagcaatgtagatatcttttaactttataagaaagaaaacaaaagtgacacgtattttatatacaaagagaggatagtattcattagtaaagtagcaagaagagtttgatgagatattgattttgtgagcaacaagagagtcatgattatatatatatagtagaacctcaatacacttgagaccaaataaattatattctaattgaaaggttataactaaataaagttacactaaaaaaaaataattattaatactatattataataaaattattttagagtaaatataatgttcatacatgtattataatttgaaataaaatttactaattttacataaataaatttacaaaatatatgtatatattttattaagatgtaattattcttatatagaggt

SEQ ID NO: 316502 - DNA, 1192 bp, Cannabis indica
gctataatttagttgttactagccaaagggtaatccctttggctagttctagtattttatagggagatctagttgcttagtcttggtggttggttgattctcttcagtttgaatagttttctaattaaagttttatgctgttttttgatgtttttttcaggtggaactattttattgagttaggagcgttgtttgaagatgttatagctttattgtctaaatttccgggggcagttttgtcccatggggctcgctctaagattttagcggcccatggttggcaaagcatgctctgcggttagacgatgagctatcctggttcgaggaggttccagcgccggtggcggacgtgggcgtcgtaaattcatgagtgattttaatcactttgtcaaaaaaaaaaaaaaaatattacaaatagtaaaataatataattaaatttataattaattaaaagagaaagaaaaaactttaaagttacaaaggtacaaactaaccaagcatcgtgatatatatgtagagtttaaatttacagacaatttcacttatatacaaataaatttactatagtacagaaaatgtacaagagaaacataattttatacaattttttaaatatttacaaataaatttataccttcacgaattttacatgataattatttttattaattttctaaaaataaaaattaaacacataaagttaaatataatatacataatttaatatttataatatgatatatatattactaaaataatatgtttagtaaaatttaatacgaaactaaaaaaaaaatatatacaaacatatatgttattaaatatatgattagtataaatatttataattctattattaatttatgtttattatgataatattttaatagaattaatagaatttgtttattaaaagttctaaataatttaaaaaataaaatacttatgattatttttatatttgtgtaaatagttatgttgattagtcattcaaaaatatgtttgaaaaaaataaataaaattgtaattaaatgtgtgtaaagattatgtttatattattattgagaatgcttattaattttataaataaaatatgtttattatttattttatatatttgtttgatgtatatatatttattatttatttttattataaatacagtagaacctctatttaagaatactctatt

SEQ ID NO: 316503 - DNA, 1088 bp, Cannabis indica
aagggagaaagaagaaagtgaaaatgtcattttgaggagtggtaatgagttggagatacttggggaaaattttgagcaattacaagagctcacttcaatccaaagtagtgaaaaaaaaaagataaggaagcaagcatgctctaccctagccatcgcgaatagccgagcgaaatgagggttgaaccctgaagccttcctgtctattttgttttctccgtccttttacgtttggatggtggattcaactcagaagtgcaccttgtaacatcaatgaaaacctctattatggtagtgtgtctggctgaaggaattggttggccctctggtagtgtatcaatataccaagtcggaccctatatgtccacgaagcagggagatagcatctccaaccctcgtttaattcccagatgaatcggccataaccttctccacttattcggtcgggatactgatgatactgtaccgcaggctctgaagactttgaatgatcattactaactttcctatcatcaaaactagaagttaaagagctttcactggtcgaagacgagtctgcacggagttgaggatgatttttgtaaaggaattgaaggagatcctgctcgatgtgatgtgtacctccccagaacttaccagggttcatctacaaaagaagaaagccaaaaggtgagagttggatggaggtatagaaggaaaaacatattcgatatgccgacaatgttaattcaaagaaaaaagaaggaatttaatttaataaagaaatcccaacaccaagagctttaaaagaacactaatattcgtaagcctatgaatgagtaatctcagataatttctagccaaaatggtaagaaattagaaagcttaaaagagacgtgcatatataagtccaaagttaaaagccctagtatcttctaaatctcagattagtcaagaatagattcaagaaccagaatttacggcaaaaattcaaagaataatgcatgtactttaaaggaaattgtataaaagaaaaaaaaagataacttactcactgttcgtagactcttgagtgtcggagtgcacaaaatatgggccaaaccattcaaccc

SEQ ID NO: 316504 - DNA, 1336 bp, Cannabis indica
tcaaaagcaaaatttttaaaaacaaaaattttactttcattttgtgattaaaaaatttagaaaacaaagtgttaccaaacggcacttaaattgttatatgaaatcttgagtttttatatttaggcatcataattgaaaataatttaccaaaatcatctcatcttttttaatttactttctaaatcacctctctaacttatcttcttctctcacaagtcacaacacttctttctattcaataagattcaaaatattataaaagaatatttaaaaaaaaaattaaattacatcatttgatttaatacgaaaataaaaaaaaatatttaattgatttaatttaacgataaaaaataaaataattatttatataatatatattaaattttattttgtagtttttatcaatcaaaataattatttgtatatattttactgatttatgatgttatttattttgtttgttatgtcatttatgtacatattagtataaaatttaggagttttttcagttttaaccaaaaaaaaataataatattacaaaaaaacctttcgccagccaaataaacaaatgtacaacccaataaagaaaaattacacaaatgcctcttacacacacttttaacccacatatccacacttcctcagattgaaacatttgtgcgatgcaatgaggtcagcaacgatgaaaaaacttcggcatgcgagaaaacaccatcaattccaacaacgtcacctgagaaaaagaacaaactcacgcacaaaaccttcgattgaccaacccagcaacctaacacaaccgaaacgaaacccaaccagaaagagaaccaccattaatttcgacgacttcacctgagaagacgactagaatcaatcaaaataaaggctgtttcgaattcatgaaaagaaaaagtgcagaataactactacgaaactaaaattcaaccgaaaattcggtttaattcacataaaactaatgtcccgacttcaatttttagatccatgaaatgcaaatctcaaaagttgaactggagttctcaaacaatccaactcaagtataatttaaaaaaattacatcaatactatagttaaatatttatcccgatgcattttcattgttttttagatttccaatggtgaatttgttcatattaaattacgaataaatatgtagatagagttacgtacgtgaaaacactgttttaatttttaatgtttcataacacttgcatcacagttgcataaatattttgctaacagttgtttctccacatattactattaaggtacaactaattatcgatcaatgacaaaaaaaaaatactaacaaatagtttct

SEQ ID NO: 316505 - DNA, 713 bp, Cannabis indica
gatcaaaattcgatcgactcgagtatagttgttttgcactacgtacctaactttgtgttaaccaggttctaaaagcattagacagagcaaagaagaatggattttcagatgtgttgtatctggattcgattaataagagacatatagaggaggcgtcttcttctaatattttcatcgtcaaggtaaaaaataaaacattaattaatttgatgtgttgggtgctttttaatctttgctatgtattctcaaagagatccaacttatattgtcaaaagtcaatgatatatttattataattttgttctgtgttaagggggatcttatttcaaccccagccataaaggggaccatactttcaggagttactagaagaagcataattgagattgctcttgaccatggttacaaggtaatatatccctttattttttggcaaagtggttacaaggtaataattaaataccaagattatacaatcttaaaaaaaagagatgtatccctttctcgtttggctaaaataaaattataatttttagatatgccagttaaaggtgttcataaaatagtcgatccaatctaatccgtacgatccaatccaatctaatccgcaaagtgtggatatccacacttgtgcggattagattggattggaaaattcaaaatccgcacttgtgcggattagatgttgattgacatataaaagtaaccgatcc

SEQ ID NO: 316506 - DNA, 988 bp, Cannabis indica
ttcttgctgagtctttgtgacttactggtgctatgtggtgcagatcaagacaaagaaaagctagatcaaccttgaggtgatagtcttctccaacaatgtacatattgatctcaccgacctgcgtgttgggttgccaggagttgttttgggctgtatctattgtgtattttggtttaatgtttttaaggcatcgtcgtatatagttcttttgtaaaactttttataacagggatgctttttaggtcgttataatattcgattttagtgttttatttaagtcaagtatttttatattctcacagtttttaacaattaattaatctatttgtattaaactagttaatgaaatcttacatgtggcgtccctatagattagggcgttacacttattccaaaagataaattgtccctccaaagtggttgactaccggcccattacttgttgtacaactctttataagtgtatctctaagctcatttgttatcgattggctaatgttctctcaaacatagtgaatcagaaccaaggggcttttgttaagggtcgttctatagcctacaacattttcattcttcaagacattttgaataaatatagaaggaagaactgctctccaagatgcactataaagattgacatcagtaaagcttatgatacggtcaatttggatttccttgaaaagctcttggtggcctattcttttcctgccaaattcgttagttggatttgaattgtgtaagaaataccacttactctttgctcatgaatgttcgtgtttagggctctttaaaaggcgagcagggtctaagacaaggggatcccatctcccctctcctttttgtgcttgtttatggaatatttgtctcaaaaaatccaataggcggctagagagaagctattcaggtatcataccttttgcaaaaagctgaaacttactaacctttgcttcgcaaatgacttagtaattttttgcaaagggaatgagga

SEQ ID NO: 316507 - DNA, 645 bp, Cannabis indica
tggaattttaagatttgtgttttgtaccattttgcacttagtcttagcaactaagttgcttacgtatctttttataggaatcaagtcaaacgtagttcaagagtgttaaaagattttgtatcttcgataactttgtggagaattaactcaattggatattttgagataaataacctcatttaggatttttgagatgaatcattaatgagtgaatgacctcatttgagattttgaagatttgttattgtacttaattttagcaattaagttgtctacgtacccaaaataagatcaaatcaaacgtagttcatataattgtatcttcttaatcttttattttttggagacataaaatttatttaggaagaaatcttatttataatctcacttaaatttagagatcacattttttgccttctgagtcgtaaccaaaacatgcaggagacatgggttctttaataggctataaaagaagacttagaactgttaatagactatagccctctttatatattataagtgaatcctttttttttcatccattcatatatactgcatgcctttcccatacttaaatagaaagggaaatttgattttctatacttagaaaatcaaaaaaaaatttccctaaaccaaaaatttaaa

SEQ ID NO: 316508 - DNA, 1912 bp, Cannabis indica
ttagtgacatgcactgaagtgtcactaaattttttttagtgtcacttgtagtgtgtcactgaaacccatttttgtagtagtgtcaagtgcctcaggagaataaccgtcaaaggtgtgctaatgaaaacgtctctcgaggtactgattaattagagcattaattagccaaaaactgaagggacgcctggtcaaactcacatcgaatcatggatagatgcattcgacacgtgtcacccgttcaaatgtaaagtcggctcagatgaagtctacactcaactttagaagtcccgtacagacttggggggaaaatgttatcccaatttttgaagtttgacgtggcatctcatgctggttacacgtggagttaattctccatacctgcccaaaagagatgttcctagcataacacaacatatacctgcacggacgaggtcctcccagccgagcagtggacaattcgagcagcatatcaacacttagcaattctagaatttgcactgtgaagcacaagagaaatccctataaatctaggaccgtatcacagagatatggttggctatctaaatcttataatctgtgtattctaaatatgtaatatgtattcttaccaattatagatattgtaagtaaaacggaaaccttccctcaaacatgtagccctataaatagggatccattctcactggaaaaagggtcgaaagaattacttgagagagatctaagagagcatactcagatattttattgtaagagctttaagagaggaaacactgtattctttattcttaagtcaatacaaatcaaggggagtagcctattaccgaaccactcgggaccgcacctttttaaaaaccttgtgttctttatttatcttttcatattatatatgaattatataatttatcacttattatcaagactcaccgtcgttggctaaaagcgaggtcaacaccatctaaagttgaagcttggagatgtattaattgacttgtacatttgattatgttaatgcagaaagtattagggttccaagctattactattctccctcttttatgccaagcaatattactagtgaaacaccacccattaaaaacattagagtataaggatccaagcttgaagccttgacttttatctcaaggagcataacaagacaaacattttgagaatgaatcaattgcttgatcaaactttgtttatattggttgttggatcctcagaaattccatgataaaagtctatcgattttgaagaggaggctctccccccctcctatcttagcatgatctgcaatctgcattttttcctgactaataatgacatttttctcagggtgttccatcagtgcttcaaatgaattttctgtgctagtgccctcttactgtgttttctccttaggtttcgaacctttgttgcctggttgaaatccataaaaactcacaataggtgctttgtttatctcttcttcattatctttaacaacccacttctacttttgatggctctgcttctttctgtattcatcagttacatgtcctagcccattgcaattcttgcaaatggtgagtttccactcatacttaacttctacagatgcaatacacccatgttcatcctcaaaattgattttccctaaaaattcctatttcatagaaacctcaatgaggattctcgggaaattgagtttttgcctttgtttggtgacttcatccaccattatagggtctccaacctgcccaacaatcttaaacaaagtgttttggccccaatattttaaatcaaggttttcaagttgaatccagataggtacctttcgaatgtcttctttcctgaaattagtactgggacccaggccttcataatcacgagtctcttagtgaagaaggtattgttggaatatgttttacca

SEQ ID NO: 316509 - DNA, 927 bp, Cannabis indica
ttttttagggtattacattagtaccttaaagagctaacaattcaaaaagtacaaccaccatcatcaagatgagatcagctgcattttgagagaaaattaattgaaaaagaaaaagtacccaaaaaaaaagtgactaaaagagaaaaccacccgaaaaagaagaaggatgacacaagcttcatttgtttgaatttcttttctctttcttttatttttctcctttctttaagtatttgaagtttgtggaattgtaaagaagtaagtagtagtcatggatgaacaacttttattttggattttattttctggtttgaacatgagctaagcctcttgaggcttgaatgactatgaacccctatgtttgatatgattaattttaagcatattttaacaactttgcctttgttcattcaagtaagcttgcttgtttgtattacttggccatgagtaacaatttactaagttagatctggttctgaaaaggctagatctagtagttacaacttggatgatgcaagtgaatacctagatttaggtttttcttagtaaatgaaataggaatattttagttgtcttgcataacttgagaattgatgtttagatgttattctctgcaatctggtttgatataagaatatattgatctaagtggtagaacttactttgtgagttttgaaaaattctcataaacacaataataattctgttatctttgtgcaacgttgctcaagtaatgccgtagcaaatctgtagcaattggaaaaatcctgactaagggggattagttattcaagtcacttttttaactatattacatttcttacaagcaattttctagtgacattagcattattttagtcaagtttaattatagtcattttaaatttgaatcattgctcaaccattctcatatcttcccttttactt

SEQ ID NO: 316510 - DNA, 1492 bp, Cannabis indica
aaaacacgctaaaaacactcgtgttggtctatagggtcagtcatcaatccatgaagcagccagagtgacgtactcgtgtataagagacattcattccgtgggtgtaaggacccaatggaggcttgaagcggggacgttacagtatatggtggaaaatgttgctggttttgcagatcacgctgattgtaacactattgggaaggccttggacttgaatgttgctgctggtttagtgccaaaggatctgaagctttggtttgttgcagtataggttgttgtttatctctgcttatgtgcttagctgaacgatatttatctatataggttataacttgagttagaagagtagaatcaacacgacttattcgaccatgaagtacactatttatgtcatttcatatgctccacataacgcatactaaagcttcaaaatcaaccttatccatagttgttgctttgtggattagataatctccattgaacatagcatgagcacaattaaaatcaatattaaattgtgtttgcttccaaacagccttagcaaacttacatgtaaataaaacatccccaattaattcccaagcgctcttacatcttgaacaagttactaaatcaataaccttttttttttttatactgagctttggcaacaggcaaagcttgtttaatttgttgttaaagaaataaaacaataataatttattttattttgcttttacttatgtgaaaacaatatttttgttaataaatattaaaaagtaaccaattgaattgaatttgagttattatacggattaaatctaaaatataaattttttacttaatgcgaatgcatgcacaaacgaattaagttagattaacacccctaatctacacatacttactcatagtaaaatttatcaactacacaaaaaattgtaccaaaaaacatttctgaagtttaaacccaatttttttctcaatgcccctatattattagattcattacttgaactaattaaatcctttaagtggaaattaccaactataatgaatgatttatctacttattttcttctttcacatttttgggttgtcatttatctggccgatggactaggcccatttatgtacgatggaagcccaatcatatgtgcagacatcttccaatattcaaagaggaagccccattcaggcccatcaaaagatttcagccccaatttttttcatcaatagattttatttaattctaaaaaaaaataataaaaattattacgtgttgtcatttttgactttcatgatttctattcctactaccattaatatactatcaaacccttacaaatatcccgaaaattaaaaaataaaaataaaaaataaaattaatgtaatctcgcccataattttaaataggtgtgtaacatgttagtctaactcatattttctatgtttttaaaattatgaattctgttgtatcatgccataaaaaaataaagtacatgccaagtcgtgc

SEQ ID NO: 316511 - DNA, 677 bp, Cannabis indica
ttatatttaataaatttcatttaaacacgtccaaaaataggatcttgttgtattattttacaatataatataattatgtaaattatgtgcacatctttttaataacttaaacaagactcatcttcagaatatatatatatctccaagttactccattcattttatttttctcatatccaaccaataacatgctttttttttctctaactcatttcaaattcgtttttaaagatattttaataaataatgaaaagtttacaatttaattaaaaaaaaaaaagtgtatttatgaaactagggtgatgaatataatttttttttaagctgtttattaaatatctcacaccgcatagacagtccatacagtataaaaaatacagtttaaaatctttcggtgtaattgcgggttatatttcttttcaaatcatatatgatgagatgtgatttgcagtttttaattcaataattgcatttaaaattgtactacactatacattacaaaattattaattttataatataattttatttttttcaattatataattaaatatatgtaatatattatagaattttttaaaaattaggatctatataataatgttaaaacttttttataatgttaaaaactttataacatccattattgaattttaattataatatttgataatgat

SEQ ID NO: 316512 - DNA, 592 bp, Cannabis indica
aatagtgatccaatggctaaaaaaatgtaactattagaacctcctccatatatttataaaaataagtatttaaaagtttgtaacaataatgtgataaattgttcagaaaaaaaattataatgtgataagttaatttgaaataaaatagataaaaattctagaaaataatttgttgttgttatcaaaatttgtattttttaacttaattttgaaaaattattttcttatttcttaaatttatttttaaaaataattttctttgaataatgacaaaatttatatttgtgttcaaaattacctttttagaattatggtgtatcttttagatatttactgttttattaatttatgtctatattatattaaatgtgattatataacaaaaatatatatatattttaaatatcacaatttaaatttaagctcactacgcttattaattttatatttttatcttatattaaatataactatatgttgtgaaaattatatacgcaagtatacgcagtcaaacaaataataaagtgataagtaagatcgtctccacagggattgcaaacaaaaatatcttgtaaaaccaactaattacaac

SEQ ID NO: 316513 - DNA, 637 bp, Cannabis indica
gacgacactataatcatgaacaaatatatatgttttggacttaatataatttatacattaaatgtaatcatgaaataaatcatgtgaaccatgcaacataaaatgatttctgatcttttattaattagtaaatgtgattatattaaaatgagttttatttagggcacaaaacccaacaatgaagcccccattgagtcttatacttcctcagattgttgtaaatcctaaatttattaacatgctggtccatctcccatggactatccttcaaaaccagctttagagcactctcttggtcaaggacttcctcttccatgttgacttcatcctggtggaccttaaaaaagaagaaaattgaagcagttagccaccccaactacctaatatagaaaaggatcaggggagtcctctcccataaactgcttggggaggtcctaatgagactaaatatcctaaagcataaacttccaggagtcattcgttccagatagaaagtcaagaacaacaaagaggaagaaacagagaaaagattaatgaagaatcgaaactagaaggattttgggcatggagaaattttgccagcacttctactgtaaaacgattgatactaagaattcctagcagcgaattctaaaaa

SEQ ID NO: 316514 - DNA, 1714 bp, Cannabis indica
atatatatatatatacatatgatctataataattgtacttgcacacataatacatatctttattacactaataattaagtaatactaatttattagatttattagttatgtatattatagtgagagaactagaactagaactagaactagagcttgatatgagtgggttgaatatcaatggcgaaacccttattgtcatgttgcttccaatagtcagcctgaggattaatccattcagactcagaaatctcaaccctagactctcccagtgcttctgtcgatatgttgtacctctcatctctttccctcaccagctccggcttcactatcccgggactcaccgcttgaggcgacatcatcagtgccggtgcacccattggaagcggatcacctaacacaaataaaaagacaaaaataaaatttaaacactctattttacgcgtataaaataaaaaaaaaaaacgtataaattgtttaaaatttatttttgaccttttatttcaattttttaaaaaatttataaaattcatatatacacatcaaaatttgttaaagaaaaataaaaataaataatttacgacataaatatttaaatttaattctcggttataaataaatacttaaatttaatttttaataataataatctctaaattatatttatgaatttctgtaagactgtaagtaactaattagctattatgtatcaagtcactatttatgttttattttcttataattaatatatttaaattaatttttaaataaaaatataataatctagttcgactaattaataagattgacacataactattaacttgacgattatagataaataaatataactttatattattgttaaaaattaaattgagtatatacactgtaactaaaaattaaatttaaatatttatattaaaaattattaaaaataagtatacatatcataataattatttttatttaaaatatttaaaaaaaataattagaatagtatttataggtaggaaggtacctctatcggtctgccacgtggaccagaatttgccataagttttggtcatattttccagctcagattttcctaacatttctggtacacgtggattcacccacagccctgatttcacctgcatttccattattaattatttatttatttattcaataaattaagaatattgctattaattaaccattactctaatcaccccatatcagaggtgtacatgtttaatcaagttatattatatttttattaactcaatataatgttgagatataaatatttaattataactatccaataaaataataataaaaaaaatgtaaggtcaagttaactcgtttaaataagattaattaaaatttttgctctatcaaatgtaataaattatgtctataaatttttagaattattaaaaatactttttaaattattgaggttgttgaatttaagaagttttatctaattttaataaaaaaaaatttaacatatatgaaaattcaaggagcaaatcaaagttcgacatatgatttagtgaatattaaaatttagggagtatagtttagtacataaataatcactcaaatagtaaaattgaatgaaattaataaaaatctttaaaaaaatttaacggtcaaaaaatttcagtaatataatttaatacaaagacaaaaatcttaattaacctttaaataataataataa

SEQ ID NO: 316515 - DNA, 621 bp, Cannabis indica
tctcttgagaataatgatcctcactaaaagtttaagaagctacatatataagaatactacatattgtggactattgttgagtctgaacattgaattcatgttctgaaactttaaaatatgactaaaatagggtgccattttgatatctcctctccctgaacaatctaattttcatgcaggatgttctaaagtataattgaaagaactaaaaattcaggccaaataaatgtaaaaatacaaatagaaatatggaaggctgtctggaataatttgcactttaaaaaaatattattattttctataatgcaagaagcaagaatcaaattaaatttatataaatctagaaaatattccctcgtaaataaattaagaataaattacttcatcaaccaatattaacatggtagatatagtagcagtaataaaatatttaatgtgtggcaatgagaactcttaattagtgtttacacatatacatatacatttatatatacatccatgcatatataaagatacacatatacatatatatacacatatatacatacacatatgtgttggaatatattttaccaggatctagatttattacctgtatattttttaacatcctaaatatga

SEQ ID NO: 316516 - DNA, 3790 bp, Cannabis indica
acacaaacaaaaaataaaaaatattgatcacaaattaatataatcaaagcaacacacaataaacaataataatctaaaaacaaaatataggtgtgaaaacaagttttaaacctcattacagaactctcaaaacccgttaaacaagtttcaaacctgtgaaccttatgaaaccagttgtgaccctataaaaaattataaaaaaacttgtgaaatcataacaaaaccaatttttgcaatatcaacataatagacttaaatcacttagcataatgccaattaggccaaggacccttagagcagcaaaacttaaccagagacaagtaaacaaaactaataaattttacacaagcaaaccagccctttgaaacacataaactaataaatttcacaaccaaaaatacaaactcagtttctttctatctaacaacatgaacaaaattgttcttgttgttctacaaccacaactaggatatacagtaaataacagattaatataaaattatgattgattatataattaacacaatcatagtatacaaccaagttaaaagcttgttctcttaattagtttcgccctacaaataagaccaaattacaaattaaaaatgtcataacaatgacaacaaattaaaaccaatgtatacacaataagtgtcagaaaaatcttaaatttaaatcaattctgttcaattcaactgtgttatctctatttttgcaaaaaaaaaaaactcaaaattgcaaaccctattaaacccttcaacattttcgagagcaaccaaactataaattaaaaaaaaaattagaaaaaaaattaaaaaaaaattgaagaacaagaaagaaaggcatactgtagcagtgtatcataccataagatcactgcaatgtatcaaacccatccatctccgatgagtcttctttgcaagaaactagtttttgaggattaatgaaaaaatacattacattccaaatatgatttaagtaattataatagacgactatggataaaaaaatacagggtttttaaccatattttagttattaattattaaattataaaacacgtaaaaatatatgtaactatattatacttgaatcttttcaatataatacccaattatcatgtaaagactaaaaattaatataccaagtaacataaactattatcattatataaaagaatctgcgtaaataatttgtctcttatatcaactcttttattactatattcaaagcaaaattgagtatacccaaaattagatctttgcagacgatctaattttggtaggtagggcgaatttggacgaagctaaagggttgtggcagtgtttggagaatttatgcgattggtcaggtcaaagaattaataagctaaaaacatccatcttcttcagcggtaacacgagcaatggtatgaaaaggggtatcaagtaggctctagggcttaactgtgtgatgggtaacataaattacctaagccttccgctgtttacaacatgccaaaatgatgctaatttcaattttattctggataacctggtaaagaaattgcatgggtggaaattaaaatagctttctaaggtaggtcgtgctactttgatcaaatctgtagggcttgccttgccagtttatacgatgcagacgacaaagctctctaaaaaacttgcctccaaagttgatgggatggtaagagatttttggtgggactgtgagcaaggtaatcgagggatctgccttaaggcctgggatcaattgtggttacccaaatctcatggtggtctaggttttagaaaatccttagagatgaaccaagccctattggccaaatggggttgggatcttctcaatgaggagcaatcattatgttgtaaggtgcttagtgccaaataccttcggggtagacagtttttcgaatgtacggtcaggagttctgactcctagttttagaggaatgtggtgcatacaaaagagatcttgaagaaaggggcttgcacacttattgctaacgggagggatataagcatttggaatgacccttggattatccatgggagagatttctaccctaggcccaaacacaattctcggggggagcttgaacttgtggcggatttacttttacctgatgggaattgggacatctgcaagcttaatgatctctttgacagggaaacagttgacagtatcttaaagggcagtaaaccgaatggtcagggtacggatagatgggtctggacaaaagactgtagtggtgtgttctcaactaagttggcctaccttacccaagccttgggacgggcttccttgtgtaatgttgctccggccatgtggaacaaactatggaattcaaaaatcttggagcgtcacaaagtcctttggtggagtatcctctcgaatgctctacccttaagggccctgcttgctaagagaatgaacattgacgaggtctcctgccccatttgccggaacggtgatgagactatggagcacttgtttctctactgcaattttgcgtcccacctttggcggtcttccccttggggagttatgcccgttatggaatctggaggtcgcatgtgggattgggttagttttctctggaaccttaggtccagaggggtggacactgatgagttgttcctctatgcttcgattgtggttgacacgatctagagggctcgtaatgacaaagttcataacaacactatgggtagcttgattcattacattggctctatctcttattgctacgcagattatggttcctgtttgttaaagtctcaccaggttgttggaacttctgtttggtctcccccgcaggaagattgggtcaaaatcaactgcgatgtcagagttggaggtgaatccatgtgtgttgtggcgattgcgagagaccatacagagtctattttgtgggttgcgacaaacaagcttcacttcgttgacactcttatcggggaagtgggggcttgtctgttagctttggagacggcggtctcaatgcatcattcttttgttgaggtggagagtgattcagagagtgtgatcaagaacctaaaacgtgtcgaatccttttgggggattgagaactatacatgacaatgcaaacttctctctacttttatgactagctgtaatttttcttttatcactagaaactataattttgcggcccacaatgtggccaaataggcgtttgccaataatgtttctggtatggtagaggtttccgctatccccgaatgctatcttttgtaatgaccatgaggtctaattccttttaatctataaacgcttttattcaaaaaaaaaatactcaaagcaaacatcagtcatgaactattttagcctgtggagactgtttaaagagaatcattaaccctaataaattagaaacataaatgcatgtaatcaacaatggtgggtatgaaattaaattaaaaaatgttggtttgaaaatagagtataataaattgattaatgaaaataaatttccaaaatcaattactcactcagtacttgtgttctcttcttgaagggcaattgcataagagttgatcagttgctcacaccaaatacttatgatatatcattttcatctgcttgatagtgagtttcatagtgaaaaacttgtagagaaggcaaaaggcagtagcagtggtcgagaagggacttggtcaccagagatcgcattgatcggtggtgagagagagagagaagaaaggagagaggcaacgactgagtggtgtggccttcgatttagtccgattgaagagagatagagagagagaga

SEQ ID NO: 316517 - DNA, 698 bp, Cannabis indica
ctctctctctctctctctctctctctctctctctctctctctctctctctctctctctctctcttgtacagctctttgggctggtgctatggcaaaaaccagggcgaggcaagggaagcagcaaatggaagcaaagaaacctaagaaaagaggtccaacctctacggcagatgctcggaaaacgaaatccatggatgcagtactgggaattgagccgattaatttctcggaggatgaaggagaaggtgaaaagggagtacgctcgtcacagattgcctcaatggcagatttattcaaacctccattatcgcctcgttcgtcgttgcaggaaattcagaagcaagaagagattagcagggattttgaatacttccttagtgcaaatcgtgattgtgctgctagcattcagcaaggtaataatactactctacctattcttagatctggaactgtagttcgtaatttggaaaattcattcaagaacactgctactgctgctaaagtcaaaataactttagacgatataaaagatcagatttattttttgagctcctctatagtgtgttatgttcttggggccaatcctcccttatatgttcttgaaggattcattaaaagagtttggaatggcaaagtggataaggttggtgccaggttttatgccctaaataaaactctttacaatctgattagttatc

SEQ ID NO: 316518 - DNA, 1329 bp, Cannabis indica
ctattcaatgaattttttaattatttcattctattttatttaagtaaaaatcactaattagctaaaataaactatagaattttacatgatcactaataaataattatatgtattaaaaaatataattttttttttagagagataacatatacaattaatattaattaatatactaaatatatcaaaaccctaaattttaattattctttattagtctctttcccttcaaatatgctaaagcactttaaaatacgcaagtaataaatttataacagaatatgattcttttaattataaaagtgaaaaatattaatgatgactacaagtgaaatacggtgataatattaactttaaatatagcggtaagtacaattaagatatgatgataatacttattttgaaattatatgatgagttttctatagatttgttgtcttctttttattttacatttatattttgcttgagtattgtttattttttaatagtttgttaatatacatttgaagatattttgtatgtattttattttttagacaagaaattgtacgaagaatttttttaaagttctctataatttttttttaataaatatatactttttgaaatataaaattttattctttaattaaaattcatatataaatttaaaatttctataaatagacgcacgcgaagcgcaacctgtttactagttattaactgttgaccgaggttttcggcaaccaatataataataatattttagaaagctataaggaattaatgagagagatttttacgtggttggggcattaatgagccttagtccacgagtctgtgtatttatgagagtatttactacagagaatgttcttggtggttatcctctctagttcttatgaaacccaaaattctcgacccctgccttgatgagtttggggggtatttatagtatttttctggggtgatccctagaattgaggtacatgtctttctgtaattttcagtaaaggcacacattccgattggatacatcataggaaatgcatggtctaatccctaggctttgtaggggtttgatggacgtagtcctttatccttcttgactgatgtgatttctcataaagtagtcgtcactaggcttactaatcatagcgcagtggctgcataaagggggtcacgccgtcagactttaagacatatggtagcttcaatacgccttctctcatgcggcattaaatgcgagatgactgttcagataggatttgagaccttccagagatgctttgttgtagctttgctctccgggagtatgtgaaactcgcgtgccttctccgggaggcatgt

SEQ ID NO: 316519 - DNA, 1591 bp, Cannabis indica
aaataatttccaacactattttgtaggaaaatcaagccattatgaaggaaaatcaggctcttaagcaaaatcaagacaatcaacacctaatgattcaggcattagtgcagaaattgagtgcgagtattctaggatttcagttagaccctcctccactacagtttgatgatgttggatctaaacgagtagagacgggagataatgatggccaagataatgatgatattgatgataatacaaccgatatgtagtagtattcattttgttttaggtgagaaattaatacttatgttagtattttaaagatgcatttgtttactaacttttagataattataactataaacatatataattagaacaatttttttttaattattttaataaataatggataaatttttaaattaaataatattaattataaattaaattaaattacaaagttttaccagcgcattaatgttggtaaaagtaagacttttcccagtgcgttaatgcactggtaaaagtaagtttttcctaatatatatttgtgctgaaaaaagtttaacttttaccagtgtatttatgcgttgaaaaaatctaacttttaccagcgtatttatgcgttgaaaaaagtcatttttgctagcgctttttattttgcactggcaaaagttgccaacatagatttgtcaatcttttttgtcagcacagcaaaaataaattctattttgctagcacaattacttaacttttgtcagcataaaaatgtactaacaaaagtctcatttcaatttgaaatatttttggtttcaattaaaactattagatcgatcgtttccttcactagattttacttgactttgaatccaagataattattattttttttaagataattattatttgaaactatacctatatatcataacagaagggtccatttcaagctatgatcacttatgtcattggataagtactctgaaaaactcatatataggaaattgaaaatcacaaatctttttgccaatgtttggaaattggatttgaaagagaaaattaacaacaatatataggaataaaaaaaaagaaagtagaaaaataaataaataaataaaattaatttttcgatataaaattttttgttgaattgaattttttactataaaattatttatttaccaaacgtgaaaaattacttttctcaaataataataataaaaaaaagagaaattgatatatatttttttaaaaataaaaaaatccacacttttgtttccctacatttttcttctttctttcttttcccattaaaatcctacttccaaaagccttatgttcttttccaagatttgtgtataaaatagcgatattgttattatttctccaaaaaaaaaaaaaaaacacacacactatactatatgtgattactctcaattctttgataatgtatctacactaaaaatatatttttagtccaaatactaaaaatacaaagttgtgactgaaaaaatatcattacacatgtgttataattgccaaaatggtttttactaaagtattaattacaagaattataatttattgtgatttattaaaaggctaa

SEQ ID NO: 316520 - DNA, 1115 bp, Cannabis indica
gaaactcgacttggacagtgcctcactacaactttccactctgtttttcactctccaatcagatcactcactctctgattttctctctcaatctcttaatgagttcacatgcctttatatataggcttacaagatggaaaaacagaacaactaactaacctaactacccgaacagtgaggactgtgaacataacagaaaaaacaaacttctccaacaaacttggagcttgacaaaagtcaacctgtttacttgcttggattacaaaaaacctaacaagagaaaaataagaaaagttagaatttcattcattaaaaagtaaaaacaaataatagctaagccttatataatctatatatatatatattaacttaaaagattaaattaataactaaatacagatatttataactctaattaattatttaattttatctatagtatatgacactgcatataatttctatttagtaatagtacaaaacttataattatacttttgtttactagttgatgctatggttaatatcaagtctcagtatggagtacaaaaaaactggcaaggggatccatgttctcctaaaaaatacacttgggatggtcttacttgtaagttcaataatcaagatccagttagaatcatatccttgtaagtctaaaatttttgtttttcaatttgtttgttttttatttagttcttaaattctataatatattttaatctcctactaactcttacaactaattaacaatttttttttcatgcatgtgtactatgatacaatctttattctatggtactagaaatttatcttcatttggattgactggaaagataacttctcatttatcagatcttactatgatacaatctttgtaagtccatatattgttcatattattactacgattaatgattcatgtacgagaattaattaccattaattatatataatttgattgcaaaaaaatgtatttataataattatgtgcattgaattatttcagggatttatcaaataacaacttcattggatcggtgcctaaatttctttcaaaattaccgttcttaaaagttttgtaagtttttttttctctaatatatttttcactacac

SEQ ID NO: 316521 - DNA, 613 bp, Cannabis indica
aaatttatattttttttctttcccctgtatttgtttaacttgagagcttataatgttttatgttattctactattcataggtaaccttacactattctttgctctaaatttgttttattagtttttagttttaaattattttttatgtataagtatatgtatatatttaaaatgaataaatatattaaatatagaatataaaagaaaataaaaaaaaaaactaatgaatgatgtaatgtaataatttgttgtaaaatagataaaatataattaatgatgtattttaaaaaattgagaaaaaagttatgtgagtgccctaatgaataatcctaagaactctttcttgctgacttttgtagccaaaggattctcataaaaaattaaatttaatgatttataatttattagatggcactgtacaagcagtaattttccaaaccacatcacaaaaaggtggtgtaaacagttttcaccattcacaaactagtttaataatcaaatattataataaataaaataaataggattcttacctttaatttatgatttagagttttattttttgaacttttctttattgccaatcctgtaaattgttgtaaatattctcatt

SEQ ID NO: 316522 - DNA, 2033 bp, Cannabis indica
tctctcacacgcctagcctaggttgtacaacatccaaggctgtctaacacttgagttctacaagatatcaattcatacattgtaatgctaagggtactatagcagatctcacctatagtgatctggatagtaattcccttagtataatacaactaaaaggggagtaggttattacccgccatcacaaagggggcgaacctctataacaaatcccgttgcctattgctttttattcttattttgcacacacttggcaagcattagatatgcaccaccgcgctgtcggttgatcaatttttagtcaacaatatttatgttaaaaattaatttctaaatcaattttagatcaatatattaaaatgttttgatgatttattttattttattttaataataattcaaaaaatatattttatttaaaatacattggattttgaattgtgattaattatattaatagaaaattaaatttaagttgaaaattaatttttaattaatataacttaaattatgtaatttttataatatttatttaaaaaatataccaattgtggaagataaatttttaaattatttttagatcaacctaagtaatatttcaataaatattaatttaaaatttatgtttagttcatcaaaattattaattttaattaaataaatatatattaaaataaatagattggaataaatatttaaataaaatacaatttcttcaaaaaaaaaatgagctctaattttaagatattcaatctccactattggtcttacatgattttgttttcaatgggatctcgagtcgctagattttgtccccttgatggatgttcatccattaaacattaacaccgtttgatatcagaagataagtgttttgttgattttttttctagtagactcatccctatgatgactacatagaattaaatttacaaataagaaataatagtagaatctcataaaataagaattaccttgactctcgcctactgggacaatgttggattcttatttttataaaataaaaggttgctaaaatggtgtccattttagatgagcgggctactctattcaattgatgatatctatgactctcccgtaccgggacactgtatatcgatcctgataaccttggaaaatatttgagtgctttgtatttttttttatatcttcattacttgctaaatgcttacaaattttatttacctgtattattttcatttattgattatatagtatcaattttgaatcttcattgttggtataacttggcttattattattaatgggacaatcctcaatagattgtcatctcttagacaacataatagtgttagatctcgtgagataaatattttataaatacaaaatctagttgactcatccatacgatgaaaacttagactagtgtttacaatgctaaaacaataaagaattttatgaaataagaacaatgttggttttctcctactcggagatcgttgaactcttatttcaattgaaattgttctttagttttcctcttagctttttcatttaaaatttttttttaacatgtatcatttgacacgaaggtttataaattacttgcttatgatatcactttattttattttataaagtaaatgttgtaaatgaccatattatagatattatatcccgtaataataacaatcctcaaatcttagaaaaatctcctacttcaaatacttgtatgtaaggaaattaaaattagagttgaattactactttagtaggggtccaactagaagaattactcattcggtataaatgaatgtctttgactttaaattttagattcgaaataaaaatttaatttcattttctagaatagattaaacactacagtataactttcacaagttctcaatatccattttctatcaatggatccaaactatctattaagtgtatggattatgagttttatattttttgacaagaatccccttaaacgattctaagaactctttgttgtaaataaacataggatcatcaaaagatcacaacca

SEQ ID NO: 316523 - DNA, 645 bp, Cannabis indica
aaaaaatatacaattttaaaggggaaaaaaaattttgggcccctgggctagatgggccctaggcacaggcctaatccgcctatgtccaaggtcgggcctgcctgttatcccctcttgtttggcccttcctttaaggagttgttttgtaacaagatatgtgtactaataagtcatagacgttattgtaattaagataagaatggatgaaatttagatttattttttttaaacgtttatcttaattaattttgtataattattgtagtaacagtttaatttgattacttataatattagtagacacactttctatataaatggataatcaaaatgaaataaactaaacttaaattattgcacaaagtagaatagacaatagacagatccaattctgattaaattaatataattcttttgtatactatatttttgtttttactttaagtaaatactcacataactgctaataagaatttttgttttgttttcttttgtaaacatataattagaagtaatttatattttatagtttctactttctactttctagaacgttaaacggaaatgtaataacacagatacgaaccttcaaagacaaaatgagatacaacaatttaataatgtggaagattatttcttgatccg

SEQ ID NO: 316524 - DNA, 1121 bp, Cannabis indica
atataataataaaatatatttttttggtataaattttagtgttgtggttgaagtgaaaataaattttaatattaaatttgatgatagtatgacaccaaatttagtgtataagttagaaatactaaatataataaaatacaaaatttaaaaagtaaaaataaacaaagtaacagatattttgattaccgctacaattcttattattataaatcaaacatctcctaatcccgatgtcttttacattcttcttgtttgatttaaagtacataccattgttttcctctaaattattataaaataatagcataagctcaatttttgctttttttttttttttttgaatttaggtggctaaatccttctaacaattatttaactctttaagctagaattttggtagtaaagccaccaaactattaaactcttaacaaatttaaagtatcaatataaatatatcacgtgtataagaatatacatataagcagttcatattggtagttaactgtgacaaatggatgtcacaataaatttgctagcggttcaataactttgagggttttactatcaaaatttgatcttagatagttaaatgcaagtgaaatagtttttggcggctaaaccctcccaactgttgtttcacttgcatttaaccatccaagctcaaatttcgacagtaaaatcctccaaactactaagatggtagcaaatttaaagtgtcatccagctaattattactatggactgcttatgtgtactcttgtatacatgatacatttatattgatacaccttatattataatttaaaaattatttttaaaattcattttaaaactaaataaaattataaaaataaaatgttaaaaaataaaaatatattataatttttaaaataattttgtattttttaaatattaatattaggtgtaccaatataaatgtgacacatatacaagagtacacataagcagtatatattagcagttaattgtataaaatgaatgacaccttaaatttacaagcagtataatagttttgagagttttactgtcaaaatttaaacttagagggttaagtgcaagtaaagtgatagttgagagagttttgctgcaaaaaaaagcga

SEQ ID NO: 316525 - DNA, 1421 bp, Cannabis indica
tctagatcctggtaaaattattttcaacatcaactacattcttcgattgagcttgagacagttgagtgtcatctacattctcagattgaggatcaatttcattctttgattgagcttgagacggttgtgattgagagaattggcttgttatcattttcagttgggcctttaaagaattgaatttttcctcgatacttttcaatgcttgtttaatttcttgtttttttttatcttgtagtcgttcctctagtaattgtgcgcaagtgctccttggaggctttttaaacacctctctttaacacacagacaatcctttaccacgaacacgaccagggtgctcgtgtttacctaatgcttgggcaagaacatcatttgagccaatcacaacaagttcagcacttgcttttttctgaagaagttcattctacacaaataaacataatcacttggacgattatcaaaagatcaaatatagtttagttaattagttaatataataacttacaatcttttcaccaatttttttggttgattcatctaaaaattctcctttagaattcgtccaagattgcttccaaagttcaactcggtcaatgggtcagatgtacgacgctctttttgtatcttgtcatctatttgtgctattgaagtcaaactgatcaatgaatatattcttgcttagcacgtctctcttgagccttttgcaatgcctaaataattaaaacaaaaataattatcattgcaattatacttaagatgcataaattgaaatattaaaataaaacttactttaaatttaagattatttcgggaagctacaaattttttccattgctcccttgtgatattcttatttttttggtggctctgtcaatgcagtcggatttttcttcgcatactctggattttttaagtaagcatatataatatttgaagtcaaatctgactagtgatccctccatttattgcaaatagactcaaaaataaaagcttgataactatttgcttcaactataaatgtcttctgaaaagaatgaaaaaaagtttcaacaattcatcatgttaaaaaaatatagttacatgtaagtacttttacctcgatatcatcccatagattactcaatattgtatctgaaacacttggccaatggatgaaatctataggcaccaacgtacgtgcaaggttgctaagataagtttaaagtatcctacaattatctccaattggttgaccatgttcattcaattttagaggaattttcaacccttgacttcgccacttaaatacctctttacacaccgatggacctcataatttctttggttgaggttatttatcctcattgggtgtgttatcctccacaagtgtgtcactgtcatcctttgtcgtgtatctctgcataagaacattaaatgtatga

SEQ ID NO: 316526 - DNA, 485 bp, Cannabis indica
tatttgtactaatttagaaaatacagggtccattttatcatttaacaaaacacagggtccaattggtaacttttgtaaaaccgagggtccaaaatggtatttaccctaataaatatatagacggctattgtgcttgagctcaattttttaaagtttaatataatcacaaatataaagtttaatatatatatatacaaatttcatattaatattcaaacccaatctaatatattttgtactcggatactcaaaataatattcatattatatttgcaacactaaatctattgcatccttgtttatttatttatttgaaaaccaaaataatttaattataaaatatgatatcttttttaaatttaatcgttcgtaatgtcacgagaaaaatgcaggggcacttcagtaattcccttgcctccgaagttgttggaaatcagcaatcccagtaaagatttgcaccagctgtcatatctttccgttagcat

SEQ ID NO: 316527 - DNA, 1225 bp, Cannabis indica
ttcatatgtaattaccacctcatatccaaacacaccttgcattttaaaatatagtgtaattactaaactgtgtaattaccaccctagtaattaccatacctagtaattacacagttacttccaaacacacccttaagtaaactttttactctttgaactttttagatcgttataaattttatttgaattattgagattgttggatttaatattttttgtctaattttactaacagaattcttacgtgaatgaaaatttaagaggcacaaattatttatattaagtttaggtggtacgatttgatatatattaaattttagggtagaatttagtatatgaataattattgtgttagtaaaattgaacataatttgacagaaattcttaaatttaatattctcaatagtcaaggaacctaaaaagtttaaaaagcaaaaattctagttggctaaaaaaatttgatttgttagacaagaatttatattttgtattttacaaaatcgaatcaaataaaacctcgaattcaattttgatcaaactttttttaatcttaaaactatcttttttttactaacactaatgattgtggtatgatttctaagagtatgtttatccattttgtaatataaacataaaatattatgtggaaattgatcctctaaaccaacttattatccaactcatttaaaccaactaacttaactaactttcggttatgttagttagttagttagttggtgctatccttgtttgagttaggactatatataagtctagtcttttcacttctagaaagagaagaatgagagaacataaggaagacagagagagaataagagagaggattagagggaattgcttagggttctaagctgagagttctgttcttgaagagggtcaagaacaaggggtgtactcgggttgatagagagaaaactgtgactgttttctctggtgtgtatcgagtaccatctgagctgtgattgctctggttattgtaattgtactgttgctctcttattcacatattaatgaagattggtgatgtttctcagctggagtatggccagggatcatattgatctctaggaccggaaccaggataaaatcgtgtgttgttctttgtttgatttcggatttgattcattgtggagattaattggtttatgttcattttactgtcaaagttgtgagttcattgctagatttttatgattgaatcctc

SEQ ID NO: 316528 - DNA, 2266 bp, Cannabis indica
aaatatttttaatttatccatcagaaaaattacgaacatacaaaaagaagcaaaaatagataaaaatactaaaaattaataaaaaatagtaaaacaaaaattaaaaataactctaaaaataaaagtttatagaaaagttaactaacactaataattatatctagtaactgataacactaaaaataaaaattaataatataaaagaataatagctaaactaataattttatctagcaactaataacactaaaaataactaacactaaaaattaacactaagtatattgactatttagctattattattttcatcatcattgagaattatttgcttgttctttttttttttttgttaacagtatcacaataatcttcatcaaagtcttctaaaatgatgatatgttattttcaaaatgtattttcttgaatttgttattttttttcttcgtttaattcatgttctcgtttgaatttctcattcgagtccaaaaattttgacacacttaaatttagaaactcctctttcaaattgtactcattcaacttcaacttgtaaacataatatttcccacaaagccttaaatctctataggaaaatcaatgtttggagacaacgcgttaactaatttatttgttgatgtgtccaataacatttcagttacttcattaaataagattaaatttgttttaacaattttgtcatttacattgatatgtattttgaacttatatattaaggtgaaaaagtagagaaaaaaaaataaatataaaacaaaaattatgaagaacacttataacataataaatttgaattttgagcaaatcaaatataaaattcttacttcataataggatatttaaattcttttttgtaagggcgacactaataaataccttttttaggtacaatttttctcaagtaagatttgcatgaaatataataccatccaaattaatgtattgcctatgcctataataaaacaattatcataaaataatattataggtaattaatgaaactgtaataataatacaaaaaaatcttcttcaaaagttgtcttctttaaataattgtaactctcaatataataacttccacactcttagagttggtggaaattttttgtagtaataatgctacataatctatttgaagattaatatagaatttggttgcacttgtagcagagaagttaatttcatctatttaaaaaaatataaattgatatacacaaacatatattattgaatattcaaatattgaatagtggaatttaaataaataattatctcaaaaatttttaatggtagtagaagttactatcacaataaatggaccaccatctttctaatataaatttggatcgaatatctcacctaattttttccataaagttatctttaatgtgatgaactatacataaaaattaacagaatttaatagtaaataaaaaagaaaaatatataaagtaaattgtatataaaaaaattacaatacttattaatttgttataactttgatctctctctttttagaacgacttctaacaatttaaacatcaccgatacgtaccacataagcatccaataatatttatatataatataaaataataaaaaaaatgttagaatattataaagatgaatagttgaataaattaattaaatatcagtaaaatttaataactaaataaatacctgagagtattgtgttaacactaacaagtaaatgagccaaatttaaagttatgaattaaaactcagtgatcgaaatgttaactatttctccttttagtctctctactgaagttgtaataaaaaataaaattttatagtcatttgaaagtggtctgtactcatttatggttgccaaaattttaaaattttacaaatagtgcaaaaaaatttcactaaattttttcttattgttgcgtgcatttagattttcttgtatgataaataatagacacgttgagtatttaataattgataaatgataaaagaagtaataaagagaaaaatataaaaaaaaataataattaccttctcattaattaatatttaattctctattctttttattattaagagacttctatattctataaattttaatctttatgttttaactatttgtgtttaagttggtatgaaaagaacactctatggttagagaaaaaagcgagaaggtaagtagatatatatagattttagtaagttacgtgccaaagcacgtagtgttagttttatttaatattttagtttt

SEQ ID NO: 316529 - DNA, 848 bp, Cannabis indica
tctgaccatatatagaatattacgtagttaattttgtccaaattcaatgaatataaaatactcatttatcacaaaatcaattatttatttatttccttaaatagaaaatattctaatatggctaactatagctcaacaaaaaatttgtatttcgaatttgaattctttacaccacgattgatctaattgtaaagagtaactttgctagtttacataatttcccctaattactggtgatttcctcctttgtctcttgttcccgaactaagataatatgttgaggatgtattctggtagagttttgactagtctggtgtgataaaaaattcttcgtcttttagaatggcggggtctcctatttatatgcgagaattaatgtagaattgccctcttctttcgatctaaatgctttgcacgaacttgttcttctcgcttctttgagatcttccttttccattctgcttattatcctctattcttttttatgttcagctttgatctgttgtttttgccttttttttatagtgaaacggtttgttttttttgttattcttgcaacatcaccttattagttctattgttgttataagagtaaaattatttttatatccttgggattatttttatcccttacaattgcccatcgattctacaattttcaggcttatgacttctttagtatgagctcgaatgtcgtggaactggttactcaaaattattctcatgtgtcataatatagttgtgattgatttaatgaaaaaaatcatttcaaattttttagagaaaatgtccagccttttcaaataaccctaattttcatattttaaatttgtaattgtgtgtattta

SEQ ID NO: 316530 - DNA, 1298 bp, Cannabis indica
aaattttccaagtgaaaagacaataatgtattaaccacaatatatatataccaaatatattgtcatgtatttggattcatgtttggctatatttatatcttttgttatgtaaagtaacataaatgacatgcatggatggagtggactgtgtgtgtatagagagagagagaggagagaagtggagtgtatatatacatatatatataggagtattgttattagatattggtgggatttaatatttgtgtcacttttgtaattaattagcgattattttttaaaaattattatactgagactgtacttatagtaatcagggccgactctgagaatatatgaaacgaaaaataaataaaaaaaaaaagagtgtaatggaactcaaacttatactattaggtaatgtgtcatataatccaaccaaccaaactattaatatttgttatctataaaatacttgattttgcttaaataaatccacatagcaactaataaagtaactcactcaaatccacatatagcaactcacatagcaactaaatatatagcaaaccaaaaatgtaaaaataaaaaaaaaatggttaaaaataaaatataaggtaattcctctatttttaattttgtaccctgaaaaatttgaacttaggcacatgcctaatccgcttatacttaggatcagtcttaaaagcaatattgacgagaaaaactagagacgtacacataatgtctaacactcttataaagtataatatccttattaatacaatttaatatccattttaacatttctctatctatatataaaaaaatgttaaagtacatcagtggtgtctaacatcctccgatatgtcaatatcgctattagttcaattaagtattatatctcatatagtttaatataataacttttaaaaagtatcactaaccaatcacaataaaacatatcgagaaggtactaaacaccaccactatatatatataacattaatattcatatatatatataaaaatatatataggtaagtaggggcagttcggatttagaataagtgtgaaaagcacgagacaagaggagaacaataaataagagagatgagatgaaagtgttatgttatgttatgataaggctctcatcatcgtcacgtcgtttttcattccctactcccaataacctcccagaattccacgcttccctcccttctctctctctctcttccttttctctctctactctctctctctctctctctcttcttagtaatagctagcaacctcatatatatatatatatatctagttcg

SEQ ID NO: 316531 - DNA, 1085 bp, Cannabis indica
ctttattgatgttgaataaaatagattacattgaaatggagttttatttagggcataaaacccaacaccaccacaccaacattttcgtacagggctcttcccctcttgacccccatcagcaaccccacaacgccttgctcattatccctcatcgaccccgccgtagctcgggcagaccatgacgtgtccccgaaatagtgcctctttcccagcttcaaacagacaaggtgtggatctggatgtaggtgatgaagcccatcaccgaggatgttatttagcgactattgaggatgatggtcttgcattaacccgtgccttcctttttgatggctatacccgcgggccatgaagggctcatcacccggccttgattcgttagaccttgtaaatgcattgggggcctcttccgcctcgcctgaagctgctgacattgcataaacactagtagctggagttgtggaggtagtcgccaaatacattctagaggttgagttactgaactcccagatattccaacccaaagtcgccaatgttaatgtcaacgttttgtgctctgctacctagcgacgtgtctgattccctaatatcaactttcacgatattttctttagaaggtttttgggttttatgtcttaacagataaaataaggtgggtactcttcctcttcaacttctttgtcgtcatcctcttcctcttcgttttccatgataacccactacttggtctattaggctccacgacaaagggtcccctataaagaagtaagaaaaacaggtttaaagagacaaaagttggagagagagtgagagatgaagggtcgtgtgtttttttgcttgttctactccaatggggttaaagttttgcttgggaaaagaaattacccattctaatttttcttataccaatcctatcccttcaataagagaaatgctaaaaggaaccagtggtacgtgtcaatatcgctattagtctaatattgtatcgtgtcctatataatctaatataataatttttagggagtatcgctatccaatcgcaaggtgacgcgtctttgttgggttttttgccctaaataaaatccatt

SEQ ID NO: 316532 - DNA, 633 bp, Cannabis indica
cccaaccgacgacatagatatatatattctttacctacagtttttttaccaaaaaccgcctctaaatgtcaatgcggatattttcacaccttttagcttctctttttataaaatgggttgaaaaaagagaaactaaaggcttacattgtagtagtggtatgacatatttgggcatagaggtctttgaatgtggattagtgcacctttatttcgtataatatatataattatgaaagtgttagaaaaaatgaataatgttcattctatacatttatttatattaccattctatacacttttagagaaattgtaacctcatcaacaaaattttgtaagagtcgcaaggtgatcggttaaggatgttatgggcttagtttattttcttattgaaaaattgagtttttgcaaatgtcaataatatatacaaaaatataaaattgtttacgtctgtagaggcagaatataattatgatactgcagagaccagttttgcagcgacaaaatagagcagacataatataaaaataattacataaaattaaatcacttgacacaagagacttgtacgtggtatcagtgttctttcgaacactcctagtccacgggaccacgcccagagaatgaaatcaatta

SEQ ID NO: 316533 - DNA, 1539 bp, Cannabis indica
aaaaagtgtcaacttgaccaagcttaaacattgtttaagtctactcaacatatgcaagtgctgattcctatctctatgttcaaatctgctacacacatcatattccttctaaaacctaaaatgactaaactaaggtggatttgtggtgttttagttcaaccattttatgttttattttggctgatgtgttaccaactattttgacagttggtacccgagtttgttgtccaaaaaacaaccaactacacctactataaatagatattgtaacacgctttttagtcatattgtatgatcagattttagtaagaaatagagtgaaaaggagggatgtataaggaaatcaagtgtatttgatcttggttcttcattggtgaggttctttgtaattttttctcatccattctccattgtatccaagacactcttatattgatttcaacatcaataatgatctatgtttatctactcttggtgttaattttttgttttgttcattaagttgctgattttatcatcacagtttgtgatcaaactatgcttgtgtttttggttcaattttaattgttgcattgtgttcttgatcaagttcttgagagtgattcattcactacatgatctaatactacgtaaacataaaaaaataaaaaaaaaaggtttcacacatttttttggagggttacggagtcctcttaattaaacaatttctgccacggtataaagtcatattgcttaaaattatactacaaataactagtagacttttagatcgaccctaatttagtgggtcataagaaaaaaattgaatccttatttagaaagaaatgttacattttcaaaattaacaaaaaaaatgtgtatttttataagggattttttttagcccttaggtggggtaggctctaggcacaggcctagccgacctatactagggttgggcctaatagactcaaaaaaaaaaaaataccacaaaacaatcttaaactcatagctcttgattaagtttttcaagatggtaattatagacttacaaatctacaattgaattaatcgtaggtgggtaccaacaacctgcacacaacaaacactacaaaaaatcttacatttcgtcacaacaaaacttgtgactaaaagtgaaaatattgtgattaattataaatcatcattccaatggtgtgactaaaaggtccgtggctaaaggtattagtcacaaaaattataacttattgtgacgaaatatttttttagtcacaacacttgttgtgattaaaactaaattagttacaacttgtaaaaaaatactatgttttagttacaagtagcattttattatgactaaaagtcacattcagtcaccaactgaaccaagaacatcaaccaatttcttgaccttaaaaagatacacattcaaactttgtgtgcctttcttgatgagcttcaatttagttcgaaactcaaggatcttggctcgaacttgaaacgtaaagtacttttcaaattgttaattccatttttggcatatttaattgacaaaaatat

SEQ ID NO: 316534 - DNA, 654 bp, Cannabis indica
tatatatatatatattatctcttctgtataacattatacgtattctgtataacattatacgtagtatagatattattctatatacactatgtttctactatatatcataagtctcctccgtttattcctttgtttatggcatggcactgctcatctgactcagctgccaccattgtagtccggcccgtagtcttgcctaaccgttcggtcggatatatatatctttattatatatatatatattatattctcttattggttttacatttatgtgtatattatgctttgagttgtaactttgtcctcatcttttattttctctttatttgtattttgtgctttgagattgtaacttttatttaatctatagttcttgtaattttgttgaatagagttgtaattatcttggtctctttgttcatcttattgttattcttctattgatatatcatatttttttaacaaaaacaatggaaggagaaataatcaagttgatgaaccaagacttaatgatattggaccgctttgatggcactaatttcactaggtggcaagacaaggtgaggttccttctaaccacactcaagattgcctatattcttaagtccaccttggagcccttacccacgcctaccgacaaggataccgatgagg

SEQ ID NO: 316535 - DNA, 1113 bp, Cannabis indica
acatatctataaaagaatgactagaatataaaaataattacattaagagaattattacatatactatttttaaatttttttattctaatttacagtttggattgttttgatagtttttatatggttgttatgtgaattttaattgcgatttaatttattatattgttgctataggacttctctaatgcgatactaaaattctaaaaatagttgaatttggatacaaaattgctccaataaaactttaaatgctattttatagagtcgatagtgttcaactaaatagtgggacactattgactacactattttttttttaatttttaatattaaaataatgtatttatgattaaatttttatgtatatatattatattatgagatagtttaataaaataatataataatatagaatatttttttagtataaattttaatgttgtggttggaatagaaaaaaatttagtgctaaaattaattttttagtgttaatttaacactaaatttaacttttagcattgaagttgattttagttgatatgtaattttttgtaaaaatgtaaaaaaaaataaaataatttattttaaagtgtaaaaatagaaaaatttctattaaatattaagagttaaaagctggtatgaaaaaaatatgtaatactataaaaacataaataagggtcaatataaaaactgtatgtaaaacttacttaaaaacaatttgttggagaattattttaaaattttgtaaaaagggaataaaatatataaatatatatcaaatattaagagtaaaaaatcaagggtaaaatatatttactatagacacacaaatggggtcaaagtagaaaagataaaatgaaaaaaaaaaacctacttttgaataatttaacaatgatatatttgtaataattgtaaaagagaggaactaaaattcaggtgggcagctacctaccactttttgagggagaaatccctgtatattttaaatcttaaatggttaataagtagaagatacttgtttatattattatcacttaattggttaatttttttaagttagaggggaatcactttatatatgtatatatattttttcaatttgaattgtttctg

SEQ ID NO: 316536 - DNA, 1664 bp, Cannabis indica
gtttaaaatatttaaagttttcttctaaaaattattttaacagaatgattattgctcgcgcataactaatatgacagaatattaactgctcgcacataactaatgtgatagaatattaactgcttaaacacaactgatcaaaaagtgttcgagaacattcaattatgtaaggacatttaattttgtaatttaccctaagtcaagttgagaaatatattttggttgtgtaaataaaagtttacttataagcaaaaaacacaacattcaaaatattcataactcaaacaaagcaaggtaagatggcataaagaaatgtaattaaaccagcattggacatccaatggtgcaaattaaaagttaaattatataataaatgccacaaagggtaaaatattgtctcggtcaaatgaccattgttcaaaagttataaaaaaaataactaagtctacattgttagagacttagaggggcccttcttcttcttcctcagtatcgccaacttcgtccttcttggtttgctcataataatccagcatcgcatcggctgcactacccaaaaagcaataattgttcggtcacaaaagggtagatcgaacagatagaaactaatggaaagagatagtcagaacattaaatgttgaaatgatttgtctcgaagttttaaactcccacaatgaaagcatgcaacttttaaatggggtaaatacgatcgtacccttaaggtaattaaaaagtcttttttattttaaaaagtacttttatggggcaattgttatactcatatttcgagcagtaatataaagctagcacgtgtaacaaagttggaatatgaaccacctcatattatacatcaataaatatattcagatgactggcctcgagaaatacagttagtaaaaatactcaaactcactgtcatatagacaatggcaggacaggagtaataactaccgattgatgagaccagcgaggtgaataagttcatcccgggataaacaaaatacactatggaattgtttgaaatacgtagataatgagttttgcagctcattgatccacatactcgtgagtatgttacaagaataaagacagcgacttcaacattcttcatctctctcttgacatgttaaaagtaagcgtctcgcatatacttcactcaatattgaaggaagagtgcgagatgtactataactataaacttagacattattccatagagatgtttgagaaaagtgttaattgaatggtgagaataacaagtacagtcagcataatctagagataaagacaaagagcatttatgcggttatttataattatcttatgtgcataaatatgagacgggaatattcacgttttaggagctgttacaaataatcatattctagggaaataaatgtattcctagactcctataaatagggacagagcccaaggaataaatgatgatatacctttgggaaaatagagaatattgtatttattgttcatttctaaaaaaacagtttattgtattctgtaaataatcttcgaaccctgaatatgatggactatgaagatttaacttcgaaaccacgataaataccctcttgtcatttattgctactcctattgttatattttttttttttttgatgaaccagtgttcattgcacaaaactttt

SEQ ID NO: 316537 - DNA, 795 bp, Cannabis indica
tgtcaaagtttttgctgaggttcagctagtatcaatttgttcaccctttgtatataaaaagtgggagtatttatatgcttacatgtgggtaaggccattccttttacccacctagggttttatcccgtagcccattgcaaggacaagtaaatacaactttgaatgtgactgtccggtcttgaagaaagttcttgatcgtgcgtttcccaggagtggtgagtacgtagtaccgtctagattagtgacatgtgttgcccaaaggtttctcctttataaattactctctagaaaagtcgtcaggaaaaaaggcatgtctaaaggtgcgtatgcacagtaccatggcctggcacgggggacaagatctgattctgtgttagaaaaaaggtgtaaccatctataagtcaatttctgaagaaatttgatgtggccatccatattcatgtaggagtcgtcgtatgtgaccaatctagaaagtccttacctagatgtcaggtagccaaaccgttgttctagaacttcatggagtttggggacaagtatggtcctttcgcatcctggagatgctaactgggacaaaggtagctctctgcaccaaacatttattaaacccctcccggattaacggggcatctccacaaggaatcgtgatggtcatctttattaatccgggaggttaacaaatctttgtctctaattatgccatgtttctcctactaaaaaacatggataacaatatatataataaaattggtttttttaagtcgtattttggcttatggaacatagtaattattc

SEQ ID NO: 316538 - DNA, 977 bp, Cannabis indica
aatcaatcgattagagagaaacgcactttcagtttcagagataatcgaatgaagaacttctttgaagcgtaaagccaacatttttgaaatgattttataagtaacattgcataagcttatcgggcgaaaatccttcattgtctttggtttttttaccttcgggattaatgtaatgagtgtattattcaaagattcagggctaccaccattgttcaagacattaaggaccacttttgttactaattcaccaatgatatcccaattgtgctgataatttatagccgacattccatcaaaatccagacttttatctgaacccatagtttttaacactgcaataacatctgaggcagtaaagtcccttgacaaaaactcattttgttctaatgagattgttgttgggatagtggataagacatgagataaagcccaatgatcctcatcagatgcaatgaaaatgtttttaaagtaatcaacaaccaaattagagattccctcatttgtagttgcgatatttccatgatcatcagtaagagctttgatcctattgtttgaatgtcttgctgaagctttagagtgaaaaaatttggtgttacggtcccccgattgaagccatttgaccctcgatcgttgctgccaatattgttcttcattggccagtagtacatccaaaatagattcagatgattgaacatcatgggagtaatttggactggagccatcaaaaaaattcaattgttggacatgtttctgtgcaagtaaaatatccttttccatttttccaaatttcctgagatcccgataagtctagtggtaaataattaggatttatatttatattatgtgttaatcaggtaataagtgggattatgatcctactaatctatttcagaataaaatttaaattttgttataagtgagtaaataagcataatttataaataatggagatttatatagcatgtgtgaatgtaata

SEQ ID NO: 316539 - DNA, 1125 bp, Cannabis indica
tacatgtattacctctttgaccatgtcattcagtgtccttcccagtatttcataaatactcttaggagaattactttgatcaatacttccaatgaatgttaatatcatgataccaccactcaccattttcctctgaacgatatcttaagaaatttgtgaaatcaatttggaattgatccaaaaatgatttgaacaccatagcagaacttgtcttccaaatgtaaatatttcctttgttatgtgcttctccagtttcatcatcaactaacccttttggaaccttaatttatagtagaatttatatatgtaattaataattagtattactattgaaattaaataaataaatatcatgtcaaaataatatcattcaactactcggacagattaatttatccacatgcatgttttttgctgacatgtctaagaagttagtaattgcatattcttaattaaagttagtttttttttgtacatgtttcctagtgtttattgggtactatatatagaggcctgtaaccattattcatttttgtactaaacttaaagtgtaaaatgagagagttggaggggtgttaaagagtgcattgtatatttgatcaatgcctctcatgtgacctgaattgtaatggcgctatactaattgaggtatcaacccaagtcccacattagaagaatatacaagagttattttagatataagtgttctaccttctctattagtatgagaccttttgagaaggtgcttaaaaataaaaccgtgagggcttaggcccaaaatagacaatatcatacaaatgtgagagtcaaggtgaggtaaggtggaagaacgagtcctaacaagtggtatcagagttgaaggtttgttgggatagtgggttgtatttgcgataatgattacgactatacaagatggaattggtattaggacttgtgtcaaaagtcttcctgacaaaggtgatggttaggcggttcgttcccttggtgatagcggcccgacatggaggaagagcgaggcccgacaagtggtattagagccaaaagtttaggagcactgggatagtgggctgcatttgcgatgtgtgggagaagccctcaatgcgtgatgacctcgcgattgaagat

SEQ ID NO: 316540 - DNA, 1027 bp, Cannabis indica
taattatcaaattaaaattacattaattttttaaaaggtaatatttttattagtgagggctatagccccacatattaatgaatggattcgtccctaaatttgatagatatcaaagtttagaggcaaaatttagtatatggaacattgccacattagtaaaattgaatgaaattaaacaaaagtctttaaatctaataattttaatagtttaaaggagatttttaacaacctaacaagtataaaagtataatttaatacatgccaaagttcaaaagataaaaatactaattaacctaaaaacaaataacaatatcaaacatgttattactattttagtcaataagtttttatctaatacaacactagcattctccattaattgtgggttcagaatggtaatgaaaatgacaaagaagttattagttatggcatgtgataaaagtgacaaattaagaaagtacttcaaagtaaacatgataaagaaagtagttgggcttctttataaaaagacaaacaagttagatagatcaagaagttttgcaatgtgtcacataaaactcatttgtaattaattttttgagcacgcctatagattataatttttaacaaaaaattgtaataatgatgcttaatggtgataacaaaaaattgtgcacataatttttttttaccttttaccgttttggcattgaatttctttgccatgacactactccaaattttccaaattttccagtttttcaactttgaaagctcgaatcgcaccaaatattatggatttttccttggattgatctcttggcactagcgacaagactttactattagaaactattggggtcacaattgtatatataaaatgtgtgttgggtcatcaaataaataagtcaaatttatgtggtctattttggaataaagtttatgacttaagagcatgattgtcatgattttaatatgtggataccagttagacaatttctaatttgatgaggggccaaattggaaatagtcaaaaatgattaattta

SEQ ID NO: 316541 - DNA, 2439 bp, Cannabis indica
attgcttcagttaagaggtgtagctcttgaaaagttaccaaagttatcataaatatcatcaacaagagtgagcaaagcaatcaacttgctcatcagcaacctaatatgtgaggtttcagcctcaaaaaaacactccaaaagtccaaaagtaacaatccattattctttctctagagaacgattgccttctttcataatcaaactccttccaccaccttattaattatcatatttttgtcacatagataataagttattacaatttattcaacatgtatacaaaaaattaagaaaacaacacactaaccttgtgagatcacttaattccttctggtaaagtttttgtagcaagttgaaatctagtatagctagagctagaagatgctcattgtgagaagagatttgatggtataaagacatgtaatgtctagcctgtctcctttgcaagctctttcgaatagggtttttcaacgcgtgatttacttggtttgaaatatgagagcttaatttcgaggttttagctgcagattcgaggtgatttgttgtgaatattagggcatcatctagtattttctctccatgcactcttagttgtgacgcttcatataagcttaacattcctcgaatatcgttacaaagtgactcttcaaatttccctttgttgttcgtgaacttattgaacacgtctgtatacattaatatatcatcataataatatattagggcgccatttcaaatggaagatgtaaaaatgagacatatttggtaccaaaaataggtctgtgacataataataataataataatgttgttgtacttaccacatgacatataataaccttgttgtctaaccaatcgaaatcgaagagcaacaacatagagatcatcgtcgtcattattttcctcatgaaatttgttacatatgttcttcaaaactacctcaatttgattttcaaaatagtacgacactcccaatcgttgaattgaatcaataaattcaagtgtctctaatgggttttcaacatagtcaagctcaactattttcttcttcacttctttcttcagaataactatttcactagtatcatcattattttccttcatatcctgtacaaattaattcaagttgagaaaaaaatacttaaatgttcaacaaatcatagaaaaactatattacttgtttcttacttaccataagagagttattggaaacatttgacatgagaaaatctttccaaatgcttggagaaaatgggatagaattaggacgattcatcttattattattatcactcgaagacatattattttacaatttgtttctttattattttcgaaataattccctctctagttttatgtgtatatatatataaacataatagtgtgattgatgatacagaaagatagattttttggagatttcatagggaagaacatgatgttcatgcgtttaatgtttatttagtggtccaaacatcccaagttttgaagagtatttgaaatttgctttctttgaaaatttgtggttactattttataggctcgtggaaaacaaggtaattaattaaaaaacttgtatactctattcatacatacagctagtgattggtaatttgtaggatatatgttatactaagctttaattaatctttaacaaatttttaatatgggtaaatgttgtttttagtgtgattaggtaaatgggaagagatttttataattattgtttaaaataatttatttagttttttaatttattcaattgatatgtcgagtcgagttttttttttaaaaaaaaacaccttattactttttaaatattttagaatgacaattaattcaaaaagaattttgaaagctaattgtgaagatttagtggagttcgaggaatcttttttatgctggaagaatggttcttatcaattctatcttgctgtcaattaatactaaaaaaatcgatctaatcagatgcttctaattgaaatactgaccttcaatcacataatataaaacctagttgttttactacgaatttataaggattattaaaaattaaaatgcaaaaattaaatccaaatgaactctgcagatttataagcttcatctgtcctagaaacacattctaggcagctagtgcttgggttctccaaactagggtaaataaccttcaataagaatcaatgtcaagatataaactctagttaaatcaaatctatgtaaaacaatacagtaaaaattcttacaacaatttaccttaagacactacaaaaaattgctacttttagtgataactttttagtcacaacataatttttttgtgactaaatatgacttttagtcacaacaaaatgttacttgtgaccaaaacatagtatttaattacaagttgtcactaatttaattttagtcacaacaagtattgtgactaaaaataca

SEQ ID NO: 316542 - DNA, 2022 bp, Cannabis indica
ttttttcgttttttttttttttttttctataatagactttttgcatacagataatgtaataattaatattaaaaaaaaaaatcctctttttgaaaaaaaaaatatatttgcactcctttttgagtatccttaattctacaaaaatatttaataagatcttgtctaagttgaatactatatatgttttgaaaatcaacctatggagcttttgtatttagataatgtaatcagacaaagctacaatataatccataactcataattaaattaaaatcaacttaaaaagtcttctcacctttttcacttttacatatctatttatttattttttttattaaaaaaaacatatatttattaccaacactactatatataaagcactacatatcactatgaaaaatcacaaacctcactaagcttttctttcttcttcttcttcttcttcttatatactttttacattttctttttttattttctcaagaaaataaaaaatgggtgaagctgttgaaattttcctttctaatgggttctctactttttacgaaaaaaagatcaaaatattataaataataatattactaataataataatattaataataataatgattcaagttggtatgaagaagtaattgatgaagatctcaaatggtcttttgctttgaacaggtttgttaaattaaattatttattaattaattaaactatatatattataattatttgtcttataattatataaatttgtttttttttaaattaattaattcttatttttattttcagtgttctgcataaagggacgagtgagtttcaagatatagctctcttggacacaaaacgttttggaaaggttattatttttatttatttgtttattttagaatattatacaaatatatataaataattatttatttaatttaatttaattttcttgttataattttgaacaggttttggtgatagatggaaaaatgcagagtgctgaaattgatgaatttatttatcatgaatgtttaattcacccagctcttatatgccacccaaagtgagtttattcatattaaaaaaataaataaaatttatttatttatttatttataatatttaataataaattttaaagaaaaatatacaaaaattactataggtatcattttttactgatcttttttttcagtggaatttttacttttatgtttttattaaatttttaaatgttaattttttattttgattctttattaatattttaatttttaaaacacttataatgtattatattatgtattattattataaataattaatttccattccatcaaaatagaagagtatatgagtctatatatattgaaaagtttatataaaaaattattattattattattattattggaatgtaattaattaattaattataattaatgcagccctaagactatatttataatgggaggtggagaagggtcaacagcaagagaagctcttaagcacaaattagtggacaaagttgtcatgtgtgatattgatcaggtaacttaattaaactaattaattaattatcattaaaaaaatatttatttattttatttatttatgtgaaattaattcaggaggtggttgatttctgccaaagatatctaactgtcaataaagaagcatttcttcacaaaaagcttgatcttgtaatcaatgatgctaagtaagtaactaatttaatttttatataattaattagtgtttaaatataattaataattaataatattaaaatttataattatacagagctgaattagaagaaaggagtgagaaatttgatattatagttggagatttagctgacccagttgaaggaggcccatgttatcaactttacactaaatctttctatgaaaaaatactcaagcccaaactaaagcccaatggcatttttgtgactcaggttcaattcttaacatatttctaattacattttttttttcaatttaaaaattaattaactattttttt

SEQ ID NO: 316543 - DNA, 1423 bp, Cannabis indica
tggaaattacaccaccggtttcaggtggaagagttgagctcgaagaatgtattccgatttttctttgggagtcgtgaggatcggcagcgagtgtatggtggcggcccttggacgtttgataagcagcttatttgttttgtaaagccaatggggctgggcgaaatttcgaagatgaatttcgattttacatccttttggatatcaattaataatgtgccattagcatgtatgacggaattatttgcaagagaatggggggagcaaattgggaagcttgaagacattaagattgtgaatggagctatgaaggtgagagtgcgtatcaacatcaccgaacctctgaaacgtggtttacgggttgcggtggatgatcaaggtaacgaggtttctcttatttttcaaaatgaacatttacctgatttttgttatgattgtgggattattgggcataaggccttggactgcccgttgaaagactttgctggggatagtcccaagttcgacagtgggaggttcggatcatggatgtgtgctccgagttcgccaccgcgtgatcggtttcgggtacagagaaatcgggagagttctcctttggataggccgattatgaccatgggtgaagcctcgaggattgttgctgcggttgggaggaaccgggttcgctattcaggccccacgtctgaagagctcctacctctgttctagaggctcgggagcgtgaggaggagttggtttccaatggggctgctgcccaaaagttgcccgtcgaacctgagggtaaaatgccgatgatggttgatgagttgggcaagcagaatttgatacctatagtagagaaggaatcggaggtgtcgacggtagcttcagatttgggtgggccgattgtagtggagagtgtgctacctacgggtgtgcatgggttgcatgagccgaatggtgaagggtcaaagggtgaggatattgagttatcacgtgtgagtaaggatgtggttgccgaaggagtgttagttgaccgtagtaaacaaaaattgacaaaagaacaaaaaggcaaagggatcatcgctcattcatcgaaagaagagatttcttttagccatgcccttcaacaaacatttgaccctcttattaaagcgcataaagctaaaacttggaagaggctaaattcttcttctggccgtggctctaaaggggtgggtaagtcgtcttcttttcccattagtcctaagttatcacatgttatggtagctaatgctaaatacaaattgagtcctaaaattggtggcggtgggaagcgaaaaatggaagtggagggagatattggttgtgtgaagaagggacggttggaagagcaatctgacatggctcccgaagatttcactttgttattggcgaagcctgcggagctggctcgccaagagccatg

SEQ ID NO: 316544 - DNA, 638 bp, Cannabis indica
ttaggtttccgttccgagttggtgcgcttctacgtggtgagcttggcgtcgactggtaggtgatcatcatcgttcggttttcatttcgttttacagagcgttcggggctgcgtgttgggattgaaggctatcggggtctggggtgttttttctggtttcctcacgatcagattgtcgctacgtttttgcctctggtttggtgcgactgggtattgtttctctttctatttggctgcgtttttctgttttggatttcttcaaggttttttgatcgattcttttggtgttgtggctgttttcggttgacgactgattactctctctatcggcttgctgcgattttattggtggagcatggcgtcaagcagtcatgccatggaggacatggagcagagctatgggaatatagagttagaggatgagaagagttttggaattgagattgatgacgatcatgaggagatggctctcgtggatgatcggtggtgcctagtgggtagatttttgaatgctcgatcgttagactttgaagctatgaagcacacattggctgggctgtggaagccgaggaagggtctttttgtcaaggagttgggtccaaatttattcttatttcagttttaccatgaaatagatat

SEQ ID NO: 316545 - DNA, 1843 bp, Cannabis indica
ttccaaccttagtcatttcttggaccggtcctggattgttctggtcctcccgtactaatcctcttggaccattcttcatacctgacttccagttggttcctcccctcgaatagctttctaggggatgacgacactagtcttttaatatatacctttgttaggacagaataagatcaccagggtaggattagtttcattatgttattcttgcatgcatggtattttggaaatgttctaactcttttgtttatcgttaagcagataagccaatggaggacctcctagacgcccttgcttgtacatactgtcctgaagctgtcctgctcgagccacgtaatgtggtggtgactccgggaagatcttctactggacttctcgagcaacaagtcatcctgatcgatgaggaagaggaagaagaaggagagatcatccctcccctggaccgcaaacgtaaaggcaatatggtggatacggagcccgttaagaaaccaaggagggtagatactccagcgcccagcgctgatccggggattccttctgaggttgatgagtatcctgcgcctctgggtattatcttgagtcccgttcatcccaacgaggaaagggttcagctccgaatttccaagtacaactatgccttgggggaacacaccaagggtaatgcggaggtggaggccctgaagaaatctctaagggacccccaggataaatctttccgaggtgaatatgctggagacgtttgggatttgaatttagatcccttgacagattggtttaagctctttgtgggacctagcctagctccttttcctttggcgatgatgagccattttgctgccgacctgacccaacttcccatgaagagatatgcagcctgtgcttctaccaaccccatgtatcaagtcaaggacatgagcgtggcccttactgcagtaagttctcacctttcgaacttcttatgcctcttttcttttttatacaaggctctaacatttccctgttggctgctagattggtgtagaggtcggtcatcttccaaagactctgatcgaccacaggtttaccatgtccgagtttggtggcacataggaggtgatgaagagtctccgggagtgggaggagcagaagcaagcgattcgggacgaagcccaaaggaaggaggccctcatggagcaaaaccatcgggaggtgttggcggccagggacgagatcattgttacggccaggaaggatctttgagattccaaagaagaagtccaagaactcactgccaagttgcgatcttttgaggagctgtaccaaaatgatttaaatacgacaactagtttaactgtcgaagtgaaggagcttcgtgagttcaagaaacaggtccgcaaggaggtagccaaggcaaaaagggatgccctcctgactcccgtcacttgtcagcactgctccaagcgctttgatgatggagtttttatgtgctggaaggctaataactttgaccttcgtcttcctttttaacacaagtctgaagaagttctggcccgttttgggaaaaaaaacaaaaggcttgatgcggtattggaggagcgtagggatcctcgtcatcctccccaggctaactaagtaatgcttgtttttattttttcttattttgtccttcccctcactcataagacaattctattttctttaaaggggagacttttttatggtccggccccagaactttactgttttttcttttgaacaatttgtgcaacttttgaatttatttagccttttactttcttatattcatcctgttttttgcccatatgttatgccttaataccccctaagtgacatgaaaagaaat

SEQ ID NO: 316546 - DNA, 705 bp, Cannabis indica
gtaaaatcattttatatctttttatgataattagtactattattagtaccatggtattcaaataactttgaactccaacaaaataaataaataaacattcgatattaaactattaatgcttccatttcaaaaatacatattaaaatcattcctgccaacaggttttcttggtcagaaaagcgtctagatgttttcttcctcccaggtacgttactgatctattaggttgtaatttatttttactaattaattatttaacgaaatttatatcatttttcctgaaaagaaaggaaaaataatgtgaccataatatggcagagttttaaaattttattgttcttatcgtaatttcattgaaggtacccacatggttttcttcttcctgaatgtagttgaggcaattggagttgtgatgacatttaaaccgtttttaacaacacgttgagagttagtgttgtgattaaatgatcaatatggcctaggcaattagatatatttgtttcatggacccatgtattaatgtactacttagaaattgtgaaactatttacatatatatactagaagaaagttacgtgcaaggcacgtatatttagttttatgttaggtgctctataatttaattgagaaagattcaataaataatcatataatttaaaatggtttaaaaaataattttaattagtgtgtggggttatttgaaaa

SEQ ID NO: 316547 - DNA, 892 bp, Cannabis indica
atacttttgttttctttttttaatcacaaaagaaaaagtaaaattaatttttgtttttaaaaatttgtttttgaaaataaaaatacgttctataaccacttttatttttaattttaaaaacagaaaacaaaaaaatgttctataaagttcattttcatatttatttttttttattttatttaagtcgagtctatataggttcgagtccgggtcaagggtcagattcggtgccagtgccagggtcaggtttgagttcgatcaaggtctaatatcagagtctaaaatatttaattaaaaaaaaaaccggtttaaaaaatattaaaagttatttttttttttttaaattttgattctcaaattaaaaaattaaaatagttttatagaacataattttgaaaatatttttactttttgaatttttaaaataaaaaactaattaaaaagggttactaaatgacaacctaaaaaaataaaaaataaaaaaattaattttatgattagttttgcttgattttggcaatataatgaattatgattagattgttttttactaataaaaaaatgaatttaagtttgttatttgattaactaataaaattaaatgaacaaaaatgatatatttctgaaatttaaagtatgagatcaaagaagtaaaacaaaagtagtaatgataaatataaaaacaataagacactactacaaaaatgggttttcccgacgtttttaaacagtcgtttaaagtattcctgtcggtttctataaccgtcgcctatacgaccgtcgtaaaacggacagaataggcgacggttcaaaatcgtcgctaatgttgatttcccgacggtttaaaaccgtcgcctataacagggtataggcgacggtttaaaaccgtgcc

SEQ ID NO: 316548 - DNA, 1178 bp, Cannabis indica
tagtctctttctcctttggccaaaagaaccagcagaaaataaagtttttctttattaatttcttgtgatttctagtagaaaataagggtgtagatcaaaggtaagccttagaaactctttcttccttaattttgaaagttcaactttagttcaagcatgcaaagtttgaggtttgattatatttgaaccctaggtgatgggtttgctgggttatttttgagttagttgaagtttatttgaactggttttggtgcctagtttaatggttgagcaattttgagttcaaaaactaaaacttgcgtcaacaatgacatttttcgattatgtgtgttcgagctactgctattgcttaggttatgtttattgtgatgtaattaggtgatctgaggcatagtttgaagtttggggttgtattgagctcgaattcagattttgtgttctttgtagcagaaaatggtaccatttaactggcaaaatcccaaaaaaaatagtctttcattttttatagaaatggcctgccatttttcaggctgttttttcacaatcttgttttttcgtgtttcctcgatatttagggtattgtcatactttttatcgatagaaaacttctatttttgagtttcggtccccaaaaatgcttctaatttcttgttcactgaatcccataatgtgtacccaaactcttcatgaacataccctaagaaatatatggttttgccttgtcatcatgcttggatctctcatctttaggaatatgaacaaatattttacacccaaagactctcaaatgatcatatgagacagctttccctctctatactctcttaggcacatcaccattcagagcaactaaagaagaaagattaataaaatcaattggagttctcacagcctccccaccctaaaagtacttaggtagcttagcatgggaaaacatacacctaatcctttcttcatttgttctagtcattctttctagcaccattatgttgaggagtttttggaactgacttatcaagcttgattctatggagtctacagtagtactcaaatggacccttatactcaccaccattatttgcacgaacacacttcaactttcttctagtttctctttcaattttagcatgaatttcttttaaagcatcgagcacttggtctttagatttcaaagcaaa

SEQ ID NO: 316549 - DNA, 1217 bp, Cannabis indica
aaacggggaccctggcactcaaatgggtgtcaaatgacagaccagcttcctcaaagaagctgatcggccacccctggccgtccccatggccggccagcctgctccgtacaggtttctaaccggccaaggaaagaacatggtatgaattcctgtacaactctacacgtggacaataagattaggttgcaaattgggccctaaaatcccaattaaacacttgaataatatctatgttcatgggagttttggtctttcgtaattaattaatcaaatatgcaaatatcctagggttttagttttaaaatagggtttagaatttcctatataaaggcttaactctaacatagaagacctaagtcattaagtgagaactatgtcattaagcctctttctagcctacaagtgatacagttctaagccctgagcaagtgacatgtggtaaataaaggaagggattatcctcataatctccttaattacaattccccattacaatcttttcacggagaagcctcgcggaactgggaataagttaagactaatggataagcggaagttcaccttgccttatactagcttcctggatgcgaaagacatattgtctctctcagacccgaagtggtccaaatatggaagcttgcctagctgatacccggatgggtactcgaaggacttagtagatatcaatcgtcaggagtgtcgcggacgtctacctttgggaaaatctgaattcccagtgacggttatactttttctgacacaggattagattttgtcccctgtgctcaggcatggtagctgtgcacgcatctcatcccccttttggccaaacgggtagtatcagacctctacttttaaaggtgagcacctttgtagcggcatgtgtgttgggagttttattgccctaaaataaaacctactttcaatataatctgatttgttatcaatagaagattagaagtcatttatgtttacatgtagtttttatgtttatagtttaatgtgtacaaaatctgttaaatccagaacatatagttattcacaattacagtgatgtcaacacaatggaaggtaattgtgattatatgcttcaaaagataatgtcccttattcatcagtgcactggatttacactgatgtgatagtcaatgataaagtatacttacaccttagataagtgttatgttctttccagaatattggtaaagtatgctagt

SEQ ID NO: 316550 - DNA, 652 bp, Cannabis indica
tttttatttatgaaatttggggattttaaaaattagggttttttatttatttttgaacaattttgccgatataattttgtgtgcttcagtatgtggtaacatatatatgcatttaatttgtactgtaaatctttggtgggaaggttgtttcggtttcgattttggtttcctaatttctgtgtatatatgtcttcgtggtcttctcttgaccatttttttattattttgttttatatgcatcaatagatacaaatattttaaagacacattcctaattatatcatgtcgatcgataaagtttatatatatactgactactgatttgattatatatattgttgaattacaatatttttttttgttcttactttttcggctgatttcgtatattgatactgtaaatcggcatggcttcagttttttgtctcctccttatatcatgaaatttttattgattgatataatatattcatattatagtttagaatccctattgaatttgtattatttagatactaaagatatataaatatttagtttattatatatttggaataatttaattcaaattttggtgttggtttatgactaatattttgaataaattaattgaaacaatatgtcgccaaagtgacctcttttgtgtagatta

SEQ ID NO: 316551 - DNA, 766 bp, Cannabis indica
ctactccactcatcaccaatggttttgtgatggaacctcatgattctcaacaaataataacaactaacaacaaaaagaaacaaaagacaccaattacccattgattctcgtggatgaccgtagatgcttccctgtagttagcgtctacctccttccacctccaatctgtgctttagtgcagcaagaattctcccttttgtgtaaaattttagtgaagagattgcgagattaggagaaatggtgaatctgttgggaggaaaataatgaagataaattatattatgagaggagtattttgagaacaaaatataaaaattagcctactttatcaatagtattacatattaattttagttatcaattttttcctaatgtatgcataattagtcaaattttcctaaacaaatgtaaagaaatgactctcttagcattgattctcattgcttagtagtaaacatgcttaattatgatcatttacaaaagagattactaaaaagcaccattggtgcctagcaccattttcggtgccatatcactattggtataattaaatatcggatctcatataacttaagaaaatagcttttaagcaatatcgctaactaattgtgaagcgccatctatgaaagatgctggacactattgctgctcaataacaatgctctttacaaaatcctgattgcaatactttaaatatcgagtctcatataatttaatataataactttgagtgagtattgccactggcggacccaaaaaaaatatt

SEQ ID NO: 316552 - DNA, 1312 bp, Cannabis indica
atttgaaattctatgaataaattaataaataattattcatttttatattattctttattatttttttattagcttaatattataagaaacacctaaactgagataaaaaaaaacgatgccaaattatacaagagaggccaaagatatatacatacaaacaaatgaccaacatatgactaaatgtggtgttaggaattgtcgcctcttctctctatatatagctatattagctagcagagagtaaatagtatttcattcttcagtacatgttcttgttcccatcgtcaaaagtgttttaaactattacaatttttccttttattcatacatatatatgcaaaaataataattataaaagaaacaaagaagatgctctatctctgatcgttctcctgtaaactttattaaacattttcattcaaaatctcttgtcttttttctgatataaagataaagtaaaatatacatatatatatatattctctggcttcattaatccaccattattttctgactgtatatcatccatagaaaagccattataatttggatataccttgatatatacaaagttgtccatatataaacaccaaatatacaaatagttccttctaaataaagagggtattgattcccatcaccactgagataggctctgaatacaacgtatcatcttataaattttatcctcttttgaattctctttgtaatcaagtaaatcataaaatggatataaaccctaaaattttataaacaggtttcgaccaaagtaaaatttcgtaagaaactatgtatgttttggtgaaacaattcatcaataacaaaaataaaaagaagaaaaaactgaatatcatggagatgaagaacatacctagaaggaaagagcagagtaggcctctgaacccgatgggatatgggttgttctgatcttgtacgaggccttcaatctcgaccgaacaacgaaagtttgagactggaactagcctggatgggcggagcagcagcgacaaattgagagggaaaccagagatggggggctcgggagagaaaagaaagaaaaaaggaagaaagagagaaagagagagagttttaccggagagaaacttgctgctcgcggggcgaagaatgagagggtttggggctcgtcgatgatgaacaacgatctgaaacggtggttggaggcgaagaacgagagggtttgggtcgtgagagagagggtgagcgtgatatgaatttgtattgatgagagatgagagttttattataaaggggcttccccttccccccgacggttttgaaccgtcgggcaaag

SEQ ID NO: 316553 - DNA, 852 bp, Cannabis indica
aaaagttctcaacaccaaacaccacaaaaaaaaaaatttataagcattctactaagttgggggtgaggatatttattagttttccctctcactattttgtactcaatcagagaaaatcttaaaataatatgcatcttattttttgagaagaatactttaatagttttgttgtatattaaaaattgtaaaattgataattttatgtagtattgttaaacttaaatgattagttatctctaattttcttgtgattttttcgtatatatttaagttaatagtgaaactagttatcttttgaactaaaagttaaattaaaaaagtcaaatcaattaaattactatttggattttattttttctcatttaattggattgaataagatgatatttttttttttgtaaaatctaattattatttatattagatttgaagtatgtaaacaaattaaataaaaaatttatatataatctacaatacaataataattagataataaataaatatatattatgattgatccataataattacataaatttcatagtgtaatactatcaattaagtcttcctccttaaatctctaaagcaaaaacaattttaatttaattatttgattatcaaaaggtatacaattgtaatgagacaatatgtatttataaagttagggagaagacttagctacataattctcgttggactagacctacttatcaaatgtttcgattaattagaaaactccatacttctacttcaattaaccttttacacacacagatgttacacacattgactattgattactaatattatgtactaacataacaaagagctatccaatcaacccatatttta

SEQ ID NO: 316554 - DNA, 1767 bp, Cannabis indica
atattttattttatcttttttttataccattttttatactctaatagtataacaactttcaaacattctataattatgatattacacgttattatttaatatattatttgtattaattataaatattctcacactacttatttaactttaattttttattttatttaaaaaaaatataacattaatgtcatgtagcatcatcaacagaatttttatgataacacatatttatctctaatgatataatctttatgttttgtcaaataagcaatctacataaacaagcatcctccaaaatttaactattagaaatgctcttaacgttcaagaactccaaaattgtaaaataaaaaattattagtagtatatatataacaataaatagtagtataatgcatcaaaatggtctttgactcctgatttggttgtcaattggacttgtgattatttttggagcttccagaatggtcgacaatcacctgggaacaaaaatttattgggcacgacagttacctctttcttgggtcgatgattagtaattgggcattcccccaaaaaagttgtctgaaagttgacattgatgcagccatagatgcatctagatcttgttctggtctagatatggttgttcgtgaccattgtggaactgttcttgctttagctgtttggcgtctgaaaggttgttttgacccagaagtggcagaggctttagctcttcgacaagctatggttcaatgccatctttttgggtatggtcacatcatttttgagctggactgtttgagtgttgttcagaagcttcacaacaagttgcttttaaattcttcgttggggcttgtcttatctacattagtcatattaattatagcttaaatgatgtttgttttaagcactgtcctaaattttttaatattgttgcctacaccttagctaaatttgcattaattgtaacttgtaacaatgtatggtggccaggttatccaagctatattcagtcttaccttgtagttgatgctactttttaataaattctcgcctctacattttttgagtttcattactctttgttgtggtggttgagacttttttttctgaaaaaaatatgtagtgatagaatgttatctcaggttaaattaatttaataatgataaaactaattgtataggaatcataaaatttaattttttcgtagatggattctacataaattgtgaaaattatgactaaatatttgaaaaaaaaatacaaaaaaggtaatatcatagatatatatattattattaattttccttaattatttaattaattaaactcatattatccaattaaaggtctaacttttcatagatacagtgtggcagagggaggattggaggaattagaaagttgaaggggcaaattgtaaacaaattaacttaaggagttaaattgttaataaaaataaaaaataatttatttttactatacttaatataattcatataaaaaaatatataatttttttaggtagggcgtaacaaaaagtccctatgttaatgtaatgactccgtcaatgcatagatacatgataaatactaacagatatactagtctaatactactacgaaatgtcatactattattataattaagtatctgatttttatatattttaatttgatatttattatataactgctagccatttacaaagtaatatctcatagtggtgttgggaactaataatgtctaataagaactgtaaagaccgcttagtttaatttgaaa

SEQ ID NO: 316555 - DNA, 1489 bp, Cannabis indica
tgtgaagtactgaatattaaattgtgcttaacactttttgatacgccccttaccatttgttttgtaggaacaaggagagattgaaaaagactttgcttctgatgacactgcatcagtactaaagaaactttatacatcttttggatcaacacctttaatcataccaaaagaaaaagatggaggatttaagagtttaaaagctccagatacattaccctcttgggtttctgaagaagtcatcaattactatgccaataagttcaaccagacaggctttactggaggattgaactattatcgagctttcaacttgtagcattctttctttatttcctattattgtatttgaaattagttcattaacatctatgcttaatggttcttgttaatccaatgctcttgaagactttggagttaaattggttaaaccaatgctttttgtttgtggttttgcagatcatgggagctcctggcaccttggacaggagcacagataaaagttccgacgaagtacatagcgggggaacaagaaagcacctaccttttcccaggcgttaaggaatacatagaaagtggtggctttaaaaaagatgtgccattgctggaagaagtggttataatggaaggtctgcctcattttattaaccaagcaaaaccagaggagatcagcacccttatatatgaattcattaagaagttctgagttaaattatgaattcattaagaagttctgactttaatttgcttgaataatctatgtaaaacagagcagccatggtacctaaatcaaataattttctataaattgtacttttagtagcttggacatcaactaataattgtcatgagtgaatctcttgcttagttataaactaggaaacaaacagctggattctaaagcataattaaaacatatatatttaatatcacatttatttaattaatattaattttttaaaattatattataaatatatcacttataatttttttttaaaaaaaattttagaaaactgtttttataatgttatatttgtttaacttgtcttatatttatagaaaagttttattcgcaccgcacaaaattataagggtacaaataaaaatattctcacgactgccatgtgctgttacaatgcttaatgtcgaggggcattcaaaaatttctgaagaaagaagtctggatacaataattgaactgtgtattttttaaaaaaaattatgctcaaagacattgcatgttgaagacttgcagcgaatgcaaaaaagtactttggacattctttacaaattgaaaattattttcccattgtcattttttgacataatggttcacttggtgatgcatttacctaaagaattgatacttgggggaccagcgcactacaggtggatgtatccaattgaatgagccatgttcgtgtacaaacaatatgaaaaaaaattgatctcaccagaaaggatctatttgtgaagcttatgcagttaa

SEQ ID NO: 316556 - DNA, 1651 bp, Cannabis indica
agagggcacaaaaaattctccaactgccagaggatgctcggaatgtcattttgctgaccactgaggccaactttgtgaagtactagctctacccaaaggattttgtgccaaagcccgtgaaggagaagaagaaaaagtccaagccgaaccgagctgaggatgtcgagcaggagaaagagctcattcaactcaagtgtgagacaatttggtatgcctgctcggccatcaatccctgtagaaggaaaaggaaaagtcgtcctagtggagcaagaagactcttaagatgatgatgctccatctgttattgtttgggaaaatgcccctgcccgcatgcagggtactttaagttgcatttacttgtatgatttttatgctttcacatatgttatgtctgcttctaactgtgttgttttgtctgcgcagaaatgtctcagaatatgatctaggccacagctcgggcatgtatcctccgactaagaagtctaagggcggtgagactccatccaaggagaaggagcccgttgatgaggtcattaaccttttcgaggagcaacccatggtggaccttccaatccagaaggtcttgaaatctaagagttctagaggaaggagctcggacggatccgaacaagctaggaccccttcaacaactgtggaactgtgcacggaggccaagaggggcaaaaacatgttgcaatattacttgaaccggtcacttcctgaagtgagtgatcagcagtcctaagcggatagtgagctgtccttggaactggtcctaggaggagttttgaaggaagctactcgggtaaatctctttcttctttattttattctcttttatgtagctcagactttgacacatttttcgtccaggtcaatgtgaagatggcttatgcctattcctgagccaaataagctgctgccaagaaccttgccaccaccaacacactgctgatggaggtggatttggccaaaaaggaatctaaggacacgcagagccagcttggggaagtgaggaatgagtttggggaggtaaataagaaacttcttgctgccaatgccaaggttgaggagctgaccaaagagctgcaagatatgccttcgaccgagcagctggaggatgataatgtttctttgtccaaagaggtcgataatctcaaagacgagagagagtgtctccggactcttctttccaaactagatgaggatgtcaagaacaaactgaccaaggaggaggaacttgtgaaggaggtcagagacaagcagtccagggtggaggtgctcgagagggaggtggacgccttggagacagctgcacttgaggttttctatgatttttagaaggccaatcctgaaggaaactttgattaccttggtgattccaaaatcatgtatcttgatttctacgcggctcaagtggccaaaaaaaatccctaggcgactacctctacatcctgctgactagagcactgaagtccctactgctcagattgttgatcttccagcctcttcagaccaaaacgatccgtaccaagagcctcggactcctgctgtctgaattgttttttttttttaatataaatatatgtctgttcggcctataggccttcttttgagacaaaatgactggccaagcggtttttaaacttgg

SEQ ID NO: 316557 - DNA, 1113 bp, Cannabis indica
ctgtttttttcccaaaaaaaaagtaaggagcgttgatcaattcatgctctcttatatatttcaatttaataagtaatatacaactactccatattagctcaaatagtgataaaaagtattggggtgcttgagtgggaggttcctaataaaatgaaatgtaaggatatgcaatgtaatttacatattatttataataaatgaatagctataccaccttttgtaatattgggaatttaataaggtgtctaataagggatacccagttattattgcagtgatgtgctgctgacaattataatgatacattttcaaattttcaagtagttggtgtaaacctttttatagttcatatatatatttttatccgagggaggtttatttggcaccacattttacttaattatttgagctccattataattgaacctccattgttaatatatgacttcttaattatataatcatttcaaaattctgttattatattggttaatatataggggtcttttcaatattatacctaaaattgattttatttataaaaatacctttaagaaaattatttgcacaaataccgattgccacgtcagcataaataccgaaatataaaataattaccgaaaattgaaaaaaataaaaaaatctcgcttccagaaattttagtgttttgcaaattttaaaaaaagcaaccttttggttgcttttgatgtaaataatatatcaattagttactttttattagaaaaaaattaattcaagataatttttttctcatacacatttggttgcttattttgatcagacaactttaaaattaatatatataataattttcatattgtaactaattctattatgttttagatactatttggtaactttataagtttttttattaacatattaaattctttttattaaataaatttattattagtatactatattttaacttttaaatacaaaataacaaaagactttaagttaagttatgatgttacttgatatgttaaagtttattaaattttaaattttattactttttgttacaaaatataaaaaaggaacaaaaaagtttcttttaacacatactaaaatgtaagagagatatct

SEQ ID NO: 316558 - DNA, 1771 bp, Cannabis indica
aaataatttccaacaataactggattgaagctgaaactgccttccctcgatgccaaccatcctcaatcgaatccaccaaatcctggatccccatgctactaccaacaagggggtttattgccctcgaatcaacaacaatatgatcaccacacgaccatttatggaaccatattttcacatccgaatcttggcccaccacctaaacacaattctccctaataaaatcctgcgtagaccaaatccctctagccaccgcagaggcatttccaggaagactcgacgagagaaaacgattgaatttgcagtacttagagccgagaacatgcgtccagagggccttagagtccgtttccaacaaccaaccaagtttggcaatcaagctgaaattaacatctctggcccgcctaaacccaagacccccacattgcttaggcttacataatgaatcccaagctttcaaggccagaaaacggccctccttgctctgttccatccaccaaaagcgtctcaggaccgcgtcaatttggttggtaattcttcgcgggaggatgaaaaccaacatactatatatcgggatagaggcaaggacacttttgattagcgttcctctagcagcttgagataaaagacgagctctccaaccttcaagtctacccgagatcttgtcaagaataaaatcaaaatcgctgctccgattgcctttgaaaaagagcggattgcctaagaatttctcttctctccccatctcctcaaggcctagcaaactctgtatctcctcacgacactctcctaaacagttgttagagaagaacaccttggatttctgcatattcaccttctgaccagactatttacagtatttatcaagagatttcagggtcccttctacattacctttatcagtcgcgagaaagagaagaaggtcgtcagcatacatcaggtgtgttatcgggattccctctctgttcagcgagtatcccctcaggttcctttcagactctgctttagagaataaacgggacagaacctccgctccaaggataaagagatagggggacaacgggtccccctgtctgagccctctcttcggagcaaaagccttgatgagacatccattgagcaaaacttgatactggaccgacgacaggaaatgcattatcattttgcagaaatggggatgaaaaccaaagcccttaaggacttttataataaaactccattccatacgatcgtacgccttcgacatatcacactttatacttgcaaaagcttttttccccaccttcctattcatatcatggaatacttcattggcaataatagaattgtcggctatccatcttccctttacaaaagccgattggaacggggaaacaatcttatcaagcaacacacttaaccgattagcaaggatttttgcaataattttgtaggtggagttacaatgactaatcgatctaaactcatcaaaacggctggcatgaagctttttagggatcaaaactatgaaagtacgattcacctccttgccaaagttatcgcttgagtaacttgattccccactatatcccagtagtccttgaaaaactttatagggaaaccatccggacccggggatttcaacgcaagcaactcccaaacaactttctttatttccaccggggttggaagttccaccaacatccgattctcctcatcggttatacataaattaagcaatgaattggctaaagctaaaaaaaaaatggtaactagtaactagttactgttt

SEQ ID NO: 316559 - DNA, 841 bp, Cannabis indica
aaagcctaataattttttttatttcgggcccccggaaagtgtgggccctaggcacgggcctagcccgcctatgcctagggccggccctgcatgtatttcattcttctccttaatagtgagatgattccactatttataggaatgaattacattaattagttttcaaaattaataccaaataaaataaaaaatttgtttactttctataattacaataaacaaaatggaaaactaggcaggttgcctttattccttgatattgcgtatctatcccatgaaattagggatattgtagtatcttgcaagcatgaagatatatgggatatatctcgcaaatgtttaactcgcattctctggtcggcgtatgcgagccgcctttatgatggaagttggtcgggtgattctgcacgccttactcggatgttccagcttctgctgactttgagtatcaaatctctctgaacaggccactacagaaaaaataacctgtccaggttgtagggttctctcaacgtgtcacccagatggatgtcatatcactttgtgtacaaattaggataatattttccccaagtccgtgcggaaacttcttggtcgcacgtaaacttattcggtcactaagctaatcggatgggtgacacgtgttcggtcccttccttcgagctgacgtgacagattgaatatatgtctcttcaatgtatgggaatataataccctgtcttgaaacactactacaaaccaagcttttagaggcacttttttttcagcaaatattaaagaaccgacgtcatagggttgtaattttttggaagggattctgacaccacctatggcgtcggtt

SEQ ID NO: 316560 - DNA, 810 bp, Cannabis indica
tgtgtaaaagagaaagaatgttaaaactaatatatcaccacaagaaaatagagttttgccagggagattttgcgtcggcaaaaggtaacttgaattactggtaaactttgtcgacgaggtactccgccagcaatagttgacagcaataaatggtcgggaaaagggtttatgccagcgaataaagttagtttgctagtaaaagtcacttgtgtcagcgagtgaagtcgccggcgtaaaagtggtcatcggcattggcgcaacaactaaacaaatttgaagatgttttcctggtgagttaagtcattggcaaaaaatttcccgtcaattttctacttcgcgtgaaagttttgtcagcgcatgtaactgttagaaacttattttattaagatctagatttactaacatgtatgttgattataattctataatctaacatcttaaatttgaaatttctaaaaatgataaataaacacataagggattaagaaattcttacagtgatagtagaggaataatatgactccttctattcacatctctagcccttaattcatgtctgtagcagagtattatcaagatctaaacctaaatcttctcctgctgacaaagtgaactacatagtcttcctcaccatactgagtattcctttgatatgtatgggtaagttctcaacaccaaggagcacaaaattttatgaaaaaatcacaagagaattttgaaaatatattgaaaataagaaaaccttctgttgaccgaggttttcggcaactaataaaatattataagtttatagagctgtaagaaaattag

SEQ ID NO: 316561 - DNA, 1206 bp, Cannabis indica
aagtcaactagtctataatctagtgttgtaactcgtacgtgtcgtgttgattcatattttgtgtgcatttttaaaagataggtcatattatctcatgctataaaaaatatggatcgtgccaatatttttaaagagtagtaggtacaatactcgtaagccaaatattttcgtgttgtgttttattcaagcagtcgatccatttttcttaaacatatcaactaatttttatattcggactcgaattcttgttgtactttactcgagtcgatctgtttttcttaaatagatcaatcagtactcatatcggctcgaattcgtgctttacattttttattttttttttacaattaatgagcgaattataaactatatgtattttttttatatataacttcaactatttttatataattttttataattatataaaaaaattattaaaatttaaatatttacttataaatactcaaattattattgtcatatttaagatttattactattttaatttatttataattgacaatacatatgtattacttagatatttgttgccaaattctcttaacatttgaaatttttatacatatcaccctaataaaaaaaaatagtagcaaaaacactatatattataattttgttatagtcataccttttagatgttaagtgtcaactcagaaatacacgaccactttaatacttggtttaataatatcgtcacgtttaatagagttggcacttaacaactaaaagagtacaactgtaataaaattgtaaaataaattatttttgtcatcattttttttattaaaattatatgtgtaagtgtgtaacaattgcaaatattaaaggagcttagccataaattattattataagattttttaatatgtcatgtcatgttttttttgtgctttttgtgtcgtgtctttcagattagtttatttgtgcttatgtgttgtatatttcaaacttatcatgtttagtacatatttttcgtatcatatcatagtgttatgttatatcatgtctaaacttatatatatatatataaaaaaaaaaaaactcaattaataaattaagagttgagaatatataaataaaaatagttgcttaaactcaattaatcaccattcaccattattaacttaagttgtatcgagttcataattcctaaccttcacagcagaaccagactcttccaag

SEQ ID NO: 316562 - DNA, 1234 bp, Cannabis indica
ccacagagagcacaaattcgcccaccccgggcgggcaccaccggcctctcctcacaccaccacccccacccccctcggccacccacccccaccaccaccgccccccagccgatcggccgcaaccaccgggtcacccaacactcgaccgcccgcactcacccccaccccatgaaactcctccaaggcatccaaagctaaaacatcaatcacctctaagcgagattgtttctttccaaacaaaacagaattcctatcaaaccacagccacgaccaaatcatagccaacaaagcaaaattctggtgatcaatcacatcaaagagataaacaagcaattccgctaacgacccagaccgcccacgatgtagcacatgccagatcctaagcttagtccataaaggacgcaatgaagaacaaaacaccaacgcatgctctggagtctccgtatcctcaccacatctttgacatagcggctgaatcgggatcttcctcttgataagctgggaattggtcgggagagcccggtgatacattctccataaaaaaaattttgaccttttgagggacccttaaattccacataccattccaccaatgagcttgatcgaccgaagagccatcagtcctatcccttaccaaatcaagagcaagagcataaccactcttcacagtataataaccattcggagtatagtgccaacaccaccaatcctcacaccgcccaccccgcaaagggatgccaagaatgacatccatatccatcctcaaaaaataatgggataacaaattaatatcccacgtcccatcgttaccaatcaagtcattaaccatcacatcagccccaggagcaggcgaaataggccgaaacgatctcggcctgggaagccaaggatccagaaacgcatgcacactctgaccatcccccactactttcctcattcccgattgcaacaactacaaaccccacactaaactcgaccacaaatgagacgatccaggacggtccttagcctccaatatggacaaagtgggaaagtatttctgcttcaagacccgaccggccaaagaatccggcgattggagcaggcgccaaacttgtttagcaaccatagcttgattaaaaagccgaagatccttaaagcctaatcccccctttgacttaggttggcaaacattctcccacttgacccacgcaattttcctcttattattctgagtaccccaccaaaattgtaa

SEQ ID NO: 316563 - DNA, 1284 bp, Cannabis indica
aaaaaaaaaaatctaatatttcaataaaatgtttatcattaatattaaaatttaatgcattgtcatattacaataaggaaaatcaacttatggtaaatgatgactaagggacaactagactagactagaagtgtaacgcgaattataatttcaaaaaaagacattttcatgtaattatcacattaccatgcatgcagtgttttcaaatcttaactggcaaaagaaaagagtgaaaaatgttcttttttgcttcataatcttgctgtttcaaatgtacgttataatatccaaaaaaaaaaaaatagaacaatctacaagagtctctagcccaggattcacatatgtaattattctacttttgtttttgggaacgacgggttcacattttctatattagaaatgaaaataaaagtacttttttttttcttttgtggtgaattatactttccacaaaaagaaatactaaggggtattttatgttgtctaaaaatattacaaaatgtgacatattattattgatataaattaatatcgagttttacatattttaatttattaaataatgtaggaaactgctaattaaccactagcacgtaacactatatgaggatgttgttgtgcaccataaaatatacctaataacatttctcttcccaaagatatacattgtataataaaagtgacttttgaaaaaaagttttgctgttaggtactttaataaagtgcccaggcacattataataattatttgctgctttgtaaatattttatattatttattaaattaaaatatcataagaagtactaattaaattgtaccaatagtatagtatgttattttttgtagcacgtacttatcttaaattgtaccaatagtatacttatcttatcttaggtgctttttaggatttctctttcaaaagaatatatataatgtcaaacaagcctctcacacttcactaaaccagttaatttcttttgctggacaataatccagataattatggagttacaaaatataaacaaacaagaaatcataaaagtattacaatgaatttttttgtctgtatgtatatttcattgagaaggataatttttgtatagtaaatgctaagtagccattacaaaaggtacttgctttttcactaacatgtcttccatatgacacggccaatatatattttatatacactataaaattttttatttttagtcacaacaaaatttttgactaaagtaaaaaagttgtaactaattataaattatcattcttatgttgtgatt

SEQ ID NO: 316564 - DNA, 902 bp, Cannabis indica
tactaaattagtgatattgatcaatcacaatccttactataattttgatatcaattaaaatattcactactattacagtgattaaattcttaatcaaatctgcatttattaataactatcaatagaccacatttaagatatcaattttttcattcacacattaacctaaattaactatttattatatattaaatataattttctattgaaaaacttgaaataatctattttataaagcaataagaaatatatgaatgtaaccaatacaaaaatcaatttataaaacaaaaaaaattagaacttatctatacaaaatcttaacaagacaaatttaaaaaaagaaaaaaaaaactcttaaagattttgtaaaagttaattaagtcttgagagaaatttatatttatagagagtttgatacaaagagaaaaggagctgaagtatcagttttaaaacaaaagaaatacaagttgataaaactaactaacaaaccaattaaaaacaattacaaaagagaactaactattggttatgagggcattactcaggcaaagaataacataatttggcccctgtaagagatgatttgagtagttttggagataccaaagagatgatgtttgatttgttttaagtggccgtattcatgatagaacatagcctagcctaagagagaggcttgaatttgtgttttgtaggcaatgtagttggtttggtgtaagtttgatggagttttgaatttgaatgagcgtaaattaagggaaatttacaaaaatattggaatttgggttaatttttacaaaaatattgtcacacgaattttttttcaaaaatactgtgcttttataaaacaccacaaagcagaacaactcaaaataaaagtagaacactagtaaaacaccagt

SEQ ID NO: 316565 - DNA, 1727 bp, Cannabis indica
gagtttccagttatgtagttaaggcatggggccaaactcatgagagagctcgagcaactcgattgagctgtggctctacccaagagaattgccaagaggaggaccaaggctacacccaactcaatctttttcaaacccatcttcttgttccttttttcttttcaagttggaaaacagggcaagctttgttgttgtggtttggtgtgttcgagtttgagtgagagagtaggaaatataagtgggatttaaataaggaagctcgtattgtaatggacaaagtgtattggtacaatttgggtggccaacttcgaatttagtaataatattttgataactaaacaagaattaatgactgactttgtgccaagtggaaaatagagttgttaaagtattgggtagtattataaataatactagaggattaacagaatatgattatttttattataaaacataatagctataactaacattgccaaacacacctaatagttaagacggttgtccatattccatccaagtcaaaaacccaaaacaaaagaaatcttgaaattccttcaaagaaagtaatagtagttaaagtagttgaacaccaaaaacccacttaaaattaaccttactctacaaattttaagtaaaattcacacatatctataaatcatctttttacccaaaacacacttcagaaaacgaatcacactaatggaagggctgaaaacattccaatcaatagcatacattattcttatcctcatctgtttagtaaatggacagatttctacaccatgtacattcacaatgataactagcttcactccatgcctgaatttcataacggggagcagtagtaatggtcagtcacaggccccaaccacaggctgttgcagctcattaaggaccctattgagctctggtatggactgtgcttgtcttctagtaactgctagtgtcccttttcaacttcccattaaccgaactcttgccctttcactcccaagtgcttgcaacatgaatggtgtcccaatacaatgcaaatgtacggactcactactctttaaatatccatttatctatctatatatatatatttaattgactaattcatcattgtgttttatttgcagcttctggtactcctcttccagcttcaggtacagttaattgtaattacataacaattacatttactattatatcattttaaacaatgataaatatcatattatcatacaagatattaataatgaatttaaaaaatagccggtcattgatattgtaaatttatgtataattaagttaaacacaatagttcaatgtaatgcaaggctagcagtgttacatataattcattttgttttcattagatttataccagatgctattcactctaataaaatataataaaagaatttgtacatctagaataaaatcaaatttgatagttatctaaatatgtgtctaaaatggttaattttatagtttatcatcatgtctcatgagacatattagagacatagtagcatcaagttaacatgtaacaattttgtttccattgataaattttaaataattttgttcattattatcataaacattcttgtactttccctagtacaaattacattttctttttataatttgtgaaatatagggtatgtgtgtaataatgaaattttcattaacaacactcctcttatacctttttatcttttacataattaataaaa

SEQ ID NO: 316566 - DNA, 1672 bp, Cannabis indica
ttttttttttgaaatattaattttttgttttttaggtaaaaaaaaataaaaatatttttcaaaaacatggtttataaaattattttcacatttcaattttttttattgataatttaaaataaaaaaaaatatattactttcgaaattttttaaacagtttttttttaattaatattttaaattctgatcccaacttgcactttgcggctacagttccagactcaaacttagatccgacttaaataaaatcaaaaaataaaaataaaaataaaagttatagaacacatttttgtttctatttttaaaattaaaaaacaaaaatggttgtagaacaaatttttattttttaaacacaaattttactttcatttttatgattaaaaaattaaaaacataaaagtgctatcaaagaccctcttaatttagaaaaaaatttgatgtcttttttttattattatttctttagagcatctccaatcgtgttctctaaacatattccttagctaaaatatagagtgagcttaaaaaaaaattatagcgagtactctaaatgtagggtgctccttacttttttactaaatttttaatagtattataatcaaaagcattattaatttttcattattttattaaattaatttatatttgataaatttaaattataaaatattattaaaataatcaaacactaactaaaatagctagcatgattagagaatgagtaaaaagaatgatttcatattttaactttttagctattttaactaaaatttggctaaaaaataaaaaatgtggttggagatgctctaattatatgtatttcttattaaaattgaactttcaaacatactttaagagaaatattataaatacacatcacttaagttgtccattgttattaatgcaattaaatattagctcttagggatgtttatctaattcaattgacattattttgcttatagtgcattaaatccgcactaagtgcgaatatcatattttggatctaatccaatccgcacaataactcaaatccaatctaacctaacgcaaaaatgccaaattaaatcgattactttggattagttgccttaaattatttgatatttattaaaaaaattattttctacataattaataacaaaataaaataaattattattattttgtgtctctaataacaacattgaaaaaaaaaatcaattagcttgtgaccttaatttttttttatatattagttagtgttaaaaatattatatattgcatatttaaatcattaagttaaatatcttaactagttttttattttatttgaatttctcattcttttattcttatcatattttagattttagaaatgccaaaatagcattgctcattcttgactttcgaaaaaataaatattctcaatttttaatgaaatcaacatccattctttttaaataaaaaaaaaaaccattttaaaattgatgaaattatatgttttttttactgattttatagtttttgactcttcatgaatcatattaaatatcagaacgggaatgcatttaaccaaactaaagatattcaaaattcaaccctattggagaacattgtcccacatggattaaatgtaaaagtattgagccatatataagaacatgggctactccactcattgccaattggt

SEQ ID NO: 316567 - DNA, 679 bp, Cannabis indica
tattacctaaaataaatcacaactatttactctatttcaatttaacaaaccctcaccttttaaaaagtaataactattattatattattaggttttaaaaatatggagaaagtaagtaaatatataatagaaataataattaagttgaagtctttggtgtatataattatatatttgaagtcgttgtagtacaagagggaagggaagggaagactagctatataggagagtcaaagtaaatggtcatcaacgaaagtcggttgacacataatttgtcaccacttgaacactttaatcatataaccaaacccaaaaaaaaaaaacatatgagtgagataataagggaaattataaaaggtaaatattttttaataatatgataagatattattataattgaagttttttaaattatttttataattattttatattttacgtatatttctttaaaaaatttcatatttatatttatgtatatttatagtcaaatatcctatggtttgatttggattttatagtaagtaaaaaagatgaataagttcgaattcaggattattatatttttttattattaaaaaaaacttgaatgtaagacattaattaatggaattattatatagaaaatataaattgatattttatttacaaaaatacctctataaggtaaagacaacat

SEQ ID NO: 316568 - DNA, 965 bp, Cannabis indica
cctttttgacaatactaggaaaaatggaaatttacttttaaaaattataaatctaattttagttttttttttttgtttttttttttttttttctgttaaaaaacttactatttctttgtttttttgtatggattgtttaagctaaattatagtgaaacagttaaaaaggtgaacatcaatatttgcttgcactctaattcaattctcaaaaagaattatctactttctacacttatcagtactaccaagagctctaattgtcaatattatttatttatttttaaataaatttcaatcacacgcacataaaatattttacatatgtatatacaataatttttgaatttgtaacatacccttaataaattaatttgactcttaattttgctccaggaagtgataaagcagattatttatcttgcaaaatatattaaatgaacctttaaacatgattttgagcaaataaatatgactaaaatgctcttaatttttataataataaattaatacaaatataacctttatgtttagttcaaatacgcaattggtcactgtgtttactaacaaatttgaccttaatttatatggaaaatttgattttttatgcttaaaaaaccttaatattttattcttaaatcaatacatttcaaactaaaaaaaatatgacacttttatttaaaacccaaaaatacccctctcataactcaatcccatctctctctctctgctcgtctacaacccaaaccgaaccacaacccaaaccctccctcaccaccgttcacaacccaaaccccccctcatcaccgtccacaacccaaaccccccctcaccaccatttacaagactggccccctcccaaatcataacggatctcctaccgccggccccctttttttgtgattttttttttgtgtgatatatgttttggagtattgatagatattgattttagggttataatgtat

SEQ ID NO: 316569 - DNA, 894 bp, Cannabis indica
aatggggagtgagaaagtcgttggggtttttatagcaaaaaaattgattttgaaaagactaaaacagcctttgaatcgtgacctgtgaggaaattggttaaccgatttgccaggtatgcagaaccggttaaccagtttctgcagcaggcaaattccccgaaaagacacaaaaaaccgttttatccaaccgtttaacccccaaacttttttcaacacttcaaatatgataaaacagaattgctcaaacaagaaaaatagaaaaatgataaaaatgatgatttacggtaagctttttcgaaaattttcaagaaaactagaaccttaccgaaaatgagttttatgcaatgaaattgaaaaagaaaatccagtagtttgatgatgtaaaatttgaggtgtacaaacttatggaatcaaaaaatgttgaaaaatgagaaggtttggcgaaaaacactcttttaggcctaaaaacctagaaaatcaacaagtagagggccaaaaatttgttccatgtgtatttcatttaaaacaaacctatacgcacactaaatacattcaatttcacatgttcaaatatatagacacacaagataattaaatataatttatatgttcacttgtttgaaatcaagtccaaagttcaccaaaagttcacataatgacctataattttgtgttttcaacaagtatagttcatataggtcaagtatcaagaaattttctcaattatgcatataaatctcattaatctcaaatttggaatgaatatgcataaataagtaaagagatatgaaattttcatagctagcaaaccttatatttcattcaagttggtcatgcctagctctcttctaattaaactaaatctttcatcattaagaggcttggtgaatatat

SEQ ID NO: 316570 - DNA, 610 bp, Cannabis indica
atgattattattattattattagtaatagtagtagtaaagcatctaacggttatacataacaaaaaataaatatatttgtttattaaaaaaataataactgtattatttaaaaataaatttatagttaataattaggctttctattttttaattgtcttcactccttacatgatttttatacttatatataaatgtttcacactccgaaacttttattcattctaattgaaatgtagtttctgtatgtaggcctaggagtagttataagtataaatttattaaatgtaaattcaagaacttcaagagaaaccaaacacaaggttcttttgtaaaataaaacttaaagttagtatagtatatatacatatacatatttgttagtcttgctatttttaaattgtctttacttttatattatttttatactatatatatttaagttctactcataaagataaatatattttaataaaaattgtaattcttgcatgtatgtatgagagtgactataggtataaatattggttaaattttaattcaagacatctaagagaaaagtaaactcaataatttatgtatatatatatataaatatatagtatttttttt

SEQ ID NO: 316571 - DNA, 1153 bp, Cannabis indica
tcacttattattaaccttttgatttttctactaacgtttttgttcataatcacctgctcgtagaatcgaccgcccgatctatactacaactaccgctagtgaaagtcacattttggacgttaaacacaaatctcaaaagaaatggtgaaccacgttaaaaaatatgatttacaaatattattaacgttgagatttagttggagtaaacatttcagttgataatagttcaaaggttggtttgaatcctaataaaagtacagtaaaaaagacatgagtttacttattcatcataatgtatttcaccactttttttttttttgcaagatattggacctttttcgagagttgtactattttggtttttgttttactaatttaatgcagtattttttatccgatggaaacaactagtcaaatgagcgaagcttagagggtttacttgatatattttattagtaaagctcagaaaagattctttaaaaagggattgactttaaaacaaagttggcttatcctagagaaatgctttaatgcaattactctaataatccacaaagaacaacctattacaaccaacgttatgcatagctttggtattgttttgttagtgatcatatgttgtcctctagtgttgatgcaagtcttcttgagaaagtagcaatcttagttgattgggttgttgagtgttttaggatcaataaattaggaattctatttcaagatgatgaagtggatgaggttgatcagtttcatagattggtctttggtgtatagaagaggacccaacaagttgtcttacaatgtgaagaaggttgtctccatgtttgaagacactatagtacacattcctattcctccatctctagtttcttgtaaggattctttcttcctattttttttggatatatctgaagcttgagtttgttattatgaatatagtaaatgaaatttgtaaccgaattatgaccattatagagttttgtcttaaattaataaagttttttttttttgaaaaaaaatgtatttcattaatagaataggttagacctcacggtcattacataatatgtttaacagaatggtagatagcggaatatcaccaaataacttgtgggtaaacacccacttagacacattatgggcaacaaaatta

SEQ ID NO: 316572 - DNA, 1495 bp, Cannabis indica
tagttaaatttgtttagtaaccatgcatgggtaatacccattaagaaaattatccatatatttatatacattgttccaaaaaatacagttctctgttactaattgtttttgcctcaactttttatctcattacagtaaattaaatcatatagagagtcaataaacatgattaatcactacaagaaaaaaggatatagccacgactaaattagtgcctacaaatgcagcttttagtgcccatagttattttggcacgacttgtcgtgcttataagttcgtgcctaaaacaagcaacaggcaccacaaataatggcgtgactgatctaatggcacgactaatgtggtgccaagttaaaaacgtaaactttatttatcgtatatttaggcactacaaagtcgtgccaattaagttttatttaaagtaaaaaaaaattcaaaaccaatatatatttaaatttaaatataaattatgaaactaataaaaaataattaataaaagtgtcttctacctcataaattaatattcaaactacaataaaagtattcaaataacaaattacaataaaaaaaataactatttaaataaacaatacttatatcgtcatatttataccatcacaaataataatactataatcggattcctcatcgtcgtcatcattattctctccagaatgttgttctggaatatgcgacatttggggatagtaaggctgctgtgatacttctggcatttgaggatagtacacttgctgtatgtgagacatctgctgcattggtgacaattgctacatctgagttgttggtaccatatgctacatcaatggcatcgaaggcgtatgcggtgtctactgcattaaaggcatctgctgcaaatgtgacatctgatgcatatgtgtcatctgctgcatttgtggtgtgtgttgcatggaaggtgattgcatatgttgtgtctgcatggaaggttactgcatctgtggtgtttgctgcatcgatgacatatgttgcatggaagtctactgcatttgtggagcatgttgcatcgatgccatctgttgcatggaaggctgctacatttgtgatgtctactgcatcgatggcatctactgcatttgtggtggatgttgttgcatctgttgtgtttgtggtgtctgctgcatatttatcacttgcatttgcgacatcgacgatgacatccaaggaaaagaggacatttacagaggtgatgacaaaggatacataaaaggaagcagactctgctaggcttggggatattgggaagtcacaagctgtgaagatgaagcagaccctcctccagacatctgaggcattgccattccgaacaactcctcaccagtaggtagacgaacatcaggtcccaacctttgagacatgtacaacattagtcttgtcaatttttcaaatttttgctccactcttggatccacaggcatatcttgagtaggagtaggttgtgtgttccgcgacgaagatt

SEQ ID NO: 316573 - DNA, 991 bp, Cannabis indica
attcccatttatttaatttaattaaatttagggggcttattcattttttatactttaaacaagttttttttttttttttttttttttttttttttttttgctatttttgcatttttacagaattttacatagaaatccctattgcaactaacgctgcaacttaaagcgcaacaaaaaatcgtatagcaatccacatagaaaccactttagaaactcaaactgtaaaatttaaaaaaaaaaaaacaaatatatgggggtaattctctttaaatttattactaattttttttttaaatttaatgtcaaattgattatcataaataaaaattaatacaaatgtttagtaataaatacaaatttattacaataatacagatatatttgatagaaaatatttcaattttcttaataagaaagttaaagtggtagctcatttattaactaaatatattttttactaactacccttaatattattgggtagtttggttgtatatgaagagccacattttaacaatgccacttatatcaaatgatattttttgttcgactatttttattttttgagtatttttctaattaaatagtgttatctaaagcttttgttcttaaaaaaaattcacttaaaagtatagagtgaccctcaatgtattcttaagaataagaagaatatttttttttaatgatttttcctttttttaaccattttcctcaaattttagtcacatctattttccctcacaacaaagtaaaagagaaaagagaacccacaacaactaattgacaagattgattgaccaatttctttaataaattttaattaatagtaatttcttttataaaataataaaaaataatttaaaggataaatatttaaattcaacgctcattataaataaatatgtaatttaatttttaataataataataattaagttatatttttataattttttttttttgaggaaaaaaactgttattataaatcaaa

SEQ ID NO: 316574 - DNA, 3551 bp, Cannabis indica
ctcgagtgcagaagagcattgttgctctgctattagtgcttgtatctactctcttattctctatattaatgaaagcaagatggtgtttctctgttggagtatggccagggatcaatcttaatctctaagaccggaaccaggataaaatttgttgtcttctcccttgttcaattctattatattgcattgtgtttgttttgttattgttgttcttgttaacaatttagtgcaggttttggagttacaatcttagtgttattgttgccaattttacaacaaaatcagagctttggttcaagatccataagaaggaagtaaagaatcaagattcaatcaagaactcatatgcaactagtcatgacaggaacaacaaggtttaaacgtgagaagttcaatgggacaagggattttggcttgtgaagagaaagtttaaagggaatacttgttcatcaaaaggtttctaaggccttaaaacccaacgaagaactgactgacaagttgaagaaggaagagcttgaagacatggaagaattgacatactacactatcataatgtaactgtcatatactgtaaggagaaaggttcagagcatgaacacagctcgagaattatggagcaagcttgaagagatttacatgaaaccctctttaactaataagatcaatctgttagaatctttatatggttttaaaatatcttctcatttgtctctagatgataatcctgatacttttaatcaaattattataggattggctaacttgaaatatactgttgatgaagaaagtcaagctgtcattctcctcacatcattaccagctgcataccaggaattgaaggctgtgatcagatatggaaaggacactctcacccttgatgatgttcttggagccttgaaatccaaagaacaagagatggccaaagaaaaagacaagattaaggatgaagcttacttggccagaggaagaaacaacaccaggggtagtgatcattacaagaaagatcacttcaaaggccaacatagatctcaatcaagatcaaaacccaggggaaaatatcacaaggacagaaaatgttatttccgtggaaaagtaggcctcatcaagaggttttgtattgagtttaagaataaactcaaagaagatagggaaaagaaatatgattttgcttcaaatgtagtagactcagctcagaccattgcccctctgatggtgacttgtacatggtttcagatcaaagaatcactaatgaatggattcttgattctggatgcacataccatatgtgtcctactcttaaaaattaattaattataggaaagtaaattctggtactgtactaatggggaatggcaattcttacatggtttttggcattggaaaggtggccataaaacactatgatggcactattcgaatgctgcatgaagtgagacatataccagagttgagaagaaacctgatctcactaggaactgttgaagatgaaggatacaattataaatgtagcaatggccagatgagaattgcaaagggatctctcaccatcatgaaaggtgaaaagaagaatggcttgtacattttacaaggagaaacagtaattgcttctgaagccagtgttgtgcaaatcaagaaactgagatgaaaatatggcacaaaaggatgggtcatatgagtgagcaaaggattaaagaattgaccaagcaaggcctcctaggcaatttcaaacctaattcactaccattctgtgaggcatgtgtgttgggaaagcaccacaggttgaagttcatggcaagcaatcatagttcaaagaggccattagaatatgtccatgctgatctatgggggtctcacaaagttggaacacactcaggtaaatgctattttctgtctattgtagatgatttcagtcggcatgtgtgggtttatcttcttaaaactaagaatgaatgtctggaaaaattcagagaatggaaaattgaggtagaaaattagcatgaaaaaaaacttaaagtgcttagggctgataatggcttaaaatttatcaacactgaatttggcttgttgtgttttgagtttggaatttctaggcataggattgttaagcacacacctcagcaaaatggtgttgctaagggaatgagtaggactttgttgaataaagtaaggtgtttgctaattagttctggtctagggaaaatctattgggggaggctctcattagtgcatgctatttgatcaataggagtcccagtagagtcattaatctgaaaactccaaatgaaaaattgcatggcactacacctaaattgaatcacttaaaaatctttggctgcactgcatatgcacactagaaacttgataagttggaacctagggtcattaaatgcttctttcttggatatcctatgggtgttaaaggatataggttgtgtcaaattgaaaatgggaagcctaagattattatatccagggatgtagtctttcatgaacatgagttcatgcacttgacagccaagaaaggcaaagattctgatgttgcaggtgcaaatagagatgacctagctgagttggagataaactttgattgaatagaagtctcaaatgaatcaccacacacaccagcagtgaggacaacaattgaggtggaaacacaggttactatggaagaacatgatgcaggcacatttaaggtgaaaactttgggaagtggtcaagataatcaacctgatttgaacaactactaattttcaagggacgtgacaaggagagagataaaatccccaagtaggtatgctgaggctgacttgatagcttatcccttagctgtggttcagtctgaaagtgatccagaaccaactacctatgaagaagccattgctagtaaatcaaggaagaagtggcttgctactatgggagaagagatgcaatccttgaagaaaaacaaaacctggattttggttcccagaccacaagacaagaaagttgtctcctacagatggttgtttaaggagaaagagggaatgacagaggatgagccagttagatacaaaactagattagtcgctaagggattcacacaggttgaaggggtagattacacagacattttctcacctgttgtgaagtacaaaaccatcagaatgatgctagccattgctgcacataatgacttggaggatgagcagttagatgtcaaaactgctctcttaaatggttttctggatgaagagattttcatggagcagccacctggttttcaggtggaaaatggtaaaacaaatctggtttgctcccttaaaagatcactgtatgggttgaagcaatcacctagacagtggagtcaaaggttcaatctgtttgttcaaagtattggattttcaagatccaaatttaactcttgtctctactacaaggagctagggacacctaaggttgtgtacctattactctatgttgatgacatgatgatcattagcaaagacgagactaaaatccaagtcattaaaaacaagataaattttgaatttgaaatgaaagacttgggagct

SEQ ID NO: 316575 - DNA, 2070 bp, Cannabis indica
tttatttaagataatatagtttattgatccattattaatttttgagtaaattatagcatattggctacctacaaatttagcaactaattattaaaaaaatatatatgtatacaagtcttatcatgtatctaactaaaaaattcaatgtagtaggatatacaaagattttcttcattttgtgcttctatttaaattttcaagcaacaagggcaatttgagaaaatgcacccttttaaaaaagattgactgatgtattttttatctgtttcagaatttaaaaaaaaaaattagtctattttttttataatcgtttatgtagttattttaagatattttacaaaattttaaaagattcagaaaaatttaacacactaaaaataggattcaaattatatttattgcacgcgatactcttttattttatatgcgtacgaaataaactgtttgaactctattttcggcgtattaaatttttaaaaatttttcaaaattttatatgatgtcctaaatagctacaacctaaatgaccataaaaaaaaatggactaaaaaattctcttagatgtcgaatcaaataggaaatacttcagtaaaatccttttaaggatacattgtacaattttctatttttttcattgtctttttcttcacctttatttattataattttaaaatctaacaccatgcctctaaattttttaggccgttaaaatttttttcgaactattaaaattgttgaatttaagaatttttatctaattttactaacagaagccaaaaaaacaaaaaaaaacaaaagttaaggggatacgatttgatacatatcaaaattcaggagtacaatttaataatcattaatgttcgggagcacgatttagtacatagataatctttgtactagtaaaatttagtagatttaacagaaattcttaaatccaacaatttcaatacaaaaaaaattttaaaaaatataatttaatacatatcaaaatttaaaattaccagtcctaattaacattttatctttacatgttttttttaagataaacttaatctctcaaatcactgtctcacactcatgagtatactctgtaaaccaaaaccctatcatgatataaagttagatcaataattctaaaatttggtatagtgttcaatctgttaaatcttttttcttttttctttttcctttttctttttttcttaaccaaaagaaataaataaaagctttctcaaagtttttttactttttgcttccggatgattctagtggattcatattaaaataattgtgtcgatataaaataaatttttgggcctttatttagaaaaaatatagtattttttaaaattaataaacaaaaagtgtaaatttaaaaggaatttttttttaggctcttgaactaagtgaaccctaagcacaaatctaatccatttatactcgggatcgagcctaaatgggaattggtgaggaaaagtgtgtagctaaaagcctcaaaatgtaagcaagtgtttttattaatttgtttgttttgttatgttttcctgcaattaataattgtttgttgttagaatttgttgagttattagaacaattaatggcaaagttctcttatattttaatttttatacatttaattttttattttttattggaagatccttttaagtgtttttttttttttaatttgaggttaaaaaaatattaccgttaaatatcaactgaatgatcactgtgtatacctgtatatatgtgacagtaaaacctcgaagctaaacagtgataacccagtttatgtataacaatgatatctaactggtgcctcaaatttataaagaaaagtaaacttaaaatgttttgccaacaaaaataaaaaaaaagattaagcatataaaatcaaaatatttactgccaataccctacatctaaattttaacctattttggcactactgatgatttgtaggagcacgtgcattgcacgtgcctactaggagtgtgcataaatcgatccaattatagtcagatcggattggatgtaatttaaatatctaattggatcgaatcagat

SEQ ID NO: 316576 - DNA, 1435 bp, Cannabis indica
tctatcaagtcttcgaaaaaaaaagactcctttgtgtgaaagaatattttgtatggtaaaaaattatttgacgagaggtcatttggagagtgggagatgagaacaatatcatttatgaagctgcttgggttttgttgtctgcttgttctttggtgttgtcacctaacatcctcgaggtaggtagtgtggtggcgcagttgaggttcgcattagggtggtggggagttgatccatgggtagaggtggcaatttatgttcatgggtcgtgaagcaaatgctaacctatttattaactcgagagataaaagattagcaaagacaatcgctaaattgagtaaaagattaatttgagagataaaagaagccatctttaagtattagccgtgagataactaaatcagagtaatgagaaaggtcactcgcgtggttcatactcacatagtgttgatccacatggctaagcatgcatgcaaggtcactcaaccaagcatgcatgcaaggccactcgcatggtgcatgctagcatgatgttgacccgcatggccaagcatgcatgcaaaatcacccgacatgctagccaagaagtcactcggccatgctagccaaaaactcactcggccatgctagccaacaagtcactctatcatgcttccaagaaagtcaccgaccatgcttcctaaaatgtcactcgaccatgcactttatgaagtcactcgactatgcttccaagaaagtcactcgaccatgcttcttagaaagtcacttgaccatgcactttaagaagtcacttcgccatgcttccaagaatgtcactcagccatgcattctaggaagtcactcagtcatacttccaagaaattcactcgtccgtacattctacgaagtcactcggccatgtttccaagaaaatcacttggccatgcattcaaggaagtcgctcggccatgcttcaagaaagtcactcgaccttaccatgtgctttcacgacatcatagttatacttcgtgaaattttcctaaatattagaaaaggaggaaacaagagtacgatcacaaggatgaaatgtgcatgagaggagtgtatgacaacgtcttttgcaagttttgaaggcaaggagcagggtcgtcttaaggtgatgagaggcctagggcgaaatttgaaacgaggcatttttatttaataaaaattaaaaatgaattttaattaaatttcgacacaatatcaattttaattcttttagctctatgtaataaataattttttgcaacgtaaactaactcgatcatgtaatatttaattactaagaacatctctattgaaatgccgtatattttagcacatttgaaagaaaaaaataatgtgtttaaattattgccatctgtgttgcacatttttgatattattttaggagttaaatatttatatattatatatt

SEQ ID NO: 316577 - DNA, 1322 bp, Cannabis indica
cttgttatttctaaccactaataagaaatttgatggcaagccatcaaagaataaatcaacaacgaaacaaaataaaatcatgtattgtagcaagttcattcaatctcgaagctttagcactcaactattgtgtaaggtatgtaactacactaaacagccactttaattgcaaagaacttgttattcccaaccactaataacgatttgatgacaagtcatcgaagaataaaaaggaatcaacaacgaaacaaaacaaaacaaaataaaatcatgtcatacagacaagactaaaacactcaaaattatgtcacaaaaacaagataaaaatgctcaaaactatgtcatagagacaagactaaaatacccaaaatcatatcacagagataagactaatcacaatagtaaaaattgaattgtagtagcaaaatacaatcctaaccaagccacacctaagcccaaggaaggtcggcgggcctgaccagagaaaaaagacaaccttcgatagctatcaatttaggaaggaaaaactttaatttttcatctgttattaacccttgagagtttatttatctaggttgatttatatatatatatttatataaatatatataatgtttcttatggatataatatgccaccatcttgaattgatggaattattttcataaaaattaaatgtgataataaatggtttcttaaatgagagtttaaaatttcgttttataactattaagaaaaaaaaataaacatatttgtgtttgtagtatgaggtaatctcaattgactcaaaatatatttgtgtttgtagcatgattattctcgtttgtgtttagatttgaggattctcatattcttattagcctcgtaacttatagtgtgattatttattatggttgttatcgttagggtttgttgctttattattttcttttattcgaatgtgaataattgggttgtcattatctaatttttattggaagaatattttcggtagattgtcattaatagttataatttgtcacatattcattcagattcaagatttagtatttttcatatttcattgatgtttcactgttagcgacttactagtttttttagttgaatgtgctattaaggttttcttttcaattattgttaatgacatgatttgtctattgattatgctgttagggttataaaacacttaaagaaatatataaatcacagatctaaacatattcctaaagtgctttaatatagaaaaccctaaatcataaatctataaagcctttgctaaattaaagaagaagatgatgataaaagatcagcggaagcactaa

SEQ ID NO: 316578 - DNA, 997 bp, Cannabis indica
atattctgttcttgtaggtaactgttcagtacattgcctacttgtttctccaatttctaaataattgttgctagcaagacattcaggtgatgttgatgattcaaatgtgtttaccatcaaagggtatcttgtttcgtcatcatttttcctccttatttgatggtagaacttgcagccattgtcatctttgatggttattggtggtatcccttctttaatttgaaatttcactataattccatacttttttctgtctattgataatgtttcataaatctcccgtgtaagaatattatacgaacattttatgggaattagtgtacctgtcacttcataatcattgtatgttgttctgtctacccatgttccattgtagaaaaggatgattgtcatgtgatccattgtttcctgtgtgttatcatatacatattactttattattattttttttatgaaactttaagtatttgtaaaaaataatgtagatattatttgcacatttattatgtttttattcgaaaaaaaaaatcgataaattgcattagcataaatgggaagaaatcgcactgtgtatataaaaatttatgatcatgttatttacaatgatattttttatcaatgtaatgttacagcaatgttttggattaccttttttgttcgatgattatttctggttgcacggagaatggagcactgtcgacaaatttttctacatgcaacaaattttctccattgttttctattttggccagaaacaactctacaatctttattgtattgaggatcgttttctttttttgagaaacaacttcgattcttgtttttgattgaaattttgaagatcgttgtcgaagcttttttcttcgtcaatggtgttttctttcttgaggatctactcagatttgtttctgttgtttacttacagtaacacagaatcgaaattgtatacagattcaaaattgttttttgatttcgatttgttgattattggagttca

SEQ ID NO: 316579 - DNA, 1414 bp, Cannabis indica
atgggctaccgaaaaacaagatcaccttgttgatataggtagtaccaatcaatccatttaagctctctttaactgtgtagtcccatacctacacagtctcagaatcatcccacttgaccttcccaggcggtgtgggattgcacagcttacccggtatttccccttacggatcacgggactactgactgtcacaggttaatagagtgactcatggattaaggctcattaacgcttgaaccacgtaaaaactcatatcttctttattattgcattttattatttcttaagctcttattttatcagcttttaaaattttcggtaaatattttggtgctttcattgagagctgacaaaagatctaaacccacagtgctactgcaaccatggtgtatacaaaaaaaaatagttactaagaagactcctcaaggcggcctcgacactatcatggaggatgtaaaccctctctcgctcatctgagaaatgtgagagagggtacgttagaagctgacaactgagaggatgacctaagcaagcattgtaagcatgttgacgaaaacaaaaatgttgaagaggaggaaggagatgatgatggagaatacgttaaagacaggtactacaaagatgggtctcattatgagcaagacctagagatggctcgagtgtctatggagttgcgtgagacccaagagaagctagcccgtcaggagaagctttctcaacaaatggagagaataatggctcatctccaagacaaatttaaagatctagaaaaggagattctgaaaatgaccatttagtacagtgtgtcaacagaaacatcagggaaaccctgtcgatgttggaacctttgctctagtacaggagaaggggaaggtaaaggtggtgaccctcacaaccctacaactcccgtacctcctaagaaaagcaagaatccaaccagcaaacctacataggcatgaaggccactgatgcctccgggcttcgatgcccttctgctatgaaaggtcctgctgtgcagaagggactggtgttaaagtacctaagctcaagggaaggaaaaatttccccactaattccgttagccaggacggtgggaccagggacaatattctgatgacagtttgtccactgtacatccgaaggtgtcttgacgccaagtacaaaaaagccaagggagagaaggcaaggccacgtgggaatgacctaacaaaccacttgaatgataaagctcgtagacgtgacctccctggtagtgatacaaagaggctagaagagcaaattgctgctttgaaaaagcttgtttgaaagcagagtggggccctcactaattctaaagatcaggacctagagccgtgtgttagaaggatcatagtgttgggttttgtgccctaaataaaacccattacaatctgat

SEQ ID NO: 316580 - DNA, 648 bp, Cannabis indica
gttacaaagttcctagtaagttatgtagttaaaagattccttcgaaactttcataatttcatgtattatagaattatttagtctggtcattggatttttggattgttcttttgtgaattatatatatatgtatatatatatatatcaagattagttagtaaggtgtagtgttaattagaagatagttgaaagttggttagtgtgttttagctcttgaactctgtataaatacagattgtattcattcattttcattaatgaaatttagaatatatttcattctctcttggtccttaaactaaaatggtatcagagccacacgattggtgagctcttagcttccaccactcttcgttctagctttgtttcctctttcttctactcgagctactttattctttcatggcgttaactcgcaacaacatcaatggaggtgctggatactccaatcaattggcagctctcaatgaaaacaatagatcttctaccattgatccacgcatgccattattttcctttccaatggagataatcccatcgtcatctctggtttcaaagatcctcactggtgtagacactacagttctggcgaagatcagtggtggttgcattattggcgaggaacaagatcaagttcatcaatgcaaa

SEQ ID NO: 316581 - DNA, 780 bp, Cannabis indica
attataaactattttataaaagtacacacatgtgtcattctactagataggatgttacatttaagaatgagaaagaaagagagagaataagagattttaaatttaaaattttaaaattatttttataaactttaaatatgtaaattatttgaatcaatttaaacgtgttaagtgtacatttagaaagttgttagcacataacaattaatgtagatgatattttaaattttccataatgaaaattgtgagattttatcaaagaaaaaataaaaaaattaagtgttaccaaatataaagaataaaaactttacaaaaaaaaaaagaataatattttgggtgcttttgtaatgcatcttaaatagggtgcaatgatgtattaatgttttagtatttaggaaaaaaattagtccaaaaataagtgtaccgatgcatcccctaatattttgatattgagattttttttttagtctaattttattttcatagttatgtatgttaaatttattaaaaacattctcacaattttgagaagtttacaataatttataatatataaattagtattcaaacaatttatttcacaaacatataaaataaaaaattatgcatgcaataaacgagttgaattatatttttagttaattattttttaaaatttctcaaaattttgtaaaatatcttaaataatttaacgtacacagggacggagggactttagcccatgtgtgggctaaagccctcactcaaatatatacatcaaattttttatatgtagatata

SEQ ID NO: 316582 - DNA, 634 bp, Cannabis indica
aaaaatggggatataggtacttttatggaagaaacagcacttcctaggtgccaaaagcaaggcccagtgcccaggttgacacccggggctggcctagcgcccaagttaactttttatcaacttgggctgattcgaatgatgttttgagaactcttccaagcatattctatattttcagtaaatattaagatttaactatttctagggaccaaacaaaactttcaagggaccgaaattgggacccaacatataggttgacaccttacactaggcccagtgcctaggttgacatattgtcaacatgggccttttccaattagattctcaaaaaattattctgagtattttttccatcatcacaaataataacgattcaagcaaactcaggttgaaaccataaacccaaaggcctagaaacagagcacagcgcccaggttgacctagtgctgggcttagagcccaggttgacaatcaacctgttgtgctagtttcaatcatccaaatgccaaacctgatccgagtattcactccagaatgggaaaagatggggtaggagttctcgtcctcaagttctagaaccttgaaagtattaaaacgacatcccaaaagctccgaaataagcacccaacgccca

SEQ ID NO: 316583 - DNA, 1055 bp, Cannabis indica
gcctcgtcacataccggacttctcccttgggtacgggttgtttcatgcccccttctggggtttgtacgtgccccttccctattggttgaagaaagaagttgatgcatgtcctaagttgagtcccaagatttccctcgttctcacgagggatttcttgttccctagtcctaggttgcgttctgttctcatttctatgagaaggttctggttgatcatttggttgttcattttcagggggaacctcaatttccccaggttgttaatgttcagcgttctgagggtcctcttgagccgtctcctggctcctggttcatgagtcgcgaggtctgcctcgtggtctcctcactctaggactaggttggttttgtgtgttgttttcctgtgccgccctggctgcggctgcctcccgctccaactcagcattttgtcagttcgtctcatccacgcggcgccttagatgatgatttttcaacttagcaaccggtacgtatctcgtgggatcataggcactatcatcgatgggttaagcaccaccaacacctgtgttgggtgcttcattccctgaatctgggttttggccaccttcatatagggtccttcttgaacctgtggaccatgtagatagtgttgtccgtgaatcaggaggcctctgtgagcccattgcgtcttttccaggatggtgagtagccttttaaggatgagtatcataattttccccgttatcacccattgagaaagatttttcttttggttaggagggtttttttctgagcgtttttcacgtaggctctcaataaaagcaccaaactattaacgcagatttttgttaatgataacaagcctattttcatgataagttttgcacagaaataatagaaagtaaaagaagaaaatataacacaaagcttttaacgtagtttttcagttaaaattctacacagtccacgagtctgttgggctttgtgccctaaataaaattctatttcaatgtaatctctatcatctaaatattaataaagagacagaagtattttcatgttataatttatatgttt

SEQ ID NO: 316584 - DNA, 1107 bp, Cannabis indica
gttattaggaataatcttgagaggtacaggtggtagagcttattatgtgtgccattctaaacagtgtagctgttatttgtttaactttctcattatctctgttatctctgttgctgtttagtagcgttcccttatatttgctgctgctgagatgtaaaactcgtaaaaaaaatgtgtgttgtgctgctgctatagttataccatgtaaatgcaagcggagaagcttgttttttcgttggaaaggagaagataaaggttgaagttttgagtttaggttgaagaagaattagctgttgtatgaaataaaatttgaaaatcaataaaataaaacacaacttcattttggttaattataatataattatttatttatttatattttattattaagttttcttcagtatagtttacatttaaaatatgaataattgggttggaagtccgtaataaaagaataattaccaaataatagcaattatttagtttggattaaagttgaccttttatatcggagaatttggaggaggaatcaaatatgaccattagtgacctataaatagttgtcacaattcaagttcccacaactaataaagtcatttattattgttattttttggtgtagcagtgagaagtttgtataagtttttaatagatgtaaacataaagttatgtaagtcaaaattatctaaggatgagtaacaatattgacatcagtgttagtgatttgctgtgatattaatcaagttacttagatgagtttgaaaattttgttgtatactaggcctaagtttactgtatgatgatttttaaaaaatataatatttttatgggaggcacaattcattttattctagttaattttgtcatatagaccaagtcaatagattaaagaaaaatagtttattaaaaaagtatgtattaaataaaataataaaagggttagtataatattataatttgctatacctaaaattcagtcgtactttagaaagtgacacatgtcagtctcagagaatatgaatcaacaaatataatgctaattatatcattaaatataaaatggaataactcattaaatgcagaattaataaagtatatttataactc

SEQ ID NO: 316585 - DNA, 1728 bp, Cannabis indica
aacggaactaaggatgatgacctggccttacccatttgcgatatatgggggattgatttaattggggcacttcccacagggcgagggggagccaagtacgatgtggtagccgttgattttgttgtcaaaaacattgtctgctggtttggaattcccatgaagatagtatctgataacggaacttagttcgatggtgacttgttcattgagttctacgagaggaacaaaataattaagagcttctcatcagtattcaggcctcaggcgaatggacaagtggaaactattaataaaaccttgaaggatacaatcaagaagaagttagatgctgccaagggcagatgggtcgacgagctacctcaagtactttgggctcacagaactactgagaaaacagcaacgggacacactcctttctcgctagcattcaacttggaagcaatgttacgaatgcggttagacttggtcatattcacatcatctcgctgaatctgtttaggcgaggttcgtactcgtggggtctctcatcgacatcttagctctcctcgaggaaagtgaatacacgtgtcttttcaataagagtccggtctcaagtttctaggtgaaaaaaatctcactataacacatgcccctagtttcgcgactgacagataaggtcatgagggaaactataatcgagagacaggtgaagagatgtcacaaggtggtgacctttggttgtcccgtcgagggtttcaaaaaatgacggctgtaattattacatttgctcctatttagggtgctacgtcacgaaactcttcggattttgtgtaggcgtgcccatggatttttttgaggcattctattggttgcacatatgcgacttgtactctgggacaattgcctaagttctcgaaatggtgggtgtgccccagtaccttaattttcatgtaacgacatgatcattaggatactgggatacccccagccatttgtttagatgttaggtcagtcctttattctttgagtagtgtttttttatgtgggtgaggtcactttactttgtttccacactttcacacactgaaaagatcttctatctttcagatgagcgacctgtcagatagccagatgctagactctagagggggtgcttttactgatgagcaagataaagaagatatctttataccagcttcgctttctgaagaagaaacccctatcgccaacactgcgactttatgtctgttgtctttcgaagacaaagaaagaatggttcaggagctcgctgaaccagggacaatcgagatttgcgatagggaatctacggtgtccgcccaggaacacctcattcactccaggcatgtccctgacatctaagtcgaggaaatgggagaagattgggaggttcctgaccgcgagtcaggaggagaggaagatgttgaggagagcgagacagattcagtggacaatacccagctaaacgtacccttctcatgcgaggactaggtctcgtgggttaccaaatccgacctcaatacgtttacgaggttgaatttgctgcgactcgcaaccatgtgtcctcgctctacccaaaggctgcacctccccttcaccaatcctgcaattatccccacagaggatgtggttgtttctatacccattcttcgaggtggggtatcgacacatttccatccatttattgctgctatcctcaagcgataagatatttctgttggaaattatttt

SEQ ID NO: 316586 - DNA, 538 bp, Cannabis indica
tttttaaaatctgaaaacagttttttaagttatgattggcaatgttgttcaacccaaggattgacttcctcaaggtcttctaataactctacgtgtaggtcaccagtggaatttggttgctggcatgagtgccagcagctattggtggccatggaagatgagttgaataactagttctgaggcctccacctggcatctgggatgcagcagtcgtcccatcaccagtcttagcaacttgtgtgcccctagtgcgttgaccaattatggtgcttctttcaacacttgttgatcttgttgcaaccatatttaataggatctcaagttatgactctcaatgagagcaccaatattgacgttgaaatttggccaaaactcgttcgctagattggcgagaggaaatataggtttaagtaaataaataaagagacacaagagatttatagtagatcactccctgtgtcacgatgataatggagctacgtttacttcgagtttttattgctcacgagaattacaaaaattgactaaggcaagagct

SEQ ID NO: 316587 - DNA, 685 bp, Cannabis indica
ttcttcttcttcttcttctaccattctttctttgtttccatatctgtagataagatataaagcttttgtagattctggtttggttttggttcgaagccagaaatggaaagcgctgcagaattggtggcattccctttgctgattactccaatcgactctaactacagagcctgcactattccctaccgctttccttccgataatcctcgcaaacccactcccacggagctcgcatggatcgaccttttcctcaattccatcccttccttcaagtacgttttatgcttatttcattcgttttcgatttttatttatgtttttttagggatcaaggattcattagattgtcgtgtacaattgctgttttgttttgaaggaaacgagctgagagtgattctactgttcctgatgctccgattcaagctgaaaaatttgctcaaaggtttgatttttcttttgtctttatgttatgagccttttaatcataagtgctgaaattcaccaaattccctcaaaagcatcggttttatatttttcctgtgtaaattgtgctgagaaatgaaaatttctgattgtgcattgctttttggaaggtattctgaactacttgaggatttcaagaaagatcctgaaagtcatggggggcctcctgattgtatcgtaagacaaattctttggacttaaa

SEQ ID NO: 316588 - DNA, 2492 bp, Cannabis indica
tgagtgggagcggtaacatagataaatctataacttctataggtatttagaagtgaaatgatgatttccttcgagcttggttaaacagagataaatggttgagtactcatttcacttcattgaaatatcatttatacagagctaagtgttttaaggaaaaaatacattgaagggtataacggtaatttaatccctatattatgtagatcatctattagaggatcattgatcaaattaggattataacaatggataatgaatagcgtatctatatcggggatcatatagagcgttctacatgactgagagtgcaattctaagttctaagagtggattcaacaaggaattaataacttagggaatttacttggtaaattcgatttggcttattggggtccgcgtgcaggtcgaggttggggtctgattctggatctgggtttgagttcgtgtctcaggttcgagttcaagtttgggttggggtttggtcgttgtatgggttcgtgtccaggttcttgtcctggtttggatcaagagtaggttttgggtccgagtccgggtctgactacggattcccaggtccaggtcaggtcctagtttggggttcaaatcccaaatttagatctaagtctcggttccggggcctagttccctgaactaggtcccccatccaagtccagttcttacgtcctggtctgggtctaggttcgggtttgggtcctcagtcttggttatagtctaagtctcggtccgagttcaggtctaggtgtcactcccagccttggttcgggtacttgttagggtctggatcctagtctaggtcacgggtctcaggtcccggtgagggtttaggacaaggttaggtccaggtcccggtccgggtcccgatccatgttcgggtcccaggtctcaagtcctagtcatagttaaggtctcagtgtaggttctggtttgagtttgggttatggtttgggttcggttctagtcacagttccaattctagttccaagtcctggtttggttccgggtctgggtatgggtctagatttgggtcagggtccaagtcttagttcgagtccgggtataggtttttcgaatctcggtctgggtcaaggtctgagtccgagtccgagtcaaggtttgggtgttgggtttgggtcccaggttcgagtctgggtctggatttgggtctgggaccgggaccaagacccaagactcgagactcacacctgggacctaagaaccgaaccgtgacctagatgggggacctgggcccgaaacccgaacctagacccagacctggaacaaggatccagacctatgggggaattagacacaaaacttggccccagaaccgggactgagaccaaaaactcgaccacaaaatcgagacataggacccgaccttggacccaaaaccttggaaatgactaccaggacacaaccccaaacccggacccaaaccaaaacttaggactcgactcgggacacgggacctgaactggaacaagatcgggatcaaagactgagatctgaatctggacctgaggctttgacctgacccgtagtcagtgtttgaatccaggacccggacctagatccgtacccagacctagacccgaaacgggatccagacccgatcccagacccgaaatcgaaatcggaccaggactgggacgagaacctagacctgggtgtaacaagacccaaacctaaaccgaaactcagactagaaccaataccgagactttgactcggactaggacctgttacctgggacctaaaccaaggctgggacctggacccagaccgggacccagacccaaaaactcgggccagaccctggacccaagaaccaaactcggagttgggacccaaaactctgaccctgacttggattggcactcgaactgagaccctaaacaaaaactgggactgggactcggaccagaacctgagatccaaagatgaatcagaacacgaacttggacccagactgggtcctaggacccgaacatagatgggatacacagaatcgggaattgggcccccaaaccgagaccaaaacttgggcctttgaacttggattgggattcaagacccgaccccaaacccaaacctggaccttcgacccaccttgggacttgagatttgggactcgatgcttggactcgaccagtaccccgtgacttgaatctggaacaaaagcagaagtggatcgaggcccaagaataggaccaggacctagacccagacttaaaacttaaccagaccaggacccggactcggacacagacccacactcggattcctgtcagggtttgggtttaggttcgggtctaggtctgggtcggggtctgagtcctggtctgagtttggatccgagtttaggtccaggccttgatcccggtctgggtctaagtttgggtccaggcctttgatggaaatattttaccaggatcttgatttactaccatgtatgtttcattaacatc

SEQ ID NO: 316589 - DNA, 940 bp, Cannabis indica
cacccctagtgctactagctaatgagtttttttttcaattggacaggagacaagctggtacccaataaaccactctcagagataatgccaggagaatactttcattaacaaagaaagataccctctgaactatgcgccacctcgagaccagaaagtactaaagaacccaagatctttcatatggaaacaagtgctcaaataagccttaaacaatgttaaagcaatagaattattcctaaaaataattagattgttgacgtataccaaaatatttatttgaattgcacccttagtaaaagtaaagagtgaataatcagcatatgacggtaagaaaccatactctttcagagtaacgacaagcttggcaaaccaacatcaaggtgcctactttaaatcgtataaaaattttcgaagctgacataccatattaagatttgatgactgaaaactaggaagaagtttttctctcaaggacttaggagatgctcactactttctaaagtttgaaattttcagagattccacttgcatgtgtttgtctcagacaaaatatctcacaaatattttggttaaaatttatacggagggtgctaaaagttgtccaaatcctaccagtgctgctataaaattgtccttacaagatgaaaaaccatttggtgatcctacactatacaagagtacaattggagaactccaataccttactctcgcaagaccagatattgcttttgttattaacaaactaagtcaattcattaaagctccaactgttgtgcactgggaggcatgtaagagattattgaggtatctcaaaggaactatttcagatgacctaattttataacttgttgctgtgatgactttagaaagctactttaatgcgaattgggcaagttgtgttgatgacagacgtgttagacttttatttgggcttacatta

SEQ ID NO: 316590 - DNA, 1517 bp, Cannabis indica
ggttggtggtgctggcagtgagaagagaagaagaagaatacgaagaagatgaagaagaaaagaaagaaaaaagaaaaagaaaaagaaaaaagaaattaattttaaattatttatttatttatttttatttttaaaaattaaaataataatttaaaccaataatattttgacacgtggcaatttttaaaaagataacggttcagttaaaattaggactaacggacaaataaaaaacatgagtttgaggactattgccgctatttttcgaggttggggacttatctgtatcaaactgaattttttgaggacttttgccgcaaattttcctatttaaaatagtaattcaatttacaatagtattttaaaatgccacttcaagtaaaaagtaaaccattattcataatcaattaattattttaaaaatatatttttgaagtgaaatttttttaaactaagtgatagcattgtgataaataaaaaatatatgtattaaagattttaactaatgattaatggataaagttttgtgttaaataaaatatataaaaaaaataatttgcagcgtaaataaatttaactcttggatgtaagataaatatttaagtttaatttttaacggcaataatacataagttagttttttagaacttccgtaggtatctgatcgttaagtgtcaagtcattattcacatattatttttttattggtatatttgaattaatttttaaatgaagataaaattttaatgaccttgaccaattagggattgtcacgtgaccttgaccttaagtatttatttgtaactgagagttaaacttaagtatttatgctcaaattattttaaaaaaaatataatttattgtgtcaataccacaccatattttatataaagtattaattttgacataatgttaaatttgtcacacttttcaaaatacaattaaatgttgcaaaattattttcttgctatttagtattttaatacattaactagtttacattacagccagccaatggcacaaacactacataggccaactttataaatagtcgtgtgggccatggtcccttcatactgtcgatttcatttaggagttaaaatctctcttgggcccagcccaatatagtacttttaaatgggcctgggctaggacaatggaagagtgtttgggtgacacttgtgcaatgaacttgaatggcatagcaaaagggaaaagcaaagatggtggtgcggtggtgtgcagtgcagctagctaaatgccagccagccatagtcagaatcagacgcagacaaacagagcagtcattagactgggtctggactggagtgagtgagtgaatgagtcatctttatgtattaactcatatatctataccatttcagaaggcgcgtgaacatcatcatccatacccacattccccctcaaatcgtgttgtaaattcatgttaacatttttggtttaacagaatatacttgaatattctgttaaatttaacgattaggtttgatctcccg

SEQ ID NO: 316591 - DNA, 1245 bp, Cannabis indica
gggaaaaaaggttggtgactcctgttcagagtagtaggtcgagaaggagctagagcatgatggtaaggaattctgtttggcaaggggtttaatggtggataaagaagcctaagtgtgtttttggtagtggatttagggtgttgaagattggaaaaattggcttgaagggagctgagagtagctgtagtgttttgcctgtccaaacatgcatcatagctaagaaataacgagtgaatctcttctatagtaggttttttcaaaactagttaagattggggaaacaaatgcattgtattctgggcctaacccattgaatagataggttatatagtcaaggtaagaaatgggttctccaacagaggctaatatattgcatagagattttaattttgaagataagcaaaggaaaacaaaccttcctttctgagattttgtagagacatccacacttttgacattcgagcaaaagacgttgcagtgcacatttgctccaaagagacccaaatttgcacaacagtggtgaaacccacaatttgtcataacatatttcttgaaagagatgcatataaccaactcataatcagtcaattgtagcggtgccaatttgtgaactttggattcaccatcgatgacgtcgactttgtgtattgcagtggttgtgaaatggttccgtcaatgtagcccttgaattcattagctacgatgatgtttcgcatctgcattctcaataccaggtaatttgtatcatcaagtttaatggagattgcttagttaatagaaggaaatttaatgaaatagagctggttgtagaggatgaaccaatcctaatttgtattgaggatgataatggttcattttggtttgtaagggtaaagtctcctagctgttgtggtgttgaacctatactgatatctgatgccattagagtcgttgtggctctgatactaagacagagaaaataagagtgcgtatcatatttttttttaaaagagcaagcacggtacaagagggtcttatatagagtacaaaaagaggatacaaaaagaaagattcgtctgtaaagtcataataaagtaaacttaacaaacttaaataacaaaattaattactgtttaaaagatgaacacccctacaacatttatgcagtataagctatagtgcaatgtatatatacaatggctacaaccactgtattcttttttaatgttatatatttatattgttttttttatgtatgtgtataaa

SEQ ID NO: 316592 - DNA, 2428 bp, Cannabis indica
ggaaaaatcaaattcaatgagaatttgactcatcccacacgtatacgtgtaattaccatttgacatccaaatacgcattatatttcaaaatacaatgtatttagttactatacagtataattactactctaataattacactgcataataattacacagttatttctaaatacaaacttaatttctattatagatttacaataacttaaaatcacaacatcaacattaggtagacaattaagtctatattataacaagcaccaaatacaaaatacaaaaaaaataaaatacaaaattaattgaatagcatgtgtcacttaagaaaaaaaataacatacattaataaaacagcaaaagtaccaaggaaaaaaaaagtaaacaagtaatataattaaacaaaaaaataataataaaagtataatttactttatcaatttaaaatattattttaacatgatacactaataagataatatatgataatttcacctccagctctccatcaattaaagagcagtcgccggctcaacaacgtcctctgttttaaatttttattttcatatattagtttactattataagtttaatatttttatggggttataattataaagagttcattctttaattaattttaatgctgtgatcgttttttgtgttgaaactaatttagtttttcccattaatcttgttttttgacatggttttttagtctttttcttttagttttttccattagtcttgtcttttgacatggttttttagtcttttccttttagttttttctggttcgagtcttgttttttgacatgggttgtgtagcttagaatcatcagctatagtagaaacattcaagaaggagaagattggatgtgttcaacccgaaattgctgagataatagacattaaagaagcattgagttggattgcaactcattcgtgggatagagtcatgttggaaacataaagcttggtgtgtgtccaagcgactcatagcggtatttttatgccttcacagtttggtcttattgttcaagatgttcgaaatttatttttggctttatcttttattgatttatgttttgtaaaacgatctacaaataagttggctcattacttggcaagagacttttgtttctttacaggtcgtgtgtttcagttagagaattgttctctgaagtgtgttctattgttttgaacgaatttattaattaacagattttatgattttttgttttagaaaaaaaggataatgtatgatcggttactaattttagttaaatttcatgcccttacttttaataaacacatatccaaaaatacatattctatatccatctaatgactcaaatgatatggaggtttcacatccttcaaacttataatgtggttttatataattggcctttcatgtatcttatcccatcttttacttttgttcaaagataatgaattgagggataatggagaccacaatttattctgttgttgatatatctgtggccataagtgaagattataataaatacaaattagcattacttatcattagacgacccatcactgtcccagcattatcatctttccatacaaatttctaaataatcatttgaattaaaaaatacaggaatcaagataatgagagagatgtttagagaatagctgcaaagggcattgttaggttcacttcttcaaattttattttaattataaaaaaaaatgatatttatttcaaaatccgttatataactagtgaccgacatcaattatattaatgggtcctcctacatatacatggcattctataagttagtgtttggttaaattagatgtaataaaataaaatgaaatggaaacaaaacaatttttattttattctattctattgtttagttgtatattaaagtattagaatttcattctaatggaatgacattttaactattttagtggaatgactattttattttgaaatgaaaggagaaagcattcatgataaaaaaaaatttaataatcttttatcaattttttatgtcttttaaattttattttattcttattcccattcacattcctattaatatgttttcatttttctcaaccaaatgccacctaaagagttttcattttttttttcaccttttctcaactatattaattattattattattttattatttaatcatcattcaataatagtttaacatttaaaacaagacattaagggctcgtttggtttgtagtattaggtcgtattgtattgtattgtattatattgaattagattatatatcatatttttgtataatactatgttaaactttaatttatactaaaatattaaatatttaagtgtctataaaagttaataccacatatagttttacataaaaatattgcataaaatataattcaatataatacaat

SEQ ID NO: 316593 - DNA, 552 bp, Cannabis indica
ctgcaaacttatattcttttgcaggaaacgttcaagggcattatgaaaagtaagtacatgttaaatctatataacaagcttacaattgacaggaaataagtaacttggattattaaactgctagctgataacaagctcaatcttaatttgcatcagatcttaatttggcatatccaaagatgatcgacgtagctgtccccgcaaacatggtttgtggtttgcaagacaccgacatcaattagccaattatttgaattgcatttgcattgtgaaatcaaagcatgtttttctttattgtacctaacaaatttataaacttgtgaataaaagtgacaaaagctatgtaaaataaaagcaagaaagaatgagagaatgatcaatgtgtccacttgattgatttggtgaatgaagtttgtttaataatggggggccaggcaggcccactgagtgaagaagaagattagatgactaggctgttggttgcggattaataatgatttgacagatttgtgttatatgtaactagaaaacaaaagccgcgcgttgcgcggt

SEQ ID NO: 316594 - DNA, 1379 bp, Cannabis indica
ttgattccatagcccacaaaaaacaatataagataccaatagtctccttatccaaaccttggacaagacccataaaaaactcatccatttccaagtgtttattattatcataatatgtaacaaacctggaagatcgccaagcctttctggatcgggagcaatctagcatagcatgcttggtattttcaaggacaagtttacataaaggacaaagaggagaatcaatcacttttctagtaaagagagaaaatgcaactggaagagcattagacaacattctccaaacaaacaacttgatcttaggagggataacaaaagaccaaattcgggaccaaaactttttagaagaagatgggagaccctgagaggaaaaagccaagtgataagcagacttaacagagaaaatactcgaactttccctttcctaaatcagattatcattgccataacaccccgaaacaggaacttcatgaatatcagcaatcatggaatcatcaaaataagaacccaatttagtaacatcccaagtaccagagtcagtaataaaataggacaaaaaccatgaaggaggatggacattattagtaaatgatttatacctatgattgggatgatcacttagagttctaattccactaccacttcccactttccaaatgattcccgaagccaacaagtctctaccccataaaatgcttctccaagtaaaagaagggttatgaccagggacagctgtaaggatagaggtcagggaaaagtaacgagctttaaggatcatactaagaagagagttagggtttttaagaatacgctcaagcttgcttagctaacatagcttggttaaaatgtacaagagaacgaaaacccaaacctccacagaattttgattgacaaaaaaacttccaggatttccaatgaattttcttagattccccagtagaaccccaccagaatttggccatcgcaccttcaattcccttgcaaagcttaacagggagcctaaaacaagccatcgcataagcagggatagcctgaattatagctttcaaaagaacctcttggccagctctagagaaacatttggaggaccagcttcgaagaacagaagcaactttatcactaagaaacgaaaaggaatgatatttaaaccgagagagacattgagggggacctaaatacttacgaacaaaaggcctatcttccaactgaaaagtatcaaaaaatatattacgaatctcctgtacagtattcagagaaaagaggattgaagatttggagaaattaatagcttgacccgaggccctagaatagatatgaaacacctcttgaagcgctaaacaagaacttctatcagcagagcaaaaaagaagactatcatc

SEQ ID NO: 316595 - DNA, 640 bp, Cannabis indica
atctctagaagcttgagcactaatttttgctataatgttatacatcgataaataaaagtaacagaaagtacagagaatacaattgtaaaaataagtcttgagggagtgaggctcgtgcagtagggttgttcataaagtattcgatccaatctaattcccacgatccaatccaatccaattcacaaaatgcggatatccgcacttgtgcagatttgattggactaaaaaatttgaaatccgcacttgtgcgaattggatgttgtttgaccttaaaaagtgatggatctaatccaatccacacttaattatatatatattttaaaaaaattataatatgtataatattatattgctatatagtaatattaaaaaaaacaaacctaatttctaaacctaaacctaattgttccactttctcttcactctataaaatcaataccgtgttgtttgagttagagttggagattaagaaacaatagtttcaaaaggagattcttccattgtttttttttactgttatggtttattttacggaagtgtaatgtgttgttagagttggagattaagaaataatagttttttttttctagtatttcttaaattctggttgtgctatgttgttgtgtgtgtattttttttt

SEQ ID NO: 316596 - DNA, 1306 bp, Cannabis indica
accttttatggtatatattcagtattttaaagtatcgtaggaatattcatccaatcaatctacaccattttacttataatgcatcaaattcgcactaagtacaaagtttatattttggatatctaatctaattcgtataataactcaaataaaattcaattcaatccgtaaaagtatccatttgatgtttgaattggttactttttaaaatttatcaacaaaatatctttttcacataactatcaacaaaataaatcaaattatcttaaaaaaatataaaataaaataaattactattattttatgtctccatcaacaaattaaaataaataaaataaaataacaaatttaaataaaaataaataaatgtatgtaaaagaaatatttatttcaattgtatataaaaaaaataaattatatatatctaagaatgtaatatatatttgatgtataaagttttagaatatatttgtattatatgtgttaaattttttattattattttcttacattaaatattagttatatatatatttaaaatttatataaaaatatgttaattgaattgtgtatcagatatttttacatgttaattaatatttaatttgtataagtacgtattttaaatttttcaatctaatctaattcgtacaagtacgaatacctatacattaaaattgaattaaattaaatcatgtagattaaattaaaattaacaattttattttatgaacacctatgatatacctcgttaacatttatcttttacaaaaggattattcaatattcattacttccaaccaaccaaacactacatctatgtttcattacagctatgtaggattattattattattatttttttttcaaaataatacacatacttgtttcattttaatttttaataaaaagtttgggacagtacgagaagaagtacctattgtatacggataagattgaataaagtagatgttttgataagctgcctaaccctctttacctaactagaacatggcggcaaatttataataaggttttcttgcatgcgatatacctccaaacaaaatatataatgcatgagaaatgctaaaaaggctgttttttttttttgaaaaaaatcatatgtactttatacatataactatatatgtatgagtgtacttttaatgggtattactcatgaatgggtaaaattagaaaattttgagtttttatacttaattattctatctaattaaaaaaaaatctcttatttttatatcatatggactgagattgttccatcggtaaaaaaaaactttaaaaa

SEQ ID NO: 316597 - DNA, 1147 bp, Cannabis indica
taatttgctgtgtttttctgaaaatccatgtcctaaacgatatcttatcattataactaatgtttgagaaaaattaagcttattattttcatataactcagcttaatatgtttgttattatgtatatatgtgtatgtattgatgatgtacagggtatgaggaatctacaagggtttaagcatacggtaaaaagattagaagaagtgtctgtttcatgtagaggggttgaaagagttcagttattgagaaggtggttggttgctcttaaagaagtcgagaaattatcatcatccacttctgatgaaagcccaagcgaacaacatcatgattctcctactaatacttttgatgataaagataattctcctaagagaccaactttggttctttatgttgactctcatggagatgtacccagaaattttcttgatgtttttttatagccaagctcttgaaggcatcacactgtccatggtaattaatacactacattaatttatgttcataatatcaatccaaattttatgaggaaaaacaaatagtacattttgtatatgctgatccatggagtttaaccgcaggttcactcttttgtatgaccagattcttgaagcacccaatgatgaagaagttcctctgcttttggagttatatgggtttgatttctctcctctactctaaattgtcttactttctagttattattattattatattacaaatagcttttattaatgttcctctaattattttattaaacttaattagttttaggtaacacttttgtttttaaattttttaagtaaaaattttatttttaaataacaaaaatatattcggtaactaattttgttttttaattttaaaaataaaaacaaaaatgtgttttctaaattttatttttattttttaattttatttaagtcgggtccgaagctggttcgaaattggtacagggcgggtgcaaatcgagggccaggtattggttcagtttctaaagtctgagttggagtcagatcagtgtaaaatattgataaaaaaactgtttaaaaaattttgacattgcaaaagatttaacataaatttagatggaaaaagttgaatgacttaatagttcggggagcaaattaactactattaaaagtat

SEQ ID NO: 316598 - DNA, 1245 bp, Cannabis indica
aaataatttccaacagatgtttctcaggaatcttctttatattcatccaaaatgaggaaacaaatattttcagtaaacaaatagatcaacttggaggacaaaaaactaacccagcgcccaagttgacactaagcctggtcactagcactcaagttgacattttgtcaacctcaagcatttccaatgagaattctaacaaagtcttctaagcatattctctattttcatcaacaattaagatacgggtgcttttgggaaacaaacggagccatttggtggccagaaagaggacttagtgcctaggttgacattttgttagcctgggccagttccaagcatttttctctggaagtctcccaggcattttcttatgttcatcaataaagaagatacaagtgttctcgggaagtaaatgaaagcatttgggagccaaaataggtacccatcacctaggttaacattggtgctagtccacacgcctgagactgcagctcagaaggacactggaccttatttgaaactatacgtctcctccaacaagcacggttctggtgttggattcatcttagtttctttagagggattttgaactcacagtggtttacagtttgagttcactacaacaaacaacaaagcagagtataaggcactcttagcaggattacaattagcactagcaatcaaagccgaatcactcaagatctatagtgattcacatgtaattgttaattaaattctcgacgagtatcaagcttgagggccaaacatgattacatacttaagcaaagttaaggatttattagcctagctcaagcagtactccatccaacaagtgtcgcgtgaatagaatgccaaatacctcgccaaatggagcattaatgaaggctcagagcctatgctgatgatcgacagtagtccatcatgaatgaccccaattccacagtacttaaaacaaggtattcttcttgctgactagaacgaagctaagagactgatgagaaaaacaactctctttatcatcataaataaagtaatgtacagaagatgcttctcaatgcctcctcttaggtgtgtcacgaatgaaaaagctaaactcctcatggttgaggtacatgagggcttttgtggcaaccatgctgggggaaaagtctctcaaagaagtgttggatttatgccctaaataaaacccatttcaatataatcaaatttacttattaatcaagatcagaaataacattttatgtt

SEQ ID NO: 316599 - DNA, 2115 bp, Cannabis indica
taaaagataaccaatgtatatctttttgatcagagattaaatcgatcatcaaaagaagaattaagccagatacgttctcgtaaaataaaacttccattgaaaatagtcattatgaaaaattttataagcaaaacaattttataaaaaattagaaacgactaataattacactatccgatcataaaaatggttattttgctcatttaacatttttatactgttagtttggcaaatttccctcattttgttgatacccaaatactggttcatcttcataactctacaaaacaagaaaaagtttcattctttacttttagaatctaactataaagaaaggaattaaaaataaatgctccacatgaccagaatttcagataatatgtagcaaaggatttgatgagagaaaagtgggcaattgtgatatattctcatatatgaaaaaagggtgcatacaatgacaatatatagatcttacaagtggacaggtttccaaaggagaaaaggtctaaaatataatacagctaatctgacaacaacaatgcataatactaattagacaaatctaattcctttgttttatcaatacccagatactgtttcatcttcataactctacaaaacaaaaaaaaaaaagtttactttctttaagaatctaactatgaagaaaaagaaaaactctatatgaccagaatttcagataataccggttcatcttcacaactctataaacaaaataaaaaaactctacatgaaagggaaatttgccaaactaacaatttatggaagcaaaacagtcatttttatgatggcatagtgtaatttttagttgtttgtgcaagcaaacataattatttagctaataaaaatttttaaaaagttattttgctaataaatttttcttacaaaacactccattttgttaatacccagatactggttcatcttcataactctaaaaaaaaaaaaggtaaaagaaaaagaaaagcctatacatgaccagaatttcagataatgtgctacttttttgggtcattttattgatacccagatactgtttcatcttcataacttaaaaaacaaaaataaagtttcaatctttactttagaaactaactaaaaagtaaaacaaaaagtttctatcttaactttcagaatttgtttaaaaacaaagttaataacaaaaaagagagattagtagtacttacaggtgtaaaaacaggataatcttgagcagagaactgaggattaggaggaggaggagaagaagaagaagaaggaagcttgagattattagaagggctgttgttgttagtgttattattattagtggtctgcatcagagcagcatgaagagctctaagctccacagctttagcaatggcagcttgaatctcttgtctgttaacttcttcttcattattactggtttgttggttttggataaatcgtggtgatggtgtcagtagccattgacaaaatctctcaaaatttggacacaatacagaataagctatttgggtttttttgggtgtattattattgttattactttgcagaaaaaaaagaagatgatattatcttgtttgtagaatagaatcttgtgagaaccaagaaaaaaaacataaatggggttagagagagagagagaaatgaagaaggtgtggaggttactcaaaatctaagccaatgagagtgagaaagctttttcttttggttttttctttgtttaaagattgaatttttatcttgttcaaaaaaagaaaagattgaatttttatcaaaggaaagcatgtgaaggagatagtaatagctttttgctctatgtaatgtaggtagacaaaggcatggttttagagtatggacctgtaattctataaagacatcttattttattatttttatttagtattaaatatatatattaatctatcaaatataaatagtaaaattgagtattcttttgcgtattctgatctatacttcatacttccgtatctattccattgtttcatataacaaaaagtttcccgccaacactaccaatttgtccaattcgaccaaccttctctccaaagcattttttatcatctgattgttaccgaaagtcgacttact

SEQ ID NO: 316600 - DNA, 938 bp, Cannabis indica
ctctagaggagtggaaaaaaatactttgggatgaatgggaaaaagtttgcaacaatagccacgtctttgtttatccatcagtagcacatgtagccaatatgagggattgctacactgtcttccttatcagttttaatgaaaaatttgacgagaacaagaaaatagtttgcaatcccacttttgaattatacagctctcaagaagcaccatttagaggaagttcagagtacatggatctccaaaaggttatttttgagaaaaactagactactccaccagaaatttggccatgaatagaagatgatgccccatgggaaatgttttcctcagattattcacgacgcataacaaagggtctagaacaattctaaatttctaaaaatagtcacaatcagctccaagccactaaagcaaagaaaaaaaattcatcactatttaaagaaatagacactataggggtcctactccgtaagacaagtatttttgaggattcacaagatgcatgcatggaccaagaaataaacatggatccctatctctttcagtactatggactggaatgggataatgtttattttgaatattatgcgtgttcactaactggaagtgataaagatgatgaaccatcaggttggcaccaacttcaggaggaccacaattatgactcagactacaatgttgatcacgagtaaattattaatcgctaataagcagaacaaagagattccatatctcttacttgtgtaagatagcaagaagtggaaaaattcctggtactcatgatatttgtaggaattttttctaattgtttgtttgtcggtttgtcgctttctatgtttatcagtttgtccatttgttgtcagactgtcattttctctatttgtcattttgttggtttgtccatttattgtcagtttatccttttgtatgtttgtttg

SEQ ID NO: 316601 - DNA, 1277 bp, Cannabis indica
acagaaatacttaaaggtgttagtgcctaatactctacctttttaagtattatattgttactggtatatacatacaaaaatacgtaatattacatataaaaaataccaatttacatttttgtatgtaatattattataatttttattttcacactatatacatacaaaaatgtaaattggtggtgtttaacattttttatggtgctatgtgtttgtaatgaaatattaagtcttatatattttaatataatttttttttttataaaaatcgctaattatttaaatggtgttaggtactatttataccttatagcaatgctcttatatatttacagaaatacttaaaggcgttagtacgtagtgcctaatacttttctttttaagtattatattgttactggtacaattacgtgtcgaattctatataatataatttaataattataaaaaatattactaactaatcgtatgatattatctcaaattagtgttgggcaccatgtcttatagaaatgctcttatatatctacgtatttatattaagaaatgctaaaaaataccaaaaatgtctagtaacttaatattatattaatattattagtataattaagtattaaatctcatatataatttaatttaataattttttaaaaatatcgttaaccaatcacaaaacaccacatccaaataacagcctaatagccaccaattatatatacacaataacaatgatgaatattaatatatggatgagtttgtttgtggatgtcttataattcctatgaaaattaagtcttcaatggttagtgaaactctacttacccaaatgaaagatgtcaagagattaggtgctaaagagtaaaagctcttttaatcgtgttagtttccctaacaaaagacttaataaaagaaattataataattattatattttcttaattaattataatatcatcatattaattatatatgtgtctttttcatatgggtagactttgttagactactatatatactacttcaactagtattttttggattgcatggagcaggggtttagaaattaataattattattattatatactttaaattcaagtgtagtgtagtcaatatatatttatgttcatattattattattatatattcaaaaaccactaacctggcgggtgaccgaaactttatgtaccaaattatacttttttacttttgggttaatttaaacattttaataattattgtgtcatgagtgtattataataatatatatatataa

SEQ ID NO: 316602 - DNA, 558 bp, Cannabis indica
tttttttttttttgaacacttgtatcattaagtttgagtacccgagattcaaaattaaaaacaatggctagcaatatcaactcatacccaaaatttagtgtgtggtcaacaagaatacacaatcagattccttaaactaaaacttattttctataagtaacaaaatcatcactcaaaattaggaaatttcaataaagcaacaaccagagttaaaaaaaaagggttgagatgcaaaatggtcctaaatttggtaactaagttagtaaatgttcactttttaaaaaaattaagaaaattgtcaaatttaataaattagctaataaaaattataaaaatagatttatcatatatataataacaaaattaagttacataattttttttagtattgcatattattatattgtaacaaaaataaataaatatattagatcatttaaatatatacagcagtattaaatatatcatagtacagaaaattaatataccgtagtaataaaattatataccacaaagaaattataacaatactaagttaatactcaaaaatatatatat

SEQ ID NO: 316603 - DNA, 722 bp, Cannabis indica
tatttttcttgcagttttttgttgtgttatgttatgcaacacgcaattactcctcgagggctatgttctaagctaaggttttcttctgtggctgactcaaacgttttgaaaaagggggctggtaagaagtttttcagttaaagaatataattactgtcgagacaagccaatttcttggcatagtgataatacgtcatgctctaagcattatttactccagtatttcatgtggggtgtgatggggatcatgcattttggctaattatcatttttcatacaagcacaagcaagtggattgtttatataattattgacctttgctagagtattatcatcagttgaagagaaatgaaaccattcatgtttgcatgtaggcttgattttgcagttgctgagaaggagtcatttttctatcaggtatttacatctcatttatctttatgttttattggagtaatttgtggcataaatacttaagtttaactcttggttgcagataaatatctaagtttaatttttgacagtaataatactatagttatatttctagaacttccgttagtatctggctgttaagtgtcaagtcattatccacttatcattttcttattggtatatttaaaattaactttttaaataaaaaataaaaaatttatgacctagacgagtcagggactgccatgtgatcattgacttgacatttaacttacttaaaagttcca

SEQ ID NO: 316604 - DNA, 1069 bp, Cannabis indica
tctctctctccatctagtctctctcgcactccaccaatctccctctttgctctcactttccgccaatgatggcaagcctggcagagctccttcccgccgacaacagcccaagcaaagctcaagtggtggtttgcgaacttataaactccagattcttttctgtcgattcttttttttgtttttggaacttacatatatattgtaaaatgggagaaagtttacaaaaatactgaaatacgaagaatgttacatttttactgtcccaagctaattttcaacttttatattgcatctacgccaaaataagggaaagctcatcattctcagcagctaccgtaaaaaacaaccaatcatccatagaataattggaaaacaaccattattccaaccgaaatgtaagtatttaagactctaatcctggaacaataacataaaaatcatctaaaataattataaaacaatagtaaaactactaaaataaaatagccaaataaaatcacacacaaaaaaatactttacctcaataattattttgctagtggggacttctataacatcgtgagaggaaatcttcagcttggaaaatttccccttaccctaaatacattagaaatcaattcagaaaaataatcattaaaaaatataaaaaccaaatatataatactaaatatcgaatagcagatacagaataacaaaacatataaaatttcacaaagttagagagcaatgaacaaaattccaacttgattctgacactgaacatgcataaataaaaaccctgaagtgattataaaacaacaaaaaatcctaaactgcataacaagattaaaaataaaacacaataaaaaacataaacaacaataagatgattaaagatcccaccaccaccctaaaaaaaaagataaaacaacctcgttaggctctaatctccaatcatttctattgactgaggttttcagcaactattaattagagttgcgcaaaggaatgaatgattgttagagaagataatttttcaacctgttgcccctgattttgcccaatatatgtggaccaaccagacaaggac

SEQ ID NO: 316605 - DNA, 945 bp, Cannabis indica
cacatctcttttatatatataatatatattgtgatttatgtgtaatattatttaatctatatttttgtcctttgtattatttgtcattgaattgtaatcttgttagtttgatatttctattggagcacaacaattttccaacaacctaagcataaagttcactttagcaaaataaataagaaaaatattaaaatatacttttctatgttttttctgtgtcaatatcgctacaggttcaaactaagtatcgtgtcccatatagtttaatataataatttttaaagaatatcgttagttattcgcaaagtgatatgtctagaagtgctaagcaccactaatatttaataacaatactcaataaataaataaataaaactcttactaaaagacaacaaccacattatataagctaataaactacctaagactaggttaggttttctcttctttcaacataaccctttattgtcttcttttcatacataagtagttcacacctcattaaagaaaaaacttcaaaaaaataacattaaatgaagaaatcaaaatccatatcaaaattattagatatccaatagactcttagataaacattatgacatgtgaccaccacattagtggcttagtggtggggggttcatactttgtaacatgagtttaaaagtttcaccagaatttaaggcacaaatatgtattgtttaagttttcaattttatacacttaaatactatattttttttaagaaattaattaccaaatgttattttcaatccatttttattactactaatttctaaatgttgattgtgtttattaaagtagcatatcaatatataattagtccacgcttatttttaattaaaaaatttaggctaattaggatttttgccccttgaattttgacatgtaccaaatcatgcccctaaacttttaagatcgttaaaa

SEQ ID NO: 316606 - DNA, 753 bp, Cannabis indica
tcatcttcattgttaaaagcatttcggtatatctgataattttttttagagtatactggtcttacaaaataaataactaactaaccatgcgtaccaaacaaaaattgaaggcgaaactaaccatggccataaaaaaaccgatcatactaacactacaagaaatgtcacttttaccagcgcagttcgctactgcgctggtacttttactagcgcatttcacaaactgcgctggcaaaaaggtcaaagttttaccagcgtacatttgtagtggaatgcgttgggaaaaattatttttaccagcgcttttcattttatgctggcaaaagttataataccaacattgatttgccaacccccttttgccaacacatcacaagtaaattctattttatcagcacaatagtacttttgccaacacaaaaatatgctgacaaaagtgacattttttgtagtgtagtgtaaccaaataaaaccaaaatagaccatacgtataatgctcaccaatgccacaaaatatatgttaaaatattcaattttctttacaataacataaaatataagaagacaacaactttaggattattactaaagtaaatgcattttttgtaactaaatcatatgcatatatgaaaaacacataaagaaataaagtacatattaaacaataaataaaaacaaaaaacaaagttaatagtgaagagtgttataaaataatataatataatataaagtagatgagaagaaagaagaaga

SEQ ID NO: 316607 - DNA, 616 bp, Cannabis indica
tcacagcagacaccaacaggaatatcacaactaaggccagagttaaaggcaggagtagaaatagttctctcaaaagcagagagcttaggagaagagatggggctattagcaatgaatccatgagaaatagcctcatccctcctaaaagcagcacgagaagaggatgatccagcacccacgtcctgagtggtaaggaattgactaacagcagcagtaagactttggtcgacttgaccatgagaaagtggcagctcctccagagggaaagagttagaaagatcaaacggattgcgcttaaaatttgatttagcaggggcttttagaggaatttatagtgcagtggaggtggataagcatactcatcgcactttttaagatacgagacacatttagtaagagtgtgatcaaacataccacagtgaaagtaaatattaggcagattttcatacttgaagtttagccatttttccttgtggatattcctaaaatcaactagaatacctctaaggatgggtttagaaacgtcaagcaagactcggacatgaaggaacaaaccagaaactttgagaattgtgattttatcaacctcaaggaaatccccaacttcatccccaat

SEQ ID NO: 316608 - DNA, 669 bp, Cannabis indica
tgaggaacaatgtgagttatgcttaactcagaatgaaaatgcagaacacttattttttacttgtagtgtttctgctgtttgtcttcaagagataaagaactggctgtcatggcatgttgcagctaataacatcttgtctctaaccaggtggattggtagatcaaaaatgagcaagtttaagaagaatttatttgctgctgctcttgtgtgtttgatatacaatctgtggaaagctcgtaacctcagtttgtgggaaaaaactaaaatgactgcaggaaaattggttgaaggagtaaagaaagaggtcctcattaggactgctgcagtatggcctaagaatgtctcacccgatgacaccaactggtttcaacatttataactggtggttttgttttggtttaatctgtacagtttcaaggtagttttcacaaggtttaaattgtatagttttgtaaagtttaaagtgtaggccgtgttggcgctatttgtttgtacaaattctggttttgagcaaataaaatttccctgattcatcaaaaaaaaaaaaatattctaagaacttttaatgtaactaaacattagtcatcaaaagaacacaaccacatttttttaattctatggcctttgtatcttgtttaatagtggttttggacaagatcaatctctgca

SEQ ID NO: 316609 - DNA, 899 bp, Cannabis indica
cctacacagtctcagaatcatcccacttgacattcctcaagcgatgtgagattgtacagcttaccaagtattttgccttacggatcacggtactactgactgtcacaataatgaatatattaaaaaaattaaaggtatataatataaatatatatataaatgaacaaagtatatagatatgtataatatatatgttaagaaaaaaaaaagtatataatataaatataataaatatatatatatataaacattcatatcaccaactgattcctctctactaacactcttaataatgcaaaacttgtaattttcctaaatacgattatacatatatttcttcttattattaattttgttttaacttgtaattttggccacctacgcgtacataaaatacgtatatatatattgaaaaattaaacttaagtttgttttaaaaaatccaaaacatacaaattcttttataaaaagaaaataaaaatactaagaggacacgtacaaaaaccctagaatacatgcataactaaaaataaaaataaagagtttaatttccaatttaaaaaaaggtcttcatatattgtaataacaatatgtatttaaattttttttggtttattaattatttatatttttatagtcgatgtatatagtttgtctatcaatatcagactaataattaaatatcgttttcttccaaagatattaaataagtgtaaccttcttttttttgaatggataaatgtaaccttcttaaatgaactcaagttgctacctttttttaattgtcaattttataatataacactaattaatgctatatatacatataagcgatacactactacaatgttagcctttagaggcagttttttcaactccatttataaaaagggaagcta

SEQ ID NO: 316610 - DNA, 562 bp, Cannabis indica
accaattgatgaggcagaagggtctggagtggcgtccttggcgggaagaacaatgtttggtgacagcagcattccaatatgactgggaagaagaaagctcaaaaggatatggcttaaataggtaagaagagtgaaaaacaaagtggctactgtaggtatttatgggatgatagggaaagggcgcatcgcacatgaagcagatgcttcgattttccccaggggacactcggtgattgggtgtaagaagctaaaagagcgcttcgcttcccagcggataactctcatcattccatgtctcgtgaagaacacttagcgaatgagaagattgcctaagtccaatcgctgccattttgcgcttcccaaaaatatgcgcccatcaatgcgcatgaaaatccaaaaaattagcatttaacattatgactgaaaaaagggagaaattatgtctcctacataatggcgatacaatttgacggctaatgactgttgtgaatattttaccaggatctagatttactaacaagtatgatgattaacatcctaaataagaatatctctaaaacaa

SEQ ID NO: 316611 - DNA, 589 bp, Cannabis indica
taaacagagctatctctatttttaaattcctcttcatttttttcttctcaatatttttgaaccatgtagtgtatgagttattgcccacacaattcaagtcgatactcaagatagtgtagaagattgtggagtgttttgtcacctgaaggagaaactatatttagatcttgatcatactctgcaacagaaagaccattaagggttaaaaatctgaacggaatgagtcatttattttgctgccatcaatgtaatgttttctataactttatgtgtttagttccatgtttttagaaaattcatatttaggatgttaaattacagatttataatcaaacatatctgttagtaaatctaaatcctgataacatatttctaataatatatatatatatataaattatacctgactaattgatagaaggatgaaaataggaggatttctcggaggtggtggtggtgctctgaatagaagttaaaatattaaaatttttttaggcggagggtcatcataccatgagattaaacaatagaaagggaagaaccaaaggtctgttggaaattattttaccagaatcttagatctactcac

SEQ ID NO: 316612 - DNA, 1394 bp, Cannabis indica
atactacaacgacttttttgttatgactttagaaacttgtttatataaatacataatgcaacattaaattactaatgagagtttagtcatagtcaaagcaatctgatgtggtgatacaaatccaacgtgttcatttattgtgaggaagtgaggtcactttgagtttgagataagttttctatatatttctatgctataattttcatctttgttaagactccttctttctgatttttttaattgaatattaattagatgataagttaaattgaccttctttaattgatggtgtaaatttggttcaaaaaaatatactagtggtaaaataataaaatttattttatttggtatgatgatggttttggatgtatgtaattatagtatgtatatatctcttcttctcctcatcctctaaaacctccttctttaagcctccaaagagacctgtgaagactcttcttggcattgaaactaactaaagaggcaggagcccacttaagcaaaactctacatatttattgtatatgtataaatatatatgcacatctttattttataatttggatatgaatatgtatgtgatcacttggatatgaatggcatgtgaatattagtgaagtacttaatttggttcttattacttaggtatatagtctccactctccactctccactctccaccaataatattatccattaataagagttcattacataaagagacttttctaagcacaagagatgtaccaaaatgctttttatgcatgtcatgaaccaatccattttatcaaaattgctccttacaaaaagagagtgagataggattaaaaaatgttaagactcatgtaaccatcgtaattttctctgtaagtctacggatcgaacctcttaagactcctgtaactgcaagtaccgacgtgagaattacaagtgtcaaagcacagatgattttgctaaccccaatatcgacgatcttaacttccattctcgaaattcactaattaatagattcgctggtttaattgtgtgagtgaaagtaaagactattgagaaatttctttcccacgttagcaattttggattctgagaaagttcattcagattctagaacattctctagggttcttgaatccatatactccattagtataccaaaatcacctgagagtttttgaaagatcttgtgtcatcggacctcgtgagataagtctgtacggcggaggatctccatcttgcggtaaagtttattagagttagtctcatattgctaatgtgtagaaataaattgtcatatataagatgaatgtgttactcctcccattgccaattgattttgaaatggaacctcattcatcttatcataaattctaacatggtatcagagccaaactaaa

SEQ ID NO: 316613 - DNA, 983 bp, Cannabis indica
taatttttttttttcaaaaatatgaacagtacaaagtaatccctatcttcttctttctctttttatttctagccgcatgcattttaagcttcaaattcatgtttcacaactcaaaataacatttttttcacattacatattgatatataattgcatgatccttttaaatattgatttcattatttaattaatttgttattttttttcaaaaagttgtagagccaatataaactataatgtacggaaaggaaagagcacaacagtggttagtttggtgcgacatttccatagctttcaagagtataagctcctataatttctcttgaaaaagtaattatagactcatatgtaaacgatctttcattagtttgtttttatatctgttgagaattaatatgcctaataatagtatgacatctttggtgaaatcagatttctttgttttgtaggtactcaattccggtgacactaaaataaaagggaaaaatgcttgtaccaaattcactaaaattagtactaacgaaattcataacaatatctcgtgccaattaatccctagaagaactcttcaagtaagttcacaagttaagaaaatgacatgaacatattttatttgccatacttcaaaatcctagttgcttcttagccaaccactctaaattaaggatgacaaaagtctgttattttatacaatattttttggaagctacccaaataatggagtgcaacaatgtgataatgacagaaagtgacaatcactcagtatactcacatatgcagcaacctgacaacaacacaacaacaataattaaataacttttatctgcttcaaggaggggatctgttttaaaagattttattttggttgatacttggactttgacagcagaagcaaccataaagcaacaagaaaacaaccaaaagcaaatcttcgaagataaatactgaatattaaaaaatctataattatttgttcatcaatt

SEQ ID NO: 316614 - DNA, 1171 bp, Cannabis indica
atatttatgaaaaatctccttgcaaattttacccttacaactattatctcaataaaaaatgataaagagtttgactaaataggataaatatgattttttttcccttgaattatgatccaacaccccctaaattttgttgttgtaaaaatttttcctgaattatacaaatcgttttaaatatctccctgcttatattttgttctttcttttaaaaaaaaaaataatttacttatgtgattaggaagtacaaatatagttacagtacgagaatttaaatgacaaccttaaagtacttgaaatacaatttattaacaataaatatataaatattaactctagaaatgtatatacttattcttataattcatcattacataattatttatgtatttattttttacctaggctcttgaagggattagattaaaattaagttagagaaataagcataatgcaattgcagggagatatttgtaaggatttttataactaagtgttaggtagttaaaaatgtatatttattagtataaaaatataaaattaaatgaactctatatgatattttcataaaattattgtaatatattttattggaaaatatttatttgaattcaattttatctttgtttggagttaaaaagcatcattttgtggcataaaagtaaaggaacaaaaaaaggagtaagatggtggcccaaaacataaaaaatggtatttttttaatagtatggagaaacaagagcagcccaataggcccatttgacaccaaccagcgccacatggcgctttccgaggcccacgcggacagctttgttcccctactctccaccaggcgcaagtgaacatgtcctctagctctcctccatgtgtgtctcacacgctctagctgcgagagtgggctttgtttcacacggtgtcaagcatttcagccaactttttgtgtggcaaactctccttgcgccacatgtcaatgactcagcacatatgcccaattcgagtcttccacgtggcacagttgagcccaactcgaccaattcgagcatgccacgtggcactctggaattaaagttattttaattacaaaattatcttataataaattacactctatacacactttttaatttttattttaatttttacttttattttattatttcttaatttatat

SEQ ID NO: 316615 - DNA, 499 bp, Cannabis indica
aataaacaaatctgattatattgaaatgagttttattgtgacgggactaaatttcacgattttaactgtttttcatctttatttttgcaaaacttcaattttccgacccataatcacatcctgagtaccaaaaataatttattttagggttttgacgttaaaactcaaatgtttatgcggtggttttaggtgggtgacaatgcgatcgaaaaaaatgctatttcgagctatttggttgtttggattatcttgtatttaggtaaaactccatcttatatgcgtattttgtacgttacattgtattattttatgtttcaatttttcgggagtgtttggtatagggttgttttttggaaacctcagctgtggtacaagaaaaatatcttttagctaccatgcttttctttttgctaccaaattttagttgcaaaatttcttagtagccaataccaaacaaataagaccaaatatttctactgccaaattatttagtaggcaa

SEQ ID NO: 316616 - DNA, 826 bp, Cannabis indica
ttgagaagcactcaatcgaaactgattgcgcagtaggttaagtaaggctagaaatacattagctgctgttttttttttttggaaaattaattaattagctactttaattaagtataacgctttataaatggagaatttagtatactatgttatttctatctatcatcatagtgttcaatcatgatacttacaatctaaattagttaatcatgacgtttggttggaggtaataaaattgaatggaatagaatgaaaaagaaacaattttcattccatttctttgtttggttggattaaagtattgagatattatttttgacatagaagtaaagagcattccaatataacatgagaaaaagtttaataattttttttatcaatattttatatgtatcttaaattttattccattacattcatattcatacttccattcccattcctatttctatatttttattcctctcaatcaaacgccttagaattatcgtatctcttagaaactgaagcaatattcaaagaaatgaaaggcagaaataaagagaaacaaagattgtgacaaaataattatcttgtattattgagagggtaatgagatagaatgcaatgaaaacattttattcctttgtttagttgcatattaaagtatttgaaggtcattttaatagaatgacatttccatcattttagtggaatgtctattccattttgaaatggaaagaatgactattttccttccatttcaatgcatggtaagaaaaaaaattaataatttttttatcaatttttttatgtcattttaatttattttattctattcctattc

SEQ ID NO: 316617 - DNA, 661 bp, Cannabis indica
aataaaaccctaataatttttttattttttattttgggcccccgaaaagtgtgggccctaggcacgggcctagcccgcctatgcctagggccggccctgctacccattcattggtaatacttattaaaagtgtactcacgtatatatttcaacataactaaaatatatttgtacttatttcatagatagaaatgggccaaccacatattggatatttattattataatttttttcttttaccaacactaaaaataacatattatatatgagagctctagagtgatgaagtgtttacagcttatgttactatatacattaattagttaattggaaaaatgttagagggtggtattgattgattctatgagctgtgatttctttgctgtaggattttattctcttctcaactttattattattattattattattattattattattattattattattatttagatttgataatttatgaagaataaattagtattttttccagggccggtcctaggcataggcgggctaggcccgtgtctagggcccacactttccggaggcccaaaataaaaaaaactaaaaaaattaattaggtttttacttaagtaaaatttaagtataatataagcaaaaaaaatacatagtttagttggttgaggt

SEQ ID NO: 316618 - DNA, 992 bp, Cannabis indica
ttcttatatacaactgacatttgcaaaaacacggtttttttacttttattgttattattgaattaaaatatattagatttaatattaaattacattaataataataaggtgcctaaatcacattattgcatagttaggattatttgtgtactatccttggagcactatctacataatcacattttttctaagaggttaggtgtatctcttaacgggatagataatgagtcttatttaaaaatatataaaattaattaaaaaaattatattatgtccaatgaaacataatatattaataatattatatattgtttggtctttttttctttttctttgtataaacatattaatttaaatgagctgtttttattgaagattgtgactaagattggtgttaattaatttaaaagttgtattttgactaatatgttggttgtggtgaaaaatatagagtccttgttagataatgaatattttttggagggaatttttatttttatggtttttaaagtataaatatttaaaaatatgattttttatttgaaaagttttatgagaaaattttagaaaaaggttaataatatatgaaaaacaatataaggtacatgttatctctcttgttaccagcaaaagagtatctagttaccttaattgatttttccatatttttttaactttttatttaattctctcataaaataatatttttgaaaaaaaaaaccatatttttacaaaatatatatatacataaaaacacataatatttgtaattttcactatttttggatgtaaggacttccctacttagccttatcctatttttatttcagtaataccaatttttgttagccatataaaattcaaaacctctaaattccaaaacttttatatttaatgaaataagattcaaaccaatctcacatatgtcgaaacttgtcttaaaaaaaaaaaaaaaattaacactctatatcctttttatattgtcctctttt

SEQ ID NO: 316619 - DNA, 998 bp, Cannabis indica
atatcaaaatttaaaggataaaattttattattaacattaaattaataatttttatctcttcacatatataaaacaaaaagaaagagtatgtaatatttttaatcacaacgtttacaaacttttaatgaccatctatatatgcaacatgtttataattttttgtaattatgttaatcgattgccatcaaattttattttttttgaacaacaaacatattgtaaattgttaagtcgttttttgaaaatattagttatcaaaatattatgtttcttgtgtagattacgttttcatggctgtatttttcttttaggaaacttaatataaaagatgaagaaatctctttatggaaagtttatctaaattaatatattttaggtatagttgtctctaattatattataataataattttgtattgactataaatagagcaaattttttaaccttttatgccagaaataaagtttaaatcgtggtcttggacttgtatagaaagtttccttatttgacccaatttgccattacagattccaattgcgttgcaacaaattagagattattttagaaaacttttatacaactgtgaaaacgtatttgtgactgtctctaaagtttctatgatctataaatgggacctagagagtagccaaatgttctcacctcttctaagtctcattttgcatatgtttatatttgcgagaagggaatttcttttgtgaaaacttagtgtgttcaactaggttttagtctttgttatcttattcttattctggtcttagaataagttgaagaacatctttgaacaagagaaatgtcttcgggagaatacttgcttaagctttacttcgagaggaagtaagcacacacatcaaagacaaagggaattcagtatttggtctgctcagaattcatattagcaaagtaaattacaaaggattgcggcaaagctttagagcgagtctaaacttatttaagtcaattgtatttgtaattgtt

SEQ ID NO: 316620 - DNA, 548 bp, Cannabis indica
aaaaaattgatccagaggttgacatcaacaacgcaaagctcataacagataaattgcatcctaaagttgaaaaaggacaggcatgcaaggacaaagaaacactcaagagagtcttgagctactatgcaatcaaaataacttccaatttaaggtatagagatcgtggtctcaagaatacagactgacgtgtgtttatgaaagttttaattagtttctacgagcataataaaatagaccagaaaatacatttataatcaggaggttctcaaacatgcacagttgcccaataaatgttagatatgaataccaaaggcaagaaacaataaaatttataggataatgcatcaaacccaagtttttgaacataaagacaaaagcaacaccactaaatatcaaaggagaattaaaatacatgtacggaataaactacatgaaagcttagaaaagtaaggagcgtgttgtgccaaaaaacacggtgccaaaaaacaaccctagatcattagtggatttgaaaacaatagaagacaacagttttttgtttattttta

SEQ ID NO: 316621 - DNA, 2146 bp, Cannabis indica
acccgtgagtcatagagactcaacaagaaaagctataaacaaatccaaacaatgtttagtgaaaataatcacaacatggcatattatacaaattcaacaatccaaagcataatcaagcatttcataaacagttatacgtcttataagatgtaccgatcttgatgcatcataaagcacccttaccaatcgttaaccacgagctacatatgtcactatcattgcttgataaagcaaaaataagtaagaaatctatttgcagtttcaagcgagcaattactcattcacagtaacggtaatgaccgtatctttccctcgatcataatcgggtcataacaatagtaatcattacctcgatcagaatcgaggcaccaacaataataatagtttctcatctaacttgcttagcagtgcataaagattttcttacctcaatccaatatcaggaatgtaggccaacctaaatagaaacaaagctcgacgatcccaggtcttatgtcacaacaacaaaattcgataaacaacttgtccaaactccagaataaaccctaattccataactagacaactttaaatccccaatgattttaaaatagcttaaacatcactaaaaatgccttaaactaggttccaaaaaacaccctaagccaaaatcaaattcaaggaaaaaccctagaattccccctgctagccaaccaatcgaccggtttaccagtaccatgtaaaaccgatcgactgattttggcaaaatttgaggtaattctggttttacaccccgaaactaatcccaagctcctccaaacctacttaaacttttcagaacactccaataacatgaaaataatgtatgcaatcaaacaattcacaacaatttatcaaaatacccaactcaccattaaagatcaagaattaagttcataagctaagttctcctaaaacaaatatgaacaaccaagtaattcatccaaaactcacttgaacaaccctaaattaaacctagaatcaaactataaactccattaacatcaccaacccgaattctaagaaaacccaataaaacctaagctaaaacttaagaaatcaccaaaaacatataaagaaaacttaccttaaattgttcaatccctaaaccttagatggttctgcttgaaattgaagaacttgctgaagaaattctccttggctcagataattcttcctttttttttagttttaggttttctagcttaattattttatatatacccactacaagacattccatttcagcctagatatataataaatgacaaactaaaaaaatgactatcttacccctcttaagacactatagcctaaataaaatctaagggtaatttggtcttttctaactaatctcgctaaaccgataacttagaattctaaactaattcggtataattctaatataacacaatgtcaaccacgtgacatttctgaccactctgtcgaatttccacggtcaccaaactcgaaaatattttattttaaaaatggtatttacaatacccacataacccaataaaatttctgtaactaataaattatgctttatttaatcattcatcaaatttacactaatcgtcacataagtaagatcataatcttactcgaatattagcctaatcacatatttaataaagtatacccaaataaatattattatattttctaagatattacaactatctcttcctatttcaggatattacaactatcccctcttaaattttcctcaaaatttacctgaatagctcgggatactgctcctgcatctgcgactttaactcccaacttgcctccttaaccttattgttcatccacatcactttaactagtagaatagtcttcttttgaaacaccttctctttcctatctaggatctaaacatgttgctcctcatatgacaaatccatctgaagctcgatatcttcatagcttaggatatgagtcgtattagacacatacttccgaagcatttatgaactccagataaagtagggggtaaggctagatgataggctacctgaccaaccctttccagaattttaaatgggccaatacatctgggactcaactttcccttctttccaaacttctaaattcctttcattggggacacccaaaggaa

SEQ ID NO: 316622 - DNA, 949 bp, Cannabis indica
tggatcctgcattgcagaacctagggaacacaagggttccaacaaccacaaatcctgaacaaccctcgaccgtaggtcatggtgtgacaacttctgtgagtggaatcgcgccaccagcaagagactgggaataacagttcagcagttaatcagggcattcccaacactgtccttccccccgtaacaaatggtcgaacaaccattggagatgacaccaaaatccaaaacttccgtgttgctcttggagtcatacaaggtcatactaataccttgtatcacgatcaggaggaactccgtgctgcggtaaatcttgcgtttgaagagcatatgcgcatgttcgctgaatggaggaacaaagagatggaaatgttgggggctcagtaagcaaccattgacgacctgaccagacaggccaccgtgttgatacgaaaagcctatcaggctactagacaacaacctacaaccgtcattcccctgggcgagacagatgaagatccagcagtgaacacctctcaaactataaatggtcagccatccaatccccggtcacaggtcccacctgtgggccaagtggtaggcggccataccttgtctagcaattcatcaagagaagtcatacctaataattccaaccaagttaatggtgttggccagctagttggccaaaccaaccagtcattgagacagccgggtgtttctaaattcaattgattagaaacggttcatgatctcagagacgatatgaacaggaggagaggattggacaagcaacatgacgcgccaatcgtacagttcggggttcgtgctcaaaatcctgctcaaagagacgctgacgtgactctggtcggccaagaggctaaacaagtcaatccagccgtgcaggcactgttggatgaactaaaaaaatatgttccaaggcctggtcaatcagaagaacaatgacctcgag

SEQ ID NO: 316623 - DNA, 1108 bp, Cannabis indica
tcccaaggtctcaacgcttttttcctttgttctacaggttgtcggtgcacgcgatccttccattccgatcattgtagattttgccctccacaaacatcagggatgttggatggtgaattatcaactactttctaagcaagtaaggccatcagcttttgacattgcatgcttgaaaaattggacagaagatctatatcccctggtgcatcttctcctttgttttcatcagctcctctgaagttagcaaaagcaagtttcccttcaggtcccttaacatttcgattaggaaactttccatggagcttgtgaccataaggatagccattcaatctgaaacatctatcatttgtgtatccattcgtgccacaatgagtataattatatttggatcgaaatggttgaacacttccaacaaattgttcaaatgagtttgatgaagaaccatcaacttcagcagtactactcgatctgacccacttgttaaccctctttgcctctcttcttggatcattaaagcataagctttattgacactaggaagaggatctctcatcaagatctgagatctaacattactgtaagagtcattcagtctaaccaaaaattcaagaagacaatcttcttcttgatactcttgtataaccttcatagcaccacaactacaaataaattgtggtctatattcacaaacctgatcccataaagctttcaatcgagtaaagtatgtataacactgttcgatccttgtgtgagattctgcattgtcttcttaacttcaaaaatccttggagcattcctttcatgaaatctttcatgtagttctgcccagatctcagcagcattatcatgatacatgatactgtctagaatttctcgagagatagcatgaataatccaagagattacagtgttgttgcaacgacaccaagcatcataatcttcatgatcctcatcaagctggagaagtcttccattgtgtaggaaatcaagctagcaattagttgtaaatttacatttaatgtattttccatttactctagtattactaggtgttcacattgtattaaatataccctttgtatacactaaaagagatcatcagaaaata

SEQ ID NO: 316624 - DNA, 658 bp, Cannabis indica
ttttttggtaatgaaaaccaaccttgtaaagatctaaaagaatgttatcaagtgattcttgagcttgatctgaacacctatgtcttagtgacttaatagcttcaatggcttcttcagccctattttgttgcttcattactatagccatgtcttttagagcactatcaactctatctccagaattaatggctgcccagaacaaaggaattgctttctctggatccttatcaaccaactgaaataaaacaaatcaaagattggaccaaaacccaattgtcagaacactaatcaaagcatgaaaaatcagttgattttctcaaaaatattaaaaattaacaaaacacatcaaaaattggatcaaaacccaaatgtcagaacactaatcaaagtatgaaaaatcattcaatttcgatgtaaaataaaaccagtaagaagtgagaacctaaatatcagaacattattcaaaccatgaaaagacagattttctcaaataaaaaaaaatcaaaacccaaataatcaaagcatgaaaagacagtaaattttctcaaaaacaaaaatcttaaagcaacccataacaaaccattattcaaaacatgaaaaaatcagtaaaattttctcaaaaagattaaaaattcaaagcaacttacttgaacatttt

SEQ ID NO: 316625 - DNA, 748 bp, Cannabis indica
tacgtaaatatatcttataaaataataatgtttgttaattgatattctttttttttttttatggaaaatctacgtaaatatatcttataaaatctttgatattctctcctggtacaaatcgacactaataaaagtggattcgtaattcaaagattatatatgccatgttttcgtacgtgtcaatatgcatcgtaaacctcaattaattagaatttaagtgtccatgaattttctttttctttcctttattaagaattattattctggttttaggggacataacataaggttgtggcaataactgattggagtgtgttttgagaaatgtgtagattaggtacgaaatttgatcctaattacaaatgttattacctacttacccttgtcggcatagcccaaacatttgatcttcataggttgctgtcaaatttgagaccatacatatatatactataatactaggtatgtattttttttattattattaattttgactgatgttaggtgtgttacttgttagtcaattttaggccgaatcaaatgagaaaaggaaaacattttatataataaagtgatacaatgttgggaaataatattggtatggtatccaactaatataaataaaacatttggtcaaatattttgtgtttgtgctttcatgtataaaaatgtaaattaactataaaaaattaatgactactattaatattattaaaaaatattacaaaacaattaattttatttatat

SEQ ID NO: 316626 - DNA, 1247 bp, Cannabis indica
gttgtttggtttgtaaaggaagatcgaaaagttgttctagtgcatcaaataaggcttttccaatgtgtattggaattttatcaaactgtgcctcgaaacaaccaaattcttccagtgcttggcggacttgggcccttacagtgttccactcgggcgtacctggtttcagtacctgttctactgaaaaatcaataataggaagcctcccaacagcgctttcggtcgccattaattaattatgaataaatatatatatatatgatttagtatttcttaattattatatatataattgttttgttttaagatttttggtactttaatttcaacttcactagacccgtatttataaacttataatttgttaagctacaaaaataataataatagagaaatgcatacatgcctcgctcgcggtgattaatttaataatattattattattattattaattattggatgttatcatctgtccttaattttttccattttcttatcagagtgatggacactgaattatttatattatgtgtatataatattacattatttgtacgttcgaagaagatatatatatagatattaattttattttatatattatattgcctctcataggatatatatcgtaaattaatcatgctcatatataattatgtatgatatcatcttccgaaaaaataagaaaatattaatttatatataatatgagattttttgagtacgtctcaattttcaatcgacaagtttcgtcatcttttccattttttgggctatatcattacaaattaatgacgtttcttcccttcaagcattaattattatttgtattgttgaaaattcaaataaaagaatacataaattgcaaaactaaaaatataaaaatataaaaaattaaatgaaatccaaatcacaatataaaaatatgggctccgacttgttaaaattttctccacttcaccccataggatttttgaagggtcagattcgaccagatctaaataaaaccgaggacaaattatgtgtatatatatatttatattagtttttaaaatattttttcttctaatattttttttttttgaaaggaaacaagataaatattaaggctaattagtaattttgtcccctaaactttgacatgtaccaaatcatgctccttgaacttttgaggtcgttaaaaatgccccctaaactattgaaattgttagatttaaggacttttatccaattttagtaaaaaagt

SEQ ID NO: 316627 - DNA, 2128 bp, Cannabis indica
acctcaaacatgttagaaagtacgttgttcttcgttcttacatgtaaagtaccaaacaatagtaccagacttcttaatgaagtagtcgaaccctttcttcattacatacaagcaaaaaactatccttaaaatgctatttgtctctagaaaactttcctagatataactccccacctggtctaccacccatagatatataatgactattatcctttttgtcttctcttttaagccttttctccttgaatttatcgtaacttgtcgaagaagaaaatggatcgctaaatccaacatcattggtccctcttgcatcactaggacctctaccgtcaatggtccctctagcttccctagttcttctagcatcactaagacctctagcatcagtggttcctctagcattacgtgttctgtctggatgactactactagtaccaggtatttggtgattttctctgcaaggccttcttttctgtgccgatttcctgagtatttggtacgatagtggagtgaagttcaaagctatagtagcacgtacctctgtgtcttggttatctcttacgtcaccattgccttcaacaaaccatttagggtatagaccattaccaaaaccattatgaaagagcatttgtgatacaatgtcaactgtcgacatcatagtgtttaattcaggtaatacatcaactgccaacacctccgtatttgtttttataataaaactctcaacctcactacgagtattcttaacagagcttggtgtgggactaggatcgatacaagcattcttcttcaccaaagttacaaacaatggagtgagttcatctggcttctttccaagcatagacaaataaccttacatgcttataatttccaataacttcacagtgatacactaagtctttcatgtacttgtaattcacttctaatttcaagtcatactatactttatcaacattgagtttttcgtacaaaagatcaaccaaacgtgagtagcttacgtttgtatcaatctcaaatgtcaaacttttagctcggttataaacctaatctctatcctcaagcttccaaataccattatacataacgaatgaaaaaacacttgaacctgtcatccacagccatttaaacacaattaaaatttagaacaaaaatctaatagaaaagtgattaaaaaatcctcaaaaagccataaatctgtcaagtatctgacacaatcggacccatatcagaccaatatcgaaccccatatgataaattccaacaaaaaactatcgaacacaaccatcagacccatcgaacatgacatcggacagggcatataaaaaaaattcttgatggcatcagacacaatatcgaacagaccatagggacactaatagagcttcggacctatcggactaacccattgggtctatgtagacatcatccctaaccttaaaaactgatctaaccattgagccaccatcagacctctattggacaccatcggtccaaaacaaaaaaaaaaaaaaaagaaaccagaaaaatacagaaaacttgaagaacaatcatttccacacaaaaaatagcataaaaagcaacaactaatagatcgaccataaaaataatattataaactaaatataataaccaacaacaagattaaacaaagaaaaatcattacccattgaatttgtgtatgatgtcccgtccaaaaaaaaccaaccaccaaagcaccgagcttatagtgtagtttgtatcaaaaatttgtattatttggtaatgaaataagtgaagagaatgaggtttgtgagtgtgtaagattcagagaagagagaactgaaaacagagaaaagatgagtgaagagaaggaaagagagatgaaatgttgttttttgggttgtaagagtgtatggggattagttttaatattgtcctagtctcttaatattgcacaatataagtttagggacatgattttcccctaatgatgcataaaaagtcaaatttttcattgcaaaaggaaagtatatagtctagaaaaaatctaatttattattaaagggtaaataccattttggactctctgttttacaaaagttaccaattggaccctatgttttgttaaatgacaaaaatggaccctgta

SEQ ID NO: 316628 - DNA, 2038 bp, Cannabis indica
atcaaaccctagtaccatgtccaaaataattataacgatttctaagcatcaatacaaattcaaaagttattttctcaaatctcgttaatatgaacatttaaacttgaaatattttataaacaaatatgtgctaagaatcattttaccataaattctggcatgtgcatttataactctaaaaatattctaagtaagaaaaaaaaatagcaaaaattgacttaaaaataagattttacaagcataaatgagcaatttaaaaaaaaattgactataaaagtattaatatgacaaaatgcaaattttaatgcttgaatatgtttaccacccgcagctaaagttagacagtgtcctcaatttctaaaaatatagaaattcaaaaataattggaaaagagaacacctggagagcgagcaaccatggtggcatcgatattgatcctctaaacataaaatctaacaaaatgataacaaataacaaaataaaatgacaaaaataaaaagaaaaaagagaacaaacctatatacaaaattagaaaaacattactcagggttggtacacttgagtcacgatgatatactcaataggctggggcaacctctctatgtagtgtttcagtatttggccattcactttgaatttcttcttatcagttgggtcttgacctcaacaacaccgtggggaagacaattttcacaacatatggcccaatccactaggatctcagcttcccaaggtggagatgcaagtgagtgtgataaagatacactcactgatttggctcaaattccttccttagaatttgcttatcatgagccgctttcaatttagccttgtagaacctaaagttgtcataagcaccattccttaattccttaatttctgacaagtaaggcttacaattaaggcctgccgcattgagatcaaaatttaggttttttataacccagtatgctttatgatccaattcaacaaacagatggcaagccttgctatagactattctataagaagacatgcctagccgagttttgtaagcagtgcggtatgcccaaagaacatcaagaagtctcaaagaccaatctttgcagtcagggtttactgtcttttctaggacttgcttaatttcacgattagctaactcagtctggccatttgtttgtggatgataaggcaatgcaactttatgaagtacaccgtacttttgcatcaaatgctcaaaagagtagttgcaaaaatgtgatccttgatcactaataataacccgtgatgtgccaaaatgagacaacacattcttttaagaatttcacaacaattgtgttatctgcatgtcgacaacgaacgacctcaacccacttagagacatagtctatagcgaggagaatgtaaaggtagccagaaaaaggacaaaaatgatctcataaaatcattcccccacagtcgaatattattataagcattgggttcaatggcatcatgtgtcgtcaggacagtgcacctaatttttggcacctttcacaagatcgacagaaattgttagtctttgaataaagtgggccagtatagagcacaccgtaagattttttcagcagtctattcataaaaaaaaaaaaaaaaaaaaaaaaaaaattaaccaccacatgcttcgttatagaaaaagttcaagccactaaaaatttcatcatctggaatgcaacatctcatttggtcagggcaatacttgaaaagatatggatcatcctagtcaaagttacgaaccttgactaaaaatttacgtttattttgtgcattccaagaagcgggaagctcaccagtcactaagtaattaacaatatgagcaaaccatggtaacttagtaacgacatagaaatgttcattagggaagtcatctcgaatggcagggccaatcaacagaatcagaaaactcaagacgaaataagtggtccgctaccacgttttcaactcatttcttgtccttaatggtcaagtcaaattcttgtaacaaaaggatccacctaattaagtgtgccttaacatcctt

SEQ ID NO: 316629 - DNA, 917 bp, Cannabis indica
aatagaatatataaaaggaatgagctaatcctcctattgtcgattggttttgagatggaatcttaatcatcttatcttaaattctaacactatgttgaaatcgagagtgagagttggaaatctctttaatgggaagccagaagtgtagaaacagtagtcctggatgtcgtaagaaagcttcacagtactaacgggacaagccagggactcggaatacctatccaacctacagaaatcgatcttctatttatggttcggcaaattttggggcttgatcttgtagaagtacaagatctcttccggggttggaacgcctaccttttgtagtttgcacaagacataccatccgacaagcaaacgataaacttgtgggatgaattgaaatagtgccacttcagccacagcgcagaattttgcaaagtagcttcttagtaaaagatgcgctccccatctctacacgacctcaactccaaatgttaaagcctccttcgacgcacttactagacatctctccgcaaacagagagcctattctagaataattttggaacactttggaggccccttttggtctcgtatttttggaggttgtaataattatggaacttgttctggtaccgatccatcccacagagaagaattcaatacaagttttggtgcagcggcctccttcgcaacaatgtcttcctcatcaactgccacctcctcataattatcttcttaaggcatgacaagctttgaaaggaatcaaaaagaaaatactacgcagttaattacccatactaaagaaaatagcatggattaaaaagaatcctcccctataactgcttggagaggtaacctaagaatcttacatctagaataaaaatgaaattccgtattttaatattcccagtttgattatttaattaaatgatt

SEQ ID NO: 316630 - DNA, 2322 bp, Cannabis indica
ataattgaaatgtgagtgatgatgatattatctagaagaatgatccttttgttgcatctctctccttagcaaatcgaattccgatttactctcccatggttataaaaccaattaatcaaaaaattatatgcagagtcagtctgcacaaattctcccactactattttcagtaacatgtcatatgcctcctccgtgacacctgctctagccagtccattgatgaagatagcaaaggaacagcatcgggacgaatccctctgttttgcatctcataccacagattccaagccccgttcaggttccctgtccttaagtacccatctaaaagcactaggaaagcaagcttgttaataggaaaccccttttctgtcatgttacataaaagatctttcgcttcatttaagcaacccttcttgcacaaacccaatagcaaataaccacatgtggaagatgatggagttaaaccaaatctactcataatcaaataagcctcataggctttttcttccaaccctgccttactataagctgctataatagagttaaaagcaacaacactgagaggaaatcctttctcaagcatattttccacagatttcatggcttcatccgaccgtcctgcccaacataaacctgcaatcgaaacatcaaacaaagaactaaccggaaacacctctggtacagttaaatccctcaacaacatgtctccaatattctcccttccatacttgtagtgacctgcaatcaagatgttaaatgtcatgccatcgggattaatacctttgttcttcatctcctcataaagcttgtctgcctcaccggtatcccctgacttaacatacccatcgatcatgatattgtatgttaccgtatttggaaaaatacccacattaaggattccatcaaagaaacttctggctttcaccatgtctccctccttgcacatggcattgataactgtattaaaggtaacaacacttggctcgcatccatttgaaatcataaaatgcatccattcaagtgcatttgaaatctgccccatcatacaattcgcattgattacaatgttgtatccaaaaacatcaggctcacaaccaaatttcctcatcacatgtaacaagctctcaccagttgagagcaacccttttcgacagaacccgagaatcatcatattaaacgtatgagccgaaatgggaggccctttactaacaatatccctgaaaagcttccacacactaccataatcaccaactctaatcaataacttaaacagaattctagcagctgatgaacttggactcactcctacttccctcattttactcacaatctgcaaagcctcgtagcccatttcagcattcaagaagcctcgcataagggtattcaaaactgaaaaatgtgactcgtatctatagtgattttcccacatgaactcaaccaaatatctactcctaacagctccaattctctcaattacataagaaaccatgtcctgggccaaaaattggagatcctctgccgcgaaaaaaagtgcggcgaggccacaagacctcaagacactatcagaatggtctctaaaagaaaatttaaagaaagcaaaggccgtgtctcgagtttccaacattttcattatatttacaatagaacatgggcaaaactctctagagaagtcctcaagtatgtgaattttctgggttttgactattttcgacaacccaacagcgatttttcgccgttcgttcgggtttatgccattcaaagaatcctcggatatgggaaaatcaaaaggcaaaaactggttcagaaaatcaaaattcttcgaatgccttacaagtaaagttttaagggtttggggtcgtacctcgactgtgctgagaatacggcgcacgttagcgggcatcggccggtttgccggagattgtagccagtaccggtggagaagcgagttctttgtctggggttctagcggggtttagggagtgagaataataaacgttctgtgtgtgttgaaaaacctcgataatggaggcccaataattcagcatattgtggcccaatgtcatttaaacaattatattgtcgtttatttgtttttgactccttaaatttcgttgtcgtttataaaagccctgttgtttgaacctttcaggcctttttctttcaattaatatcgttttttttacccggtgatcaaaatcacacatgattaaacaaagcatcaatccacaatcggtggagacatctcctcaaaccaggatagctcatcgtctaaccgaaggacatgctttgccaaaccatttgctgcagaattcttatcccgag

SEQ ID NO: 316631 - DNA, 1175 bp, Cannabis indica
  modified_base (911)..(911): a, c, t, g, unknown or other
aataagatacccaatatataaggggatatagggtaaccggtacccagtataaggtaactaggtacccacataaaggtagcccaatgtgtagtgtaactaggtacccaaaatatagagtaactaggtaactatagaggtaaacatgtacccaatatataaaatacctaagtacttaatacataaggtaactatcaataaccatgtaacccatatgtagtgtaactaggtgcccaatatatagggtaactaggcatccaatatataactcactaggtaccaaatatttaaggtagctatataggacaagcatatacccaatgagtaactaggtactcaagataattataaggtacttactccctttgaacacatttttcttttaaaaaaatgcaaatgtatagggtaacgaggtactgtaatcaaagtaagcaatagttaaatccaagatttgagttagagctaactgaaatcaacaatacatccaacttttgaataaatcaattaactagttaattttattgcacactagtgactagttactactttaaaacttgaaccaaaaggcttattgttaagattttggtagactagtagtaccatgattatcattactaaaactagagaacatatgtttttagattttgttaaactagtaacaatgacagttttgaaaattgaaaaattagttctatttattgtactctgttctttcagtatcaagaaaatagattttgactgtgttctatttattattagcaactgtaataaatagcttatatatagatatgattattcattaaacttattttatatatatatatatatattttgttgtatacgtgtgaaatattattaatttaataaatttatttgtctgtataaaacaataaactttaaaagtatactatatncaaagaaaaaaaaaactaaatatataatgcaatgtaaatattgaagtaaaataagaaaaaattagatttttattgtatatattttgaataataaaaataaactaatgtgagtgtattacaattagagagaaaagaacaagaagaaggcaaataatgaactctgttttatgatttgcaagagttgattacagagtctatacaaaggaagaactatatatagctcgaatacacaatttctagttagttgcataggatataacagaa

SEQ ID NO: 316632 - DNA, 1201 bp, Cannabis indica
aaaaaaaatacacatgagttagaaaaaaaaaaattatgaaaataaaatcaaaataagtattaaaattaacataaaataatgtgaagaaaaatttttaaaaaaatattaagagtaatttttaaaaattatttaagtttatattttttttaataatagggtgtatttataagtttaaggggtgcaaatataactctcatttatctattgatgaaaattactaaactagactgaatttgttgtcaaataagaaaaagagactttttttttgagataaaaaaagaacatttataaattttgtttcaaaaaaaaatatatattcataaatgattaatttgcggtgtaattacataattttaattctcggttacagataaattcataacggtttaatcaaaataaccattcattttgaccaaatggcttaatttcctttatttgtagtatatgttttgtttgaagattctctatatccactaaaatctcatttccattctatttacttcattttatttatttattttacattggtaaaatcaaataaaaatattgaagttaaaaatgggaactagggacaaataagtaagggtgggtatcatctaatccaatccaattaaatcgaatcgatccaattcaattcaatccaattacaaaaagttaaaaattccaattataattttggattggatgttaaagttagattcttattggattgaattagttattagatgtcaatctcgaaatccaattaaaaatcgatccaattcaattaataaatgttaaaaaattatttatataataaaaatattgaaaaatataatatatattaattatattttattagatttttttgtgtattaaatttgtaatacttagttgttttgtgtatttattttcatgatgttttgttctattttattatttagaaacattgttattttaattatttaaaatttttggttgtattacatttgtagaataattctacgatggtgactattattttgtctctatgctatacatacacttttttaaccacttatctatatgacttttgagggtcaacattctttaacatataattgtatgtagcatattaaatttggggtaaatggcggcaaaattcccaaaactttcattttggtttcacttaacccccaaaacccaaatttgggcggtaaaacccccaatactcgtattctgt

SEQ ID NO: 316633 - DNA, 803 bp, Cannabis indica
attatatcatattcatatagaaccgaaattaatgaagccaaaaccaggaacatagtaatcatcaaattagagtaactttttgaaataaaagatgtgaaaattgaacaagcttcttcttgttgatatcattaagaacaacactattgggatcaagcatttggttatttgtgctaattgatgactattgtccatatcaagcatttggttatttgtatttcatgaaattaatggtgttacttttggtatcttatgagaaactctagacgtttacatgagttaaatcaatcaaattcttcagacatattgcttttctaaacttactggtgtcaaggtcaagcatttgtatgatcataaatgtgatattttactccaaccacaacacatggacattcccaaagaaagtacattggtttttatatttccttttcttttataaaatttaagaaagtattttgttttcttattaaaaatgtctttgcaaagaataacatgttctccaatgaaacaaatccaactcctctgctccaagtaaaggatgacactcaagcttaattttaatctgaaatcgatagatggatctttaccctgcccacccattgctttccattgatcaaatatcaagccatgaagctccagattagggtaagtagcagcccaaagagatctcaatgcttcttgttctcataaatttttcttactactgatcatattcataggtacgggtacagaagaatagttcacactaaatcatatacatgagaagaaaaacaaatcatcttctttctataaaacattttagaaca

SEQ ID NO: 316634 - DNA, 1031 bp, Cannabis indica
ttgatatatttatttttctttgttgatagacattttaatacaaattattttctagttattgttttgagacaattctgatagtttttaagtgttacaaactaaagctccatcttttttggtgtgttgtttgaggatgttatagctttattatctaaatttttggtgcagttttgccttatgtttgctcactttagcagtttatggtttggcgaagcatgcctttcggttagacaatgatctatcctagttcaagaagatattcgtacactgtttgtgaataagagggtgtacataaatcgatccaatccaatgataaccgaccgatccaattacaagcaaccgccaaacattagacatctaattgtgattagatcggattggatgttatttttgaatatccaattggatcagatcaaatgttggatggggtatccaaaaatctaatacattaacatccaatcgaactaattaatattttcatttagtttgaatgcataattagattttatgttgttatacgtaaaaaaatatatgtatatatgaaaattaacattaaattttactttttttgaattggataaatcttattcaatctaatagatactggatctaaaatattagatggatccgatccgatctaataaatgctaggtctaaaacattggatactaatagatatacatttgaaatacatccattaggaatcgatatccaatccaatattcattggatgttggatcgattagatgagtgaaattaattggatggatctggatatatagacctaaaaatatttgatatggtccaataaacattcttatgttataaaatatctacatggtgaatttatgagtgattctaattgctacttaaaaaaaacctatttttgataaaaacacaaagaatcaaacaattatatttcctttaacaattgaatatgatggctgataaaataaataatattatgtgaaaattacatgaaatatgggatttacataacaaagttagaaaaatatggcatttttaggttt

SEQ ID NO: 316635 - DNA, 1693 bp, Cannabis indica
taacaactaattaattttataaaaataacaactaactttaaatacattaaatttatacaataacaaaataaatatatataataaataaaaagtatattaattaaataaatgcatttataccgagctcggagagagagaaaaagagagagggagatggacgggaggtggtggtggtccgacgtttgagacagagatgagaggaacatcgacgggaggtggtggtggtccgacgtatgcgacggagatgagagggagaccgacggaggaggggtgggtggagatcgatggaccagggagacgagaagaaagggagatcgagagggggaggaatacggcgataaaggagggtgatggtgcggaggcatgtgtggactttttgagagttaagattttcgttttagggtgtgagagatggagaagaaataggtgggcatgtgggaaataaaaaaaaaaaagtaagagggcatgtggtaaatgtaggtaggtaaagattttttaatgggcccttatatccaacggtttaaaactgtcgcctatactataggcgacggttttaaaccgtcgggtcgggtataagactctcctaaaaaatcccaatttaacaaaaaaaaaaagcgtcgcctattttgtttactactattttaaaccgccaggaatactaaatttttcccgacggttttatatagttacttcattttttttagcgacggtcccaaaaaaattatttttaggaccgtcgcaaattttgatacttgtagtagtgaattaacatcgagtatatagggacaaatttaccattctatcaactaatgtattttatccttaaaacacttagtttcctttaaatgatatttcaataaattaatataattaccgaaataagaaatcctccatttatttctattaagccaaactcaaagaaaattatcatttctctatataataacagaagctgtagatttcatatttatgattagtgctccctctcaattgtgatacaatgagcagtgagccggcttacaattgctatccagatatatatttatgtatatctatatatataatatcatccttgactttgaaaaatagcacatacacatatacatgaaaaatatgttatcataatatgataatttttttatatatacgagatatcatcacatttgatgatgattttatttagagaagttaacgttacaatttcattttcatttaattataaaattaaaaataatgtaactttccctataatatgtgactcgagaaatattatgcatgtattcgttttttttttctttttttctttttttttggctaaaatactcggatgcataaacaatcactttggaggtttaatgaaaaggcaaatgtgtatataaagagcatatttacataaaataagtttttaagtactaaggatatatattagagacatattggcttgaataacaaaaaaattaccaccatcctccaataatcataacaggaaaaagagggaaacagatacttgtaaaaagtattcttcatacccaattttatagatacataaaaaattttgtggaaagttgtatacacgatttggagggagatatctttcaagatccattctataaatattggtcaaaaagtcaaaaaaattattttagctcttataaagatgaagttgattattgaactcctttcacacccaaaa

SEQ ID NO: 316636 - DNA, 1687 bp, Cannabis indica
ccgttctggacaatattgaagatatttacgaaaaataccactcccttacaaactaagcatcagcattccaccaacatgcacctcaacatgcaccaccactagaccaccacttggacaacttatgggcgtcacttagcttgtaacgtgccgtcttagcacgaacattacattctcccccacttcaacatgtcgatgccctcatcgacggaccgcgagcaaatcttcctgatctcgactcataagcttactccaagcttctcttgaatcctaagtctgtgcttgtccctctacctccgtagaaccaccctcttggttgcgatttccctcgcccactcttggacttgatcaaagaacctgtgccactgtcgctattcagaatctcccatggagtagtgcctccacactagaatacttccccaacatgaaatcccctgagtccatcacaacgtccctccagtcaaccaattagcccttgcaacactaaccctgaagctaacatatcctctgatagtagctcacccgccaatcgtccaatgcatactccttttgacaaggactaagtatggtgcacccctcggggtgaggttcgcaaactaaccgtacccaacggcacctacagaacacgcttctactgaagccaagtccctctagaaaagtccctttgaaaacttcacacgccaactccatggcgcaccatcctcttgatggcaatcgagcaagacactcctatcgcaggataaaatttagtgcgtcccacctggacgaggctcgcaagccagctgcacccaatgcagcaccaagtgcactcttgcacaaaatcttttcgcgaagttcacaacattggccctccggccctaccgcacacccacgaattcatgaaaaggcccctctgacccactgcattcgtgctcatcaaagcttctttcacgcggtcaatgatctaacaatcacccaaaaccacaagtttgccctctgactcctgcttgtgtccactctcaaaactatatcataagtctgtctcccaaaatcaaccatgaatcctctaatgactcgctaactttcaaaaaacttgataacacccaatcttactcttaagacttgaagtcatcccaatccgctatctcccatcggcatatgctctctgaaccattcggcttacagtgtcccatacaacaccagtgtccccataaacaaaaaacatgcccataacatgccgcaaactagctcagtcttgatccctgcctacgcccctacatattgtctatctgcagcttacagcaatcatgcaagtttttgtactaaacaacccatctgtggtagtatttccctctagattcacacatcaaaactaaacaagtaccctgattcttcaaacatatgaattagtgggctcccccacttcaacttgggaagaacttctctcttagaggaatacccctcaagatatagctcgcaagctaatcgcttactcgcatacggtccctccattctgaaatgtcattttgatgaagaagttaaactaatgcctcagtcattctgactcttcacccctcaacatttcaacgttgccatagtaccttagtcttgatgaatttcaccttaggccaacattgtcgtggtgttatcttagtacctgagtcctacagactttcaccctagataactggcactgcctgtgtcccgagtc

SEQ ID NO: 316637 - DNA, 1304 bp, Cannabis indica
gcccgattacccacatcaatcggtttcttttgcagatcatgcttatgtgggaccaaagctcaaagattcaatggctggaggtatttcgatccttattcatagtgtatatatgtttgatttaattccgcattttatacataaacatatatattgcagtttatacatataaatgtctaacataaatatcatatcaatacttatcaattctccattcttcttatcaatatttaaatcggtaagaaaataaccctccagagaaaaaaagagaacgtaagttaagatatatatagagtgttatactcaaaatttggtgagtacatcagaggaagaagcgtgtcgagctgggaagaacaaaagattcaaacactcaatcgtaagtacacttggcatggaacaactcatcagaaacataagttgcagagtatgtatataactcggctgactgaatggtcttttgcgaggcagaaatgtacgaactgctaacttatgtatcgacgagaaactctgtgagtaaaagtgtgcatgacgaggcttcaacctcgctgcgtgaaaagaaacaataacaataaaaatacttggcgtatattacatggtatacaaactaagtataaacaatatggggaatcaagataacaaatagcgaggttcctatctcgctgtaagatggcgtacatgcgaggaagattatctcgacactagaaaatatagttattagattaaaacaatattaatctcgggaagtctgatgacaagcaactgctcgccatcaaagttaacccggctcctagcgaggcatccccacgaagataagatttaccatatatccttaaatgtgcgtccatctcggccctataaaaacgggatacttacagctgtgtgaattataaataaaaacctcattaaaaaaaaagtgtggatgttaattatttttataaaaataataaatttagtattagatttgtgatattttaaagtatattttttttatttgttttatcattttgaaaaataatttgttaagttagttatgattaaaaaattaaataaatgagaaaattaaggaaagaatagaaaaatacatttagaataattttagggtaacatgtcactgcctcatatctctcatttatataaatagatagatagatagatagataaattacttgcagaatttattattatgtgttgtttttttaaaaaaaatattagaaatataaaatattataattctcctcaaatatttaaaatgttgagtttgttgctaacaaacacttgaatttgaaaaatagtagcataaattctta

SEQ ID NO: 316638 - DNA, 1060 bp, Cannabis indica
acatcccccttcgtgttcttgttaatgttgaatgtcaagtcagacaattaagagcgaaacatggctaagaatatcatcgcttttagcaaagacaaaaaagagaatgtatggaactatttgaaagtgaaagggtggcgaacgagaggaggttcgaacgcattcaaatacatggtgatctcttttatccactaccagggttccccgaatggtgtcgtcgttgcaaaataaatttagttaaaggcaaaccggtcatggctgggtggttatgcatatattgcatgaatcgcctaaactattgagacttttaaatttaacgtttaggggttacttttaaagttcatgattgttatcctgattgttgcatttttatttatgtttaaaagttttcacttgtttcagccactttcttataatattgtcgacatactatcgacatcctatcaataatatgtcgacaaacaacaattacgatgagaaatggaaaattttattaatcatcaacaacatatcgacaaatcatctataatatttacgtaatatatattttcaaatattattgacataatatcgatatactgtcgagaaatgatgcttaaatttaatttaagctatattgtcgataatatgtcaacaattaatcgacaccttgtcgataatgtgttagtttttataatccatatcaaagttataaaagcagaagtagaatttgataaaaaataatttttattcaatatgaactataagcctctcaacataatatataatgattaaatctgaactattgaaagaattaagaaaggttatacctcttgaagcctatcagaatatccttatttctttttgtatatttatcaaatatccaatccaagaactttgtttcgaaaaattcacactttgatcttttaagtcagcctcaactctcaagaatagagtggactattagatcttatttagatgaacaaatttaggtattacattgtgtgcttaactcatgagacactataattgagttaggattttgatctcacacacacctgaataggtgtgtgtgtgtgtgtgt

SEQ ID NO: 316639 - DNA, 1037 bp, Cannabis indica
cgagcaatgcagtcattgaagtcactaccgttcactttgtacacgtcatgaactagactgttgtaattgaaaactgtacgtagtacaatatatatacatacattattatataattcttttagctagggtaaaacacttcctcaaaagagatatattgtttgggcatttaagagaaatttttaatctattttttcctagtgtacattatagtattatttaaaacatcttataaaattttgagaaatttaaaataatttataatataaataagaaataatattcaatcagtttattttacacgtacaaaataaagagtttcctatacaatatatagactgtttgaactctattttaaattttaaataattgttataacatacacgaccatgaaaaaaattagataaaataaattattctgaataccaaaacaagcaggagtgcattggtgggtgtgccttttttagaaaataatttaaaatattttattttatataaaattatttaaaatagttagagaagaaacgaccatgaaaaaaattaaataaaataaattattctgaataccaaaacaagcaggagtgcattggtgggtgtgccctttttagaaaataatttaaaatattttattttgaataaaattatttaaaatagttaggcaagaaattacatacaagtgcttaatgtattttttcaattttgaaatgaggtttaatttttgatgtttgaggattttaaatttaaattaatttttttatatataaaattaataaatattaatatattttattaaagttaacataataaattcaaaaacaccattaaatcaaaaactctattacataatttatatttcatgtaaaatatatatagcagcttgtcatattattatattatgtcaaaaataaaattagaataattatcttttttatcccctgtacttatgacactatactattatgccccttaatttattcagcttgttataaatagtccttgtataattttatatgcatacatttagtccttctgtttatttt

SEQ ID NO: 316640 - DNA, 574 bp, Cannabis indica
cgtattttatgtaaataaattaagaaaaaaccataaaatattgaaaactttgtataggtagttttttttttttttgttaatttttttgttgtttgtgtgtggtttttttttcgaaattatctctaaataatactagtataatataatccaatacaatataatataacacggtgtaccaaactagccctaaaagtatttcttgttctattttggtgtcaatataacactctaatactctagttgtttccactttaagttgaaatttaatactctttcttgaatcctcatttatggtttgatatgaccacattagcacaagaatttgaaaaatgacaataatttgttacttggtaccaaaattgtctttcttttttccttttaattataattattggtaaacatgaagacggagtattcatatgatatttttcaataagattaaattatttcgtattggatgaattaattagagctattggattaaatttttaatatcctccttgtttataatattgattattcagcttgtactgacgaaattaaaaaaaaattacagttttacaaatattaagta

SEQ ID NO: 316641 - DNA, 3288 bp, Cannabis indica
ctccatggatttcctctgttatggggacaaaagaaagcaagacaaaggcaaggccaaggccaatgttgctactgcaaacacccagaaaaatgacattgacagcagctcgggtcacattgatctctcctctcaatgccaacaattaatctctctgttaagccagcaactcagcagcacaacaaatgcagaaccagctgcaatagcccctgctgcatcaaatctggcaggtacaacattaaactcaacttcttggattgtggatagtggtgccactcaccacatgtgttgcaatttcagttgtttttcatccttttctaacacaccatttcctaaatatgtgtctttaccaaatggacacaatcttcttgtccacaacattggcattgtcaagataaactcaaaaattacattgcagaatgtactttatgttccacaatttcagctcaatcttttttctataacagattacatgctcaatactcttaactcagtgttgtttcatcaaaattgttgtgttattcacgatcctactctgaatgtggtgattgggacagctaaaaagtgtggcaaattgttcttgcttcaccaagaaaatccaactatagcagctactgctactactgtttctgttcctttcaataaaatcaatgtaaatcaatggcataatcgccttggacatccttcgatgtgtatttcaagttttttcaataaagaacataacatttcacatcctaattccactttacattgtcacatttgtcatttagcaaagcaaaaacgattgccatttatttctaatcaccatttttccaaaaacctattcgatttggttcatatggacatttggggcccctttcatataactactatagaaggttataaatatttccttaccatagtagatggcaagtcagggttcacttggatctatatgcttaagaacaaatcagatgttcaaactataattcccaatttcttcaacatgatctgtactcaattctcattgtctattaaagaaatccgctcagacaacgcaaaagaattgaacttacaatctttctttgccttaaagggcattattaattaccactcttgtgtggaaagaccacaacaaaattcagttgtggaacgaaaacatcaacatatactcaacatagcccgagcactaagtttccaatccaacttacccttggtttattggtcttacctagtccaaatggctacatacctaatgaatagaacaccctccaaattgttcaaaggtttaacatcataccaaattcttcatggtacagctcctaaatatgatcacctacgaagttttgggtgcctagcctatggctccacccttccttccaaaagacacaaattcacacctaggagtagggcctctattttcattggttaccctcatggcatgaaagcctatactctcctggatattgaaaccaaacaagtttatatttcatgagatgttgtcttccatgaaaccatttttcccttggtttcaccgacatctacatctaaaataaaccaattgtttgctgacattgtgcttattgcatttaaatctatacaacaacagccccctacaacaaaacctacacaagagtcatcttacccatctggtttcacaccagtaaccgagtgcttcaactcatatggttccacaccaaatcgtactaatcacaaaataccatctcaaccactccaatgtagctctgacaatctggttttcacaccagaaactcaccaagggaacatttcaactactggtagcatcgaagcaccagtacctaccatcaattccccaactaaacacacagctcctactgaagcaattcccaaaaatcccttgcaaactgacagaacaccagcatccataactccagcttccacatctgaagccaccactactggttctcacaaacaaactatcatcacaacagctccaacacctccaaaaaccaccaaaactggcagaattttgcacaaacctaagcatctcaatgactacgtttgtcatgcttcatctacatcacatccaattgagcctttcctatcatatatcaagttacatcctcaatttcgagcagctgtacttgcagcctattctgaaattgaacctaaaagctatgctgaagcagctcaatttcgacattggcttcttgccatggataaagaaacaaccgcccttgaaaaaaacaatacttgggtcattaccaagctaccacccggacataaagccgttggttgcaaatgggtatataaagttaaatataacgaaagtggggctgttgaaaggtttaaagctcgtctagtggccaaaggctacactcaaagacatggaattgactattcccaaacctatgctcccgtagctaaattcaacaccctcaaaatcttttagcactagcagccatgaacaattggaatgtccatcaattagacatcaataatgcttttcttcatggagatctccatgaagaagtatacatgaaaatccctccgggttataaagcacctccaaactcggtgtgcaaacttaacaaaagcatttatggcctcaagcaagcctcaagacaatggtttagcaaacttagtcaaactcttatttcggatggtttcattcaatctctctcggacaattctttgttcataaagaagacaaacaatatcttcttggccattctcatctatgtggatgacatagttgttgcaagcaacaatgacaatgccatatcacacttcaaaacatatctccatgacaaattcaaacttaaagaccttggcactattcgttttttccttggtcttgaagttggtcgcacaaagaaaggcatttcagtctctcaacggccttttacacttcaattactacaagatacaggctacattggtgccaaaccagtgtctacccccatggaaacaaacctcaagttaagtaaagataaagggaatcttctcccagatcctacagcctatagaagtctcataggcaaactcatatacttgaccattacgaggcctgatatttcctatgttgtgaaccatctaagtcaatttctaacttgtccacgggttccacatctccatgctgcacatcgtatcttgcagtacctaaaatcaaccccgggccaaggactgtttttcccttccaacacaacagctactatttcagcatatgctgaaacaagcctttccccgtccaatgttcaagtatccttcttctcggatgccgattggggggcttgtcaagcacaaggcgatcaatttctggtattgtct

SEQ ID NO: 316642 - DNA, 557 bp, Cannabis indica
tgatcagtgtaaaatctcacacctctctccaaacaaataatatcgccaaatcattaaggcaaagacaaccgttgcaagctccaagtcgtgggtcaaatactgttgttcgtagtctttttattgtcgtgaagtacaagctataaccttgtctgcttgcattaatacacaccctaaacactgtctagatgcatcacaatacaccacaattttttctttgatcagttggtaggtctaataccggggctgtaattaatcgttgtttcaattcttggaagttttcttcacatttatctgaccacacaaattgctaattctttttagtcaactcggtcaatggcacagtaatcttagagaatccttccacaaaacgtcgataatatcccgctaatttgagaaaacttcgtactttagtaactattttttgccttggccaatttttaatcgattcaaccttccctggatccaccacaatcctgtcttttctgacaatgtgttcaagaaaagacacatgtgatagccaaaattcacactttttgaattttgcataaagtttatga

SEQ ID NO: 316643 - DNA, 799 bp, Cannabis indica
actttttaagggccaattgttatacccaaaatttggctaccatctcaatggaggacacgtgtccagataaaaggaatgtgaatcgatgcaatcgctttttatggtataacttattaattacataagtgtcagagtatatttgtaacttgctgactgtaaggtcttaggcgaggaatcaatatacaaactagcacttagtatattagcgagaaaatatatgtcgctgaatgcgaatagtgaggtatcaaggatagtacatataggaagacgaaagcgacacatatcaatttcaaaagcccttagtgtacaaactaagtgtaacagtcatttcagctcgagaccaaataagtgaggtaaccgtctcgctatggaaagactttctataacttcatcctgttacgacagtgaggcttgtaaccctgataagttagaatctaacattcaaacgagcttcgaaagaactctttgtgaataaaaactgcgaagacatgcatcgaacaccttggaaggaaaagtgatctcagctcgctattgagatcactggaaccaagcttctgtcgagacatctccagatgcaataattaaagacgtgtttaatgcacgatcattttaacccagtaaaggcgttaaaatcacagctacatgattttctaaatcatgaccgcatttacactatgtgatatgtaatcaaaccccgtaattttaggggatgatcattgtaaacaaattacggtcaattttgtaatgaactgccctactatggaattataaatagtaggcaaacaagatcaaaaaaagg

SEQ ID NO: 316644 - DNA, 852 bp, Cannabis indica
ctcacctgtgtgagtttactacttgattgtctatacttgcatagtgatcataatttttgtaacaaagttgcacatctaattttgctcaaattattgtactatcaatgactggtcgactaggtatggagctttgcaaagttggatgaccaatgttgtagtgttgcaaaactggtcggtcaggggagcacctcaaaggggccggccgtccaggtcctctttttggcactaaataagttttgttttggttttaagccctatggaagttcagcctctctcatggcaagaccaaggggttgccaggtgctctctaggagaagcttaaggcccaagagatcgagcttttggtgaagagggatgccctcaccaaggaagaagctcttaccgaatagaggcaaggcttaattactagtttggagcgcatgcttggcatcagaaacaaagaaaacaacacacttattgttgaggcctctagattagaggtggaactcaagaagaaggacaaagcactgaatttttcccttgatggccagcaatccattagggaccagtatgttggcttgtcttcagaggtcttatatgaggttaagctacgtaaccccaatgttgacctctcctacatgggagcttctttccttgaaaatcactagactaggagagagaattgtatgagattaggattcaaacagaagaccatcatccagcctgatgagtcatcatcgggccactttgatgaggctatggcctgcacacctactggggaggtggccaactagcctgtaaaggccatggctaacccactttttgttgggttttatgccctaaataaaactctttacaatctgattagttatc

SEQ ID NO: 316645 - DNA, 1029 bp, Cannabis indica
aagtgtaaagttgacttggggggcaaaaaagttaacccgaaaactttccttggtgacatggatatcattgtttgatacgtgataagaatgatggcatcacagagttgagtagactcgactcatagcagccgacctgggagggaaccctagctttgcacccaggtcgacttcgggagcttcgagatggaagtttagacttcaataactttaatctaactcactatttttcagtattctataccatgaagacatcgagtaatctaatcaaatgaacttgtaacccggaagcaaacttgagcacctatcgtttcaccttgcgcttaagttgacattcctaactagggttttagtttctgggattgtcatagtgaaaatggatcaaaacttgcattgagtcatcaactaagacataccacaaatatatttggaccatcagagtcagaaatagaacaacattgtttttgagcagccagggccccgacgaagtgagcaacccagcgcccaggttgacgatttttcaatctgggtgccttccaggtatcagatcgacgatatccaactttttcatcttcttcatcttcatcaaaaaaaggggaaatatgtctttttggggaagaaacaacacttcttgggtgctagaagcaaggcctagcgcctaggttgaaatgtcaacctggggcaattttgatgatgtttttcgagaactctttcgagcatcttctttattctcaaaaaatattgagattcaactatttttgggaaccaaacggaacttccaaaggccataactaggaccagcacccaagttgacatattgtcaaactaggctatttccaatcaagttcaccaaagagtgctctaggcattttttttctatcatcagatataatgaatattcaagaatactctgggagaaaaccataaatccaagcccctgaaaatatggcccagtgcccagtttgagggcgctgccttcgattgctcaaatgtcaaatctaatttgactaatgaatttggaatggtcaaaaa

SEQ ID NO: 316646 - DNA, 1036 bp, Cannabis indica
gaatttatacattaaacataatcataaaataaatcatgtgaaccatgcaatataaaagtgatttctgatcttatattaatgagtaaatctgattatattgaaatgtgctttatttagggcacaaaactcaaagtggtcaaattactgaggatagacttcgatcatcgaacgagatgcttatttatgattgcatgaaacaataagattgtttcttcaacctcaaaaatgttccagaatgatgtccgacatctttcaaacctagacgtaatgctagcggcgtagtacgcactaggagtgctagtggtcaaatcactgaggatagacttcgatcatcgaacgagatacttatttttatgaaccattattaagtattgtgaaacttctttctaagttattttatttttctttcttaactttctagatttactttatatgctcatcactttttttgtagtaaaattaaaatagatgtaaactttggaaagtttaacccccaacaatttagtaactgggtataacgtaccaaatcttaaagtttaaatagttatactgtcaattactttttaaatatataatattaattaaatataattattttaatcatttaaattatttataataataaataaaatattataagtaagtagttttataataatcaaaatgttataactaagtgcaattcaaagtatatataatattaattaaatatataaattatttataataatattaaaaataaaaaatactatattgtgcaattttttaattactaaaaaaattttaaatttttttgagtgtaatctctcctataaggttgcagatcaggtgcaaaagtggttgggagttgggggctggccgaaggagtttcaggcttggaaaatctggttggtaatcagcagcaaaaacaagaatagcagaatttgtactgctgtcatggcagccacgatttacaggttgtggttgaacagaaataattgtgtttttaatggttactcgagcacaatcacatgcattgtacaggatattaaaaaaa

SEQ ID NO: 316647 - DNA, 583 bp, Cannabis indica
aaaaaaaaaaaagcaatatgtgtatgctcatatataatattattcttttttggcaaggtcatatatattgttttgaaccttgtttttagcatcataattaattagttcaatttttttgaaaactagtaaaaatgtagctaataatataattaaaatatacattatcttataaacaaaataaattataatttctctaaatatcaattaacataaaaaatttctcgcaaaaatattttcctagctatatataacactattattaaaatctaactagaacaaaaactataagtggcatttagttagagataataaaatgaaatggaataaaaaagtcaatttcatttcattcttttgttttattaaagtctaaagtattataatattattttaatataatgtcattttcaatattttagtggaataattattttattttaaaataaaaaaaagcgttctaatattaaataaagaatttaataattttttatcaactatttttattaattttaaattttattctattctatctttatttatatttatattcctattaatatttttatttttatattttcattttttt

SEQ ID NO: 316648 - DNA, 1644 bp, Cannabis indica
agtcctccaacaaagattgcattgagcagtcactacaattatgtaaacttttcccttttatccaacacccctttatctatacaatctttgtagctactaactactactagttctagtggttatgtttatatatacatatatttatgcatatattttccctatacaaactaaaaagatcactttaaaatatctacattatgtataagatcactcttctgattactatcttcaacttctatacatttctcatgtgaagatcccaacatctgaacaattaagcttccacctataataccaccataaaattcttgcttttaagcttggtcttaagctgtgagttagattgacttttgttgtgtcatatgttagtgactaataagaaatttttagttactaagtaaagtgatgattgaacatgtataagaaatgtttaccaagaacaagagtagctccaagccaaccaagagtaccccatctttcacctaatagaaaccaagcaaagccagcaccccaaactggctcaagaccatatattatggctgtttctgttgctgaaacatcacgcatggccgaaaactgagcacacaacacgatgaaacttcgtcaaaaactatatttcgtgttaagaattacgagattctatctcaaaattaaattgataataagtagagtatctcgtattcttataaataatttaatgttttcttgcaatgtttatgctaggacactatactctaatattgactctccttatcttaagtttttggctaattaagacttttattcttcgaattcttacatggattaaatcatcttccttaagctttttaagcggttaaaagttttcacaaattattaagattgttggatttaagaatttttgtccaattttactaatagaagtttgacgtagataaaagttcaaaaaactcaatttggtacatatcaaaattcgggagcacaatttactagatatcaaagttcagaagcacaactttacatagagacaatcaccacattagtaaaaataaataaaatcggaaaaatatttttaaatacaacaatcgcaatagttaaaggagaatttttaacggtctgaaaattccttaaatttaataataacaactaataagtagagtaacttttgtaaatgatcaatgttttcatacatttttttatcaataactatattctaatgtagaatatgactggtatctaaaaaatgtagtacaagatgcagaacaatctccactactatatatgcatgtaagtataatttttcatgtatatgtgtaaggatataaatatctatttagttgaagaagggtgctaataaaagagtgtggaaaggagtaaaatacctcaataatagagcaaattccagtagaaaatagaccagtataaattgcaggtatccatgggaatgtaacaatccattcccataactctttccatgtccatattgtatcattaacactttgatcaccatcaaaccaccctccaaggagtacccacatggtggataacagagcaagaaccgaagcctatacgaaaagcaaaatactatgagctactactctagtcgtcaattagttttgagattgaacctcatacttcttactaattcgatcttattttataata

SEQ ID NO: 316649 - DNA, 1278 bp, Cannabis indica
ttcaatttttttttttataatatctttaataacttacttcatatactatcatataagaaactaaaattaaaattatctaaatgttaaaaatataaaataagtgcattcgttcacccatatagaacttttctgtgaatgtattattatgactcgaaggtgggaaacatctcaaagttacatattcagtctgactcgaagatggcaatgtttgctcttagaagcagctctctgccttttgcttggggaacttacccaatttttgactcccgtgttaaactttgcaagtggtttaatgttgttaccttttctcatattcctcgatcattgaatcgtgttgcggatgctttagcgggttgggctagatgtgcaaaggtgcaatcaatgggttgtttaagggatgtggccctctttgtgactactactttgatgtagttggtttgtttgttttcaataaaagttgcttaattaccaaaaaaaaatgtattattatgatacacaacatgacaacacacatttagaagttggtaaagaaaggttttaaaaattaagtgtgtgatgattaagtagtgataataatgtgccgtaactaacccgcaatcataaacataggtgatggtaaatagtaaaattaaaataacacaaatagttgaattgatgatttccacattataaacaataataattaaagccaaacactcactcttttctgcatttacttttacaaaatatgtggtcctctcctgtcctctcgaccccattgctcacacgtgtaactaaactagatgtaactatgcataattagtatactaatacatattatattatgatttattactataatttcattttttggtcaaacttggcaaacttcaatgagcaaagttagttgtctcgaaggtcgaatttgagatcttagggttcgcttcaactccactattataaaaaaaaaaaaatacataagggaaaagtgtattagctataatgattgtgaggctacatttaaattttagatttgagttagtgttagagaaccttatatctaatatgtgaaaaagataataatatacatatataaataagatgcatgatacatcttaccataacttttatataaaaaatttgagttatattttttttttggttaaaaacagtataaatatgtattttgttattaaattataccaatacaaaataataataataataataatgatataataaaatataaaataataagggaaatttgcggcaaaagtccccaaaaaggtcactttgatg

SEQ ID NO: 316650 - DNA, 1413 bp, Cannabis indica
aattaaaggttgacaaccttctctaaactctcattttccattatacataatataaaacttcgctttaataagatttaacatttacatgtttgttaacattcatgctcatcacatgcagataatggatcaacatattataatctcttacaatgctacaaaaggtcaatttgaaaaaagttcgtattgtaggacaaaattgcgttcatattcatcaatcaatctagattgtacttacctgaacttttaagaatttctggagttaattcatgacctgcttgtgctaatgaaacaagctgaaaagaagaaaattattcacaaagtaagatgagaaaatgtgcacaaaaataaacgaaaatacaaataaaagtgaatgcacatacctgcattgcagtaatgaactcagtaagacctagaaacccttgccgcttagtgtccgcaagggcccacaccttcaacatcaaatggacaaaagcaatgagattcacaaactcaaagtatcataatcccaaacaccacgagaacttgagcaagaaatcaaaaacataaacatgaaaccacagaagtccctagaaaaagcagtaggaaaaaaggaacgataatgaaaataataataacaataaaaatgatcgggcaatgttttataccaaaatcattaataggttcttctaactctagttaacaattagcatatcttattatgtccaaacattatctatgagatgttttccgaaaaaaaaaacttaaatccacctaaacgatttttcaataaaaaaaaatccacctaagtgatcagttcagacacaatcaatgcaatcatcactctagaaaactatatttactgatattaattcacatagcatcactaatcaagtaatcatcaatatccaactaaagtaatttcatgtgtcaaatcacgttggatctaagttctaaatcaatcatacctattaaggaaatgaaatcctattaacgaaaaaattaatatcaagataaccaaactgttaaaaaaaaaaaaactggtaacctgcttcagttccgtacgagaaagtgtagacatggagaaaaacttcgtggcgtcgttgccagtaatacggccatcaccgtctattatcaacgcacaaatgtattcgatttaataaacttcaaacgagttgcgagtttgatttgaacgacaaaaatgaagagaagaagaagaagtttgaatacctgaatctgctacgttgaaccactcctgatagaccttctgatgctctttagagcagggaactactgaattcgacccaatctccatgtgaaagtttcaccagaatccaagagttcctggattgatgatttcagtttttttttttttatttcttttttgattttcttcttttccatcattccttaagtgccataggtttgatcctgtag

SEQ ID NO: 316651 - DNA, 801 bp, Cannabis indica
tataacaatttccccttaaaaagttcttttttaataaaaagagctttttaatgattacggagggtatttttgtcatgatcctctttttgaaaagacgcatgtcctctgattttggcagttgtgcggtttcaaggtacatcagtattaaatgaccatcttttccactttcgctttgaattatgtctataggatgaaacctttctctgatctgatgaagccaatatcgtgagtataaagtaaggaaaaaggaaccacctttacattatttcctccattgtagaaagcctgaaaaatcctgaagctttttcactaagaatcaccatcaaatttgcctgaggacttgcatgccatcccggttcttgacattttttctattagtttcctctgacttcatcttctcaaagcgatccttactacatttgaagatttgtagacgaagcaacaagtcattgcccaaagccctaacttcaaacagtaagttgctttcttcctttacatgcttgttacattgtgtttatttgctgcttaaatttgtttgtatcgtagtcatcttatctagttttggtagtttttagggtaaaactgtatttcggtccatactagggttcaggcaatacataggttatttcataatctctaactcaccatcttcgggtctgataaaattcttcgagggattgggaatgctttctgcttacagaaatgtcccactatggttcaggagtttatcgtccagaagatttaaaatttgagttccctacagaattagccatcccttatagacccaacccttcaaaaccc

SEQ ID NO: 316652 - DNA, 3048 bp, Cannabis indica
aaatctcactataacacatgcccctagtttcgcgactaactaatgcggtcatgagggaaactatagtcgagagacgggcgaagagatgtcacgaggtggtgacctttggctgtcccatcgagggttttagaaaatgacggctgtaattattacatttgatcctatctagggttccatgtcacgaaactcttcggatttcgtgtaggcgtgcccatggataaccgttagatgggatgacctatggcattccttttgccacgtgtcataatctcaattaatgagggataatggtacttaaacctcataatacgaacccattccatactttccctctcattttcattctcctcttcccctctttctttgaagtttcaaagattcaaaatccatttctaaattcctatcctcctttctccagaaatttgaactttctaagtttcagaggcaattggaactgatcaaagaaggaatcgataaatctcaaggtgtgttttcgaaacttttgcgaatttttcttctattttacgagaaataatctgcattttgtgttttagggaatggaaaatgtaagtcatttgtagggaatgcatatagaactttatttctctactgaaaactgggtaattctcaggagagaataggcctgaaatttgcataatcgtgaaccttaggaggaacactttgagtatttgcatcttttttgtttgctgtcttgaatactcgcgagtattgagatgaacatcttgaatactcacatatgtatatctttaggaaatctggggatttggttatcccaacccgttgtttagatcttagggttttccttatgttttctgtatgcttttgttgggaatactggttaggtccttcaaatggtgggtgtgtcgccgtaacttaatgttcatgcgtgcgatcgcatgctccttgagttactgcgatacacccagccatttgtgacatatggccagttttctcttttcctgcttactcgcatgttgtgattagtcagggtttttgaaatggtgggtgtttcccagtaactccatggtcatgctcaagaacgcatgcccattaggtcactggaaacccccatccattttttgagacactctactagtcgtacatatacgacttacactctgagaagattgtctgagttctcgaaatggtgggcgtgccccagtaccttaatttttatgtaatgacatgatcattaggctactgggatacacccagccattttttgaggtattaggccatcctttacgcttttagtagtgttttttacgcaggtgaggtcacttgcactattctcgcactttcaccacactgaaaagatcttctatctttcagatgagcgacctgtcgaatagccaaatgctcgactctggaggtggtgcttttgctgacgagcaggataaagaagatagctttgtaccgacttcactttctgaagaagaaaccctatcgccaaaaccgcaacattaggcccattgtcttctgaagacatagaaagaatggtttaggaactcgttgaaccagggacgatcgagattcgcaatagcgaatccacggtgtccgctcgtgaacaccttgttcactctacgcatgctcctgacatcgaagtagaggagatgggagaggattgggagattcctgatcgcgagtcaggagaaaaggaagatgctgagggaagcgggacagattcaatggacaatacacaactgaacaaacccttctcatgcgagggcctggtctcgcgagttaccaaatccgacctcagcacgtttatgaggttgaatttgctgcgaatcggcactatgtgtcctcgctctactcaaagaccgcatcttccctttaccaatcttgcgataatccccacagaggatgtggctgtctctatacccattcttcgatgtggggtatcaatacctttccatccatttatttttgctatcctcaagcggtatgatgtatctccttttcagctaaccccaaaagttatcgcatagctcttgggttttatgcgatgtacatggagtacgcgcgaagggagccttcgatggaggattttagctgctctatgacataaagaatgtgggccacgacaattgttctactgtttcagcaagtgggccacttctagaatcaatcgggtagaaggcatggttttaaatatgggggattggaaatctaagtggttttacgtgttcaaagtaccaggaattaggactaatttcaatcgtcgacctagtacgtcgcacttttcaacacttagttaatatttatgttaccttatgaggtcgttaaacatttatttttttcattgatcgcagatagaccggctcgacctgttctggattcagcccgcaaagaagttcttgaagtcctcggtagccttcatgttcaagatcgcgactggcgattattgtgcacaactttgaagttgcgagaacataagctaatctctgagaatgccagtcttcatcgggaactagtgtacaaggagccatctaaaaaacaaagggagagaatagacaaacgtctttccaaacaaacctctcgactggcgattattatacttatctttaacgtttttgtcttcgcataattgactttcctgaagcaagctccggttctcaaccgtaaacccaagactagaactgcgacaacatctcccatcatcccgcagaagaggaagagtgaagtcgtggcgactcctgcagctgattcctctaagaagtaggtcaggcctgcccaagataaggggaaaaatgtcatgattgaccccgccgtcagagcccgcgatgtcctagctcttcaagagaagtttgtgggtgaggaatttatgtcaaaggttgaaggaactccctctgaggaattaatgccacgttctacggaattggctttgcagttcatcaccatgttctcgaaggcatttgtcgctagctctaaggaaattgatcttttgaaaaagcagatcacccagcttcaagagagcaacaagaagctgaagcaggatgcaaattctaaggacaaagatctcga

SEQ ID NO: 316653 - DNA, 1465 bp, Cannabis indica
gctcaatagactcataagtagatatataatatatatataaaaaaaaaaacttacaagtacaatttaatgtgataataattatatcatagataagatatcctcttaatttgaagtttgcacacgaacgttttttaacaatacaattaccttaagccagctgttcaaatttcttaaatatttacttcaaagttaaaaaggtcgtaataaagggggtactatatggcaagaatatatatatattggagttactgaataatctttttggcattttaaagaatattaatttaaatttatgctgtttggtagtaatattatagagtatagctagggacttgttttttggttggctgctttacagctttgttgttctactgtgtgtctgctctactttgttggattgaattttcaaaagtagccttcttacgagataataatagcatgaaaggtagagaagaagagtagtatataatgtatagtcacgttgtattgccttttgctttttccaacatcacttcatatcattatcatatgtctccctttgtctctccattattatatataatgaacatatattatatacacattcattatatatataaacatgagccaatggtctttcagtagagaagtggggtttggtaatattgattaacttagctaatttgatatatatcaataatatcattacctctttcccttgatcatcataagatattattccatcccataaattaattgcttttctttgaattcaatgaaaaattaagaagcacgagtgaacgtgttatagtcatgtagtttaatatttaattttaagaaatttaaattttaataagaaatattaaaaatcatttactcttttaaaaaggtaatttgcagctaaactatttatacttttatatttagtacgattaaccttttgactaaaattttaagagtaaaatcctttcaaactataggtcccttttggtttttggtgttatgttggtttagctctattaattgctattagttgggtgtttattcgattcaaaccaactattttgctcatagtgcattcggtccatactaagtgcaggttttatattttggatctaatacaatcagcagagtaacataattccaatttaatccaatctgcaaaagtgtagattggatcgattattttgaattgattactttttaataattatttaatatttattaaaaaatatttttttcacataaataacaataaaataaagaaaattattattgttttatgtattatgtataaaaaaatatttcattttgttttagattatgttttttttataaataagaatggaatatatatatttaacttactatgttcttaaatatatttgtactagatttttaaattactattttttacattaaaatattaattgtatatataatttttttaaaaaaatatgtacatatatgtgtggattggattgga

SEQ ID NO: 316654 - DNA, 607 bp, Cannabis indica
tgaacctgcattgtgagttgcagatgttctttgaagctggtaatagtttgagataactgtttcagcttcttttgttaggattggtgtgaaatgtaaaaaccatgcatattagaaagagacagaaaaccatagaagacactataagaaatcaaatcaggggagaacacaattagaattagaactcctattttacttcccctccaccaccgaaaatgagactttcatacactttggttatgactataaccaagatggaacactatcataggctgcagtttcagttaaaagtacaatttattatcaacttcaaacaaaatttcctaagaacatgtagtactcatagatcatcaaagattgttaccttagcaacacttgtagtttgttgttccattgcttcatgtatggttgctctatcatgttctctcatgctgttgaagaaagtgatatcaaacttgatattttcgcatgaacaaaataactgataaaatttatgtaaagattaaaataatatcataaaatgatatattctctgttctataataattttgaaaatatctgttagagagtcccacacttaataatgtgtggaaactaaataccatacata

SEQ ID NO: 316655 - DNA, 798 bp, Cannabis indica
aaaaatctttgatctctctgagaaaaacgacaagcaagatgaaggagtccaagaaaaagagcttgaaaatagtaaactgaaaggcataggtggtgataataagttatttcttaatcttttttgacgatgatggtgattgaatctgcaactgaaataagttattgaagttaaaataattgagcgccatcgtttgcagacgtaagtacactctactacgcttttaaaatcaggaagtcgaaccaatatttccaacaatacatcatcaattataattgatattggtgagcattgttgttcatacctaatccttttcctaaatggatgatattcataacccatattaataaggaaagctaaaataagttctttattatttcttagcaatacacatgcgtacgttagttatgtacatttttttttatgtatatatatatatatatataatacagtttttatttttattatatattgttagtactcttatacaaatttttaaaaatattaatgtcaaattaattcaccaaaaatatcacaattttatatataattaaatcactagtataaatatgtattaatctatcaagtacttatatcgatataaacaagagaaactacaaattcaacttaagatgttgatggtcataagtatctattttattattattatccttattattattttgaaattgacaatgtctaaatgataattataatatataactgaaaaaaaaaaaatcaaggaaccatgaaaaactgtgtttttgcaaatatcagttgtatataagaaaatataaaaac

SEQ ID NO: 316656 - DNA, 621 bp, Cannabis indica
ttaataaaagataagacataaattgattaaaaaaaattgtacttcacatgtattccttagtgaaaagtacagctacaaaacaatgttctttattatagagcatccccaatagatactttataaattgttaagagctaaaaaaaaatagttaaaaggttaaactcatttccaaacaaataatctaaatccttaactaatatacttcatcctaaactttcaaatctttagctaaatgtagctaagctctaaagtttctttcttattttttttttgtacttcattggcgtttccaaatagaagtcatgtggcacttaactaatatttaatgagttttgagcctatcatttggctcagtaagactagcaagtagtctttttattagttcgaatcttgtattcaaatttatgttacattccagaaatttcaaagcgtatcgaagcacctccaaaagtcattcatcaatgaaagttgaaagagtatctgggatagtttatgatctcagaggatgctcgtgtggcgctcctttggcacaattttgaagaatttggtgacgtgtcccctctgttagattttaattttttctttaaatttgatcaacatataaattataaagtctttttt

SEQ ID NO: 316657 - DNA, 1036 bp, Cannabis indica
actaagattcagcagcctcgcggaacttctgaatggatatagcatcacgccccttcttccaatactggatctcctgtttccaatgcccgaccaagcgcattacccctcccttagactggccaccagatgatttggagaaggaaggaagcatttgacatctcctaagtaaccgagcttctgaaaattattcattttttccctggttaccatggacagaggagaaactcactgagctcctacttcaccttgtcttctctaaggaacgaccttggtgtattccttagtaacatagtcttcactggcctctatgatttcaccggcctcaaacacaggttgtccaatttcattgaagccaccaaagggcaacctctgagctgcaccttcctcctcagcttcagaaggagtattaggatggaccttgccctgatcctccatctcttggacttcggtgtccccctcaatgccttcttcttcagtagcaggctgggcctgctccgcactcgacattgtagcaagtcgagctatgtgtgggtcagctagagaagacttttgcacagttttcttagtttgccccacatcctattcctggacggagcctagttggtatgtctggcgatgatcacggcaaatgtggaaacgtgtgtacctgcaacagcaggatttggacggcccacaggaaatatattaaccgtattgggtcggacaatatatgtccagttggacggtaaatatcgcctccacccctttataagctcctagatgaaacatccttagccttgaccttcgatctagtcgagataaaaatggtgctgaacgtcacgttctgggaaaggtgtgtgctcgatgcttatctcccaatcttcaaagcttgaattgaaaagattattgctagatgaagatggactagcacggagatgaggatgattcccgtacagaagttgaagaagatcttgatcgatatgatgttcgcctccctaaaactcactagggttcatctacaaaatgtaggacacaagatgagcatttggccgggata

SEQ ID NO: 316658 - DNA, 633 bp, Cannabis indica
ttttttccctaattatatagataattgatgttgttaatataattgaatagtttggcttagatgagttttatgttttaaattactagggtgtactactaaatagtaattttttgagaattactaaaagatattactagtgtctagttttttctttagtgttatatcactattagtgtaattaaatatcgggtcccatataatttaagaaaataatttttaaagaatatcgatatccaattataagacgccacttatagaaggtactaggcaccacaccactggtgcccaataacaatattctaatctttattgttgatttgtgattttttttttggttacacaatttgaaacctcttaatatttatagcagctagaatattgtaatcttgtggtgtttattaaaatttttagaaactaagtatttgaaagcttaaaaaattaaataacaattaagtaaatgagatagagaacttttacgtagtatattgatctttcaggcttttaaaatgtattacaaggtaagtttcacaataaaaatcctaactatggctattggctaccaactttctaagtttttccagaggaagaagaaagcttagagagtattctatgcccaactctttctaagttttt

SEQ ID NO: 316659 - DNA, 1133 bp, Cannabis indica
ccatgtgactctcttatgttagatattaggtacaatatatataaaaagaaatatgtttcaaataaatataaaattagaagtaaatttaattcataaattaataaaaggcgtattttttaacttaccccaaaaaattatatatcaacagtgaatattcttctacgtaaagatcgactgatcagcttgacgctgttggagttctcacgctataatttgatgatggtgacattttttagtggagcaaggtgagtcatgaattatattatatggtcaatttaattaatattcgtaatgtttattaatatacaaccttataattggaaaagtgtattttgacaatcacaggacaatgcaaataagtggtagtggccaattattgtgtaaaatcatgtttaaagagaacactattcttcatcgaaatgatatcactacaagttagactttatcaagataaaaaaaaagttcaaactttttcaatgaatgaaaaagtacacactttaaaatatatatattttttattttttcttttatagagttgctctttttataaaattactctaatagttaacaattttaaaatttactcacactatgatccgacatattactttttaaaaacaaaaagttagctagttataaagtaatttttttaaaaaaataaataaataatattacatagaaatggcattttaaacaatgatactcataaagtttgtttaaaaatattaatggcattgtacatgtgacaaagaccacttaagccaatccccattaaaaatgttgcaccttataagtgattaatatttctttatattatttatttaattaataataaattatactaataataatactaaaataaaattcttcttctagttctttgggaacgaaaaaatgtacaagttgatcaaatagtaagtaaaacaaaaatagatattttgtatagaattaaaagtgtttggcctaaaaaagttagtgctaaaaatagatcatggtttgaaaagtaagaaagaaatacacatgtgaatatttattgatgtataaattatttctcaggtctcggttgagatgctattaaggtaattggttctttaattagagtaataataatctcgctgattcataaaaaaaaa

SEQ ID NO: 316660 - DNA, 694 bp, Cannabis indica
agttgactcaagctgaattaaaaggaaacgttttgttatagaaaacggtaatgggcctcctactaacaatatggtctaaactgatgctggttcaaaaaatgtgaatgtggtgggtcctggtgcttaggcccaccaatcattatgagtaccatcaattgaaattgttgtgggcctggaaacccatgggcttgtcgattccttgagaatattgttgttcaaaagaagcctaattttatttcttatgtgaccttatgtaaaaaagatgttgtggaaagacttagagttcgactaggctttgaaggaagtttttatgttgaagccaaggtcataaaggtggtttggctcttttatggaggatcaaggaggaagtctgtctgttaggatactctcataatcatattgatgttgaaattagtattccaaatactattgtttggtgcctgactggtttttactgggagtcaaatcaaagccttcgtttcaagacttggaagcttatccattctctatctcttgattcttagcttccttggtgtatcataggcgatattaataacattggaagctaaactaagaagaaagggggcagaccctatcctttgtcactaattgtcggcatctaggaggtcttagacagttgcaggttgattgatttagagttccgtggttacccttgttgaaaattattttacca

SEQ ID NO: 316661 - DNA, 650 bp, Cannabis indica
ttttaaatatatatataagtgtagataggattggatcaattattttttgagaacaaataatatccaatccccacaagtacagattttaatttttttaatctaattcaatttgcacaagtaaaaatatatgcattttgtagattgaattggattagatcatgtgaattggatcagatcggatactttgtgaacaaccctatttggtgtggttatttcaatattttgttgttatttattgacaacatgttagtagcatgctccaacaataattgtatttgagagttgaaggctcatttggctaagggagtttgaaatgaaagacttgagaccaacaagatgaaaattcactgagagagaaataattgaaagatttgactttctcaaaagaattacttcaagaaaatcttgcaacacttcaacatacaagattgtaaaccgatctctaccttattttctatcaattttaaggtaacctcaagtatgaggcttagtgtaacgtgcatgccaagatggcacgttacaagctaggtgatgcccaaaagttggccaagtggtggtcaagtggtggcacatgttgttgtgcatgctggtggcatgctgatgcttagtttgtatgatagtagcatttttgtaaatatcttcaatattat

SEQ ID NO: 316662 - DNA, 915 bp, Cannabis indica
attttaagtagataaattaattacttggtgtctagtacattcctatgtgttattatcgttattggtccaactaagtatcgggtcccatatagtttaatataataatttttaaagaatatagctagccaatcgcaacgcgatatatcgaaaaggtgctaagcaccactgatgactaataacaatactcttatcatatctataaatatttatatatagttgaaatgtgtcataatgtatttattacattaaacgtggagaagacaaatgggggccaagatatatatagcaatctttttaatttttttttaatttcttatttttctcactctgagacccttgtttggtgccctaatgatgtatttattaaaaaaaattaaggcatcaaaacatgataaaattttatttttatattagtggtcccagtgtgtatgtatatatagtttctcattatctgtcctcatttatatgtatgttattttgataaatgaagcgtgaatttgtgttcatattattatacaaaagatatgtacattgttattaaatattaatagtgcctaatagtatcttttaaaaataattagtgatattttttaaaaactattacattaaattatatcgatacttaattatactaataataatataacaacaataatatttttcaaaaaaaaaaatatgtaattaatcgatcttaattagcttttggattatcataacccaatacatattgagagtcacattaattattaccattataaaaatataaatatttttatatttgtgtaacacgttcttcacgaatattccaataatcccaacttaactttttagtttttagtactataatttctttctttattagttccttatcaatttaggctaaaaactaaagtatcttcattatgtcattttttt

SEQ ID NO: 316663 - DNA, 1211 bp, Cannabis indica
aattcatataaatctccacaaatgcgtaaatcatgatttataactcaatctcataattaaactctaattatttcatgatctactatattaaagttaggcggtctttacattgttagtgttgttagctctagctcaatatatataaagcttgtaatctttcattcaaatagataagaaagaattctttcgattctctctcattcaaaacgaggtgatactttggggagtttcaaatgaagccctccctacaaggagtaggttgcatttttctatccattggaggtagttaggcaaaaagttcaaagtctttcatggattttgttaagtctgaagaatattctaggtgaaatattgagcccaggagacataaggaatggatggttggtgaactctagccatcgttgatggtgctttttacagatgctacatggaagaatggagaaagcaggttcagccatggaagctgaattaagagcaattttccttacagtccaatgggtatagcagaagtacaactagtttgacaattattttttttatgctcaagtggtggactggtggaagctctttccaaaaacatttggcagcttgtttaaaatctttttttttttttcaattctaaactttataagatcttttgattgctttatatttatagtgctaaaggattctagtcaaaatgtattgccaaatgtgaataaaataatatttatgtttctttctatattaactagaaatggaatgtttttatttcaaaatataaatttgtgttatttagttgcacattggttagaaatagaaattttctagtagaaaactatataaatatagttcatagtaggattaggaaagcatactaatacacaacacatatacagattctcaactctctttaagtcgagtgtctctaatcttgagtttgtctctagaatcttcatcttctctttgtctcttattatatttgattacaaaactaaccttctcttgacgatatttattacaattctcatcatctttatattttattaatttgtttatgagaaaaaacaatttattaacaaaaactaatctggaaacaagaaacttctcactaaaactaaaactaaagtgatcaccaataccatatagcagtacggtatatatatatatatatgtatatatatatatataataaagaagagttctctgctcactaaactaaagactatcag

SEQ ID NO: 316664 - DNA, 756 bp, Cannabis indica
aaagtcttgaatagaattaatagctagactggcaaactgctatctggtgcaggaaaggaaatccttttgaagactgttgcccaatctcttcccacttatgctatgagcatttttctcatacctcttggcacttgtcacgagattgaaaaattgatggctcgtttttggtggaaaactacgaatagcaaaggcaatgaaattatttggatgaattgggaccgactttctcgaccaaaagatgaaggcggcttaggctttcgtcttctccatgactttaatctggctatgcttgctaagcaagggtggaggtttctatgccatcctgattctctagtttctagaatttataaagcgcaatattttccccatgaagactttctctcagttgatttgggtcgtaatcccagctttgtatggcgaagcatatggagtgctaaagatctggttcgtcatggtgctaagagaactattggtactgggtcttcaactaatattctgcatcatccttggctcccagatcctaataatcccttcataacttcttcccatgtggaccttgttggccataatattagttcacttctctcggttgatgatcgaagctgggacatagagctggttcaggatatgttcaacgatagggatgctaatctgatcttaagtatcccttaagcttttttgcttcttctgatttctggacctggtccaatgaaagctctggccaattctctgtcaaaagcgcataccgtattcttc

SEQ ID NO: 316665 - DNA, 1005 bp, Cannabis indica
aacttgaaatatatcaatacctcagcaatgggttctttcagagtcttgcgtgtaactcgaaaccgaatacccaacttttccagctgcctagacataacccgaatcatagtcgcggagttcctcaaatcctcctccaatttctcaattctctccagaaaattcacatccagggtaccttttaccgaaccggcgcaaaacctccgccactggcgccttcgaatccaagccccaatcccaaccgcggccaccaaaaccacgattcccgaagcacagagtcttctccccattacatccattactgcctttttcgagctcgaaacaacgaaattgaccccgaatgcaatcgaaataattgcggatgagaaaatacacatggtttcaacgaccccgagcaagtagtcgaaatcgataccgtcatcaacgccatggctccgtaaatcttcatcggattcaaatgatttgagtcgaaatcgctgagtccttacagaattaagacagcaatggttcgaaagcttcttggagatacggaaatacgaggcgtcggtaaggtgacaggaggcgattggtagggagacgagagtaggtttcttaggagaaatcgcgttgaagtaaatggtcaaacgtggaggcgaattggtgagaagatgccgagaagtaaatgacattgttcccaaatatgaatacttaggtgtgttcaggggttgggactgtgctagaggggttctgattttggtggatttggaagaacagagaaagacgccattgttagggtttggctgttgagaaggcgatgaaaggaaactggtgtcgttgggagggagaggactgaggagggtaagaaagaagaagcacttggcgacaatttcgataagttagcgcgcggcgcaattgtggtgtatttgctaaaaagaggaagagaactgctcattcattacaatttaatgcaccgtggcgtcacagaataatttataatattgaaaatagaattttggttttttttttttt

SEQ ID NO: 316666 - DNA, 617 bp, Cannabis indica
tattggttatttgaatactcacatacttattttcattttctaaaaagttgtaaattaattttcctttatgtgaattagaaagaaagaggaaacaaagataggaaactgtatgctgttgtaatttcaccgaataattttaggggtgtttgtaatgagggtaccattttttaaattataatcgcaccgcaagctcttaaaatcacaaaaatcacactacaataacatatacactaatcaagttattatattaatttatctctaaaaaaattatataatatacaatatattacatattatataccataaaaagtaagaataaacaacaaatgaaaagaatttatatgtatattccattaattttaatagtatagcttgatctttataaaacatgtgagtttttatacatgaaaaaaattaaaaaagtgatatggtaaaatttagtatttttgtaatatatgtggtgccgtttaaactacgagtatgaaattcgaaactgcaaatcttactacaccacacaatttggtgaaaatacaaacctcaactgcatcataaaaaattttaaaccatatttttttatgcagtatagtgcagtgcgggtagtttatgcagcgtgaacg

SEQ ID NO: 316667 - DNA, 1514 bp, Cannabis indica
attgctacaaagtaatgttgttttgattaaaaaatatgggagccacctaccaacatctggtcaacaaaatattcaaggatcaaataagtcaaaacatggaagtgcatttagatgatatgctcataaattccaaaagggttgggggcatttgaaggatctagaagaatgcttcaaaatcttaaaaaatatataatatgaagccgaatcccctcaaatgttcatttggggtagttttgggaaagttctttggttttatcatgaatgctcaaggaatagccactcctcaaaaaatacaagcccttatggtcagagcttaactggtcggatagctactcttagtaggtttgtgtcaaagtctaccgacaaatgtgttccctttttaaatatcctttgagaaaataagaagtttgaatggaccgaggactgcgagcaagctttcaagaagtaacgaaataactcatgcaacctcctatcctatcaaaacatctagacagggaagtattgtgaatatatttagcagtaactgccatcctgatcaaagaagaagaaggcacccaacatcccatttattatgttgaaaaaaggttaaccgatgtaaaaatttggtaacctccagtcgaaagaccaacctactgctttctgctctcataaaggaaattacgatcatatttctaagcacatcccgtcaaggtatacaccaaccaaccactttgacaagttttgcataaatctaatggatttggtcgactaatgaaatgggtgattgaactaggacaatatgaggttacttatcaaccaagagtagcaatgaaaaggaaagttgtagtagattttatggttgaatgcatgaacaatcaagaccgtgagatcaaagattccaaagagccagagaagaagtgagagcaagagaagaaaaaaaatctagataagaaacaagagcaagggccgatttggaaactacatatagatgaatcttctactaaacaactttctagtgtaggaattgcactaataacctacaaaggaaaaagacttcatggggccgttaaatttggattcactacttcaaataatgaagccaagtatagtgcattaattggtggactcaatctagctaaggaggtacatgccgaacaccttgatatatgtagtgactcacaactagtagtaaatcacgtgctaggagaatacatgacaagaggtaaaaaaaaatggtagcctaccttagcaagatcaaaggcttactagaccaatacagatggtatactataaggtagatctcaagagaagaaaatacaacaatagatgccttggcctaactagctagcagcacagtcgtggacaaaacaaaccttttgcccattcaacaacttgaagagtcgagcatcacttatcctgaaaaggtcaacatggtagacaccaatctttcatggatttctctaattacaatttaaattgaaacaggagcaataccttgttggattttgtgtcctaaataaaaccctttacaatct

SEQ ID NO: 316668 - DNA, 1425 bp, Cannabis indica
tatccttgagcagttgcaattctgtagcgttccctatagcaagatagcttctttggaagcttcagtggtggccatgaattttgatttggttattgaaagtgccaccacttgttgttgttgagacttccagcaaatgcaactcttgttgaccataaacacatatgctgtagtagatcttctgttgtccttgtttgatgcataatcagcagcaacatagccttctaacctcacatttcatgagtctctttgatagattaaaccatacttgagtgttcctttcaagtatcttatcaactatttcattgaattccaatgttctaacctaggatttgccataaacctgctcaatacacatagggggtgagttatatcaggtctagtgctcaccgtgatatacataaggcatccaacagccatagcatatggtaccctcttcatgctttcgctttctattttagtcttaggacactgctcatttgacagcttaaattgcccagcaagtggtactgctgttgtcttggatgaatccaagctgaactttttaatcactttctcaatgtagctattcagagttagcattatctttccttcttgcctattttcttacaacttcaataccaaagattttcttgacagctccaagatcctccattttgaattcaaaacttagtttgtccttagtgacttgaaattctgtcttgtgtttgatgatgatcatcatgtcatcaacatagagcagtaggtagacaaccttaggtgtccctaattccttgtagtagagacaagagtcaaatttggatcttgaaaatctaatactttgaacagacatgttgaacctttaattccactgcctaggtgatttctttaacccatacagtgaccttttcaacaagcataccggttcagttttaccgttttccacctgaaaaccaggtggttgctccatgaatatctcctcatccaaaaaagcatttaggaaagcaattttgacatctaactgctcaacctccaagtcatagtgtgaagtaatagcaagtattatcctaatggttttgtgtttcaccactggtgagaaaatatctgtgtagtctatcacttctacctgtgtgaacccctttgctaccaacctagcattgtagctaggtggctcaccttctgtcattccctctttctgattaaacaaccacctgcaagaggcaaccttcttgtcttgtggcctaggaaccaaaatccaggtttcgttcttctttagagattgcatctcttctcccattccagcaagccatttcttccttgatttacttgcagtagcttcttcataagtaattacttctaaattattttttgactgtactacagccaaggcataagcttttaagtcaaccccaccatacctgcttgggggttttatttctcttctagttc

SEQ ID NO: 316669 - DNA, 1396 bp, Cannabis indica
tttatttttttaacattttattttgtcatttttgaaaattgtccaaattcacacaccacacacaactcttcatgagtatttggtctctattttcaaagctttatattattcactcattttattgccgtttagattccattgcataaaatacattttaatattaaaaagattaatttagattattatccaataacccatttggaactgactcaaaatttaattgaaataactatttgaacatgttccaatgagaaagtacaacctaaaagtgaccaaatgtggaattcagtgctttatgggacccaacccaatgttcttattttattagattttgattacttaaaacacttttaaatatgtaataatgtcacatgcaacagcattacatgtatttgaacaataataagaagagaattgttaaaatgtattattaggtatttttagtgtttagcatctctaaatatgtcgtcgtgcgattagctagcgatattctttacaagttattatattgaattataagggacccgatatttacttgaactaatagtgatattgacacataagaaggtgatagacactactggtgcgttttagtatattttactggtgcttagtatcctcttcggtatcatattgttattagtgtaattaagtatcgagtctcatataattttaaaaaatagtttttaagaaatattgttaaccaatcgtaaaacgtcaacctataaaaagtactaaagagtactagtgctcaataataataataagagaaatgctaaagggcaccactggtgcctagcaccctcctacgtgtcaatatcgctattggtgtaattaattatcgggtcccatatagtttaatataataatttttatagagtatcgctagccaattgcaagtcgacacatttagaaggtgctaggcacaactggtgcccaatagcaatgctctgataataataataattataataatattataccttattcaattgcatttatgtatagtcaaagtattggtatatcataatcattgtgagacatgaaaaaacggtcagttttgaataatgcttttcgaaaaaaggtttatttaagaagaccccactttggatcttattgtttaatgtaaatctgacctacttgtcctttcacaaagaatgagcaagaaaataacaaaacaagaacaaataaaaatagggaattttacaaaaatactgtttttggaccaaaactttacaattatactgggacacggcaaaaataacatttttactgccccagcccaatttcattacttttgtactgcccaagcccaacagcataacatttatactgtgtgtgtggggaaacaaccttcttcgtgtgtggggagacgccggagacggaaatcaccaag

SEQ ID NO: 316670 - DNA, 1373 bp, Cannabis indica
gtttataaatacattttattatttaccaatgttagattttgacagtttgacattatgtattttataagtagtaatttaataattaatttaattaattgcgaaataattatattgttaatgaattatttattctgtagcaaaagaacacaactttctaattgtagagtaggagtctaaacaagtagtgttgaaaaagataaaaatacacaagattttatctatggtattaacaatccatgcaaattgttactagttcatgtggcaacgttagagatatgaatcattagatatgttacaaaaatacaaagtaattaacttattatatgttgcaggcttgaggtatattccgcattcccaaaccaatcttgttgatacttcaagtgacaaacttcctttgatctccttaaagagtgtttgctttgtcccgaagaaagacttgaaaatttatcttccgaaagcttgtagaaccttttcacgaaggtagcactattgttcttcttcttttgtagactttattataggctcaagataatacaaaatatttaaccagagaggaagagactgtagatgctaaaaagtgatcaactctgtactgtctgataagcagtagtggccaacaaatgtatgaacagaaagtaaaaagtgttgacctcgcttttggccaacgacagtgagtcaattaataagcgataagaaatataattacgatagagaaaaaataggtaagcaataaagaacacacgattttaaagaggttcagcacctttagttcagtaatagcctacaccccttggattgtattgacttgagaacaaagaatacagtgttttctctcgcaaagctctcacaatgaaatctctaagtattttctcttagatctctctaaagcaattcttttgatcccttttacagtgaggatagatcactatttatagcgttaaatgcatgagggaaggttttgttggaattattttacaaggatctagatttactaccatgtatgttgtttaacatcctaatatgaatttctaaaacaatgaaataaacacaaataaagtttaagaaaaccttacattgattgcagcgcaatataatgactccttccgttcagatctcgagcccttgatttccttatgtagcagagcattataaagatctgaacccggatctctttcttaatcccaattctccttcttgttgattggattcttcctagacttacacactatgattgagataccacttgatgtgtgtgggcactcactctatcactcaaggtatgcaaatttgaagaagaaaagagagaaaggtggttcggctatggtataggaaagatggctcaacttttcctgaaggcaagaaatttcatcaat

SEQ ID NO: 316671 - DNA, 1315 bp, Cannabis indica
gttattgtaattttatttcttttatttagcatgccgcttattctgatatggatgcatccacttccttctttggtgtttatgattatcatggaggtaagaattgggaggataagttgcaattatctttgttggattccaatctagggccatatgctaagctcattatttacttatccttaaaacttgttccattcttcaacacgaccatgaatctttaagtaaatgaaattgtaaattcaacacatcctggtcaaacaatcttttgaatttcaagtgggttcttgtgagaaggttacattgtcagcctgcctcttttcttcctcattttgattattttatctatcattgttgcatgtcgatgcctttgttaagaagcttggctgtacctcctcacttcggatttctcttgtcaaactataggtattgttttctattaataatttaataaattctagctctacacttagtaaattatttattcaagtagtttatgtcctaaaagtgggtttattgcctgggagtatgtaaatctacttttcatatacaactacttcatatacaggttttatatataaatgaataggggattagagttttactaatgctctctatataataaagcttacctccttaatatcccttaaaacaggtaaataaagttatatttacataattaatcaattaagttcaactgactaaattacacctcaaaaataaggaagttactaatattttctctctattttcgtgggttgtcaaggcccaattcactgcttgactcactgtccacgaatgaaggttgtggaccaaaaatctaccagccagaagctggccagccatgcacttgccagagtgcatgctagccagctacacagtgcttggaaactggtcagcctatgctggccaaagggccggcctggggtggccgaccagtctgcttgaggtggttggtttgtcattttgtcgtccctcctaagtattcataactctcgttggttgaagtgttgagtagataacttggctttcttgttggcgagtgtactctcacgtgtcattgataatggcgacatgaacatgccacgtcaagtgggcaaaaattgggataactgagacaaagggtgagagttggacagtggtatggaatgcaaaaacatttttttatatgtcgaccatgtcatttcaaaggaaaaagaaagaatttcattctgataatgaaaccccaataactaaaattttagataattctagcaaaaatattgagaaattagaaacctaaaagattagtgtgtatatcagtcaaaagttaaaagcccta

SEQ ID NO: 316672 - DNA, 1911 bp, Cannabis indica
tttgccaatgccctagaaaggtcataacacttgtccaaggtgtaagtatacctaacgctgaatataatgccagtctaaatccagtgaactgacaattcagggaatgaaactttcgaacatataaacatgattatattccactgtgttgacaacactataatcatgaacaaatacatatgttctggacttaatagaatttataatcatgaaataaatcatgtgaaccatggaacataaaataatttctaatctttattaattagtaaatctgattattttgaaatgggttttatttagggcacaaaaatccaacatttttttcacctcttcgagctgattcctcacgtcctgaacttcctttttagccgcatccacctccctctgcaaagtgttagtggtagcaaggttctttgcagctgtggacttggcttgggaataggtgtaagccatcttcagattgacctgcatgggtaaattttaaaaccctagctggtaaaaagataataaaaacaaggaagagaatatttactcgagcagcctccttcaggactccacccatgtccaattccaaggacatgtcgttgtctaccctggacagctgatcgctcacctctagaagtgaccgatcgaggtagtactggagcatgtcctttccttttttggcctccgtgctcagcaccatggcggtttaggaggtcttggttggactagatccatccaagctccccctttggaactcttggacttagatgcttcctgagccgggggatccacagcgggcaccacctcagaaatgtcgatcacctctccagttggcaccttctccttggacagagcctcatcacctcaggatcgtttgggtggaggagtctggcccgagctatcaccaaccctcttcttcaaagcttggagtactttctgggacatgactgtagatgaacaaaaaaaaagaaagttagaagcaagtattatgtaaagcatgtcataaagtaaataaatacaagttaaaaataccctgcacatgggtaagagcattctccaaaacaagtagggacggagcctcatcatccgaagagtcttcttcctactctgtgaggacgacttttccttttccctccattaggacggatggcaagagaggtctatcaggttctctaatcctgatagcacgctcaattggtgcctagtcacttgggagaactttcttcctcggcctctcctgctcattcacccagacctagctaggctttgccttcttcttctccttcacaggcctcagcataaaatcctcttggaaaagtttgtagttaacataattggcctcagtggccagaagagtgatgttccgagcagcgcctggtagttggagaattctttgtgccctctccctgagccccaatttgtaaggagggcggtagtacgagggaatatgttaacgctgagtgtggacggtctccattccctagacgaagtagtaatcatccacaaaattccctatcttgctcatctcggagtccacgatgcccgtcagccacttctcctcgatctgagaaaagtagatataccccgacctactttgcttggtggttgatttcaaatcaaatagctagttggtgttgtgcggggatggctcaccccatccttgtgaggcatagagaatgaacggggcggataaacacttgatgccctttagattaaactgggtcggacagaaaatgtagtagtctagaactctcttgaagtacgaaagcaagggtagcatagcaccctgcttagtgtgggtgcccgaccaagcgtactacccctcccttggactagtcgcccgaaggtttggagagggaaggaagcattcgagatcccttcagtaaccgtgtgtaaggaccgctttagtaatttggattagtaaaggca

SEQ ID NO: 316673 - DNA, 1509 bp, Cannabis indica
tttttgtgaagatgtgttgttttgattttgcatgttgataagtgacagtttaatttctattatttttcattatcattttttgttgtttcaaatttttctagattttgttctgatttatgagttttggttgttttggtttgttattttatatgagaggtttatttttgtttttttatatttttaaaaggtgttttgtttagaatcttgagtttttttgatgttttttatatattttttgtgttatacatgatgttgtatttgtgttggcaagttacaatttagtttcttattgtgaaatagtgtagttagtgctttagtgtttgttgtttgtagtgtaggtgcttttcatgtgttgtatgtggtttaagtttctattttgttgcttttttgacatataagtagattgtatattttaaaattactagtttattggtttcttgattatgctattttatacttttcagtttctaattttatattttttttatgtgttgcagttgtagaaatattacttgaagccagaggaaaaattttgtagtaaatcatattttggaatgatgatgttttagtagatataagaggaaaattgattgagaagaagcgtgttatgtttatttcaacttattttgggtatttattggatattaagtcttataagatgtaacatcagatttttcacattgcattgaatagggagtccatcaatcaaattctaaagagatgtggtttgattttggtcgtgatacggtttattttggtttagaggagtttgctgctattagtggtttattgtgtaagagtgatattgatatgtttttaagtatgtcgggaagggagatgtgtttgtagacaagtagtttagtgatatgactatgactcatggagctgttaagcagaattttctaaatagtattttcaaagatgacgagtttgcagttaggatggtcgtgttgtatttggttactaactatttgataagtaaacctccagctaaacatgttagtaacgggttgttatatttgataggatcgggtgagtttgatagtttctcatggggaagatttgtttatgactctacattgtactatatgaggcttggtttgaaaggtaagaagggtgctaaattgaaagcacagtctaagacaaaaggaatcgataagaaggggaatgattcaaatagtaaaacatataaattggctgggtatcctcttatcttccaagtttggttatatgaggttattcctctttttagaagtcaaaacttttgtacctttgacccttctctgacatataggatatgtaggtggtcttgtgcaaaagaagttacttcaagtgaggtggagaggaaaatttacatgtcatctaaggtatggttggtttttttgttttgttttacttttttttattaattatctgtttttgacttgtaaagtccttttttggcaatttagatgccaaaatattttttttattgatggtgagatttatttgtgctttcaatccgatttt

SEQ ID NO: 316674 - DNA, 1913 bp, Cannabis indica
agttgttaatatgaagtggaattaatgagataagtttctagttgttagaaattgttacaatactcaattatatcatttaaatgggtattgggacgttgggaaaagatttaactcggagaggagttacattttgagttctctggaaacagttgtttatatgttttgttttatggttgtcttcgaacaaaccagatttttgaaaacgttcataaacgtatataaattaattgagcatgtttctagctcccttgtccaatgtttttatcccattaaacacaaataattaaagtgttggtaacaaccatgtgatgaaaggatttagttttcaaatgtgatcctcaaaacactataaatagaggtcttgagtttactttgggctgaagaagtttctatcaagagaacacattgctagaaacactataggcttgataaattcaaaaagctatttccgttctttattttccctaaatgcttgtggtaggggaaagaagcttttggataaggtgtaagaccttgttcaagtttggtgattcccctattatacacttatggtgtatgtggtgttgagatttctctcacatctcttttatatatatgttatttatatattgtgtctcatgtgtaactttttactttgagttgtaatctctcttcatctctattcttattttatgtgtatattttgtttagtgttgtaacattatatctatatttttttcctttgtattatttatcatagagttgtaatcttgttggtttaatatttctattggggcacaacaattttccaacacacgggaccataaaatcaattagtaaagtatcaaaaattaaaaaacattgacttacacaaaaatagactcactttaataatttgccgcaaacattcataatccaccttgctaatatgatctctgaaatacatcaagtagtgaactacttcaactattgatgcgtgctcacttcctctcgaagtgagtttttgacagatctattcccgaaaatatatgcccactttctctcaaaatgagacttaaaaaaagtcttttcccgaagatctacgcttgttcaaagcttctcttcatcttcaatctattttatgaacatcaagagatcagtacaagaaaataaaaatctagttcaacactctaggtttttacaaaagaaataatcttctcacaaaataaggtatgaaaatatgagactagaagagatgagtacgtttgactgttctctaagtcctatttataatacatttaaaccttagagacaacaacaacacttatttacaactgtacaaaacttttctaaaatagaccctgattttgcaacgacataatcccaatttgcaatgacaaatcggggaaactttccaaagaagtttaagatcacaatttaaattttaatacatgccatgcatataaatattatacaatatgttatattcatagcaaaactggaaagagtaactcgcaaaaggaaaagccaatttttccaaaaataaatcatttaatcaaactatccataaaaaaaattctcctttatgaaaatttttctaaataaaaaggacaactataagtaactaaattgcacacaagaacactaatatttttaattcacaattgaatattcacaataaattaaattatattttaaaaactaaattttcaaaaaaaaaaaataaataaataaattaacgaaagtgaaaccataaaagaattcatggactactaatttattaattgatgagaatcatagggttccatctcaaaatagatcaatcggtgataagtggagtagtctaccatgatgagaatcataaagatccatctcaaaactaattggtgatgagtggagtagcccatgttcttatatatggctcaatattttttacatttaatctatgtgagaca

SEQ ID NO: 316675 - DNA, 1388 bp, Cannabis indica
ctagcgagcgggtgtggcttaggcgtctatatctagatttctgagtcaagatttactatagccaaatgtgaagactccactttatcatgttgcagtaacttaacaatattattaataatattttgttaataattgtttttcttttgattactaggtagacagactacagggttgggtgaatcaaatcaaagatttgaatccttttcgccctaggcatagaacatgctttgggccttctacttgctttttattagaaaagagcacctacattgaataatatcgacatattagacaaaactttattaggtactttcatttgtggtgtttgtttgtacaatgatgcttagtccgaaaactaaagaatcaaccaacaaaatagaccttgcctacctcattacagtgagtgtatcaacgactagatatggagatataaaaccactggcattgttccgttattttctccttttcaatgttatattttgcctaatatggctagatcattttctaaggtgtctatttatgaacctttttggttcgaaatggacacctctcacccgtattaggaaatttggtattactttagtaacttttgtatttgtacatattttgggaataacagcattctactgggagggttattcaattcaggatagtgtttatgctagtttagtaaccttaatgacgataggatacggggattactcattccacactcagcaagggcaaatctttacaacagtatggattattccaaacagttttgttttttcaagtttttttgtcgatgatctatgattacttttcaaaggtaaggcaatttgaagaatctgaagaatcagctgaccactatggatcttgcaaaaggcaagactcgagcagattttatgtgataattaattaaagtcatattacattaatcaataattaattgttaatttcaaattaattatttattatctaatatattttgttttaattatttgtaacaaagccgaatttgtggtattttatttgcggaagttggaattggtggatactcaatacagcgatgatattgaagaaaagtatcacgagtatactagagaatatgataatacagttacagttggtcaagtcattgatgactacatggagcagggattgcttcaaaattcaagattagagacaaatgttgtagcagtgcatgattggagcaagtattaaaagcatttgtctgcaacaacattttcctctagtcttcattgatttggtaatgaactttggacttttggtgaactttggacttatttttaaacaagtgaacatgtgaatttttgcatatttgattttcttatgtgtctatatgcttgaatatgtgaaatagaatgtatttagtatgcctataggtt

SEQ ID NO: 316676 - DNA, 949 bp, Cannabis indica
attttttttttctttctgtaacattaaattttaggcaactaattagtgaatgaaatatttctctaatcaagtatcaataaattatgagatagttattttgaagccaattagcggtagaggagtaaagtgataataaaacagaacttatgcttactggttgattcatgctaaattagttattattaaattacaaaatatgacatacttgtacttatttatcttcttttattcttacaatgtaacttcttttaactatatttgcaagctactgcgttgaccctttgtatagttcctcaacgcaatacatggactgacaaataaatctgccaataagcatgcaattatttgacaaatgttgagtttcagcaaaatcttattccctttcttttatgtttgataatattgaagtttaggtttctttgacacatccaatgttgtgcaagttaaataaaaatggttatgttgtgaaaatacatcactcattgtttaatttaacttattaataatattgtatagggtgattctacaatgcacccccttaaaagggatgtactgatacacctttgacttgtttcggcatccagaaaaattttttagtctgatttttttttatattcatatacgttataactatttcagataacctacaaaattttgagaaattccgaataacttacaatttagaaaacaatgttaaaacagtctattttacatgcgtataaaataaaatagtcacgcgtgcaatatactgtttgaacgtagttttcggcgtgttaaatttttctaaatttcttaaaattttgtagaatgtcttaaataactataatgtacatgacaatgagaaaaaatttgactaaaaaattatttcgggtgctaaaacagataagaatatatcaatatatctattttaaggggtgcaaatattttgattagaaaacgttaattataa

SEQ ID NO: 316677 - DNA, 1772 bp, Cannabis indica
tccaagttaacgtcatatgtcaacctgggtgctgggatggcaacatgggcgctagatgcgctgggtcatatgaactaccttcaattaaacagtcataattcactcaattacaatccaatggacgcaattaaacttgtttttcgaagctaattcaattctctatgaagtcatgtctcaaactcgagacataattctaaagttatcgtcgtcaatttcaccccaagggagttacgaaaataagctccaagttacccgcaacaggacctactgggcttcaaaaaatggccatcaccaccaagagctaatttcatctttagatcatcatcaacggtcaaaaatatatatatatcttatttgtgttttttttcctattttttgggcctccttcacctattaaaggagagctttataagctcatttttcacattcaggaaactacccacaaagtcaaagcttctctctctagtttttctctctagaaattggagcttctgacacttagtctttttctataattaccatcttatgagaaataaaaactcgaaatagacatagctccataactcttacgatacggggagtgaactattataaatttgctaggtctcacttataattacataactacttttttatttttgccaatctagcgagcagttgggacttagaagtctagtctaaatttttgaatcaataatatgtttaaacaaaagttaacagaatgtaaaaacaaacatgaaataaagaacacataagattgtacatggtatcagtaatcctttcaaattgctactactccacgaggccactcccagagaattaaatttattagatgaatctcaagtgattacaaaaccaaattgacttataccctctttgaattttctgcaaccattgtaatatatctttctaacgaaatttctgaagtgttgagaccttgaactcccttcaaatcgtagcacttgcacacttcctcccaaagaatgactcacttgcacttttcctcctgaagagtgacgaacaagtcttctcccgaaacttgaggaacgatatccaatgtttacaacctggacaatttcaacaagaaataatacagaataacacaataacaaaatactctaagaacttattcaactcaaatttttcacacactaaagaaactatctctaaatttgaaaagtaatttagaacatgatacaccaagagagatgatggaattcaacgacctaagattgtatttatacactttagaaaccctctaggtcgtgatcaaagaattaagaatccatcagctaataaatggaaaatcttcccaaacaaaaaagtcagattctgttcaaacagactgtacgtcaatttgttcaaacagataaattaaacctggacaattttttagcaacttaactatataaataagaaaacttgaaaacctttatccatatacacggtttattaaaaataaaaataaataagaataaaataaatatattttgatttttcttaaaaatacaaagtgaatactaaataataatttaaataagaaaaatttatatttattcactaataaagtcgtacaatctgatttgatagactttctacattaagaaaagaaaagatatttttgaaaataataaatacaaatacacaaccaaatttgaaaataatacacattatttttatttattttatacaatataccaataaaaatttgacagggtgaaatataaactaaacatgctaatattttacaaaattaaggtgccgtttggtaa

SEQ ID NO: 316678 - DNA, 1164 bp, Cannabis indica
gtcctgaaataaatgcactttgaaaatatgagataagagggccaagaacacttttcatcctcaatgataaagctttcacaacaattttatacattatgttacacaaagcaatatgtcgacactctttaaccaaatctggtttttgcacttttggtatcaacactacgtttgacttattaaactgtcgcactaaagcaccgtcatttaggattgtaaggcatacttggctgaccctgtcacccataatatcccaaaatctctgaaaaaataaagcatgaaatatgtttggtcctagagctttagtggcgccaatggccttaatagtctagtgaatatcctcctaagtgaatggtttcattaggcgctcattatcaaccaccgaaatatgagaattaacaacctccgtaccacgctagatttgttcatttttcggattggatgtttgaaaaatatctctaaaatgccgctctacttcaccaacaatctcttcctctaaacacaacttttggccgaattccgtcataatctcagtaatagcatttttctttttcttcactgacgctttgttatgaaagtatttcatgtttctatcccctgcaatcatccactccgatcttgatctctgcttccagtaaagtttctctctattcataaggtcatccaatttaagttctagagctttcacctcatccattcgaacatcgagagcattggcatttaagagtttatctatctcattccgagtgtccacaacttgcttaggtagcgacccaaacctttgcttattctaagatgaaagacactttccacagtaatcgagcgaatctcgaagtcccaccggatcagccacatctaacgtacatatttgccaagcttcagccacaatagatcaacattcctcatctttaagctattgtggttcaaaatagaactatttcttaattcgctcatgattctgtaccacaatattctctagtttagcgactataggtcgacgatcagaccaaagaaagtcaccatgggacactcagactgaaggatatagtttagaccaagcatgattgcacacaaattgatttaatcattcttggacatgtgaaatgccttgtcttttattgacccaagtgaaggttggccctttgtaccccaaatcatctaacatac

SEQ ID NO: 316679 - DNA, 1269 bp, Cannabis indica
aaaaaggaaagaaaaagggtatacttgtcaataaaattagttttttttttaggggaaaaaatacgtaattaatgaaaacatatttattattaggatattacttatatatttattttttttctaaatttacggtttggatttctaaggagatttctatgtgggttgctatacgaattttgattgcgatttaaattgctctgttagttgcaataaaagtttttatgtgaaattccataaaaataccaaaaaaaaaaaacaatttaaaagtgtaaacataaaaaaaataccaaaattcaaaagaaaaaaaagaaacttgcttaccaaaagctactaccttcaatccctaagaattgctgagaaaatgagaaaatgtaagaaaaatcgaggtccttaaactctaggtggaatcgacccctagagagaaacagagaaagacttgagctttttttctaacttttctttacctaattgcaattactattaatttctaatctatctaaattaatatctcagccactaataaaataaaggaaatgttgatttcctaataattcactaatgccaaaagagggcaaaattaccaatttgtccttcccttcactaagaagtaaccttgaaatctaaatgtattttggtcaaacctataaccccaaacactcctaatattcttaatgtctaactaaatcgtcccgctatttctaaaatactaaaccattaaaaggtgactctaccggccaaacgtcgcgttctactattatcgggcataaaatatgaaaaacataatattttacatataacctaattagcacacctagaattcaaatatatctccacatttgcataaataataattaaaagtttgaattctgaattaaactctaattatctacaaatttcatattaaagctaagcaatcattacaattatccctcgttaaattttgtcctcaaaatttaacctgaataactctgaatattaagctctcatattgcactccaactcccaagttgcttcctccatcttatggtttctccaaagtaccttgaccaaagttatggtcttgttttgaaggactttatcctttctttcaaggattttcacttgttgctcttcataagacaaatctagctggagttctaagtttttgtagctcaggacatgagtgggatctgaaacgtatttctgtaacatagaaacatgaaatacgctatgaactgctaatagtgttagagtcaaggttagacggtaagctaccaatccaaccttttc

SEQ ID NO: 316680 - DNA, 867 bp, Cannabis indica
ttggttgatgcaactcgctaataaaatgtcaccattattttatcaaaaaaaaaaaaaaaaaaaaaaatagaaatagagatattccaattgaaagtaaataattattacaaaataatgtaaaaaaattataaattgagatagaaatcaacttaaaataaaccaaatttgactttttaatattcaatttgattgttactaattcgtattttacttctagtaaatatcaaaagataatgtttgacatacttttagcggaaaaaagttatataaatgataacttgtaataagttgacctcacaaattctattctcaaaattaaaattatattttaattggggaccaatcattttattattattattattaatataacattgttattacacaccaataatatttaacaccactataaataatagatattaatttttcataataactataaaattaaaatatatgaaacttttagaaaaattataattaatatacagaattaaatcaattaaaacttaattaacaaacagttagcaataacaagattaacaatttacaaacaacactcaaagactaaaataaggatgaacagagtgttaaaaataaaaacagttgaagcaataaacaataaaatcaataccaagatatatattggttcaactcctgcaaattaaaataatctatgactccactctagttccgaaacaccaccaaaattatctttattgaatgagcaaaaacatggtataatattgtcgagatcgattctttgttagattctgtcaaagtgtttatctctcacactcttatccaagaaacttcttcttagagaagattcttcatacaaaatccaaactcaatctctctctctct

SEQ ID NO: 316681 - DNA, 974 bp, Cannabis indica
actcacaacccttattttgatccttcttgtactttccttctagaggcatcctcagaggcttcctataatggaccatattgcaggtcgccttgtacatattctcctgagtatccactaagctcgtgtattcaatgtactttgcttcatattcttttcttggtttctttaaagtctcaattcagttctattccttccacctctcttgctccgagactagctcacattttattccagaacattcgcttgtggcttcgactgttcaggagcaatactacatctagtttgagttgctccataccaagagaaaagagtctgagtaggtgcttgcatagatggagaaggtctatagacaactagagtgtattgtgttttgggaatatgatcttatagagtaaatccatgagtagatgcggaagagattagtgttagagggactccaaatgcttgttggcaagcatcttccaaattgatgaagccttgtgcccttgacataaactaggacaaggtctcttccctcttcctctgcatctttccccacaatacggagccaactgtaagtctagattgtagggctatgagtttcatgtcgtcggtcacctttgtttttgcatctacctccatcattcagtgaatgaagctctttaggctttttcctgcctgttgtttgatattggtgatcgaacgtacttccacatcatagtcttaggcaactatgaattacttctagaaggccgacgaaaactcttttcaactatggattaacccggaagtcaatctcttccaccaatcctccgctgacttagtgagtgttagagaaaaacacaaacatttggtgtcatcacttaccctggccacttgcatcatctcgttgtatttagccacgtaggtccttgggtctatacgtccgtcatataactcaatctgagctatcttgaagttctctaggagtggggctttctgttggaaattatttt

SEQ ID NO: 316682 - DNA, 1147 bp, Cannabis indica
tgtcaaaattcgggagaaaaaaaccctaattagcctatttttaattgcttcttattcttgtttattaaggaggtgattcccaacataactttagacgattcattttatatcagttgttgcacacttttcttggaggtagaatgctttgtaataggaccttcacaagttcggaatgtaatgatacaataattctatatttcaataatttctttttacaaataatccaaaaatgtattttaaacttgctttgaactctaagactatgaccttgtgctgcaactaccaagtaatttggcaactattacatctcttctctaaacagttcttcttttcatgttttacaagtaaaaaaacaaaaaacaactctgtagtctgtactgaaaaatattgagtaaaagacatcacataaatcattttttttcatttttataaagatgaaaatcttgacttactttggtgggtttggtgagcatgaatcagtctgaagggaagaaggaaaaggctcagaaagagtttcacaagaagggctatcatccttccttcgttttcggtccaaggaagcgggtttcataggtgccccaaccatattaacattgcctgtcaacatggtcacaatgtgtgacatgggaggtctatgttctggatcaggctggagacataagaaagctacatttattgcttgcaaaacatccttctctaaaaatccatcttctctcattcttggatctacaagttcaagcactttcgatgtctcatacagcctccatgcctggttttgaaacaatcagcatgagaaattgaatgatgcaatatgaaataataagttcgcaagtagtaagatgcctacatattcagggaggtattgcattacagatggcaaattctgatcagtgtttttcctgcagctgataatttcaagcacaagaactccaaaactatagatatctgccttctcagacaactctcctctaatagcatattcaggagctgaataacccctgaacaaaataacaaaagaattcagtttgtcacctgaaaatcaataataaacctgtacaaaaaaagctaaaaaaaaacactaaatagaaaaacttgtactagctttttagtaccttattttacagtttttattagtaaacctataatt

SEQ ID NO: 316683 - DNA, 521 bp, Cannabis indica
ttattattctattatttttataagataattcacatattaattattagcttatatatatatatatttcattttgaataattttagcattaaaatatagtattgttgcagtcatacttatttttaatattcttgtaaaacaagttatttaaatattattattaaaatataaattactctaaatttctttttaaaaaactagttacttaatattttaaatgagtatacaatataaatcaaaattcataaaaataaaaccgtaactatataaatataatagagacgggagtgcacttattttttgaccattataccctatatatcactctgtataaatatatacataaaatccaattatatatattggaaaattatgtggtgcacctacatagaccctaattatatatagaagaattttgtagtgcacctaaaaataaaaaaaaattacattaatattttaattagtgatagtattttataaatatataaaattaatttatattttagtataagaaattattcaa

SEQ ID NO: 316684 - DNA, 1151 bp, Cannabis indica
atacaataaattacacccgtaagagtagacaaattagcataggaagaatttactctttctactatactttttgagtccctcctttttccagcttctgttacaaaggttaggggctagtttcacccgatcttcctttctgactacatgcagttggtctctagtgccaataatcatgctttcccttcttggcatgacagaggcttatttacttagttgttcgctattcttgatactttgcctgattttgttattttttagattcctagacttctgaataaagtataaccattttagaaaattagagtgggtgcgagctctccctctcttctcccatggcgaagaagaaaagggttggctgaaagccagccattgcaatttctatagctaatagtgctaaggaggcggatctccctttgatccaaggttcggttgctgaacaagaaggcattgaagagtttcacgatcagtgtaagaacttggggatcgataatgaagctgaaggttgcaaagctgagcaattcgatcgtgaagcgtcgattccaattagctgggcagaggaagtagagcaggccaacttataaaccaatgcaagggatctttggagtaaatttaagtcgaattaggtaccttcaccttcttccaaacttacatttactgaaccaattagaatcggtgataagattgtggccaagctagaccttgaggagattgaggttgaggccttatactggaaaaatgttatagtatgtattgtgctaggtgcaaaccccccatttaaagtgtttgagggattcatcaagaggatttggggtaacttaggtatagaaaagattgtgcggatgcactcaggatgcactttggtcaattttcaagatgaagctactcgagatctcatccttgaggcgggagtcattcattttgataagaagccggtggtattaaggccgtggacaactgatctcgatttgaatagaatagtcaactcagttccagtttggattagactaaatgggctgggattacaatattgggggaagaaaaatctagcgccttggttagcacaataggcaaacctattatgatttataaggtgactcaagatagatcttgttggaattattttaccaagatcttagatctactcacaagta

SEQ ID NO: 316685 - DNA, 852 bp, Cannabis indica
gtagccatgttctcttgcccaatgccaatgatcacctctacatgtctcagtgactattctttacaaacaaataaataaataaattgatttttttttttaaaaaaatacgggtcgggttcgacccgacctagttatttcaggtcagacttgacccgctaagctaaagaaaatagtcgggttgggcggggtcaggccaaagtgatatcgggtcgggctgggtctatggcaggttgggccgggcccgaccttattaatattaggataagttgaaaaatatcttatttttgtatcctttaatcaaaaatatccttatattatattttattaaaatatacacacttttttgagtgggttgcccactataccctcactctctaattaactctagcatataaatttatattaatctaaaaggtctaataaggacattatttataaaagtgagtatatgttaaaggatataaaaatagaggtaaaaattaaaacaaataaaataaagtagtatactatgtaatttcctggttgacattcctactctagatggatgctttgacctctattactttagatttcctttactatttcggtgtttcttgggccttcaacatactggcccagcccatggcccattttatacctctagtccgttcacatattatattttcaaatctctgactttattctttgttattctttttaaatgataattgcctttattaatctatatttaatatctgtactaaaacaaatgtatattcaatttccctttcaaaaataaagggtattttacaaaaatactggatttggggtaatacttttcaattttactgccacacggcagaattaacattt

SEQ ID NO: 316686 - DNA, 1143 bp, Cannabis indica
acacccaatcttgaaccgtatcagagtggacatggtcactatctgtataggtacggatcggatatgatcacttgcccgcaagggatatggctctgataccatgttgagaatcatggggttccatctcaaaaccaattagcaatgagtggagtaacccatgttcttatatatggctcaattctctaccatttattgggacaatgtccacaataataacatcttataaatttaaaattttaagtatttatattataaatgatacaaatttaataatttttttgacaatataaatatctaaatattactaagattgtaatttttatctaattttaatagtataaactctcttagtgttctaaacaagacaaatccaattataaacagggatagaggtagagatgggattaaggggggccaaaacaaagaaaaaaatttaaaaggggccaaaatataaattttgaaaaaaaaaaacaaagaaaagtacaacaaaaaaaataaataaggttttattaatatttgggggctatgacccccttattacaaagggtggcgctgttgcatgcaaggcctagattctaaataataaaaatgtatattaattattttcgaattttattttaacaaatttaaaaactaagtctagttatacatttaagatcatttacaaaatgtatattgacgtaatagagtgggatttggccggttttgggtgcataagtggagcatactctttgttattatatcgttattggtacaattaaatatcgagtctcatataatttaatataataacttttaaagaatatcactgaccagtcacagagcattatttttagaaagtgctagacactattagtacccaatagtctatgtgcaagtatatcccttataatatagagtattactattagacaccaatagtacctaacactttctaatcgtgccattttataattaattaacgatatatatgctataaaaattatcatcaaaattttttgactaggtgagaccgttggtagccttagggcaaaagtgtgacagtcagtagtcccgtaatccgtaaggggaaataccgggtaagttgtgcaaccccacatcgcctggggaaggtcaagtgggatgattctgagactgtgtagg

SEQ ID NO: 316687 - DNA, 2166 bp, Cannabis indica
aactaagcgggctttacagcaacgattatgtgggtggatctattcacttccagagggcatgagacaagctgtgacaattagagtcccgtgatatgcaaaggaaagaccaggagttgtacaatccacattggatggggaaatgttgtatgtagtgatttcgagattatgtagacattagacatcatagtgttgaggacttgaatgaattatttgggactgcctatattaacaaaaagtatccttatttggtagcccaccataaacgaactccacggttaagtgtccttgacctagggtgatttcatttaggaagtttccccataaagcgtgcgaaccagaacaaagcgtgcgaacattgaaaacgcttggattggtctctggggcgagtcatcagtctaggaagcagttaaagtgatgcactcttgtataagggcccttattctgtgactataagggcccaatcaaggcttgaagtagggacattaccagggtaacctataaaagaacgccaaggagagtagtgatatcactaaggtaaggaaaattacctggattacatatggtaacacggtaatgatggaaaatacttttatattcgactggatgctcaatctggtatataaggagactattgatgttatgggaaaagatgaccttatttaacaatgatggaaaggcatactcacccacattgggggaaaggcttataaattgaattataatttaatggacatacattcgagtgattggtgaaagttggatcacaaagtgggttgtttattaaataataggctacataactgagggtaaaacgagttttagagtgattaaccaagtattaagatagtgatgattacaagaaagtaatagtagcgtacgaatcatggagtgaaaccttagtggtaataatggggaacgaatacaagagtcttagatgttgatgaatcaacacaatcaacgaggaactcactacaagttggatttcacaccaagggattgtcaataaaatagagaatattcatgtatatttttggatgtgttaaaaagggaattttaggatttctacctaacacagatgcggaggtttgagatcaaggaatgatctttgatcaattgttattagctaagaactcaagaaatggatgcaagttaaaatgagtgaagataaataagattcaagttgacaataagataaaaattcctcaagcataagtgaacaaaatcgatgaggaattgtaagaggttaatgaagggagtggtggaaattggatttaaataacggaaggacaaaaataagaaatacaagtgggaacgacaaagaagcatctactttctgataacccatcgtgagcttaccttggagttaagcatacttaacttgggggaatttcaagatggaaaatctttcggggagtcatcttggaaagtgtatgattgaggacaaagaacgctagaaagattcatagtaggatgcagaatcaatagtcgttgtagagattaccaagaggaaagcatgtgacaatcagtaaagattttcaaggtatcaagataagcatatgttaataagtagaaagaagaagtgctctaaatgaatatctatcagaaacgaatacttaacttgttaataagttgagttagtagatttgtttaggaggtctcacaggaggaacagatggatgtaattatgaactatatattgtgggatctcatgggttcaaggagtagtaacggtggaacataccgagttaatatgctgtttaccagcgtagacaatttatacaataaatgaggatataaaatttatacaaaggaatagtctactcttgtgaaatctcaaagttgatatccttggctacgatgttaaggattaatgaaggttattgaaaactatggagattaaagtgaaaatagtataatattttattcttgaaagatggataatctgggaagaagccatactgttctaacaacccatttacttaagcaaataaagcaacgactatgcttgaattcactaattataagatgcattctagaagggttttgcatccgtagataagtggttagaggatccatctttgtgttgggttttatgccctaaataaaactcatttcaatataatcagattgacttattaatatagatcagaaataacatttaatgtt

SEQ ID NO: 316688 - DNA, 2404 bp, Cannabis indica
taatataaaatttacttattaataaaataatactaatcttatttcttactttaaattaatttgacgttgaaaagtggccaacatcagctcgttagattggggagataattaataagtttcagtaaataatctagagagagacacacaaaatttatagtagtttactctccatgttgcaatgataatgaagctacgcctacttcgagtttttaattctcacaagaattacagaataaggctaagggagctctccttttataggtgaaggaggtccacaaaaataagaaagaaaatacaaattagacatttttgattgtagataatgatctaatggtaaaaaaaatatcttttgatggtaatggctatttttttggagcccggcatgttaccgagagcttattttcataactctcttggggtgaaatttgacgatgatatatttggaatcacgatttaagtgcgagacatgacttgatagatcatttaattagcttcaaaagtcactttgaatcaagtgaatcgggtcaatattgaggagttatagttattttattgaaggaagttcatgactcagcgccaaagttgacatcccaacacccaagttgacatatgacgtcaacctggatgttgtgtaagtgcaaaaatgtccaagggatgtactttaaggtgtcaaagtgatattttgacatcaattagcacgtttatatgttctgggaaagctagtcaccagttatcagagatgttactggtctgcagaaatgagagactcgaaactcttcatttttaagtggaaatgagaaatacaaagttgtgaatttgacttctctgacttcatggatctttgttattgtgaaaaactagacggacgattaaaacgatattagaatcggataagcaaaacccaatgcattaggacaccttttgtcaacctaggtgctgggtacttactcctgagctcctgagatctttttttgatactttcaaggcttctgaacttgaggacaaggtatcctactccattttttaccattccagattcattggtcgaattaggtttgacatttgagcaaggcagtgtcctaagttgattatcaacctgggcgctgggtcccgtttctaggggctgggacttgtggttttctcctcgagtttgcttgaatcttaattattttttatgaaaaaaaaattaaccaactcagagtcttccattagagtagttctaattctttctaataattagactgaagcgttaaattactaagtttgccaaccacaaactcaataccttctgtaaccatgtccatagctaattgaggagagatcatcttggtactgaaaaatcgacctgggcctctcctactcaaggcatcaaccatcgtattggctttcccataatgataaagaatgacacaatagtccttcacaattctaaccactgtcttggtctcatattaaaaattttctgggtagagaaatatttgagactcttgtggtccgtataaatctcacgtttctctccataaagataatatcaccaaatcttcaatgcaaaaaccattacattaagttctagttcatgagtcaggtaatgtttctcatactccctcaactagcgagaagaataagtaatgaccctgtcagcttgcatcagaacacaccccagactttgtatggaggcatcacaataaaccacgaaattttttattgatttaatggcaaagccaacactggagatgtaatcaatcgctacttcagctcttgaaaactaacttcatacttgtcggtcaacacaactgccaacttttcttggtcttaaaggtgtggaaatcttagaaaacccttccaaaaaaacgacgacattattagggtttatgccttaaaaagcttgtaaatatatttttatttataaatataaattgaagatttttatataagcttgaatgttaaattattaatatttaatgtataaatattaaaaaattccttattcatacatgaggtcgtgacttgtattgtacgaaaaattaagatcacttattcatgaataaaatattcaaaaacatattaaagttatgggatctataatcaaatgttttctagtgtggttcactaatgtttgttatttggtgaaagtgatctcaattcagattgttgatgtaatatgacatctaactgaaggtattgtatataatagagattatatatgacaaggatcgatatgtaatttagctatctttatcaaacatcttatttaccataaagaccttatttataacataatgatgatcaatagtggatcagcataaatcctaagtaatcatgaactcatgttcatgttattagtttctttgtgttgggaaacatggggttccatctcaaaaccaattggcaatgagtggagtag

SEQ ID NO: 316689 - DNA, 1105 bp, Cannabis indica
cctccttacatacaaaaaataatcctcttcatggctgacaacacagaatacgttgacacaccacatgaagaaactcttcaccgtcctggaaaagagccaatgggctctacgaggccttccaactcttagtctaaatggaccgctcactccaggaggacccaacctgagggtggccccagcactcggatcactcgttccaggaggacccaccatgagggtggccccagcactcagagcactcactctaggacgacccaacttgagggtggccctagcaaacgaataacacgtccgaggaggactcagcatgcaaatggacaaaaatcctagagtgagggatgaagaacccaatcttgggggtgctcaacccatggatgagggtgcttatgaccctacaagatacatacctattgtcaaaatggaaaactgtcatctcaggcgccgtctggagcaggcaaattggtggaatgctgaattggagtgtgaggcagtcgcgaccagggcgtcatcggggaataatactcaaaattaacctgaccctggagtgagaaggccacgagaagaaccaggagacatgaaacatctcaggagaaccctcaaaatgctcaggaagaacaaggaaaatccaaatgatcagcgagaaccatctcatagaaatgagaatgggaggcggctagaaaccaggaaacaggaaattcctcgtggaaacaaggaaaatcctaggaaacaacctgacgagcgtaggaaccaccaacattcttcccggacccatagagaaggggctcgtacaaatcccaatgggggaaacataacgaaccatgcctaagggggaagaacggggcgtgaagaagcgagtgtgacatcggggcactcaaggacccatagtcgattaactcgagaaggagaaagtactcgtcgtaataatgatcaagaaagcatgagaaccagtaagactacaagtcactcaaggacgaggtccataagcaagacgaggttcgtaagcaggacgcagtcagtgagtagaacgaggttcgctagtatctataaccaaccagatctgcgagagcacttgaatcagaaaaaacttgatcttcgccaaaaactc

SEQ ID NO: 316690 - DNA, 697 bp, Cannabis indica
atatttatcctcccagcataagctataaaataagttaaaaattggtagtactcaagaaaagggcacttctttaatctatcaagtctatagatagactcaatgttgatttcaccaataagttaaaagggaattatttcatttttaactgatacatagtcgcaccgttaacaaagattcaactcgcttatcgttgccgacgatatggcgtggttgatcatcaaaaatatgctacagccttctgttgcaagcgggagatgtcagaagagtggttggtcaatgttggaggaggtcgatcggagtatagtggcagtgggctggccattaacgccaggaaggtatcagtgaggtgatagctagagttaagaggatgagaggttgaagataactttaaatttggattttttaattgtttgtagtacttaattcttacaaaaaaaaattgtattacataattttatcttattatttttttatctaagaataaaataatattataaacttaaaatattaaaattaaggtaatttagaaattttataaatttaaacacagccagagtagcaaagtatgtaatttttgtaaatacatggtattaattaattattatctaaaacagaaagaaagtactaaatatgtatttttacaaaatacaggatactaaataagtaatggaaaaattctacaatgcacacccttaaa

SEQ ID NO: 316691 - DNA, 1670 bp, Cannabis indica
tgtttcgatttcaggtccttagtctgagtctggatttgggtcctagttttgaaatggttccaagtttgggtcttggtaagattccaagatccacacacccactacaagttaggtccaagccgcgggtcatgggtcaagatccggttcccaatcttgggtcctggtctcgttccgatatagatcctgggtccctgtccgtgtccaagtccgtgtttgggtccgggtttgcgaccaagaccgggtcgggtcttgggtcacattctaaatcttgggtcccgattctggttctaattgtaggttcgggcccgcaatccaggtctggacctgggtccaggtctgagtctccaataccggtccgggttctgcgtctgggtctagatccaagtccatgtcttggtttgggttcgtgtctcgagtcccgatcctagttttaattgagtttgcgtgtcggtccgggtgtgggtctgggtcctagtcccttggtcttgttcccaagtctcggtccgcttctagttccgtttctaatttcgggtcacggtgtgtgtgtctgggtttggtttcgggtttgggcctgagtccggggttgggtttgagcccgggtatgggtccgagatccaaacatcgactatgggtcaggtccaagccccgagtccagatcaggatcatggtctcgagtcgtagtccagttcaacttcgggtcccaagacctggtctgggtccaagttcagggtctagatccggggtcaggtctatggtgtcagtgcaaattccaaagcccgggtcccgggtccaggtccgccatccaggtctgggtcctaggtcccagtccgagtctaggacctagtggagcttcaagtcctagtccgagttcgggtcgggtttcaaatcctggtcagggtctagatctgggtttgagttccaagttcgagtccagatctttgtctgggcccaggtcccgagtataggtcccccatccaggtctgggtcctaggtcctagtccgagtccatgtttgggtttgggtcgtagtccaagttcttatttcgattccgtgttcaggttcgggttcaggtccgggtctgggtcggggtctgagtcttggtccgagtcaagagtttggttttggtccaagtccagatccctgtctgggtttgggtttgggtctaggtccgagtccaagtcttgggtgcgggtccaggtttgggtctgggtctcggtccggatccatgtcccacgtgttaatcccggtctgggtatgggtccgagtctgggttcgagtccatgtttgtatctagatccatgtctaggtccgagtctgggtctgggatcgggtcccgggtttagtaggtccgacccgataccggactcggacctagaaccggaatcggacaaggactaggactgtaacagtatccactaaacccaaactcagaccagaacccataccgggacttgaaccagaccagcacttgtgacttgggacctaaaccaagaccgggacctggacccagaccgggactaggacctatatccaaaacccaaaaacaaggcccgaacccaggacccaagaacaagactcggacctaggacccgaaacccaaagctagaataggactgggacccgaactcgtacctgaaagccaaaccaggacctggactcggactagaccc

SEQ ID NO: 316692 - DNA, 1675 bp, Cannabis indica
tcttcatccaagaattcattcagtaaagtagttttaacatcaagttgttcaacttcaaactctatttgagctgccaaagtaagcatcaatcttatcgtcttgtacatgaccacaagtgagaatatttcagtgtagtcaattctttccacctcagtaaagtccttggccactaacctggctttgaaccgtaccagttcattctcattgattccctctttcaccttgagaatgcatttgcactccacaatatttttgatctctaacttcggtagaacaatccaagtcttgtttttccagagcgaatccatctcctcatccatggactggatccatttttacgtgtttccacttaaaatttcctttttgtagtttttgcgctcttcaatttcagttggttgtactactaatagtgcaagcgcaattaggtctgcctcagcaaacctttccgaagggtgaatctctcttttggttttatcacgtgctaactgataaccttccaaacctgcctatctgaatcctttcagaaaatctatttggtcttcgttatctttcggcttaacatcaacttccatctacgcactatctttcagttccataatagctttcagctacgaaccttcttttggatgttttgttccgtactctatttccatgcatgtagtgttcttgtttcttgattttcttgcatcacacggagacacactacctttccccgttgtcaagcgggaatattacaattcattgaaaattacatttatagcaattactacctttggtctactcttttttggaaatgcatattctataacccttggtatctaatgaataacctagaaaagttcccttaactgatctaggttccagtttatcaatagattagtgtacatatattgtacaccaaaaggttcttaaatgcattatgtttggggttctattgtaccacattttataaggggctttcaagtcttataactctgtttggtcttctatttataacataaattgcagtagctagagcttccccctaaaatggtttctctaatccaaaaatgaatagcaggcatctaactttattcaataggatttggttcattctttcagcaacaccattttactctggagtcttcactatggttctatgcatagcgatctcatattcttgacagaacttgtcaaatttagagttaataaactctatcctattatcactcctaaggttcttaactttaagattagtttggttttccacatgagtttttcaagttctaaactgttctaggcattcattcttagtttctagcaaataggtccaaacacacttattataatcatcaaccatagaaagaaaatattgcttactagagtgagcaggccctttgtatggcccccaaagatcaacatacacatattcgagtatcttcttagttatatgccttgctattatgaatttcagcttatgttgtttcctaaaacacaagcttcaaaaaatggtaaggtagaagaatttaaattttcaattataccactaagagtataggtggtctgtctctcttttttgagagttttgctctgtctctctccttgagtgtgtctgttacgttctaaaagttctaaaagttctttcttgttttttttttctgtcttgtgtttctatctgtcgtgtgtgcttcgtgta

SEQ ID NO: 316693 - DNA, 1057 bp, Cannabis indica
aaaaaaaaaaacagctgtttttgtttaagggaaatcaatactacaaaaggattaggcttatgagctataaacaaaaagcagaaaagagcaatattaataaaataatgttacaattctatgacataaatcaagaaatacaactctatagcataaatgtgatgattgaacaccctaaaaagcagaaccaatcttaattgttacaacaagaaattgagagacaaaacctaactttgaatgaattaactgcaatctttattaacatgaaaaacgagtatatacaagtgtatcaatgaattacaactcaacaatagaggatgaaacctcagatacaacatgaactcacaatgagatacacatgatcatatacacatatgacctatttacattcctccacacacgttaataatcttggacaagaactctaaaacaaatctctaagtttctgaattttgagctaacttgagttatatatatagagacacgattttgtcccgttattgtactttcatggaatgtaatccgtgatgtacggcaaccgttggatggggtggttatttgatctaaggactgaggtcgatctaagggtaattagggtttaaaaaaatggtaaccggatatgtttttgaattttaaatttattaaatttgaaaaagttgaaactgacatccatcaatcatatcaaccgtcctccactcttccatttcattcttcactttctttttgtttttcatttttcattttctattttcgatcctgctagggcaaaactctcattttcattttccattttctttttcattttctattttctttttccattttccattttcgtttcaacttaggtaaaaacccatattttacattttcttcacttttcatactttgttcttcactgtggtgtacattacttgtcttctgccattgttaggggttgttacagtagtgggtgtcgacggtgggttgtacaagtaagtttctccggttctactttacatacatttcgttcttcactgtgggcgttaaaaaaaaaatctttttttttgaagggaatgtggtg

SEQ ID NO: 316694 - DNA, 1177 bp, Cannabis indica
acaaaattcatggtaatgataagctgaaaatgaactgaaacttaaataaaagttcacttcttcataggtaaacctctcaaaattttataactaatagaccaaactaattaaaaatcatataattaacaattgttaccttctcgtcacaatttgaacattgaatagtacgactatcaattgttttaatatttgaacttgaagaagcagcaatgttagaagcatcatacttaattcctttcctcttactcaagcctgcaaattggagggtggcctccttgcaggcaaactctgttcgtaagcacgcaattctgcatccaacttatctacgtcagatgagttaaccactaatgcttattgtagaagccctaacgaattaaaaaaaaccaaaaagaagagtgaagataaaatgtttttatatttttagatttagatgtaaattaaccaattagaaaaatgttaatatgtgaccaaagtaatttagttgcattccactccaatagtccaagtgcatatccaatatccaagagactaaaagtcaacgaagtacaagtcaagcttcgccaccgtcattaaaaaatgttataataaacgcataactaataacaaaaagcaaataaatcacattatcttcccgtacaatagacaactgcaatctaccagactcctcatcaaaatcagggacatcaatttttcaaaaatacctaaaaaaacaaaaaatcattaacaaaaccagtttcttgaaaaagaaaaaaaaacttaaaaaaaccatgcatatactaaaatatattaggttatgaaacataaaaaaaaatatataaagacaaaatctcataaaatgcaatgtttaaaaataataacacctaaaacaaacaatgcacaaagaaaataaccaattataaaattgaacaaaataaaaaataaagcaaatacctctgaggataatggatttggtaagtcaccatcattgccattgacatccatattctcagaacaagaatcctcaaccttatcatctacattattgggcacagacgacccacccttactcttcaaaagatcaataagttcatcaagtttaatcctaaactcatctctcaagccaaagtagactcaaccttagcaaactgaaaacaaacaaaaaaaaataacaacattaaaaaattatgaaaaaccaact

SEQ ID NO: 316695 - DNA, 1673 bp, Cannabis indica
aataaatctataattaaataattgaaattaaaaaaccctaaggactcctttctattggcttgggcggcggctctgctaggggatctcagaaggatctcagcaacgaaaagacgagaaatgttgaaaggaaggtaaagtcctttaaaactacgctcgtagctaaaggcttcacataagtagaaggtgtcgattatggtgaaaccttcactcctatggtgatgcttaaatccattcacattcttctatccatagctgccacttatgattactatatatggcaaatgaatgtcaagaattcttttctaaatgaaaatcttgatgaaaggttttcatatttcataaatcaatatatggattgaggtaaatctctagatcttggaatgtcacctttactaaaactattaaagagtatggcttcaaataaaatgaagacgaagcctgtgtatacaaatacattaaaggtaatatagtggtattcctagttccttatgttgataatattctacttattggaaacagtgtagaaaggtaatcggatgtaaagtggtggttacccaaacaattccaaatgaaagattgggagaagcaagctatgttttcgacatcaaaatctatagagatggaaagaggagaatattagaattttccaagaaacttatatcaataaggttctagaaagattctcaatggagaactccaagaaaggatagttgccatccaaaaatggaatttcactatgcaaggatatgtccaaagactcctcaggagatggaggatatgagaaagtacccttatgcattagcagttgggagcttaatgtatggaatgttatgtagaaggcctgacatatgcaatgcagtaggaattgtgaatcgttactaattgaatccaggtttggaaccctggatagctatttagaacattctcaagaatctttagagaacggtagatctcatacttgtatatttcaaaatagagttaaatcctattagatataatgattctaattttcaatcagagaaagatattcaaaagtggacatttgggtcagtattaactctttgtggtggagctatagtatggaggagtattaagcgaaccagtattgcagattgaaccatcaaagatgattatataagcatctttaaaagtaagtaaggaagcggtttggttgaagaatttctacactaatctggaagtagtctagaagtagaaaaaccattagttatatactgtgacaatagtggaacagtaaccaactccaaggaatcaagaagccacaagagatgcaagaaccttgagaggaagtaccatatacaaaaagatatagtagaaagagttgatgtgatggtcttgaagatttcatcggaacataacctggcagatccgttcacaaagatgctaccaacaaaatgttttatgggtcatataactaatatgagactaagggagattaccaaattgcttttaaggaaagtgagagatagttatggcttatgtcctgaaaaacctgtacatatatttctatttataaatataagttgaatatttttatatatacttgaatgttaaattattaatatttaatattgtatacttaaatataaatattagaaaattccttattcatatattaggttatgacggtaatgtacggagaattaagatcactt

SEQ ID NO: 316696 - DNA, 1162 bp, Cannabis indica
atttttatgtaaaactatatgtggtattaacttttatggacacctaaatatataatattttaatataacttaaagtttaacatagtataatataaaaatataatgtataaaccaattcaatataatacaatataatacaatacgatctaatacggcattccaaacgagcccttaaacagtcataacatagggtgcatagggtcctttcttcatttctcttctctcttccttagtctttagacactgttcatttgacatttttaaagtgtccagctaagggtactgcagtatagctttggaagattccaatgttgaatttctttgtcactctctctatgtagcttctatgagttagaatcatcttctcttctttccttttccttatcacctttatgccaagaatcttcttgacaagtctatttcaatataatctaatttataattataaaatatcagaaattattttaatgttaattcagaacatattattattcataattatagagctgtctacacattgaaaaattaataatcatgataatatgcttcaaactagttagtctcatgatttatcaatacattaagtttacactggtaagataatatcaacaatgtagttgctcacacttggataagtggagtgacttttttagagctttagcaaagaaaaacgtgtatcaaatatatcgacaatacatcagtctgaatcaatattgtacaataaaaaggaaagatattataaagttactgttatatttaatatttctgacttcatatcacttagttgatcttaagtcaattgatctcagtcctgagatgattaagttctagcttaattgtactatacaagttctttgacttgttcattactggcttacccgtaggaatagcccatacttacatctttgggaattcggtaatgcaattgagtgggagtgttaatcatatcatagatatggaatctatagcttttataactagttaaaagtgaaatgacagtttccttagagtttggctaaacacgataaatgatagagcgctcattttggtaattatattagtttctcaaaatatcatttacaatgagttaagtatttttgagataaaatacattgaaggataaagtagtaaaaatagtaaatttgtccctactagatgtaaa

SEQ ID NO: 316697 - DNA, 1306 bp, Cannabis indica
caagtattttagaatatgcttaatagccgctcaatgttcctttcttgggtttgattgatacctgctcacaattccccaagaattctggacaatactcataaattgtcccacctttactaatactagatcacttctagataaaaagattgctttctctgaatcaattaaatggatacctccattagctgctcatgtcgtatgtttctctttggaataccagcaaatttagctcatagtgtcattcctttaatctctctaccccgtcagataagctaccactaaataacgtacatgtaccgtccatttagatttttttggcatctctaattgaatatacaatgtttaatataaatatcaatcaaaataaataattttacccataagattctaacctgagtcggtcgaagggccgatacccgagttcccttgagttataatcgacacttgggcaggacccatacactcttctcctttaacatcaatctttcttaattacgggtagattcttttcaaatgacccaccactccacaataaaaacaagatttggttctacattggcctaaatagcatcttttgcatctttgacattcaagataaggttgccatatcttgttctcaccttgactactaccctggtcaccctagaacctttcatttggtcccataattgatggtttatttagttttttcttcctaatctgcttgtaagttgattccatatgttccaccacatctattggcacaacaggaagtgttggtggtacatgaatggacacaagatgagcctgttattctctcaaatctcgaatctattcctcttgttgtctaatcgtatcttgcatagcaccaattacttgttcccagtgttgagatggtaatgggttttcttccgtaccatctattctgagcccagaaaacttgctaatcgaattgtttgattgccctggctgcataatttatcacaaatttaatccacatctttcaagcatttagaactcaggcatatatcaatatcaatatgcatataccatacacatattcttatcataatcatcactatgttatgtaacgtccctgcttcaagcctccattgggcccttacacccacgaacttatggctcttatacacgagtatgtcactctggctgcttcctggattgacgactgaccctatagaccaacacgagtgtttccagcgtgctttttcctcactcacacgcttcctgggaaaacttcccaggaggtaccccatcctaaaattgccccaggtcaagcacacttaactgtggagttctttcgtgatgg

SEQ ID NO: 316698 - DNA, 602 bp, Cannabis indica
aaataataaattttaagttaataaatatatatttaatattataactttatattatacacatattataatactgttaattaaactgattttattaatttttttttcttcataatttagatatttcaatttcaatattcattatattttttgagttatttaattattaatttataaaatataaaattaaaaaatagattttaaactttaaaatgtctaatttactaacaatattaattaaagttggatacaaattggtattacgaaattagaatgtatcaatcatttaaattcaaatatattttaagtgtgtataaattattttgatatttttaattaatatttattataaaattcaaattgtatatcatagatattatctattaaatttatttaactcaaataaagttatttttcttacgttaatatttactgtattacacttgtagttatatttaaaatatttgttattactatatcttatttgtagtcaccattaatatttaaattcattattattatgatatctccactactacaaatattaaaattcgcgacgatcctaaaaatgatttttttaggatcgtcgctaaaaaaattaagta

SEQ ID NO: 316699 - DNA, 883 bp, Cannabis indica
ttgattagatagttctttgctgtgttagcccatattgttggtgatcactagttaatggacttaatatctgtgtgtaaagtgaagcagaagtgtgtgcttttttggttaacaaaatcctttgatgagcaggtcctgtccaaactagggttatgtagttaagttctccccttaactctagaaatacatatattgtctcatcacaatgtataatattattatattattattgtgttctatattatatacaaattgatgatcttgggtttatatattattaatttttctaacaaccatgatatgatatggtaattttgaaaactgctactacctagctatttgagtattttttataggacaaataagatttggagacttttggcagcttattaaattgtttgtattggtgaagctctgaaaaaattatataccgaaaacacaattgggcactgtacttcggccgtagtacctcacttaattaattaattaaatcatctgttaagaggtattaatttaaccttaacttccaataatagtttgatacaaaagagaaagtggcttgaatattaaaaagtatatattaataaaataattagaagttgccaaaacatgcatgtcatactatttaactacgtaattatagtatagtatcatgcaagttgtgaacaagggccacttgtttaaagacacgtagtatatatatataaacgtggagttggtgtttatatataatttcagacaagttattaatttgtatgaaccacaacgacagagatgtaggatttttaccgttttaaccctacaccaacaaagccacaatatcagttatcaaggtcaaaaatgacctttcctagtctaagtaaacccttagactaaacggcaccgt

SEQ ID NO: 316700 - DNA, 1673 bp, Cannabis indica
ctacgaaaagaaaaagtagtacgtagagaaaataaaaaaaaaaaaaaaaaaagtgatgtgagagagtgaaaaatttattttaaagtagaaaacaatattttgatcttaatattttgttttttaaaaactgttatctaaaaacaatgtcaaatgcacttatttattatttgggataagttgagaaatacaatgagctatcctggttcgaggaggtaccgtcgccgattgtgaattgctgctttaataatcttgtgtgattttgatcaccgcgtaaaaaaaaacatgaaagagaaactatttaaaacaaagtaactaaattttaacctaatttcaaatatttaatgaggttttgttttagaaaaataaaaaataagtaatacaaggatttaatataaaatatgagtagaataaaataattagtaaataagatgtgtaaaggaagattattaagatattagaattcacaaaattcaagttcaaataatatttataaatatattgattctcaagttttagttataattaaaataaatcacatttattttctatttaagcacaagtttctttctaaaaagtgagatttttctttacttataaaatatataatttttaagtattagttgtgtaacaacctaatgaaactacaagaaataaaagaaattatgtgttaggcacaatataatatttatactctaaggattagatgtgaacaatttaataaaaaacattcaattaaaaaatattatatttttgcacaatgaaaagctaagtaaaaatctgctcaaacaatcaagaatatatgatattaaatatgaaaaatacatattcataagagaaatccatagacaatattgcacaaataaaaaatcggttatattatttattaaataatataatatttaagattaaaattgtgatatattatatatattattatgagtataatatataaatgtgattgggagtaattacatacatgtaataattactatataatatgattgggagatacatacatgtaatattcatagaaattgtaacataagaggtgaagttactatattttgtaacttccacatgatcaccaattaagtgtgtaaaaagtggttaaacaacttaatcttttgaaattcaaagctacaatgcaaatatagctgttggggatttaattttgtcatttataatgtgtataagtgatattaaataaagtgataatgatttagaatggtttggagaattatttacaaaagctgaaaaatttagtaacaagtaactagttattattttttttcagctttaatgttgaaatattttttttttttaacttatgggggtgccttttaataactctcataaccttcaaatcatctatttaatttcatttatagccaattaagaaatgttaacagttattgggtgtaggatgtttgaatttcaaggtgtgtgaatcataaacactacaaatagagatctttttgttcatcctttaagacacacttatctcttctatctttcaaacacaaagctagttctaagtattgataattcttagaagtattttcacaaagccctgcgtattttataaagagagaaataatcttaaccttgttcctgttgaaaatcatgaggttccatctcaaaactaattgggctcaatatttatatatggctca

SEQ ID NO: 316701 - DNA, 1371 bp, Cannabis indica
ttttacaccgagcttaagccaccaccaacttttcagccatgttccgatcaataaagccaaaaccaaactttcgttcttcttcaaatagagtcgcatcgacatttatcttgatgttcaaaactaatttcgtccaaagctcatttccgtcacttgccgctagcagatgcagcagaggaatatttcccctaccttgagctttaatccattgatcaagactaaaatcaacaaactccacaatctccaacacaccccttctctgctagttccaaaccacgtcattcctagccgaccaaatcgcccacaacaccattaagacctgacataatctacttccatcaaccctcttaaccatttcctcaatccaagctaacataaaaccaaaattctttccaactctcctcacgcctacaatttcccagccgcgctccatgcaaattgacaagaatcaaataatgaaaatttgcttccgcaaatacactacacatgggacaattcactcccacatctacatatttttttttgtaaactcatccacgaaggaagaaatctcatcaatgatcactaagctaaatctttaatttttggaggtactttcaattgccataagcgtttccaaaagccaaaattagcatccataggataagcacatgtgagagtttaaagacaattataagcactatgaactgagtaaaacccatttttctcaaattgccaataccataagtcctcctcaacgtcaacactcaaagggatacctaaaatcaccccttagcaatttagaaaataaatcacccaccatttcagaatcctacgccgttggccccacttgcaacaatctgttagctaaaaaattctccaagcccaagacaagaggaattggaataggagagtccaccacaggcagccaggggtccttcgcgatactaatcgaaaccccactctccacccttttatgcagcccctttttaagaatatctttgacaacaagcacactcctccaaatgaaacttgggtttgatctaagcacatctaaaaggaagtctctattagaaaaataacgatctttgaacactttgctaactaacgaattaggcctaaccataagcctccacccttgcttaccaagcatttccaaattaaaatcccttagacatcgaacgttcataccaccaacatgcttatgacaagttatgcgacctccagacatctaaataatacccctcccttcaccactattagtggctgatttccactagaaattagctattaatttctctaccaaatcacataaacccacagggagcaagaagacactcataacaaaagatggcaaggcttgtgtaatatcccagaaaataaataatatttaaa

SEQ ID NO: 316702 - DNA, 869 bp, Cannabis indica
atttctacaaaaaaaaaaattaataaattgtgttcatttatctacttataactaaattaagatttatgctaaaataaattaataggattacaatccaactcattacctgattaactcataatatatataaactctaattatttagcattaagtttagcatcgggatattataaataatgttattttaataaaaacagtaatttaacttcattgaagataaaattataatattaaaaaatattttgataaactagagtactctttttcttttttgaatacttgattcaagcaatttttgtatgaaccctaatttatgtgagaaatttggttaatgcatattttatcaaagattttgtttttattataggttcattaattaaaatgtaaggtgaaaagtacaagttagattacttaaattagaattaagatccagcgggtccaataaactatcattatatcactgtttaatcactgttttgcaccatcgcaatataataatgagtatagtactatctttttattttttttattattttatatatttttatataaaaataatataagttgtaattatttaaaattaagatatatatattttaaaaaaataaatataatttattgtaaaaaaatatgaataccacgattatttattaaataattaagttaataaataatcaaatagtatataaacataattaatgtaaattataactaatttacatgtcaaaacaaaaacaaaaagtgcatcataagattctccattaatatatgtatgtgtatatttcttacaataaaaattaaaagtgggcaacatccaattgaatttaattaaatatatatatctaattataattaaattggattgaata

SEQ ID NO: 316703 - DNA, 597 bp, Cannabis indica
aaattaaaataataataatatgtattgtacatattttaattttttaaaaattaaatttaaaaacaaaaatatcatttttatttttgtgatgaataaattaataaactacatctaaattaataattttttttcttagaaaatacgaaataagcattgagaggtgatatataattatatatattatgtttagatttataattatacactattatttatttatttttttatgagacacactattcttagttaggaaagatccaaagagagacacacaaagcccacgaaacgtttgttttgatattctttttcctttataaaatgagctgattgacccacaagacccggcaggaatcattgatttcgaaaagttccaatattttgaggattgaaagaatccctgtgttttcgaataacaaatcaccaaatattttcctttggaataagagacactcactttatgctatgagagtatgagaatcattttaatagggaaatttgaattcctatacttacattacctaaaaatttgtcccctaaatgcaaagttattaaaattggtaatatatgaccattttactaattttcctaaactacccc

SEQ ID NO: 316704 - DNA, 514 bp, Cannabis indica
cccataacattcaaaaaacttgatcttgatcaaactacgaccattattcaacattctactcatccacatccaatgaaatatttccatgttgactatgatcaaaccgctcattgttttggttgtcgatcactaattaaatctggttgtcaagtttatgtttgtggagaagatttcgattatgttcttcacaaatcatgtgcagaacttccaaaagaaattcattatccttttcacttgaaccatggtcctcttactctaaacataaaatatttcaaatggttcaatgataaatgcaatttgtgtaacaaaatctacacaactatattcattttcaaatgcaatgagtgtagtttttggttatgtttgaaatgtaatgaaattgcaatgagagcgaaaaggagtatcaagtataagtatcatgagcatcttctttgctttgcttctgatggtgatatgtttattgacaataataatcagtgtgacagctatgattcttattgcaagcaaacaccaa

SEQ ID NO: 316705 - DNA, 1288 bp, Cannabis indica
tataaaatatatgtatatatatttttaagatgtaattatagatgatggagtggtataataaaagaaaatgtctgagcccgggttcgaaccggggacctctagtgtgtgagactagcgtgataaccgactacaccacccagacaattggtaggttgggtatatttttataataagattaatgaacgagtaaaaataagtatttttcttttctttgtcagtaacggtaagaaccacatttgcatatctattagcgaaatatatacgtgttcggtagaacatttatacgcctacgtagtcattgaataaatttttgacaaacaaactaaacaatatgcttatgaaaatctgagattcacattaccacacatgaactaaaccattttttttttggaaagccacatgaactattttcctatctcagagttttgcatggatgatttcaagctgagaaattatgttttcaaatagtcaaatgttggcttcttgtgccagcaatctcttagaagccaagtaatatcacaaagtagagccagggaaggaaactacaccatttgcatatcctctgcattctgcaatttgttctgtatcctcttctacaggtgatggtcttttttgaaacatctaattataccttatattacacgaacttgcttttccagtcttataaccattctcagcttcatcttgtaacacatttctataagtcaaaagggccttctaccatttctcaaagggagaattttggtagaaacaaacaatttattattcttagtgtaaagatcatgttggagtaccttgatgttaaatctctgtggattagagcatgtggtttatggtgatggaaataattcattcctctgcaagatattcagtaagtagaacaatagcagccaaagttgtgggtactgaaatgccggtatattaatgactcctaatttatgtttttcaaatataagttttaaagtcatttttttttttaaaatataattaatgttttataactataagtagcactatcacatacctgatatgttaatttcacttactactaattgttttgcaattttgcgttgtgtcgtttggtaacacttttgtttttaattttttaatcacaaaaacagaaaacaaaagtgtgttctgtaaagttcattttttgattttatttacgtcaggtctataggtccggggtcggattcgagttcaggtcagaggtcgggtttagcgccagggtcgtggagggatttgggtccgagtctgatcgaagtccaaaatattgattaataaaaaa

SEQ ID NO: 316706 - DNA, 1805 bp, Cannabis indica
aacatggactactccactcattgccaattggttttgagatagaatcccatgattctcaactattattttgtggtggtattaatgtgataacaataaagaatgtggatgatattaagctagttttacactatattataagatgttattatacattttcaaactattttgtctttgttttgtaaaaaaaaatgtatttttgtctcttatcatatgtatagatctataatatttttcgagatacaaaataagaaagaaaattaggaatatttcttaatatatatggaatgtaataacttctatcatcatatgtatatacctcttccaaattcctattattatatataatggagatttatattcaagttcaacttttatgatatttttctttattcttttatttgctttattaacaactagctgctttttaaaaaatattattctaactttttttttttattgaaggtagatatgtattagattcttttcttttaaagaaaataacctcatatattaaataaggtataaattctctaataatggcctcaaattaaaactcttatgttatattaattgttaagctaaattaggagtgtatattaaaaaggtcatagttgaaactcaaaactcctaagttattaattagttaatatgtaatattattacatcacactaaaaaaatttaagctattacttatgaacaatggataaattgtttttaattatacaataacttgtgctcggtagatatacacatcacaacttttttttttttttaatatcttacttactatatataaatgactatcaaatggtacttagttgtgttttaactgattgttgtgtattttaacagagttttcaaacttaataattaagataaatactattttagatcctgtattttgtaaaaattatcaattagacaatttcaattttaagacaatttcaactttgacaattttattttttaatataattaattttaaaataattttaaacacgaataaatacaaaaaatgtaataagttttatcataacatctctagatcaaattattattaagttttattttaacaaaaaatcagtttatggtcctatatttgtacaattttagaaaatacagggtccattttgttatttaataaaacagaaaatttaattagtaacttttacaaaacacaaaaatttaaaatgatatttaccctaattaaaagtatttaaaccaaaacagcacaagtatatttatatctcatcgaattttgtaagtttattttcttaaatttgctctctagcttttacaaaattatattacatatttatatatgtttgagctgcatgcatgcaattacatctacaatgttagaattcacgcacaaaaatattgattaaagaattacactaattaatatcaataattgttgtgtatatatatggtaacatatattaatttatgattgaaaaatagaaaattcaaataaggccaagtcaaacaaagatatatagaatattttcacgttgaacatatattgtcgataagaaaaatacttgaaaaatatatatatatatatatagagtagttagtaatcctaaattccaaaccttaaattttccttacctatatatatatatgtatgttataattaattataagctcagttcacaaactatttaaatatatatatacatatataattaatttcataagtgttggtgtaagtatagcataaaatatgtatataataagttgaaggggaaaaacatatatatatatatatatatatgtttgtttcttattagttgggtac

SEQ ID NO: 316707 - DNA, 1345 bp, Cannabis indica
tttgtattaccaaatatttgtataatgatgtttattcgtggtagatgccagtagtgatttggatttcatcttatgaacaatgcgtgatggtttgattctgattgtgtataaatgacagtattcgaataataaactatatgattattattattacttttattgctgagtccttgtgactcacgagtgctatgtggtgcaggtaaatgcaaataaaagctagattaactatgaggtaacagtcttctccagcaatgtacatattgacctcaccggcctacgtgccgagttgccaggagttattttggactaggaacctttcccaagtcgaccgctatgactcgagactactcaactccgaggtgttatttttcttgctacgtgtcaaacattgatgtcaacgtcatcaggaaaaatttctgagttaaagactaatatataatcaaagatacataaattattatagaaattgatatatatatataaggatattaattttctatatacataaattattgtttagcagtgaaaattcttagtaaattattatgttattgtaacacaataatattcaaattatttttttggccataaaattatttaaattattatatttatacttaaatacccaaattatttttttttttcagcgaaagtactcaattgtaattttgtaagcaataatgaaagcataatttcggactcccaattcatattagatagaaaaaatcattaagattttatgatctgctgcagaacttattccacataaatattataaacataataatttcaagaaaataattttcgataaacacaataatttagatactacccaaataaaaaaaatatatactttttgaaatcaaaagtaaaataatttgaatgcatattcaagagatggatttgcttggctgccctaaatatataatttgaagccaatgaagaagagggtagagaaagatcagagggaccatgtatatataaatatatatatatatatatattgttatattatttatcaataatataatgtgtagattaaatacatgtaacaaactaatatgtaacatatgacattatatattatgtgtcatcattttgtaatatttggaggagttgttactatgagtaacttccaccattatcaccaactttaagagtgtaaaaggtgttacacatctttatttgaaattcttaatggtataggagttatggtgtgcatgagttacatctctataggagttatggtgtgcatgagttacatctctttattgagtccataacaaccatggaggttatgacttatgaattttgaatttcaaatggtgatatcctaaacactata

SEQ ID NO: 316708 - DNA, 936 bp, Cannabis indica
gtcttacccttttgaaagatatctacccagttattaaaatgaataattcccatgttttcttaaaaataataataaaataaaatgaaaaggttatataaaatagagaattcccacgtgtcatgtcaccatatgtgcatttgcgcacatggatgctcgataacataatcccaacttgcaagcgcagtcccttccagaaaatgtcaactcatctattatctaaatttttttaagggttttaaaaaaaatcattagtctacaataatattttggtagaatttttgtcatttttagtatctaaactaaattaatttttttttttttataatctacttgtttaagattatttataaatatttaaaaaaatttaaataatataaataatataaagtttaaataattattgatcacgtgtataaaataaaataattttacatataataaaatatttaaattttatttgtagtattataaataattaaaacatttcttaaaatatatagatgatcttaaataactattcatacataattaaaaaaaataaaaaaattattttcaatattgaaataaataaaaaatctacaaaatactattttaaaagagtatactatagacttacccaaaactattattaagaggaaactttaattattttaattatagaatactttatatttgttttgcattaaaaatattttttttcaataattgttggtgttgggaggaagattaactggtcatgatctcttttcggctgtgccacagttaataagatttttaattgctctgataaaatataaagaagaaaacctcctcttccactgcccgtaccatcacaccttactaccattctcttcaactataaataggcataagggttctaaattgtaatacaacaccaaaaagccaaagctaaatcaaataaaagcttactgcttc

SEQ ID NO: 316709 - DNA, 943 bp, Cannabis indica
attattccgctgccatcaatgtaaggttttcttaactttatatgtatttagtagaatacataactctctcatttcccaaaaaaaaaaaaatggaatcaaatacttgtacaattccccttaaaagaaaattacttgccccacaattattgtatactcctagacgtatgtacgtatgtgtacgtatctgatttctttatttattttcttatttgaataagtacgtatctgattttaaattaagtttattaattgaataagacccctagctaggcgctataaatattttgattttcgttacggggatgtccatataaatgcatgtacgtatgcagtattaattatgggaaaaaaaatcatggtggtatattttaaatagagcattgctattaggcataagtggtgcctagtaccttctcgacatgtcgggttgcgattgactagcgatacttcctaaaagttattatatcaaactatatgagacccgatatttagttggaccaatagcgatattaagacataaaaaggtattagacaccagtagtaccctttaacatttatcttttacatatatgtcgacacatttactatatactattatagaaatctaataatatatagtatgttaatttaaaagtaaaagaagctaataagtttcaccatattttggttttggtcacatcatgatctgaagcaattcatgcaataataacgaaaaaagtacctatatatatttatatataaatcctaggctgtgaacttgtgatacatcacataatttttacgtgcataactctacaaactacacatatccttctacttatgcatgcacgctatccataatataaatatatataattaatatcattacgtacgaccaagaaaacccacgtggtagctatgtgtgtctctaaagtccaatattaaatatacagagaaaaaggaa

SEQ ID NO: 316710 - DNA, 640 bp, Cannabis indica
tttttgaaaaaaaatttgtgtgacagtatttttgtaaaagttaatccaaatttcagtatttttgtaagttttccttagtctattcgtgcttacgtaccatgccttttgtgcttttcgtgttgtgtcatgtttaatcacatattttttataccgtaccgtgtcaatttatagcatcatgttgtatgtgcctaaacttttttttttgttttttcgtgtcgtatcaaagagcccatcccatatttataacactacttagaaataaaaaaaaatagaaaagtaacataattaattgttaatagcaattgttcgactatatatatataatcccaccaagtataatatttatacatttactcacaatcactcttgtattttcttttggtattatgtaaattaaaagaggtgagagtcatgagtaaactgaagagtgactaattaagaacatgtagatgaagaccgaaaattgtcatttttagttagatttacaccatgttacatatagttcttactttttaattttttgtttaaaaacgtatccaaattccaaacataactacaaatacaataacatttatacatatatcaaaaaaaaaaaaaaaaaaaatctagtcaaattagtaacaatgttattattaaaaaa

SEQ ID NO: 316711 - DNA, 2363 bp, Cannabis indica
tactgcaaaaacataaaaaaaaaaccttatttctccaaatgctatagaacaccaaactaagtcataataaacatatgcaaactgaaaaatctatcatcaagctactatttcaaaaatcacaattaaagggagctttgagcttaaaacctcaacacaagctcaaacataactacaaccaccaaaacctactctaaatcacacaaacaacaacatattaaccctagaaactcaacccaactcatctcaaacatacagaatctgaaagcataaaaatttgcatgaaaatctaatcctttaaatatgaacttcaaagaaacttagaagagaagcttaccttagttcttagcattcttaaataccttcaaactagctgaaatacccaaaattaagaagcaaatggactggtttcttgggtctccttagggccaaataagaaagagagaaagagatggttttggacttgatttattatattttcttctatttaatttcttcatataatatccaatatagcttaaggataatactaattcccattaattaatctaaagccaaaatgaaaatcactcattactgtaccaacaagtaatgtacttacttagaagtaaaatgatctaatctataatcctgaaaatacccgacataccaaatatctaactatattaccccaataattctaagatactaaaccatatctaagtaactttacagaccaaacgtcgtattccactattactgagcataaaatataaaaatcataaaatctcatatatatcacaatcaatacacctagaattcaaatatatctatataattacaaaaatagtaattaaaagcctacttctgataataagtcctaattatctgctattctcaagataaaactatgcggtcattaaagatggtgtctccaaatatgtgagccatagattaagaaacagaaatttaaattaatattcaagcatttgggaaaaattgatacactaaacctaagtatatttaaattagttagatagacaacttttttaataaacccaaaaatacctctctcataactcactctcctctctctcttcctctattctctctgtctctcccattctcttcttctcacgcacacgagaacctagcaaccaatggctgccaatcacagcgcctctaaccaaataccaccaacccaccaacgactaccaacccaagacccaagatcatcaaaccacgaccatcgcgctttgaatgtaagttttctatttcattttaattgtattatgtgtgatttaggattgaaatgtatgattttatttataggtttattgatttaggaataaattgtatgattaatgtctgttatctatgagttgatattagatttagggtaacaaacggtcatatctgagttttggacagaaaactagtttttttgccaagctcaatggtggcccgatgtctttctattgttaaaattagtaaaggttaaagacaaatgtttaacgatggcctgatgccacctataaatgtaggatgtggttcgatagtggctcgatgccttcccgacgagcttgatgaatggagcttgaaatttgtaaatgtagaatatggttcgatggtggcttgatgctaccgttttcttatgtacaaaaccataaaacaatgggtagcatcaggccaccatcggactcccatcgaaccaccattggtatggatggaatggagagtatggatggtgaagttataagggaaaggagaaggatattatgggtattgttataccctaaattcgactaccattccaatagaggacacgtgtcaggttaagggaaatatggatcgatgaaatctcttttgattgaataactcattaattgcgtaaataacagaatatacttgcaactcgctgactataaggtcatatgtgaggtaaagatatacaaattgttgccacgtgtattaatgagaaaccattcgtcatttgatgcataaagcgagacatcaactttgttacacctgagaagacgaaagccatgcatatcgattgagaagacatttagcgtatgatatacaaactaagtataatagttgggcaaactcaagacctaataagcgaggcacttatatcgctataggaaggcacactcctgtgtctttcaccaattaacttcagacatctttcagtaagacttatagtcttgatgagtcagaagctcacattcaaatgactgctgaggtgatatttgtaaataagaattgcgattgtcaaaatgaagcgttaagtcttcaaacaaagaagcaacgaggcgtacattgtcgacctcagaaagataggggaaaaagctccagctcgctatcaaggtcattggaaccga

SEQ ID NO: 316712 - DNA, 2348 bp, Cannabis indica
aaataccctcatattccccatatggaaggggactcgcaaataacatagttgaaacactgctaagttcactcttcctcttcttcacaagaaacatagagtgcagaattagagtttcctccaaaaatattataaacacatcaaaaatgccctaagatgactaatagattgactacatggacttaattaacacccgaactaacgtaaaaaaattccatctctttatttttatattttattatttctttagttcttaaatattgagtttctgaaaatctcgataaacaattgtaattaccaaaaaaaaatctttctagctttttttaaaataatacaactaaaatacacataataatcaaagtaaaaactaattagaatatataactaagtatatacgtgtattgcacgtaatattacctagtacataaataattttatataccaaataagaaaacgtaactaatcattgaaagtgattttaaattctcttctcaaaaataagtaatgaattactgacaaataacttaaagatgaaaaataaaattaatagtgagaatgatattaataaatgaataatcattatgttctcgatgatcatatctacaatcccaattaattaagtaatatattttcatcttattttcttacacggttttttcatataaactcatttatcattaaatatctattgattctcttctaattggttggaccgtaggtgtgatgatttacgtaacggatgagtattggctcaagttttagatgacccaactacgccaaggaaaagaatagaaagaagcagtggactccgtcaaatagtttaaaaaaaattatgtatctcattagtacaaaatttattttaaataaatctttctttaccctctatgttattattattataagaacttccaagactcactttttgttaagttattcaagccttaagtttatgcaagtaatatatattaaaaatgtgttggaatagaatgtcttctaaaaaaatatagcaattgtataatattaatatatttataaaaaaatttaacgaaaaagagtatttttttttcttttcaaataatgaactagaaaaagttttctttgaatgaactagaaatagtacgtatttaattagagatatttaatggaagataaaaagcatcaattaaaccaccttaacaaaaatgataggacttgtatatattcaaatatatataagcttatttattctgatctttttacctcccaaggtctcgatttagagtcaatccgaactgttcttcgagggcttactaagcgtattagtcatcaacaatacgagtatcttgctaaacctttcgattttgttaaggtcagaaaagttcttttccaactttcaggggacaaagcccctagccctgatggtctaaacacgttgttctattagaagaattggtctacttcaaatcaagatctttgtaaagttgttcttgatatccttaacaatggtgccaatctaaatcccatcaacgagacttttcttgtcctcatccctaagaaaaataatacttccaaaattcgagatttgagacctattagcctctgctctactatctataaagttgttgccaagtccattgccaatagactgaaagagattcttaatgatcttatttcccacaatcaatgagcttttcttcataatagaatcattttcaataacattatcattgctaatgaggtcattaatgccattaataataggaagaatggcaaaattagttgggctgctcttaagctggacatggaaaaggctttcgataaagttgaatgggattttattaggcatattcctacccacttgggtttccctataaattttatttctcttatttttaactgtatctcctctgttaattttaaactcagtatcaacaataacattttcccctcccattcttccctccagaggaatcaggcaaggggaccccctctctcactatctgtttctccttgttgcaaaaggtctttctaccataatctcttctaaaactcaagatcatctgttcaggggcatttctatctatcattctgctccttctatttcccatcttctttttgcatacgaaagtttgctttttactcatgtaaattctcttagctgtaatcagggtcggtcctaaggtatatggggcctaaggcgaaatcaaattttggggcccctatatatatagtttaactattgtaaaaataatatttctagtgcttagtgtaatggtaaaacttttaaaaactcttaagagctccaaggttcaatccctcataactatacattaaatattttttaagaaaaattaaaaagtagaggttgggaa

SEQ ID NO: 316713 - DNA, 817 bp, Cannabis indica
gttggtgtggttcgtatcacctggccgacaatccccaagtatagagttggcctaggctggacaggtttatgcccagatattgtgcttggccggccagacctacattgagtagtatctagccgcctagtactcctccatggctggccaaacctataaggggcagggtctgactccctgtgacgcctccatggctggccagatcagtattgggcaagatctgaccgcccatgactccttggttgactagtattgaatgtgtgttgatcaggggtagatcatacaaattactggagtttaggttgatctagatgcccgaagtgataggttttacttcttgaattgccatttttggtgtttccacgcagtcacattcctcgtcggtcgaagatcaacctctgcgcacctcgattcccttggggaggatgtgttgtaccctggccaaccatgggtactcctgctgatggctggccagccaatggtcgtacagtgagggttgttgttgagccaaagatccctagttacccccaggccactgattgctgggatctgtctgttctcaccatttgacctttgagcaaaggtctgtctgttggaattattttacaaggatctagatttactaccatgtatgttgtttaacatcctaaatatgaatttctaaaacaatgtaaagaaacacatataaagtttgagaaacattacagtgggtacaacagaattaaatgactccttccactcagatctctaactcttgtatcctttctgtagcagagtatcaccaagatctgagcccaaaactccttccttgtgtttgtat

SEQ ID NO: 316714 - DNA, 835 bp, Cannabis indica
aaaaaaaaatccacatggatattgctgttcccagattcttcaagttgtaaatgcttttatcatatattttgaaaaaatatttgtagcattattatttaactagtaaacgggcttcgccgtaaatattataaaaattaaaattttatatataaaataaattatcatgctatttatttatttgtttaattagagaatcctgccatttatttaataattaagaaataatttaagtgtgtggttgtattttgtttaatgatatatattaaattttaatttgtaataattattttaataatatattagtaaattttactaactttaatttttttaatttgaaaaataaatgaatgttgtagaaaatttcatcatacaatttttgactatctaataaaaaaagtaaacaaatagatattttcaaaaattatatagtaaaaatgagaatttaaagaattattacacaaaataaaggtgtaaacagaaaacaatcaataaattaataaaaaactgattcagactatatgagcatccccattcggaacacttttgagaaatacttggagcttccccagcatattggtcgcttaaaaaagcaagtcttcactacctgtaatataaaatctagaaccatcttaacaagtggaagcacaagaccttctcgaaaggtggcaaagaagttctgcttaaatcggtcatacaagccattcccttgaatctatcatggctaatttctggtgggctttcaatgccaataataacccatccatccactggcaaaattgacaaaaactctatctgtaacgccctaaacaattaggcacgctacccaaaatactta

SEQ ID NO: 316715 - DNA, 1072 bp, Cannabis indica
tgttagagccaccattttcatgtaattagtgactttagttttagcagccacatccatcatgcgttgaataaacttcttcaggttttctccttgttgttgcttgatgatggtcaaggagctagcttccaagtcatagtccttggctgctataaactgctttctgaacattacttgtaggtctctctagttgtgaatcaatcctggagacaacctcttccactagtcctctacggacttactgaatgtcaatgaaaaacatagacattttacatcatcactggccttagaaacttgcatgatgcggttgtatttcaaaaaattctccctggggtcagtgcgtccttcatacagctccatctaggcattcttaaatgcttcgacaatggtgcatcaatgattctcttcacacaaggctctatatcctcttcctcagagtcagatacgacacaattttttttttctagaaatctttttggtgatcttcatcatctcctcaactttatgttctaggcattaagtcttatcacaaaaggattctcctccgcgaatgcaatcgttgatgacgtttctcaaatcatttttggggggtcttgcttttttagctttggcactttccttcttggcattcaattttctttggagatcatttatggaaaggctttttccactgtcatttgataacaaatgtacttcttaaacatcctcatatgggatactagaatcactaagaggaggtgatttcctttgagactctagcttctatactctgacatctatcttgtgttttcgcgtgactctgcctagaattggtttggtcaccgtgccctaaggcatggttacctttcctcttctattgaggttggtcagtagctttagactttttaggctattttgtggaaggattgttcttttgttcttcaacaacgattcctttgtctttgtctttgcgaatgcttgatgttcttgctgttgggttttatgccctaaataaaactcttcacaatctgattagttatcaagtttaatatgtttattacatctacacacagaatcagttaaatccagatcatat

SEQ ID NO: 316716 - DNA, 1277 bp, Cannabis indica
ggcaagtttgaaggaaatttagtcaagggaggtatactcttacactgtttaaattcacttctgaaacactcagctgtgctagtgcagcccctcagtaagtacgaccttgatgaatctgggcgagtcgttacgctggatattccactgcctctgaagaattctgatggttcaactgctcgtatagaaggggatatgggactgagtgaagaggaaagtaaaaggttgaactccttgttggctgatttggctaacaatatggagttgtggacagtgggttatattcgactcttaaaacttttcaaggaaaaagagtcggaacaattttcacctgatgaagagaagtatgaatgggtcccactgagtgtggagtttggtgttccacttttcagtccaaagttatgcaacaatatatgcaaaagagttgtttcatcccaattacttcaagcagattcactacatgagcatcacgatgcaatgcaaggcctaagaaaaagattacgggatgtttgtgcagagtatcaagcaacaggtcctgcggcaaaacttctttatcagaaagagaaatcgaaggagccatctcgacatctcatgaattatgccagtggaaggtggaatccacttgtggatccttcatctcccatttcgggagctttgagtgaacaccaaagattaaaactggctaaccgacatcgttgccgaaccgaagtcttgagcttcgatgggagcatccttaggtatatctgaatcttctcttctttaccttttacatgtggcacatttctctatttcctaccatgaaattgcagttaattcggtaacaggatatgcattaatatttcttattccaacagtgccttctctttaaaatgaaagtaatgtgttcttggtatgctttctgcatttgatgtgggtggcatttagagataatcagccacattcccaacacaattggttattggatgcattttttttttaatcaatacataccaacattgatatagaaaagggtaaatactattttggaccctgtgttttgcaaaagttacaaattggaccttctgttttattaaatgacaaaatggaccctgtattttctaaaattgtacaaataggaccctgaactgttatttgtcaaaataaaattaataataatctaatctagagatgttatgataaactagttacattttctgtatctgttcgtgttagaattgtcttaaagttggttatattaaaaataaaattattgaaaattgagctcaggtttgtcatttaat

SEQ ID NO: 316717 - DNA, 422 bp, Cannabis indica
ttttttttttgaaagaacctcggttcaaatctcagtgcgttatattggaaattaaaatattttaataaacaataaagttatatggaattattgatgggcagtagtagtttaaatcatagcctacgtagctaatttaattaatatgtgtaataaagttggaattaaatgtttccaatatttagttttgaacttagattcatcaaggtcatcattcatgagagacttaattgcctaataaaacctcaaagggactaagcatgagtggcctagatccttttaattatatttaggggtgttactgttaatttttttaaaaaaatttattaattaattattgtacctaaaaataccgtgctaaatattttctttttcaaaaaaaaaaaaattatgacattatttattataattacaataatatttgt

SEQ ID NO: 316718 - DNA, 661 bp, Cannabis indica
tattttatcttaattttaaatctaaggtcagatattacatatatgagaaaaacattatctcgttttctttattcaataataataataataataataataatacaataatattataattatatgaataattgatagcatgatttgagacttgtatgttttaaatagtaactgttttttttcatatacgtcctatttaattcgaatttccagtaataatatatgaatacgatgtgcttaattaaaaaataattggtatattgtaatttaattgataaaaaatagttatagtttatatatagtactgaatgcttattggatggatggtttgaggcttttagcatcttttgatatataagaagtaaactattgaatgaaatgtatatatatgaaagaaaagaataggttgaagagagatgatgatatattaatgctaagtctacgggaacctctcaatcgtcatgtgtgtgcacgtgtttgttggttgtacgtataagagttcattcaacatttttcatattaccaatttataagcaaatatatttttattattgttattatatattttggtcattttcatttgagataaatatcaaatttaattttttatctctcttaaaattctaacaatttacttatgaaacatggcttttttttttttttt

SEQ ID NO: 316719 - DNA, 744 bp, Cannabis indica
aaaatataattttttacaaaaattggtgtcctatgcaattatcctattattaattagtgtaattataaaattttttaagtaattttaaaaactaattatgcattattttacaagacaaaacttaattgcaatgtttgatgaccttagaagtaaaactagacttggagctaaacatgaaagttttagatctcgttcttagcttttaggaataacttgaatcgtctaattctgagttgtattgaagacattatggccaaaacactaatcaaaacacgtgactgaaatttttcaacaacaagctatcgagcggcgggggatttcgtggccacggcgaggacacgaattctaccaaatttcaaaattttatcatattttttttttaaaatgagatatttttaagggttataaatatgacttctagggtacaagttttatcacctttgaattacgaatttgatagagaaactcaaagaaggaggaagaagaagacagagattgggacatcgattattctacattattgttctttttcttctctttaaactcttactatttattatgattttcaatatcaaggcagcacaccccacatgcgcgcgcgggtggtatgtaacgcataccatccgtacagcgtgcaacttttttcattttcttcgatttttcatgctacttcatggaattaactttctattttttgtgtagttttgtatattaatttttgtttttcaaattttaaatctaatt

SEQ ID NO: 316720 - DNA, 2034 bp, Cannabis indica
agcaccaaagttaacacagatttttattaactaaatatataagcccttttatgtaataaatttactacagaatttaatagtaataataaatgaacacctgatattttacgtagttttatagttaaaatttacatactccacgagtctgttagggatatttgtttggatacagagtacaattttcaataaatgtacaatatagtttttctctccaatttgccatcctctttttctctgaattctgcccctatttataggtgtatagatggtcagttatttttattaggatctattcatttacaactacacatgaaacatggacattcctcacgtttcatttttatgctcatggaataatatttaataactagccaaccacttttagtctttatccttaaacggttatgttgactaagaaggttgtttctagctaaatgtgagttatatttcttcactatctttataagaaaaaatgataagtatatgcttcctctcgtaatgttcttcgtattgtgatgatattagcgaggtggttattctatcttgtaaagggcaagataaatgaatgtagttctcttttccatgcgtaagtatgtgggtcaataagttgtaagctcgttgatgtcttgtcttgtacgctcttattatgtactctatttatcctgaggtggacatattgtcccgttaataattacatccgttaatagttattattcttatgtcgtgtattcttatgttgcagcgagtttgaatatttctatcaattataattaattgaaacgagttatttaactcgcatttaataatgcaatttaattattataaattttgagctgattcatattccttttgtggtacacgtttcagtttttggttgataatcgaatttcgagtataacaacatgtgcattgagttcaaatttgaataaaaaaaacattttatagccacatttaataaaaaataaaaaattaaaaaaatattgtgactttaaatttaaattgtaattttttttttaaaaaaacaatgcatagccaaatttagtatgacataaaccattaaaacaataatttattggatacatattttcatataattgaaaaatatattagtgacaataactatcactaatcattttttttacttgtacatgtatcttatttttctagtaaagcaaaagttcataagaaattaaatcttactaatagacattccaataacttctcaaatacaaagagtttatttaaaatataaaatgttcatatctaaatctcttttgcagctcccctcatacatatgatccaatcttctttcgagtattttattcgctgtacatatttaaataaaataaaatagaaaatgagttaataataataacatatcatgcataaagatatatattgtataatttaatattgtacacatgcatttgcaataacttgcagtacgtactatatatatatatatatatattgtgtataataaaattttgcgtttgagatctaactactcgaagagtaatatgttagaaaaatattattaggttcatactttgttaattatttctaataaaatgacattttgaacaacattaaattcggtacggttatatatacaagtatatgtgcatatacacagaacaacaacaacgataataataataataataataataataataataataataataataataataataataataataataagtgtgttaaatataccctttaacactataataatatttaccaatattattatactaaaaaataataataacaaatattattacatatatcatttttattattattcccactaataataatatgtaccaaaatcaaaccaaatcacatattcatttaataatatccaaatatatatatattaggcattatgcacatgccaataaaattaaatattatatcatcacaaaaacctcatgcatatttaaacccataaatatgtaaaataataaaaatactctcagctaagaattttacaaaaataccctttctgagttagcg

SEQ ID NO: 316721 - DNA, 877 bp, Cannabis indica
tagaggtacactttggtaatacgtgacttacaaaatgtataactaattacaatttagaggttattcttatttataactggctcaaattgggacttgatcttttataacacattagaggttattcttgagtagagtattcttaaatagaggttctactgtattatttaaatgctatttttctgttatttttacgtaattttcttattgttgttataaaatactgtaaaaaatgtaaaaaaaaaatatttaaatgtaaaaaaataaaaaatttacaaaaaataataatttatgtaattatccctaaataaaatgtacaactccgaaaataaaaaaaaaaattgtttgaatgtttttaatctaatcatgtaaatttctcttaatgccatgttgattttttagatccaaatctaaattaaattgcttattataaaggattgagatttgagcatgttctatgttcaaaagtcaataaacaaagttattctcttcttgtccttttaaaacaaagtatttctttttaataacatatttataatacataaatcctacaattttctactaacaaaaaaaaaataaaaaatgtaaatcaaattaatcatattaatttaatataatttggaaagaaagaagggaaaaaaaataattgaattgggaaaatattgtagtgatggtgggatgaatattgtaatgtggtgcacatgcagtgacccatatatttatatatatatatatatatatatatgtgtgtatttatattaatttgtataagcatcatgcatgggagaaagatgtattatttatgaagagactaattttcacgttttggctttttcttcaacatttctaataatcagatctgatttgcttgtctatgaac

SEQ ID NO: 316722 - DNA, 558 bp, Cannabis indica
ggtggatatcctccatatatctttctagaagtcgcttagtgggagtatgccccctagtatggccgtatatcaaccttcattttctgtaatcagagtgcttttcttttagaaagacttataatatcttcattgcaaatgaaattattaatgccattacctgcaagaagaaagacaaggtgggttgggccgcgctaaagctcgatatggagaaggctcttgacaaagttgactggagctttgtcaaggatgttctcaaacatgttgcttttccccttaggtttgtttctctagtgattaggtgcatctctttagtcactttcaaaatcttaattaaaggtcacctctataatagttttgtttttattaagggattaggtaaggtgaccccttatccccttatttgtttctgttggtggttgaagggctcttaactgccattcatgttaaggagcagaaaatagacttctttggccttgtgatttgtagaaatgctcctgtaacaccctaactagtataggcgtgttagcgtgatttttaacgtactgtgcagctcgttgc

SEQ ID NO: 316723 - DNA, 1923 bp, Cannabis indica
acgggggaataattgtaaagaccctctaagtttaatatatcagattatttaataattaggatttaattatagaattgatttattatttatgatttgtatatattgtggagatttatttaagctcaatatgtactaattatgctatttatatgaatttctccgttttctatatttgtgttcgggagcggtggaacgcgatgttggaccattagagagtcacgtgttatatggtttagaatgtttatagtggggcatccttattagactttaaaaatatcgggaagtgtcgggatttggaaatgaccaaattgcccttttgtgtaagtaagcttttttctttttgctaagggtaaaatagtcattaccctagaaactcctattttgtcttttatggtttcaattatcaaattttttaggttttatattaagttaatattagtaaaaggaggtggtttttgagaaattagaaaatttatttatctcacccattctttctctctccttcgaagcatcaagaacccaacttagggttagattttatttgcttaattctgttatttccagcagtattgaagagcttcgattcaaggtagtacctcctagctttttttttttttttttgaagcttaagttagaagtaagtgcatgaatatttgatttatggtactgtggtgataattgttgtttgggtttaagttctgagctttatttgaggttgtttacgtggatttgagtgggtttcattgattgtttggaggtttggctaaggtttgagtttaagaactcaagcctagccctttaaaggtgaaatgagattttgtgtgaattgttgagttcttttgcttgaattgggtatattatagtgtatataggcgatctagagcttttgagtgagtttagggttattttgtggtgtgtgggacatttttgaggttcccagcactgaactggtcaaccggtttacggggacttgtagcaactagtcgactcgttggtccccagggaactagacttccggttgggaactggtctgccagttggaccattttccagaaccttagttttctccatttttgtgttatttggggtatttccatgttattcatcgatagggttattcttagttttgattttaagtccccgataagtgttttagcgtttctctcatcaaaattttggatattgtggtttagggccctgtaaagcgtcgagctacagttccactcaggttgaccggcacacttaaacttggaaacgaggtaagatagcataaagtatatacatatgtctgaatgcttgctattattcatatacactattaacactgaaagtgtgatagttttaagggtgttagtagagtgtagcgttttaggatagttatagtgttatcaacacgagtacaagggggtgcgttgtgcatgtggtacaacacttagtaactctcagaagtacaataatgaccctaccaacacgagtaggagtcggtactttagtgcatatggtaaagtggtcgtacttccgttgagaacgtttttaaccacttggtgagctcagtattagagctcaggacggcttaaacataaagtcggtctacgacatctatatatatgtttatgcacaacttagtgagtctgtcgactcatcagcttgctaccttgtatggtaaaggtaaagctaaactggaggagtagtgagttagagcttggcaaggattgtacatattgcgacggtgcagcctgaagggttccagtctttcaactttttgaattatattttgtagttgccctgtcgtttataaaaaaaatgttattaaactttttaaatagtaattgtagtttcagttgtgttttaaaactcgggatcccgatctataatattatataattataatataatatgattaattttgaattagcaagtttt

SEQ ID NO: 316724 - DNA, 1083 bp, Cannabis indica
tttctaagtatagaaaatcaaatttcccttttagaaactacagggtccatttggtcatttaacaaaacagaaggtccaattggtgacttttacaaaacacaaagtccaaaatggtatttacccaaaattctatgatccaaagatatagagatatcgtttggcaaaattgaaaataattttttaaaattaataggtatcgtttggcaaaattttatgttggattaaacctccacttgcactgataatgggcttaatacaaggatagaacagtaaatacatataaatccctattttgaccttgaagaaaacctagatctatatatacctgcaatcattcacaaccagacacggttgagagacattcttcaagatccaggagttaagaaccttgaagaagaaggagttgttgctctcacatgcacaagaaaacaagagagagttagtatagtgagagagaaagggattaaacactaaatatgtactaaaaacaagagattaccagtcgagaaattacctgtgacttggaatctccatccttgtacttctgaacatcattttatagtggaatcgagctctcaaatttgaggagcagctcaacggagacgtagccaaatttatttggtgaacttcgggaaaatctggtgttttctaaccttaatattttctggttttgtgtgtgtgtttgaggatacatcagatgtagtaagatctgatcttgtgtttgtgtttgatctgggatttctgggttgtttgagggtttggcttcgagtttctcagagagaaactctctgctagggtttcgatctaaaccaaggctgagggattgaatgagaaagttctcgaatcccttgttggttttgtctaaagtcaaaacgaagtcgtattgattctttctgactttgaaaagtcagagcaattaaaaggtcgaaattgaccttggtaaaactgattatttgtttgttggtgtaggccgaaattggaaaaagactaaatttcatacattttataaaataagttttttaaaaattgagtttaaaaaattaaaaaacagaatgttagactatatatatagtgtatgtaata

SEQ ID NO: 316725 - DNA, 1685 bp, Cannabis indica
aaacatttaattttataatcttataaaactatttttaataaatttgtaattgttaataattatttattattataagaataaataacattcttatttttttatcgtaaaaaaagaaattgttgacattgaacttgatcaactaataccgaagccttctttgttattaataatcaccacgtataaattgtaatagtcaataataaaagtgacactacaatttatagaaatttgacccccttgtttagcaggtaatgacctacgctcatttttgttgtattaattctagagataataccacgcaaattacaagcttaaaccttgtaatttttagctatggctctcttgaatagtacaatagtgagaactgagcattacaaattcaaaacaagtgagatttaatgaggaccatagactaagtgtctaataaagaagcgagaaggcgtgagagagagagaagctcagggcgtggggcttgaaagacttagagttcaagtccttttttgccttgcctaatgccttttatataattcagggtgtacaaaagatcattattcaaaatgggtaaatcctcaaaataaaaataataacttttctatcttatatttaaattacaaaaaaaaaagattattaatatccctaaagggtagtaaatattagcttgaagaagatcccctatttcaatagttagttaaggttgtctcgtaactaaatattagcttgcggaccccaccatccatatggcctcttgctaataggccagccccattttcagggcctaaccaacacacaaagttcaatggtcggccaggttttggtaaggccagggttccttggctggccatttctcccttgttcgatcttgcttgattgcttcaaaacccttggaatgacatgttatgcaggggaaatttgtccagtcactgacaggttgtactccacatggccttagttttgcccatgccacgtcaagtgggcgaaaattggaataatatttgcccctaaatctctgtgcagacgtctgtacggatagagacttttcaactccaaccttggttgtaagaaacattaaccgggcagctataccttgttggatatttgacttttcagatgactcatcttgatgacaaataataactttattgccaattattatagggatatatattttggctgcacattttcccattttcgaactgttggtcttctgcatgcctattttcttggagaaataactagggctgttcaaaaaatttaacaaaccgcccaacccgaataaaccgtccaaaccaaaccgaacaaaccgacaaacaatacaacccgaataactttacgaaaaactcaaaccgcccaatgaatatattgtgcaggttgaatattaatattcaaacccgcccaaataacccgaataaatcgatttacatattttttactaaaattatttataacataatatgtaaattatgtttaatagttaaactattttacatttaaagtttgtattttatagtatttattttgaaatttagaatttatagttgataattttgattgtatttgaatattgaagttgaaatttagaatttacatatgagtttatttttttattctattttttaaaaaatattgtttaatactttaatgtttattcaattcatattattttttaacattaatttaaactataa

SEQ ID NO: 316726 - DNA, 1136 bp, Cannabis indica
ttattgtttccatatgtttttactggacataaaactttaatttaaatttattattcaaatttctttaaattaaatatgatttattttttattcatttatttccttccgaactcataatataattaaatatgtacacgtaaattaaattttattttttaagaggacaaaaatgcttttctcatatgttgcgagataatttagtccgcagaatgtgctaatctcatcattatatatgtatatttatatactgaagttaatttctcccaccaaaatcaaacctacaatggaaacgatcaatattaattaatttatacttaatttcatattttattatttttctccacttcaaacaaacacacaaagagcacttagaattttaaagcgaaagaagtttaaagcctaatgattgtaaagacaaagtgcatatatattaatatatttatcagtatatatgttgtgcactaacgattgaaatggttggagactagactatgaagttctatttaatttaatatataacaatacatagaaacgcattgggctaataattaagttaagcaaataatgctaatatataaaaaataatattatatacgttcatatgacatataccagtgaactttattaattagtgttttttttttaacaatgtattagttagtgttgaatgcagtaatgcactatgaatttattaatttaatttttttttaaaaaaaaaaaaagtggaaggcaactttgtctaatactcattggtatcatattgttattacacaattaagtatcaagtttcatataacgtaagataataacttgtaagaaatatcgctaaccaattatcaatcgtaggacgtcacttgctatactaggtacccaataataatgctaaaaaaacaccccggctcacagtaccgtactcctctcagtgtaagaagccacaggagaatgtcacataaaaaaaaatgtcacttttagtgactattttagtcacaacaaaatttttttgtgactaaatgtcacaataaaaaagttacttgtgactaaacataacatttaaactcatattgtcactaattagttttaagttacaataagtattgtgactaaaaatacatatagtcacaataaattgtgatttt

SEQ ID NO: 316727 - DNA, 903 bp, Cannabis indica
tccttaacttaccaaataattagaaattgtatttcaagtcataataaggtattttccaaacatttacactacaaataaacatgttcaatcacccaaacacttcatacacaaactcaattaccaacaaatatactcatcaaaatctcaatatccatacacaagcccaatgattcacatcaaacttccagctctcaaaaatcaaactgaaactaagaattacacatttaaaaatcacccatgctttccaatatcaaaggaataaacaagaataacttcactagcaaaaacctagccaaacacaacaaactaaacaattttaacacatgtgcactcaagagtatcatcaaacaaaatattcctttaacaacttcaaatatcagaataaaagttcaacaagaaacttaggagcttaccacaaaattaaagctccaatcaccaaaatcaactccaaaattccttccaacttcaagcaaaatttctcaaatcaagagtttcaaaaagatgagtaaatgagaagagggaggagatttggccaagtgcaagggaaaatcagaaatgaattttattattgccaaaaatctcattttgttgcaaataaatcaaatggtcaaaaagaccaaaatgcccctaagaccattatatcacataagcataaatcaagggaaaatttgtcattcttcacataccacattctaatttttttttagattattccattaacaaaaaaaagccaaaaaaaaaacccaaaaaattatttcagccccgaacccggttcggccaaaaatactcgattgtgactataccacgttgacttgtcaaaaaatacatgcagaaggacaaaacaagtgttctatttaataatatagtccaaaaacatgcaataatattaaaattacagtttta

SEQ ID NO: 316728 - DNA, 1634 bp, Cannabis indica
attagggcttattgtcagaaatatatcttaggaaagtattttttttaattgcggagatatatttgaatgttaagtgtattatatatactatttatgaatttatgattttcatgttttgtgcttgataacagtagaatgtgatgatttggccaatagagttactcagatatgattgagtgtcttagaattagcagggttagttagacatttagaatgtcgggagttatcggggttatggttttggaccattttacccctagaaggtaaggtatcttcctagtaaagcaaagggtaaaattgtcttttggatttattttattaatggagaataaatgatctttctagtaataatccttaagtttatttagattttattaagttgaataaaataattaattttcaattatccaaactcatcacgcataactcttctccctttctctctcttggggttcgactacaagaaaacacaaggaaacccaaccccttttctctattatttagaccaaatcaagagaattcagcttaggtttttgtggtttaattattgagaaggttaaggtaagctaatccatcttcttctctttttaaatcttacggtttttatgtggtttcattgagggttttggggattttagttctattttctgtttccaattttagagctgagtttggggagttcttttgtgttgtttaagctttagtgagaagcttcgggctgttttgtggtgttctgagctaagttagggtttagagatcaagcttagctcattaatagtagtttttgattcaaggctatatggttggatttatttgatgaattatgtttgtttagccttatttgaagttctggatattatgggaaggattagagttattttgttgtagttttaggattttagaagaaaaaaattgctgtaaaaacggtagactgtttatggtaaaacaacctaccatttttctaggcagaaaacccaaaaaatggcctaccattttcatagaaatggcctactgttttttggggtacttttctcgaaatctcattttttttagcaattttcttgatatgtaggatttagtcacgctttttatcgataggaaaacttttagttttaagtttaagtccccgaaagtgatttagcggatcatttaccagtttttgactcagggccttaaatcgtcgagcaatagtttccacttagagttaccggcacgcttacattcaaaattaaggttagactagtataatagttgcatatatgtatacatgtttaatgtgcatgtcagtagccaatagattagcatatcaggtagggctgtacaaaaaaaattgtaaatcgcccaaccgaatcaaaaaaaccgataaaaattacaaaccgaaataacctaaaaaaaatacaacccgctcaatctgttaattgggtgggttaaaaataggtccaacccgcccaattaaaccgaataacccgaccaacccgactttggcttttttttttttactttttattatatataacataaatgattatatatataataatataaaattatatacttaattgttagtttaaaaatatattatattgtgctttggtggaatttgatatttttaatttatctttttaatttttatt

SEQ ID NO: 316729 - DNA, 1221 bp, Cannabis indica
tggccaataccacctccttcaacatcatcctcatcctcatccactgcttattccttagacttggaaattcgtttagacgaatcacagcaaacttcaccatctacttccacaaccacctcctataattccaccattcctcctcctcctcctcctcttccttctcctaaaaacaacaacaacaacaacaagtactactcatgttgctctgtcccaaaagaaacattggaaacatgggacaaagtgttcaaggaaggacacggtgcagatgtgtatgttatcagtacccagggccaggaccaagcctcctcctcctccccctcctatgttctagctcattcctttattctggtgagtcacgatccctgtaccaacccacttcaatcaatttaattatgttataattcaagattgttgaattgggttttgcaaattggcagggtgctgcatcaccagtattggcagatttattagagcaagcaaaaattaagaatggtatgagatacattaacattcctggggtaccctacaatgccctccatatctttatacgttttctttactcatcctggtatgtctattcaatctaatgatccttatatcctataccctacaagtcataatcatattgtgtcgggtaattaagaatggtttgtttgtttgtttgtaaacaagctcagctatgaaaaggaggaattgaacaagtttgttctgcacctgttacttctatcacactcctactcagtttcatcattgaaaaggatttgtgtagagttgattgaggagggttggttgaccacgaaaacgtggtggatgtgctgcagttggcaaggaactgcgatgcacctcgcctctccttggtttgtatccgttggattgtcaaacatttcaaggccatttcttcaacacaaggttggaaagttatgaagagggttaatcctgctcttgaacaggaattactagaagcagtagtagaagcagatactgtaataaaccatccaccccactttcccacttttcttatgatgattatgttatgttgtttatgataaaatgatgtgttttgatttcagacaaaagaagagagattaaagagaatggaagagaagaaagtgtacttacaactgaatgaggcaatggaagccatagttcacatatgcagggatggttgcagaacaatagggccacgcgacaaagtccttaaagggagccaagttgcttgtg

SEQ ID NO: 316730 - DNA, 1631 bp, Cannabis indica
gcctcaacactctgattggtaagagaggcgcaagtggtcgcctcgggatccccgtaggccacctgagcaacgcagtagtcgagaaacatgtctttggaatcgcccaaataatcaaagttttccttgggattggccttccaaaagtcataaaaaatctcgagaccagctatctctaaggcatttaccttctccccgagcctcaccacctcggacttttagttcttaacctcagcatcgagttcctcctccttagccttcttctcctcctccaacctacagagaagagtccggaggccctctctttcatcctgaagactgttaacgtcccgagacaaagaatatcagcctcgagctgctccgttgacggcgtctcctgcagttctttggtcagctctgcaactttggtctcagccgcagaagtttcttattgacctctctcagctcaattcgcacaaccccaagttgaacccgtgcatcctcgacatcctttttggccaagtccactttcgtttgcattgtgttggaattggcaatgttcttagcagtagccaacttagctcgggaataggcgtaggccatcttcaaaccagtctgcgcggataaaaggcattaaaatccgaactaggcaaagaggaataaaagaaaaacgtcagaaaggacttacccgcgaaagctctttcaagactcctcccatggccagctccaaagacaagtcactatccgccccaaccaactgttcgttcacatctgggaccaaccagctcacatagtggttgagcatgtctctacctctttggtctccgtgtgaaatattaaaggtggggccggagccttaacttgttcaggtccgcttctgaccggctcggatccacctttcgcctactcgggtccatgtgaactccctcctcaagaacacttggacttagtaactttcgaggtaggagggtcaacagcagcttgttcctcggagagatcaatgacctctccagctggtgttttctctttcaacggagtctcactgtccttagacttcttggtcgaagggtataagcccgagcttctccccactatcttcttcaaagcctcgatcatcttttgagatatttctggacggaataaaaacaatacagttagaagaaggtatagaatatatgaaggcatgaaaatcaagaaaaataaatgtaagatgacgtacttcgctggtaggagaatctgcccgaacaagcacagatggggtgtcgtcatccaaagagtcttcttgctcctccaggatggattttcccttccttctacaggggttgatggtcgagtaggtagaccaggctctctaatccggagagtatgttcgatgggcctatgcccggtcaggagggttttctttttcttgagcagcctctcctgctcagaatattcttgagcttccttctcatgttcagaatattcctgagcatactgcttgcctcttgcatcacccttcaatttagactcacacttaagttgagtgagctccttctcttgctctactctatcagccccgccacccctagacttcttcttcatccccttcacaggtagtctactgaataaagcttatacttcacaaagttgtcctccgaggtcaacaaagtgat

SEQ ID NO: 316731 - DNA, 1247 bp, Cannabis indica
attttcttttttctttttcatttgtttttctttttctctaaccccggggacccctgggacaaaaaccaccccaaaacttcttcttcttctgttgactgtggatttagccaactgatactctgactaggatcagatcttgcttatgactgtcatgcgtggaacgataataaatgtaaagatactagaatttatagagttttagcccatttcatttaggtaatgacctactctcattttagttgtattcgctgttgagataataccaagcagattaaggctgagaccttgtaatttctaacaaggctctcttcagtattacaatgagtttgtgtttgtgttgacccttaaagattactaagtgtaatatttggagttattagttttatgcccgaaaagttcgccaaggggagctccacgacgcctgcgcgcccagccatctcgcgcacccagcctgctcgtgcgcctagctagccccgcactcgtgtacgtaacctcaggactctgcccatctgcctttcctccctgacatcagtagaattactgagaaggtgtcagaggggaacaacaacggctcaacctgcttatataacaggaactaaattttggttcatccgaggtacaaaattaaaagaagtttttttaccgtgtaatttaggattctagacatggcaggttgcttaggggacaatgtaatgataggtgaaagcgattggtcatagggtggatgggggaagctgaaagtgtaaggagaaggggctggctataaattagactctcccatccattgtaggggaggattttctggagggaaaaacttgtatcattgaaagaaaatttatgagatataactttcaaacactttaaagattctgaagttctttcttcttggcattaaagtcaaaattccattaaagtttatcaatattattagttaaaaaagttatctatatcgttaacgagttctgactgttaacattttggcatcgtctgtgggaacgacaagctctggctacgttggttctcaaatcattcgccatcactttcgaaatgtcaaaacattcccattatctcaaagaaaataagggtcacttggatgaaaaccagtcgaccaccatatttagaggacaccaacctcccaccactggagaaggcaggaggatgaacaacccaagtgtgggttgccaaaaaaatgcacgaagagagtccccagcactacgtgacccgataactgttggatatattttacc

SEQ ID NO: 316732 - DNA, 686 bp, Cannabis indica
ggtgtgtggagaattaagtattgtaaatctcttgaacagacactattacataatagacttttggagtattataaaaacaagatcagtgtcccacgttgagtgactctaaaatcatttagtgtcccttcactacgcgtcactaaggccatctccaatggcacactaaaaacctatatatagtataatttttctcacaaaatgctccaaccaaaccctaaaactcatcatattttgatgggagtctacagtgtcccactaataatagtgggcaggggcaaagccaggaattcatctaggggccaaactataataaaaagttttttaagatttttcttaaaattaaaatatattattaaattcataattaacattaaaatacaaaacatctctcttgcatgtcacgaaattcatctacaattgaatcaatactaaatttttcagcaatttctcttctaatatacactagcaaacaatcacttaaaaatttatcttccatcttgttgcggagtgtagttttcactaaattcattgctgaaaatgatcactctgttgtagctatagaaactgaaagtgtaagaataagaattaccactttatacacaagtaggaaaacttctgcttttctagtttttatgagccactgacataaatcattaatagttgttaagactataaaatcatgaaga

SEQ ID NO: 316733 - DNA, 963 bp, Cannabis indica
cggctaccccatctcaatccggtcccagtagttggcccgttgcctcaaggggcaccagggggtgcacccggagcaccagcatccattgcacctactaggggagcagtccctcaataggtccccgggctcccacccagcactaatgggagagtagccatgatctctggtgggccccatattgcgggaaccaccagagaagaattaaagcgctatgctggggccatgaagcatgatgaactgttggaagtcacccagcttccagcataaaggccccgactcatggatcaacccattacttttacggaagaagatgccaaactggtgcgcttccctcatcatgacaccctggtcatagagactcccattgccaataaaaattgtggcaagaatattggtcgatatgggagttccgtgaatttattgttccaagaagccttcacagccataggcctcacagaaagggatttgtcgcccatcgactcccaattcacaggattcaatggaccacacttatcccaatgggaaaagtgagactaccagtcaccctgtgcccagatacccctcagagtacttttaagtactgcacctttgtggtggttactgcccaacagcatacaatacaatcgttggccgaccggccttggttgattttggcgcaatcacatccatcctgcacttgagcctaaaattccccactcaagaggccagagtaggaactgtaaggggcaaccatggagaagccaagcagtgctataatgtggtagcgcatttgccggtgctatggtccgtaagggtatcgagccaggagtggcagaagaggatgtgttggatccccgtttgggatccgaaaaaaacatagatcctatggaggatgccgaagaagtacaagtgtgcgacctcgaccctaccaagatcctccacctaggaaaaagcctagagccggaggagagagacaaaattatt

SEQ ID NO: 316734 - DNA, 604 bp, Cannabis indica
taattgtaccaataacgatattgacacgtaaaagagtattaagcactacaagtaccttttaccatttctcttaccataaatatatatttccttattaatttttgtaattacaaatttaatattaattcttgacctttatctttataatctaatggtttaaaatgaatacacgttcatagaagcatatgtatatgcattaaaaattgtaagacagcaatctatatcaaaatccgtctgacgagtaggtaagagacagtaagtgttttttaaaaaaaagaatatactttttttttcttttgttttttgtaatgaatatattatttaaaaatataaatctgaaccactgaaatttactttcaaatgcattgcaaagaaatacatcatagttttaaaaatatttgttttgttagaccgaaattaaaaacaatgaaactagaacgaattatcgataaaaattctggttgagttaatatcactttctttaaaacgtttaaatttaattgtacgcccaaaatgtgacttctactagcggtagttgtagtatagatcgggcagtcgattccacaaggaggagattatggacaaaaacgttagtagaaaaata

SEQ ID NO: 316735 - DNA, 1209 bp, Cannabis indica
tagtatgttattttttgtagcacttaacactttaaataaatagtgtttgattagaaagaactaaaacataaaaatatgaatgagatagagaatagatacaaatataaatgtaatagaatcaaatttataatacatataaaaaattattacatttttttttctcatcttacattagaatggtgtttctttatattttaaaatagaatagtcattttacaaaaatattatagaaaaatcattctattaaaatgacattccaatactttaaaatacaacaaatcaaaagaataaaataaaatttgtttcattttcattccattcttttcactacttctaatcaaacactacattaatgtgttacttacctagcatttttaaataatctttgccaatgactttttaaagtcaactctaactagcttataaaacaaattgcttttaattagcataaatacccctttgagtttcttgctaattgacaatttagtccatttttgttgcagtcaagtccttcagtttttaaaataatatctaaatatccaaaaagaaacttatttttttgtgaagtaattagctaaaaagacttgattagttcttattttaatgcttaaggatttgattgcaaatttgttattcccagggagtacaaattgccaaacaaattaaaattcataagacatttttgctaaaactctaaaataataataataattaaaaaaaactacaaaaatctagcctcaaattatctaaatctaacctcatacctaatcatcaaacaagtactcatttagtagatgtattgaaacaagtctctacagtacgatcgccacccaaaccctagtccgcaaaatcatcttattagtattttcagttataacatcaataaaaaatataaggctcaagaaccaagactcgtgccctaactaactacaactaccatttttatttttatttaaattgtacagagttagaaatttactaaggcacaattataaataacaatacttgtaacagagaaagcctgttaaaaaattctagagtgagagagtcctaaaagaaagagagagagagagaagggttttgaacccaaagccaagaaaagaaagccccaatcggggattttcattgtaatctggccaagatctgtgagttgaaaatagagtaagggttttggttttgataatggattttgggtcatcgggaagaaga

SEQ ID NO: 316736 - DNA, 3071 bp, Cannabis indica
agcctatcaggtagctttacctcttgcgttgtccagagtgtatgatgtgtttcatattttgagctatgacgatattgagcttcagacagacttatcatatgaggaaaaacttttccaggttttggaccacaaagaaaaagaactttggaataagacaatcacactagttgatgtgttgtggagaaacatcaaggttgaggaagcgacttgggagttagagttgcagatgtggaagcagtatcctgagttattcaagtaaattttgggatcaaaatttctataaggagagaatatgtgtaatatcttgaaaatgtaattatgaataattaggacttattatataaatatggagtaattaaagtacaatgagtaggattatgattctactaatctaattcactgtgaattaagaaatttttgccaaagtatataaataagtgtaatttattaattatggagattttattagaatggtatgatgtatgttattcaaggaataataatattttcaagttcgacaaccttggggactctatcggaggccaaaaatattacaacaattttagagtgtgattttaatggaattattatgataagttgattttagaatatcgggattcagcgggtaacaatattggactattttacctctatggttataaggttatttagcggggaagtaagggcatattagtctttttatcctttgattagtcaccttatttttgagtgcagagtggttgtggctcaacaaatttgtggtgaccaaaagcttggaaatatttaagatagaaatcaaaacaaaagaaattcaaagtgaaaagaaaagtcaaaacgcacctttcttcctcaccctttctctccatttttgaaccctccaaaacaagaacaaaccaacaagatttccaccatttttgaagcttatttcagccaaggatagctagaagaaatatctcttccatcctcccaagaaatctaaggtaaaccctaacccgaattcattggttttctagggttttagttggttttaagtggatttttctgtaggaattgttgagggagtctatgaaggttaggaaaggcctcctagtgttatttagggctgattggaattggtttgaactcaaacttggctcatgcttgataacttgatttttattgggaattcttccaaggtttgttcatgaaaaatgctccttatgatgtgtataggtgctctacgaaatttggtaaggtttggctcaagattgagtcacatataaactttttaagataggacatgggaatttcgaactgtcctatttctaaaataggtcgacagttttaagaatggaccatccattttgagacttgtcccgggaccctaatttttattttctcaatatttagagtattttcatgctatctatcgatagggaaactttcagttatcaatttaagacctagaacgagttaggtcaagttgattaattagttctttttcattgttgttgcataggatccgggatcattgatcttttttaggtcgactaacatacttgaattggaaatagaggtaagaaagtacatttgtacatcatagcatgccaagatatgattattatcatttatgagttaattataattgaggtaaaaatacagtgattaccatcaagtaagagaaaatcatgacttcaatcaaaaccattgttaggtctcatacttgtcaattgttttattagacaatgacaaaagtatgtggatgccaggatatggcatcagggttgtcttattagacaacaagagatgtgtggatgtcgggttatagcataaggattatcttactagacaataataaaaatggttactttctgaagtatcgattatgacttgtcttattagacaagtacttgtatattataatttaattacagtagtctaaattggtcatctgattgatatgtgtttatgtttacttttctttttgagtttttgtgactcacgggtgctttgtggtgaaggtaagggcaaattaaaattagggtagccatgagatgatattctttggtaaatgtacatatagacttatctaggttgtatggtcgagttgtcaggagatgtttgtgagtcacctaatgtgtattttgacttacttttctatatatcctttttgtaaaaattttgtatcagggaatcctcgaaacaaatttttggcgatgtaattttgttcattgcttagttttattttagtgaagtttttactattatcacagattttattaaattattaatctactattacaaatatattccaaaagcacacacgtggtgtccctaggagttagggcgctacacaatcttgtgtatgtaggtcagagtagtggttgcatggtgttgttggtcaggtgtaccaggtgctgtagagtggtggtaatgccactactcacccaggccttgtctccatgcgtgatctgacattgtggtccatgcttggttgccctagacttcgaaccttcgttccaccactcttatgttcgaccccttgtcttacatactctcttaccatggccaaagtttttaagttatacttataatagttgaaccgtttgagtattgtaaagacaaatggggcaatgaggatctctgaatgattgtgctcttgagaaatcaatgacgaatcaactccatgggggtcctcagatggaccctttctcataggtcatggggtcctcgtagggacccctcttcgcagctcgtggggtctttacaagggaccctttctcggatgtccagagatcttcgttcaatcatccttatgtaagcgggacatctaagctcgcatatttccttgtcatggactaagcaaattatgtatgtggtagtcgagtcatttgagcatcatcgagacttgggagacaatggaaaaactccaaattcccaaacaattgagataccaacgaagggtcgtaattggtgtgtccccaacacaaagaatcaacaccagaggtgtaatgaccacatactttaaacatgagaattagaaaataattacgaatttagttattattttatgattatatgctttttagtag

SEQ ID NO: 316737 - DNA, 515 bp, Cannabis indica
tttgaagaagctttaaagcttctctaaaggatctctatttgaagaaccaatatacatcatctgtttgctttcaaaaaaacatatatcatctgttgttggagcattattttaacaattttctttaaatgtttaaagctttctctatattataaagaagctgataggagtgctctaataaacagagaaataaactttcattcaaattcaaaggtaatgtgaatagagaaatatcacgtaaaaacgtgaaggtaaatacgaagtgagaatatcatgttttagatttaaaatcatttgctattaaagtttaattttaagctttatgtttatatttgactaaaattaataaaatgaagccaactgtttttccgacccggaaggaagcatcattcctaccaaggatcactaggtattaaaagaaagaaaatttacatggtatactaacttttgtcattttcttacaaaaatactgttaggcggaatttttaacttttttactgtgttttttcataagtttc

SEQ ID NO: 316738 - DNA, 1999 bp, Cannabis indica
agattatgatgtctctccttaagatttgcataacatttattttttaatataaaagttagcataaaaaaaatgaaaattcataaagtatttatacattggtaaataaattagagcttctctacccaaaaaaactagagattttaactgaaaatagttactaaaatattttacaggttttttgaatatccaaattaaaatatatgaaaaacttttaagaggttagttataaaggagaaaataattaacaaagaaattcataacaataacaaagattttggtggttggaatactttttttttccattaacaaatcttatgtggtatgtttttgtttctgccgactataaattttaattatattattaatttttgatggaaatatagttattgtatttatgtatcttttcatattattgaacaacaagttatttttctttaaaaaaaaaaagaagaaatatttgtttggaaatatatgtgagtttttttctttctttctttctttctttcttttttttttttttaattataaacttcattgaaaaaaaaatacaaacataacacaaactcactggtgcaacaggaatgcaaccttccgaaagaaattaaacgagacacaaccccctcagccacccaagaggcaattcggtgagcctttaaattcaaagaccgagagatccaacaaacatttagaacaaaattattcgagactttagaagtcttcaaagcagtgaccactactttacaatctgagaaaaacttaacccgcttccaatctcgatataaacaaaactgcctagaaaatagcaaaagcttcagcctcgagctgagaagacactaaagacatgatcgttaaagcctcaacaaactcatagcagtggtccgaccaagattgtagcgaaagacccacgtccacaaattgcagcaacaacattgattaaaaaattgacaccatcctcaatctcaccaagggaaacctcctcctccaaacacggatccaccacaaccctctcagaaatcaccctcaactcattcatagcataataaactttctacaacaaagaaaaaggtgacacaatcacattctcatggaaggctaagtttctagcctcccataagaagtaacaaagtaaagcaacccatgttgacaatatatcaatctgggcgttgggcctagtgccaagtgtcaagttgggcgctgggtctagtttcatgctacttggaagttctgtttgctccccaaaaatagttgaatcttaatctttgatgaaaatagagaatatgtctggaagacttttcaggacaaactcctcaaatttttgtcaacttggttgttgggccagcactaggtgttaacttgggcattggaccaacactacgtgtcaacttgggcattggtcccttgttttggcctctaggttggtttatttcttccttcgaaaacacttgtttccccatttttgatgaagacaaataagaagcacgggtcgaattttatgtttgatgcttggaagtggcctaggttgaaaaaatgtcgacctgggcactaggtgcccgggcaccaggtgctcaaaaatgaaaattctctaatcagattctaatgcctcaaatatgttcgtggtatgtctagttcatgtaccaatataaagtttgacccatttgcaataaaacggtcctggaaactgaaaccctagttaggttgtcaacttgggcgttgggtgaaaccctaagcgcccgagttgaattctgaggtgtaatttcgtgtattttcagctcccatggcatgaagttcgatgcgccatgttttcatgttacagaataatgaaagatagtgagttggaaacgactaatcagaatctgaatacccattccggagttcctagagtcaacttaggcgcaaagctagggatccctctcaggtttactgctatgcctcgcgactactcaactctgagatattatctttcttgctacgtgtcaaatattgatgtccacgttaccag

SEQ ID NO: 316739 - DNA, 525 bp, Cannabis indica
aaacaaaacaaaacaaaaataaaccagtttggagttgtaatagggttataacttttcctaagaacacgaccaaaagttaaatgtttgcttggaaaatttcaaataattggatatcttcgaatttgaataagcatgttatactaatcgatgatctttgtcctttatacgatgtttaggagaaaaccccttatcatgttttgttggaatactttactcttttacaataccaaaaattttgtgattttaatcttagagatcctaacttgttattatgtggagagtttggtatagtttaaataaaatggtgcataataattgtttgatgtctcctgagttggtggtcagttagagttgtaattttttgagtgattattaaaaacttctattgcagttaaaagagattgattgtttgagaactacaaggcatgagtatgtgtcttctccctctttgttcaccatgccttactcggtacccagggacggacccattcacattaatgtgggggctatagtctccactaacaa

SEQ ID NO: 316740 - DNA, 1556 bp, Cannabis indica
aaacacttgattttctaatctgactgtgtttggttggactctctactctctatatttatattggttttgtatcaaataatcattttctcttgaccactaagatctgttagcatatgcttttttctattctttctttttctctttttattatttatttatctataataaatgtgtggaaacaatataaaaggagctatttgtatttttattaaataaaattaaatctaaaaaaaatataaatctatatttaaattttttttcgttatttttgagttttatgaaaatagcccatatggcaattcaattacaattttggtcttaatttatgggtttatacaatttgagattttatattttgcatttattttcatttaaaccttgtattttaacaaattaatttttttttttaacaaattaattttttttatcaagaaggaagttactttattaatcaagaacaaaatcaatacaaacaatcaagcaaagagcaaaacagcccttaaccgaagcaaacaaacagtaaattacatttgtataatctgtaaaaacctgctatctactctattcaatcttctattttttacattttaaactctatacctcactatacctttaatatcagtaacaatgcgagtattttatgcgaatatccctcaaaaacacacctattgcgattaatccaaagataatagcaggtagcgacaacagctgctacactgatttttttcacccaattgtccacgttcaaagacagccagcttatccaacctttaaaatctgaaggccacatgcgattaccaagccaatcgaacaccaactcaaccactatgggaaagacatcaagagaaaaacaagtgttcatgagtttcaatacaatcctcacaaactgggcgcttgttcgactccaacagaatgtgcattctagccatattattctttgtcaacagatgggagttaaccacttgccaaagaacaaatttgtgctttggtaagttaagagaactccctatagttttatggcaatgaaaattgatttcgatcaagcatgctgttatataacagaccatttcggaatttacttgtattcccagctgcctttatgtcatcctccgtgaatctcttcctcaagtgacaaagctttcgccaataccaacttatgtcaggttttagattatacaaccaataagactcttgttttaggtaaatggtattgatccatttaacccataacaagtcttttttaatagaaagagcccaaacaaacttggctaagttcacctgattccatttagcaccatccttgaccccaaacctccataagctttgggcaagaagattttatcccaaaaagcaacatggactttgcttctgttaccatttaaatgttgggaatattttaccaggatctagatttactaacaagtatgtttcaataacatcctaaatatgaattctctaaaacaatgaaaataaacacatagggatttaagaaaaccttacattggttgcaacggaatataatgactccttccgtttaagatctctagcccttgatt

SEQ ID NO: 316741 - DNA, 962 bp, Cannabis indica
gaagtatttttaaaaataaaaaaattcacagtataaaaataaaaaatttctgtgtttgaaacatttttgtaatttttttaaattttaatctattttgtaaatttctgtaaatcttttaatcttacatttttcagcaagataagagagggaggattaaagagaaggaaagcacaattttccacactaatggagttcattttgtactataaaatctaaacgaaaattaaaatttttctaatattgagtactaatatcgctaatgtcttttttttaaaaaaatatactgcttacaaacttaaaacgaaaacatattttttagatatcttataatcaaagctattagtttagctgaagttttatttgatcagtatttatgcagtaaatatctctatcataagtttcttcattatcaatatttaccttgtgaactttttttttctttgtgaatttacttatatttaggacgttttgtttattaattagaattgttggagaatatttcaactattggacatgttaaattgtttaatgactcttattttaactttgtgtatctttatcaagacaattagtttggttaggccttgttatgtgatgcaagtaacacgtatagatctttgaccccaattttacaaaaatatttatgaatacagccaaatgttttatcaaatttgaaactctttaactttttaaacttttttgtatctaattatattaaaaaatattttgaacaaaatcaactctaagaggggtataagtatgtataaccgaatgttaacttaaaacacagtgcaaaattacttttaaaaactcgtctaacataaatgatgcaaaaaagatatgaagtctttgaaatgcaacttcataaaagaaatttcataattcgaaagaattttttttagggaaattactttacggtttgagtttttaaaatggttgcagcgctaattgcaataggggtt

SEQ ID NO: 316742 - DNA, 664 bp, Cannabis indica
taattttttataaaaaaaaaaaagcgaaactttatttcttggaatttcaaattatgatcaagtaaaaagaataaagaaagaaacataatcgaaacaaaatcttaggaattaggattataggaaccttgatatactactacctacccagtagaatatgcaatcaaaaatcgaaaacccatcaagatttacatcaaattattgagaaaaaaaaaaagaaagaaagaaattgcgaaagagaaaaaaggaagattttttttttaccaaatgtcttcggggaaaccgtacttgatgagctcttcgttctcgtgcttgtcgagacccatgaaaatcgtatagtctccggcctctggtctggctttgaagtagaaaaccatcgcgtttctgaaccagcgagaccgagagagagagagaaaccttgccaattggaagggtaaagggaagggttgagtcgagacgagagagagagagtgcgacagagaccttgacttgacattttagaaagaaatgtagttcgttcaattctgggttggctgggccgaagaactattttgggccttcagacaaaagtttggcccaaatactactataaataggaaaatttacacctattattgccttttatttttttttttcatttgtactgttgcacggtcattttaacttt

SEQ ID NO: 316743 - DNA, 2258 bp, Cannabis indica
gtaaaatatttccaacacatacaaagactcaccatcattctaataaaagttatttatttctcccttcagtttagcaacttttgaaggagggaagaatttagataaaaacttttaagccagatcttaacaagtgactatagaattttgttgtagagaattcaaccaactctttgctctttcctttaaagagaatggaaaaagcctcagtttgatagcatcatcactcactccattgtatttgaaagtgccacaaagctccaaaaaattagtcaagtgggtgtgagaatcttcaaaaggcaatccactaaattggagagtattacaccatttgtaaaatagctggcttgatcttaaagttgttggcgtccactgctagtggtcttatacagttttgtacctccgtcagagtagggagtacatagtctcacaggctcctttcagcattagggtgagcctgacctccttgcataactcaagaaattagatcatttccttcattatgcaccatcttctttgatttctttgcttctctcttgttcttttttatttttcttgcaagatttctcaatctaaggattcaaaggaacaaggctctctgcacctcttctatcgcgcatgtaaacttgagataagtaaaaatagcaactaaacaggttagaaacaagagaaaacaaaattaaattagaataaaaatatattaaattgatattgataaattcaatccttggcaacgacgccaaaaacttgtttggcaaaatttatatgcaagtatacgaaatcgaaacaagtaatataatgataaataaagtatcgttctctcgaggattgattatcaatgtccaattaattaattgtttggttctatttgataaataatcattgttggataaagagtaaataaaacaagcaataattaaaattttaaaaaataacaatgataaagacaaagattattatgatcccaaattatcttttattttacttcataatgtaatacctaatttttcttcttcctaagttgagttaagaagtttataatttggttaagacttataaacccaatctatatgaaaacttcttatatttctatgacaagtttaattacaaagataatattaagcttcacaactagtaaaataatacaaacaacctaggtaatttcgttctaaatcaatttgcttacatatcaattagagcacattccaatcttatatttcagaattttgatttaaattcataaataataattaaagttgatcatcaataattgcaaaattaaaatagattgtatgaaattgaataaagagtagaagaagaaattcaacaatcacattaatcaataaaataaacttaagtggttcacgtaataatccttaaaaagaaattagctactaaatgacattctaaaacaaaagaaatttaacaaaagacataaaagacagagataaaggagaaagaacactgcttggagtcatccacctgtgccttctactctttgctctccttctacactcagaattcctctcaatttttgaatggtgtcaaagctttgtcatcaacccccctttataatgaaaaaatccaagttacaaaaaaaaaaaaaacaccaaggctccgaccttacaaggaatttcctcttttctttgttgaattttccagtttcccattttcaagatcctgctacgatgactgatagtattttgaccataactctctcgatataacttgaaattgaaagattcaagatgttttaaaaagatgaaagagagatctagaactttctttagaaaatttttcttagaagtaaatggattatagttaaaaaaaattcttgaagctttagactttatttttaattagaaacagagcatgttgaacatcaatgacttaaatttttttcaatttatttatggaagtgatcactcttgactctagatcacaaattttggagctaaaaatgtaatctttgacccattttaggcaataggaaatcaatccaagcaaaaacaagtttctttctttattatattttttttttctcatttttgctcaaaaatggcttgcaaaatactaaaattaccaaagttaaagtgttataaaaattaatataaaccccaagatcaatttgtatataacatagaacacaataataatatataataattaggtatgcatacctgattgatccatagcaattatctcaattcgatccacaacaattactccaattcgatagtgcaatactatcaactaagtct

SEQ ID NO: 316744 - DNA, 975 bp, Cannabis indica
gaaatttatagaggttcagccctttcaacagtaatatcctactctggtgtttgttgtattgcttttacgaaagtatatcaagatcacagggtctggccaggtgagtttctcaatatccctcaaaaatgttacaaattattgatgctgaaaaatggtcaacactaattcgctagattgacgagataaataatgaatttaagtaaataatttagagacacaaatttatagtagttcatttcccatgtcgtgatgataatgaagctacgtttacgtctactttgagtttttatttctcacgaaaattacaagaaactggttaagtgtggggctcaaatttctagagagaaaaagtatagagagatgatatgaccttatgaggactgttgatgctaaaacatggccaacatcagctcactagattaacgagatgattaataagtttaagtaagtaatttagagagacaaaatttatagtagttcaccccctatgttgcgatagtaacctgactacgtctacttcgagtttttatttctcaagagatggtaattacagcgatggactaagtatcagaaactccaaatctagagagagaaagtctaaagagagaagctctcaccttgtgggtagttttctaaatgtgaaaaatgaactaagggaactctccatttataggtgaaggatgcccacaaaaataagagataaaatagaaaatgaagtgtttttcaccattgatgatgatcaaacaatgaaaattaacttctggtagtgatggttgattttttttttttatctagcaggtcccgttaggagttactcggagcttattttcgtaactcccttggggtgaattttgacgatgatagcttcagaattttgactattgtgtgagacatgacttgatagagggcttaaatagcttcaaaatgcaatttgaatcgcatcaatcgaataaaaattgagtgagttatggttgt

SEQ ID NO: 316745 - DNA, 530 bp, Cannabis indica
caagacagaattatgaaccagtcaggtttgaacagaccaagttcttaggccaaaaacatgaacggatagggtcacaaacagaccctgtgtgatggccaaggcttcacgagaatcaaattcctatttttcaaaaactcgaacagagttctttgtgttttttgtgactcgaagagtcaagaatctaaatagagctcaaatctaatctttttttataggaagtcttacattatacatcctaaagctatcatgcatactataatgtaataaagaaaacactacaacgtgagaatcaaaggttttaaaaaaagcttgaaaaatggaagattcaagaaaacaatatgaaagtgagatttgaagacttacccactgatgaagaatgttgtaggtgctcagggaaacattggatcgtcgaaaaaaatcaaaaacctcgaggaatggaggagctagaagtgtcgggtttgatgaggaaatgaagagtttctttttcttctatcttacacagagagtgtgaatgagagagagagagagag

SEQ ID NO: 316746 - DNA, 1434 bp, Cannabis indica
catcaatttctaaaaggaataattacataaatcattattttttgtaaaatatttatatttttacgttcacaaaatgttttttttacatttttacggttttccaaaaaataacataaaatcagcaagaaaactacatgaaagtaacatcaaaataacaataaaaaataacatacagataacaaaaaatcaacaacaaattaacaagattataacataaaaagaccgtactttctgtaaataaaataaaaaaaaatgtttaaaattccgtgaaaccgtatttttgtaattttttttgttgtttttatgtttttgtgaaataatcctcagttcggattatttcataaatacctaaaaatgacaaaaagtttatatttttagaaatttactcttttttttcggatttttttttattaaaatacaaagtgttatttttctattatttccatattgctgctagaaaaaatgaagtgaaaataataattttctaaaaaaaaaacaagtaaaaaaattgtaaaaaacagaattaaataaaaatgtaaaaaaaaaaagtttagattttaagttcattatatagattttttaaggaatggaagatagaacaagttacctggagcaatatatccatatgtaccagcaatcatggtttgattagaagaatctggatcaagtaatctagctgttccataatcggatacgaaggcctcaaattccgagttcaacaagatgttggtggtagttacatcacgatgaacaattggaggagtgcaatcataatgcatgtaagacaatgcacaagctatgcctttaatgatattgattctcttactccaatctaattccacagcttctatatcattgctcagaacacagaacaagcttcctctttccatgtactcataaatcaaaaacatgctcctcttgtgtagacagaatccatggagtcttatgatatttctgtgacgaattttagtcaacgtttccacctcattctcgaaactctttctgaatgatgactgctctgcctctgaattgtgaagcttcttcaaggcaactattttgccacttggtagttgtgctctgtatacactaccataaccacctgttccaatgcaatatctaatgtcgaaatcttctgttgcttttaggatatcttcaaatgcaagtttcccatcgaaattccatatggacaatatatcaccatttttggaagtttctttggtaggttggacttgtctagttttgaatagacgctttttggccaacaaaataaaatgatcgaaaacaaggcaatagagaatgccaaggcgaatacgataacgatcactgctatagtcttgggaaaatgaggtggacggtagaaagtactgatatcactttgatattgttgtgaacattgtcccacatagaataaatggtagagaattgagccatata

SEQ ID NO: 316747 - DNA, 672 bp, Cannabis indica
taacgaataaaaataaggaaattaccttatatacttaattttttaactttttcttcaaattttacggttgtagtttttaaagtggttgcagcgctagttgcaataggagtttctatacgttattttgttgtaatttaggttgcagcgctagttgacaatagggtatttacaacgtagaatttacgtaaaaatgcaaaaaaaaaaaaaaactgtttttaaaaatataaaaaatagaaaaagccactaaaatatgatttattaaataaaacaaaaacaaaaaattctcaatctttctctccctccctcgcaagtctcttctccttcttctaccatattttttttttttcacaaaagcacttaaaagcaataaaaaatattcaatctagttattaaattgattgaatggaaattaataaacttaagaatatttttttcttcaatcacttctcctcttcctcaaatttgttatatttgttcacttgaaatgggcctacttcgacatcaacctccctcagatctggttgagagagtcgtggaacacccaagccgatgaatgaccccctcagactttgaaacctcctaaagcctggacctcaagcctcgatttgcttctcttctagatcttgacgtttatggcgccccagagcctagatctggttgttctctctctct

SEQ ID NO: 316748 - DNA, 1022 bp, Cannabis indica
aagttaaaaacaaaaaaaaaaaggaagagtctttattataccaccaacaatgccaagaaatccactgaagttggaatcatgaaaagagatagacaatttagtcccaccaagaacactcttatctgagttcacatcatgttctgctgccttaatagcaatctttgagactctaccattgattgtttttaatgtgaaaatagctccaacattcacttctgcaggtcttgatgatgatgaggctccatttaagcattgtgcccagaagcatagaatgaataatattaagaggagaaaagttaaattcatggtgagcttctgaccattaatttaggagtttttcttccaagtttagtaatcttaacaagcccaaaagagaaaaaagcataagagcttcgatacgaaaggcatatatatatataacatttaagaatgatggtgttgttgttttgccaaaagaagaaagaaacataccaattctgaagattctaaggaatcaaatagaaagatgtaagtgatagctagacaactagacaaaacctcaaacatctatcttaccaaattaataataataataaaaagaaccccattaaagcaagttcaataacaaaatgttctaacatatataataattggaagaaaatgtaaaatctaggtaaccttctattctctactccaatggtgtcttttcacatgctaatataaacactctcaaataagaagaggaaaagctctgagacacgcttgccactcattcttaaaagaaaagagagagagagagagaagaaagaatggattaactcaaacaagtgccatactcaaaagaaaggaaaataatttatataaaaatatatggcttcagagtcacaagaagagaattatataacagaaatgctaaagggcaccagtggtgcctagcaccttcctatgtgtcaatatcgctattggtacaattaagtatcgggtcccatataatttaatataatagtttttagggagtatcgctagccaatcgcaacgcgaca

SEQ ID NO: 316749 - DNA, 2370 bp, Cannabis indica
gggattatattgattttagtatgtaattattattacaataactattaaattgtaatggattatacaagttaaaaagaaaatataaataatgtaatgcacttatcaattatcattgtaattactattacagtaaatcaaacatcacttaatcactttatttattaatttttctttttggtagcaaaaaactcctcagtctttcaattggcttgtactcctaaaagtgtcctataaagaaaattccaaaaacagtaaatccaattttactcctgttcatgtctacttcctttttttgagaaaaacaaaacctatatatatttcttagacaaaagctattatgaattatttatttcatcatgctctgaagactcccatttcccacatcaacttttgcaatcagatttcataatctttacagtagatcttcctgaatcttccaaccaatgtttgttgtttaaactagaggtaaatacactccacccaataaaatggtgaattaagtagccaaggaaaaagtcacatgcgtgacaaagcttttatcattataatattcactaaaaatcagagatatgagctccgaatgatgtttggttgtcacttctcataagttacaaaaactataatacatggtgctgattatatgtatatccatataaatggcagtgatgatcattagctaattaaaaatgagtgatattttttatttgtacttacttccctcacacaatattaataaattatattaatgaaaataaaacataaaatatgaagaataatacaatgacaaaacataaataaacaccgaccatccacaagccaaaaatcatgactaccattgaataggcggtggagaataattgtcttttgtgccaccattgactccccttcaaacatctccaattataacactttttaatgctgtaaaaaatatttatattttttaaaaatagcaagtaaaatttttttatattttaatttttatacacttaatttttttatttatttttaatagtaaaattctcttaaatttattttttttgtaaacttgatacgccagttaaatattactgttaaatatcaactggatgaccactgtatatataacagtaaaacttcaaaatcgatacaataataacccagttagaacttaacggtaatatctaacaaacacattaaatttacaaaaaaaaaagttaacttaagggagttttgttaaaaaaaaaaaaaaagagaatttgtgtataaaattaaaacataaaatgatttcactacaaatttctccttttaaaaatataatattttgttttatttatttaatattattttaccaattttttttaaatacttcaatattaaactttgttaccataatccaacacattattatttaataaataatatgttattttgtttgatttgatttaaaagaaagagtatgacatcaatatcattcttttgttcgggttggtaatcaaacacatctagtggttttcttcttctaagcatactcccacatcaacaaacactatctccaaacacaacattagaaatgccctcaatacacataattgaacaataattaacatttttatgttacaataagaacaaaaataatgcttcccaatccttcaaaaaaaaaataatgcttcccaataaaaaatctctcgattagtccaatctttaacacaggagaaagatgggtgaaactcaaaatcacataactttcattaggaaattgagatacatttagtagattcattgcaataaataaaaagaaaaattaccaatactagtaatatgtaatcccttaccatttctatatgaattgttcttctccaaataatacgagctactcattagatgcatctggagtaaagtaattagtgacgttggaatcaggataccaactgaaattagctacagtttttaggcatgcaattaaagcttacattttagcaataacagttgatggttgaaaaggttggaaggattcaagatcatggaaggacttattgagtcaatagaaacattaacaaacaatgttgccttgtttcatatagagttgacactgaggacgttgaccccaagaattggattgaccacgaccagttatgtagcctcctcgtgagccacctaattttacaccaccacgagagccaaattaattagaaactaaagttcccaccatattaaggaattgaggaccatgttttccattgaagccaccaaaaacacttactatttagaccaccctgaaaccttgcacagcctctgccgcgatcacggggattctgaggaatttgatttccttgactgcctcgagtctcgatcctattaccctgactccttgtatttcgctaggcatccatt

SEQ ID NO: 316750 - DNA, 1699 bp, Cannabis indica
ttttttttatttagggaacaggggttcccctttttgaatgtgcggagacaatttatacccttaccgtgaggctttcttagtacttgataccttttgttaatttcattagatatttgcgtgttatattggagaaatggctaagtatttgacatttccaatttcggaaggtttctggttctaaaggtctgaacctttgctttttaaatacttagacctaaatacttttttagaaaaaatacttttccagaagggtttatttgaaattctgaatatttaattaacttgaactaattaattgactgagaatttacccttccttggcattcttaattttttaattgacctggatcaattgatttaaataacctgaatattatggtgatgttaacttgaattaactattaggcttgggcctttattttaagttaacatggattaaccattttaatgttctacaattaattctgaatgtactaagacaatgacttactttcggttccctaaggctctgattttgtcatacttcttttctctcatttagttaagtgttaaacaatctttaaatacaataaggcagtggcttgctttcggttccctgaggtttcgatttcaggcaatacttcctactcatatattttagcatttaacttagctgttttctagcggaggtaagagaatatgagtatttgcacaataacgtatatgctacccccaagcgattagtaattgaaacttttgatcacttgttatatgataaaacttttaaagaccaattatgaaatgaaaaatcttctttttattcaaacggttcctgccctaaggcatacataaaactaataaaaaggcaaagtaaaaatgtaaaacggaactcgaccacccccagtttactgatagtatcagcgcaggtggtcagcgttctaggctcttggaattcttgttccatccagtctttccatatgataagttccatcaccaattttatcagttactttatacggacctccctagtttggacataagaccccaatcctggttcttaggaagcagggaaaactcttctcaaaacaagatcatcgatctcgaattttctgctctttacttttgagttaaaattcttgacgattttgttttaatatatctggagttgcacttgtgactcttctcagagttcctcaattaaatctaaagattcttggagtaaagcatggtttcgagtcaggtcataggtatccctcctatttgtagatacagtggattcgactgggattacggcctcgcatccatgagtcatggaatatggagtgtggcccatagaagttcatgtatatttgaattgtgtgtaactaattattttttttatctcatttggtgtgtagtttttttcttaagtttacaaagcttatttttattagatgcccaactaggttgcttgtggcttaaggatatgacctactattagcgaatacaataactttttgggtcaatttttttgaaatttcgattcagctattcctttatctagctatgattatgtctctagtttgtatatattgtcgatagtttgataaatgttaggttatatttagcctatgtttcgggtctttaaagttagcattttctcgtctattggtgtcatttggagcagttttacgcttgattttcattgtttcaggttcctggggtgttaaagttcaaattc

SEQ ID NO: 316751 - DNA, 916 bp, Cannabis indica
ccaaggtccgggtctgggtcccaggtctcgattggagattggtgttgaccccgaatcctttgtaaatattataatacaagctactacggaccatttgttatgtattaaataatacaacataaattgtattaaaaaatttggtcgtaataattaatacaatacattgctttatccaaacatagtgttatttattatttaatacaatacgacccttatacggcgtaccaaacgagcccaaataatctaaaaatacacacacaactacaaaatattcatatatcaactcaaaaatatgtacctattaaaaataaaaataaactaatttttattttggttaaacaacttaatcgaaactaccaaacaactcgaagacaacattacataaattaacaaattaattggacctcaataaattgtatcgacaacattaaaaagacataaaaataacacataatcaatctcaataaaacaagattaagtacaaaatacagaccgttgatgttttcatattatttttgtgttgtacccttgttatttttttgttgttttgttttgttttgttttttgttgttataatgatgttttcctattacttttatgtggtttcttaattttttttaggacaccataaaattttaattaaaaaattttaaaaccataaaattgaaaaaatatatatattttgtaaaaatgtaaaaaaaaaatatatttgattataaaatgttaattttaaaaaagaatactcaacaacaatggtactttaatatgcaaaagaaatcatgtaggcattaatattttgggaaaattctacaatagaaacacttcatttgtccccataagatagtgatattttattagccattgattatgttgagttttgaaggtttaaactatttattatggaatagcatgtaca

SEQ ID NO: 316752 - DNA, 2298 bp, Cannabis indica
attaagattaattatattttaaaattaaattaattataattatactactgacaactgccttgtaatttttatttgactaattcgaaaagagttaagggacgttgatgtactatatatagtgctagcttcgcaaattatcgatgaatattgtaacaaaattaggtcacattgcaaattaatagttaatctaattcttttgacttgttgtaacatagtgttgcaattactctttcaccaatcactaaaaaaaagttaagtcataacataattttttattgtgagtaaatgtaattgttagttacaacaaaaagttatttgtgactaaaatataatatttaaatataaattgttataaatttagttttagtcacacaacaggtttcgtgacgtataaaaacgtatttagtcacaacaaattgtaatttttgtaactaataattttactcacagaatttttagtcacaatataggaatgctaatttttaattagtcacaacttttttatttttagtaattataaatcttattgtgatgaaaagatttattttttgtagtgaatgcattaatctgctttgttttatcatcgcggtttatggatgattgtatgtaaaaattgtcaacttaaatatcatcgtccaaaatcgtggatagagggttttcatgtcgaacaagggtaggcatgcataatttgtcttttttttttctttttcttactatattatattattttatataatataatatttagattgaataattaagtgtgataaattattaatttggtcaaatagtaatatacaataagatgttacattattttgatacaatatatatatataaaaaaaaagttgcaaatccttagaaataatgatcataaattgtggaactcttctcttcatataattactcttaaattagtaaaagatgtaactaatttaatttagatgtgaataaaagatagctattgaaaatatagctattggagacttaatatattcattcataaggtgtataaatagttcaaaatcaagtggaactggtttagaacaccgtatataagaattggtcaaatctgaaaaaatggtaactagcgactagttactatttttttcggtcatacaagtgcatttatttttaaacgtttgggagtctttctaacaaccttaaactcctctaaatcacttaattaataccataaatgaccaatttatgattggtaacatccaatacctttatagtagtcattcatgttcatatatgggagtggaagctctatcaatggtcactatttgtgctcttgtgagacatgtagtttgatcacttgttgtggttagaactttgtgaggatatgctcacccttaaacactagactgaacatatgagacttgataaatccttaagagaatttctaaaatttccctaagtgtccacgtgagggaaaaaatgacttataggacaaaaatattcttgagccttggtcaagcttattgtgtcttcttcttcttcttcttcttcttcttcttcttatacttttacttgtattgtaagtattttgtttgtaattttcctattctctcttgtaatgaataaatttccgatagactataggtaattaagatccaaatgatggcagaaatattaataaatctaaccctaaaaatcgaattaatttatgatcctccattcaaaaaagaaaattaatgatgttcctctccctctcatttttatctataatacattgtgccaactcatgaaacatttgtctcaattacattttagaaagagaaatttgccacctatatatgtcgagctcaactgagtatttgtagtacataataagcaaatatttttttgctccctatgcatgttcaatacttaaaaagaaagacgatagctaggtactttgtcactataataacccctaaaaatataatggctagccactttaaaaatgaataattttttaactattgttatattttccaagttgatattaatgaaaatatatgtttcttagttgaatgttaaaattttgaatgattgtatttgatgagatttcctaagattattccttgaagccatcttcatcaacaagattgcattatttaaatatacatgtaatgttatttaattgttatatatgggaccctttaaacacaacatatatatataattttattttattataaataaattgaagaaaaaagttgaataattatataaatatttaattttattttatattgattttatatacatatatatatactagtagaaagctacgtgcgaggcacgtat

SEQ ID NO: 316753 - DNA, 977 bp, Cannabis indica
tttttacactttaaaataattttcttacatttttacttaattctacttaaaaatcactataataactaatagaacaatctaaattgcaactaaaatccacgtaaactcataaaaactactaaaaaaaattattgaagcaacccaaatccagccaaatcgtaaatttgaaaaaaaagaaattaaaaaaaaatatatatgagataatttttcaaaaaaataaactaaagattactagctcctattaatatctactatcatcagtgtaaattcatattaaattcatattaaatctcatgcacaaataaatatttaaatttaaattatatacacaacccgctatttaattatattacaccaataacatagaaaatgcgctcaaataaaatatatttcatactataatttatcagctaattaatggtcgtgtgggatatggcaattaattagaggttgctctttttaaaacgttaagcatatatatatatacataagaaatgctattattataacatgctgtgaagaagtttgttggttcaataatatccaaaccaaattaaacatatataaaacaaatcatgtttatgaaagtgaatcatattttttgggctgctttttgtttattgagtgggcttaaaagactatatatacagaagcatatatgggaaacacgatgagataacgttgtcgtatatgctaaaaaattgaagtcaaaaccaaattaagtgagatatatatccacatatatgtaataattaaatcttatctttatatgggtgggtgtattgcttacgtccgagaaactgagttcctaaatacccctgaaaaaaggaaagttcttaaactgctcttatatggatttagtgaatgaaaaataatattacatagagatagaagttcatcttaaataaacaagaaaacaattgcacataaaacatctttaaaaaaaaaagaaaaaaaaataagaagagagagagaag

SEQ ID NO: 316754 - DNA, 2644 bp, Cannabis indica
aatttcattcaattttaccgttttagtgattatttatgtactaaaccatgctcctttgactttgatatctaccaaattatgcccctcaaactttgatatgtactaaatcatgccccttgaacttttatccatgttataatttttttactaaaattaaacaaaagtctttaaatttaacaatctcaatagtttggggagaatttttaacggccaaaaaagttcaggggcatgatttagtacatgtcaaagttcagggggaaaaattactaattagcctaactttaattacaagctttctctcaacttttaacaccccattcctttcctccactactcatttgccacaagaatcaaatctattaggtgaagtaacacactgtcacattattacactccaaaagaatttttcttttttcttataattagggcaatgcagcatctttttctacactttgaagaattttaaagataggattttgctctggaaaaggcggtggccgttggtatacaactgatgctgctttaatcaagatcccagcagtcaaaccccatatcatgaacttgttattctctgtttcatagtcaaagaaatgaataaggtacttgttccccatccactctctttcttctactcttctgttctcatcctagacaaaaatatatatgaatatttctattaaagatccatccattttagacatgtgatttgacaaaagtgaatatatataatgaatgacagtgaaccttaataaacatttccaatggggcatcaaatacagtttctacttcatcaggattaggagcaggcttgaatgattccttgtcattaagtatgccaatgactggaactactctaagaagatgctgcaagtagaagatgccaatgattattaacattcaactcaaaatgaagcaatgggccattattcagatcagatctctcaaatgaatctatctatctaggtctatgtattgattgataatttaagatgaaaatagaaaagaaaaagcaaaaaaaaaaaaccttggaaaggaatggttcaagaaccgtcacaacattgacaagtgatggatccaaaccaatttcctcatgtgcctccctcgtagctgtgtcaccatcatccttatcaccctcctctgctttaccccctggcaaagcaatttcacctgcaaaaacaaaaaccccatcaaactccccatttcagaaacacaacagattcccaattatctcataaacttaacccttacccgagtgagtagacagagtggaggaccgctttgtgagaattactctcagatccccagcatctccttggaaaagacagattaagacagctgctctcttttgtttgaatctttgtgggtttcggctaattggggtagccgattccacgacacccacttgggacacgacctttcctgcactctcttcagaggtggcctcctctgaatcatcatcaaagggcattcgcggtgccttgtagtgacagagctgttgggccaatgccactaggctctcagaccctccaaaccaatttgctgttgaatccatatatacacaaactaatcgtcgtctgttgtaagaagaaaggtgaaaataagttaattgatttgaggcacacaaccaagagctaattgattaactgttaagtcattgtggtagagtaaaggatagtttatattgtctctgtaattctctgttctaatctatcaatctatacacaagtttctctttattttgattctgctattgttcttgtaccagcagagtcggtctaatcattaggtacaagaaaataaatctagctgagaccaatttgaaatctaaattcaccataatcatcctttctgaccatttcctaagttcaaaaacatcaatttctcaaaaatcagatcagatcttcactacaaagtatcaaatactactccatctgagaattatcagtacttataaaaaatcaaactttgagtgttctaagcaaatgaaaaggcaatgatatacagaaccatgattattagatgagatcttcactagaaagtatcaaataaaaggcaacaacagtatgattgtttgagcatttgctaagtttaaaaacatgaatttctcaaaaatcagaggaaatattgagtacaaaacagagtatgaaatagaagaatgtaaataaatttagtgttaggaaaagataccaaaggattagaagatgggatgggagtggaggtggcttcggtggtagtcgtcggagtgaagcggagcaccgtagttagggctattttcgtaactgtgaagtgtaacagtaaagagtctaagacgacaagggtggttagttagttagttacataaatattaagcacattaaataatatttgggtaaataatattttgtaacctatgttttgcaaaagttattgattggaccatttattttgttaaatgacaaaatagatcatgtattttcttaaatggtgaaaataggaccctgaatttaatatttgataactttttttaataaaaccaacttgaagacaattcctaacacgaacagatacaaaaaatataaatagttttatcataacccttttaaatcgaaatattattaaattttattttgaaaaaaaatcagttcagggtcctatttgtatcatt

SEQ ID NO: 316755 - DNA, 810 bp, Cannabis indica
gtgatgacgtggaactgaaaatttagttacggtctggtcggtttgatggtcggtttcagtttatcagtttttatgaacacccctaagaggaatcaatattctatgtattggttaattgctcactcgctcattcatgctggaatagatctgctttgggggtgggaaattctgcaacaaacacttttgtggactggtttatggaaatcacagtaggggcaactcaggtctaatagaagaagttgtgatggttagttgggctatatggaaggcacgcaatatgatctgttatggaatggtaaaaaaaatgtgttgttgttgatgttgtttggttagctcgcaacactcttcgtcaatgggtcttttcacagtcgcatcggttggatcccgtttccctggttttcaattctattgacaggagggattgctggaccaaaccagaagctgatatgcttaaaatcaacgtgggtggagctgtttttgaagctacgaatgagattggtacatgctttgtggcttgagactgtgaaagaatattaattgaggctttttctactttgtccatcacaagttgccagcctgttgttgcaaaaattttgagtgtcaaagaggcacatagttggataaagaggaaaaacaagtcaaatgtgataattgagactgactgcatcttagttgtccagcctatccttagttttgtctcaatgctatctatatttggttagattattcaagattgttagttcatgctttcattttttttataatattattttcatttgtcatgttaaacggtctgctaacaaagtcgcg

SEQ ID NO: 316756 - DNA, 1201 bp, Cannabis indica
ttttagttatgatgccaaacatggactaagtaatcgagtgttgactcaaaatttggtcaactgatagtggagccttatttattgttgacaatcactacatgtaaataataataataaatgataaaagtgacataggaatttatagaggtgcgaccctcttgattaggaggcaatgacttactctccttttagttgtatttactcttgagataatagcatgcagattacaagcttagaacttgtaatttctagctatggctctcttcagtattacaacagtaagaataaagtgttacagattaaaaaactggcaagatcttgtgaagaacttatgaagaaaagaggtttagagcctaggaggccctgggtgcgcatgagacttagagagaaagagttctatgcatgtgagaagcttaatggattgtgagaaaggacttgtggagacctttattacaaaaaaggatagttaaatctctagaatataggactaatatcttgagagaacattcctatctttgtgggttattggaactatcttgtaattcattcatcatgttcggaattgtttgcacaagttggctagccaaccctatttttagggcctggccggcatgtgtccctccatgggttggccaagtatggtttgccaagccttttccacacaacttcattggtcagcttgtttgtacaactttgctattcatcttggttggccagctttccttgcaaaggccaagcctccttggttgaacaggcctctttggtttgacagtcattcttggtcgactagcttgttctcaaaacttggctagcctataagtttccctcgtggcctacaagcttcccttggtcgaccagacatggtcgaccaaggtcttgatggcctatttaactccttttacttattcttacttgatagttttgtttgattgctttagaaccgttgacagttaacatgtcgtgtaaggtgactttgtcctgttattaacaagttgtattccacgtgtccttagttttgactatgtcgatatgccacattaggtggactaaatttgagataatatttgccccccaaatccctgttaaatcttatttttaacatgtatgtttgattatattctataatctaacaccccaaacatgaattccctaaaataataaaataaacgcatataaaattgtagaaaaccttacattggtg

SEQ ID NO: 316757 - DNA, 1152 bp, Cannabis indica
atgttctcttctcgctcgttttttgtgttttttttttcaagttttttgacaatgtcataaaacatcgctaaatgtcgctataacgcaaaatatcgctaaacacatcactaaatgtcgtaaaattacactcaagttttcacaatgattagcgatgtattgtgcatttataagtctcatgttacaaatacatcgctaatatcattgctaaacacgcaaaatatcaccaaatattgctaaacttcattcataacctcacgtatgatatactattgcaaatacaacgctaaatattgacaaaaaactagaaaaccaaaagaaagaaaaatacaaaaacaagagactgcgagagaagacgacagtaggagcttacaaccgaggttaaggtctgtgtgttcgatggcagtagttctgagctaggttcaatgcaagaagtgagagagttagagagataaagtttttttgaaatgtaaggatgtttttaagagaaaaaaattaaaagtataaatatattatttctaattgggtgggatatataaaaacccttgttttacatttaagcataataagccagaaagttgaaagatgaaaaaaaatattagtaaaattataaaattatctttctaaatataaatattagtcattttagaagaataattattgtattattattattattattattattattattattattattattttgaagagttaaatttttaaattttaaagtttggcaggagaatgtcaccctccttcattcttcttgtcaaacaaagaggatatgctatttcaaaaaaaaaacatcattaaaactacaaaatttcaagaaaacaaagattaaaattaaggaatcaatagagaaaaaactacattacactataccatactatactatagatagaagcatccattttttccaactcttaattagtccatgaaaaaaaaaattgttaatttaaaaaggtaaaactaaacaagtcatacatttttgcatttttctactttgttttaaagcatcattatctttgtattgatttaggcttattattatattaaattaggagagagaaataaagaaatagttattgtacgtaggttagataatagactaaggtctcgtttagaacgccgtattaagtcgtattgtat

SEQ ID NO: 316758 - DNA, 2827 bp, Cannabis indica
atcgtgggatctgattacatatagtgatcccaatagtgaactgggaccattcttctttccaaggtcgacaatgtatgtcttacatcgatcgcaggtataaagaaatctagtgacttgccagggttatgagcctcgctcctgtgtgttggatgaaactataggaattctcctcatagcgagatggtcatctcgcatacttgttcttcgagccgatccgacttttacacttattttacttattgcaagctaaggtatgtgtcactcttctttggtacctcgctatttacctttagcaacatattatttctcgttaatacactaagtgccagtttgtacattaattcctcgcctaagaccttatagtcagcgggttgcaaatatactctcatacttacgtaattaatgagttattccataaaaagattttgcactgattcacattcactttatcttgacacgtgtcctccaactgaatttcaggtataacacttacgcctagtcgcctaggattcagttttgctttctcttggctggggttgctgttggcatatttgtgtggcttgcctaaccctagtagagggcatatgggtcacgacatgtaataccctaagattaagaaaacggattagcgaaccctaactagttaaatgtgtattattgtgaaaatatattattatataatttaatatgtgtcaattatactcataaatgacatgttaagaccccgttggtgagccaggggtattttcgtaattttgacccgagaagtgtaaaaattcaattttaatgttatagcgtgctcatgaactatattaatatatagtatacttgctttatacttgtacatgtgttttttggcaagtcggcgtggtatactcacaatcaggtattttggaccgaactgggttcggggccgaaatacatttttagggttttattttggaattttattaatgattgaataatctgaaaaattattggtgtggaatgtgatagaatgacatatttgcccttgagttatgcttatgtgatataatggccataggggcatttttgtatttttgaccatttgttttactttcaacaaaatgagattttttttggaaaaaatagaaagaaattcatttatggttttccttgcacttggccgaaccctctccccctctcttttactcatctcttcgaagcttttgatttgagaaaattacttgaaattggaggtgatcttgaagtgattcttgttggcactttggaggcttgcatattggggtaacatcttgattttttctttgttgaattctgcatttagtgaagcttaagatatgtatttttccatggtgtatattcttgaatgcatgttgcttagattatgttcaaataagttattttatgcttgaattggttagtaggatggattagattgctttgtggtgtgtttttgagagaattttagggttgtattggtgtttctaatttgatttgcagctctaaaattatagttattttcaagcttaagtttatggtttttgtgatcaagatcttaaatggaagttatgttgagttttagctcaagtttgagcttactttgattgttggtgaatctaatttttgatgcatgttctgttgaggattaaagcttgatttatgtgttttaattctctgttatgatagttgcaataagtggagtatgaatttgaagtgtatgcatgttttggttgagatttttgtgcatattgggttgaaatcgtgtggttgtttggggttttctgggtatggaacctaggcgctgcagcccaactcattgggcactgcaacctgcccccttgtaaatcctaggttttcaaccatggtgccgcgactcgtatggggagtgctgcgacccgccttgtggttctgggcagtttcaaatgcattatttgaatgctcataacttagtgatcgggactccgatttaggtgtttcgagtatcattagaaagctcgttccgagatttatgtatttatttgaatttgattgtcaattttataattatgtaagaatggatttagggattaaccctattatgtgaatcccaaaaattgtgactaggattactggcacttgatcaggagcacccggagatttggaatctccacgtactcggaacaataggtaagaaagtagttagtacgtagagttaagcgcattggcacccatgttgaatattataattgtgattaatttaagaacccggattaggattattacccgaaagtgagcggttatatggtctagggttattaccctagttattattgatttttaaatcctatgccattatttatatattgatttaaagaattatgcactgaaagcataatttggttggactcagcaattagaaccgagatggttctaaggccttattataaataaaagtgtgagcgtaacacgtgggtctatgccacataaatgtaaataggcgtgtgagcgtaacacgcaagtctatatcaaatagacattaagtgtaatggcattattactatacatgtgaaatgtatattgtgattattgatatttataatgtcttgctcgacttggctcacgggtcctctactgtgcaggaaagggtaaatcagtctatgatcagccatgagtacgagagcttggtgatgcttgtacatgctcgagccacactagactaagccggttgggtctatcagtgattgtattttgtaatctcaattttggccgcttaggtcgacacgtaaattaacttgtaatattttgtgaaggttttacgggatttcctgtcatgtaactttttggtttgtttataaagttaaaa

SEQ ID NO: 316759 - DNA, 2073 bp, Cannabis indica
agtgaactactataaattttttgtgtctctcttataattacttaacaactatttcattcttgccaatctagcaagcaggtgtggcttagaagtgtattctagatttctgagtcaatactttggtgctttcattgagaaccacaacttaagaaagttactaataagatggttgcaacacaatctacaagtgttgacagaggaatcccaacttctggccaatcaactaggggcacgccagttgatggaattggaactggagctactcttacgccctaggtgccaagagcagacctcaaaactagctccacaactcatcctccaaggccaccaaatgctcccaggactggcaccaatgaccagatcacacttggggagcctcacgtggagattgatgaccctaaggaggtcgatcctcgagtctcccaactcaacaaaactgtggctgacttgcaacaatagctgtgagattctctctctcactaatcaacacgaacagtttcaacagtggtatgtggaaaactagaggaccattgaaagccaacaagttgagcaagaacactggaaagctaacctctctcaacagattagagaagcttattgctttggtcgtggaactactccccgccggggtcttttcaaggttgttagagagactccccgtcaacccactagtcatgtgggaactagtactcaaggagaaacccttaatgctcgaaatcccactaccacacctagtaaccgagcagacactaagcaaacactaggcgttgagacattctagagggaaagtacaatcgagcaagagtctgaaaggactcaagctcatgggcaccgaccaatgggccctccacctaatgttgaatgaccttgtaacactgagagaaccaacaggactcctccataagtctttctcaacactttcatgacactaggccccaagaccctgcaaagggaaagggacctgccactcaaactggaaggaggtagtaggagacactactttaaaacgtagaggctatgagatccggtgagtaagaaccaatgaaaataacttctgagatgaaagggtgaattgtgtcactacttttcccatggccccgactggacaacagtatgagtaattcccttgagtacatggagaggagttgaacttgagcaaccagttcaattctctttagacttgtgatccagttgaacactactttgagggaaataaccactacaatgctccgaatgaacactcccacaaaagatcatcccaagatgatccgaagttcattctagagacctcaccagtgttaccttcacgaccctgtggtcaggagacaacaacaagacccaagtcgattggagtacatgatcaactaggaagacaagagacctgtgtgacatcttgaccaagaaaaggtcaatgaaagaggaacttctaaaggagatcctactggggaacaaaagctccaattaggatgcagaacaccacccatggggtcaatcgggaagaattcgacacctcgaaagccttagtgaaaaggatcacgactcctaagttatcagatttcgaacttgacagagagcagcggtcataactctttgaacgaatcaaagctcttcctatccctctaaagttcaagaacccttccgagcaccaatacactaggaaagaagattcgttatctgacatccactactttgaagtgcagactgatctactgggtgtgagaaatgatgtcaggtatagaatcttccctgctacactaacaggcttggctcagcagtggtaccttaagctctccactggatcattcgactcatgtaaagatctagtggctgcttttggcagccaattcactccatctggccaatgccagatgaaacccaatgatttggtggatgtcaagtaacaggaaggcaagctcctcaaggagtgcatccaatggttcttagaggcagatgctatgaccaaaagtcttagcgagaatgcaagggtaatggcacttgcagccagactcaaggagatgagtcctctgtggtcctaccttttttctcaaagtagtatatgttggaaattatttt

SEQ ID NO: 316760 - DNA, 4072 bp, Cannabis indica
ggccttgaggaaaatatggcccaaatcgtgaaaggaagtggagtcattccttcggatgaaagaatggtctttagtcagaatgaggaaggaattcaaggccaagctttacctgggccaggccaaaagaaacgaaaggccttagtccatgtgatgcccattgacggattgggccagcctctcccagatgccttagtgagaaacatggactcagacaaaatttttgcaccagaaggatcacccgtctttgtgattgggaaaactgacaaagagactttattaggcggtgggaaattcttgaacaactcttcatctagtaagaagagagcgagaccaagaaagagtgttacgtgtaaaagctcccagaaaagccatgaaaaaggtgtcggggttgagagcaggggactggaggaactatgcgaggcgggggaagtttttgtggacatttccattcaacaggattttcagatggacgaggaggcggcccttatcaagcccccccatgcccaatgattatcctttcctggaattgccgaggtttggcccggaccgaggcatcccaagcgctagaagcttggacaagtaagtttcatgttgattgcttttttctaatggaaactaaaattgggtgggatcatatggatttagttcgaaagaatttggggtttgattacggggaatttattctgtcggaagggatagctggtggtttttgtttcctttggagagctgatgccaatattaaagttctgagaatacgcaattctccctttgaatgtcgtctgtgggagcctcaatgtcaaaagttttggactttgtttgcggtgtatggccccccttagacgatgaaaggcttggttctgggaagaatttaccagctatgtttcgaaggaagaggatctgttggtggttatgggtgatctaaatgtgagtttgaacagagaagataagattggagggagacggtttgtggagaaggatggggagatccttcagtctttcctcgattgcacaaggggagtggatttgggttttaaaggttgtaagtacacttggcagaacaagcgatttaaagggggtttaattcgggaacggattgatagagccgttgttaacactgagtggctctcaatttgtcctaatggtggagttcataatctgcctattgtggcctctgaccatgggcctctaattctctatacggaaatgaaaaagggtagaggatcacgggttttccgcttttatgaggcatggttgcgtgaaagtacatgtaaggaggtgatcatggatacttggaagctgagtgaaaagggcagagggagaaattcgttggtgatgtagcttaaagctgtcaaaggggccctccagaggtgaaaaaagaagtcgtttggggacaacgaagccaacctgaagatcttcgaagatagattggcctggattcaatcgcacgaggattttgaaaagttctatcaagaagaacagatgataaaaaagaagatttctaaagaatggacaaggaacgaaatggtgtgcaaacagaggtccagagaactgtggctgaagcatggtgatcggaatagtaaattctttcatgcctccaccatggtgcgacgcaaacgaacccatatatgggcgcttcatgacagtgagcataagagaagagagagggacagagagaagggtgacatccttaatgacttttttgggaatctttttaagttttcaaatccgtgtcttcccgatgatcttgaggatctgatctccccttcggtctatgtggaggaaaacattatgatgtgcgacatcccttcaagtgaagaaatctttgatcatgtatctcaaatgcatccgctaaaagctcctgggctggatgggatgtcaggtattttcttccagaattgttgggatacggttggaactaaggtgatagaatgtgttcaagagttttttcgatcggccacattggaccacgacttaaatttcaactatatctgcttgattcccaaggttccaaacgcggagagggtggaattgtttagaccgattagtctttgcaattttgtttacaaactcatttctcggatcctttctcaaaggttaaaagggattatggatagagttatttcgcctttccaagaagcctttatcccgggccgttagattgcgaatgcaactttgttaggtcaagaagtggtgaattcagtgaggaagaacaagagtagtggaggtcttatggctatcaaaatggatatgcataaagcttatgaccggattgaatggtgctttttgagaaaagtcctgggagctcacagtttctctagtgagactattgatcgaattatgacctgtgttactactgcctcctatacggtcctactcaatggaaaacctctcaagaagcaaagaccctcgaggggtctgcggcaaggtgacccgatatccccattcttatttctgttctatcatgatgtcctatctagattgttgcagaaagcgaaattggccagaattattaagggcatttccattgccagaggagctactccgatttcacatctcatgtttgccgacgacactatggtgtgtatgaaggcaagcaagaaagcagctatttgtatcaaagattgcttacacaactatgagagttggtagggtcagctttgtagcactcagaagtcgggcatcttattttcgaaaagatgttctagtggcagaaaaaaggaaattgaagagattcttcaaatgaaaagttcggaggcaggaggtttttatttgggaaacccgatggttctatctaaggatcgttctagtgactttggttgtcgagagtaacgatgagtcgaagaacgccgtgctttgtggacaggttgagaacccgtcctgaagggtggaggctaaagactttatcgtatgttgggagaatgaccgcgatcaaggcagtggctttggctatgccagtgtactctatgtcaactttcactatccctcttaatgtttgtaggaagatggatgctcttgtaaagagaattttggtggactgggggtttgacgtagacacactttctagcctccagaagttgggactccctgtgtcagccaaaagctagaggaggtctgggttttcgaaaatttgaagacattaatcaagccttagttactaaactagcttgggaaatgggtttaaatgatgagaagctatgggtttagatttttaaggagaaattttgtttttggaattctttctgggtagtggaaaaaacggtgggtgatccaagtatatggaagtctgttctagatgccaggaagactatctatgaagggacgtgtactattatatccaatgggagagacattgatatatggtatcaaccttggatcccgtggatggactatgaggaattcatattgactatggaggaagtaaggatgaaagctccaaatctgagaaatgtctctgatctgattctgagcggtcaaggaatatggaataagggatatgtgaacttcctttttgggccaacggtgggtaaccaagttaatgctatcgatattgttgaagggcttggtaaagatagggtggtttggaagagatcccccaagggaaatttctctgtaaaagaggcttactggttgaaaaatgagtataagttcggagatactcatgacttgtggaactttatatggtccaaggagatgcatccgagagctagcctgtttctatggagaatgtgcagtggggctttgcctaccagagataagttaggaattggggaccatttggattgcttgctttgtgatgggaaggtagaaaatcctcttcatgtcttttttgagtgcaatttggctaaaactctctggttcggagccccattgcctgtcagaatagagctgatcgagggagaggatgtaaagacaaggacgttgaatctgtgtttaaatctcaggaaggaagatgtggtgagaaccttgctatgtggctatgtggtctcggatacattatggcactgcagaaactcctccttacatggggaaaaaatccgtgacaccccttgtaacaccctaactatcttaggcg

SEQ ID NO: 316761 - DNA, 2075 bp, Cannabis indica
tttttgtgggctgttaaggcccaattcatggtttggcttgttgtccacttatgaaagttgcacaccaaaatctcatcaagtgaaaggctggtcgggcatgtacctttagagtgcatgttggctgaccatgagatgttcagaagctggccgacctatgttggccatagggtcggctaagggtggccgaccaaccccctcgaggtgctttgttcgtcacttcgtcatctcgcttgagtactcaaatccctcgttggttgaaatgatgagtagttagcttgaccctcttgttggcgagctgtactgccacgtcaggtgggcaaaaattaggataacatttgcctccaagttcttgtgctgacgtctatgcgaatatggactttccagcttagttgggactgatgtaggccccccagactgctggttgtcgagatttggctgttctcgccactagatctttgtggcaagacttgttctcttttaggtaggagaaggcatgtcttggttcttgaggaacctggttggacaatctgttggtagaccctccttgatctgtcgactagtcttcctttgaggagatttctgatgagatcttggcctttcccaacagttctctcattgaacttccttatcaggttgctagcttctctattacggcggtctagctctgcttggtgagatcgaaggatgtactcttggttatccatccacctcagaaatttgtgtctctattgtgtgaatgcatcgcagccaatagcgcgtggttctttaatttgatcaatttggtatacatcttctcttatctggccaattcgatgtcttctctcaagtctacatggggcataccaatggctgggtcatcaattcttggccccgtctctccaatataatagcaaggaccatataaagttacagtgcctaggggttgatccacgcgggttcttccctcaccaggaggcgccggtggagggtcttccttaggcagaataggttgattattcagacccacatgaacgattgtgtcgtcctggccaggttcgtggtgcctgccgaggtggcaagagtggccatatctgttggatttgtggagattctagttgtgactggaacatgcaccttaggattagcattcatggggtcttgaggaagacccgatgaggccaaaattgtggctagagtcctctttgtgttaaccatggcgtttgatcagacaaattaacatctcgctctcaatgaaagcactaaattgttgacctcaaatctggccaaccaacatcgaaattgaatttaattctgatgcttgccacgttacacaattagaacacaataaagtaaatagatacaaaattttatagaggtttgaccctcttagttagcgggtaatgacctactctccttttagttgcattaataccgagagataatactacttagatcactatagtaatgagatctaaagtagctctcttaaggttacaatgtaggaattagagttggcaaatctcaagtaagagaagagaaatgggtgataagtatcaaacttaagcttaaggttagactacttagggtttaagattagactagactcttatataggagagctttcacccttcaaatcctttgaaatagttgaaataagctattattggcatgttaaattaataaaatacaaatgactaaaatgcctctcgaagatggatatttttttctctatatttgtgggctattatggcccaattcgtggtcagtcttactgtccacgtataaaacctgcacaccaaaatcctgttagaccaaaggttggtcagccatgcacctgttgagtgcatgttggccagcaatgagatgttcagaagctaaccgacctatgctggccatagggcggggaggccagggtggtcggccagcccctttgaggtagctggttcgtcactttgtcgtcccgcctgagtactcagacctctcgttggttgaagtgctgagtagatggtttggccctattgttggagagctgtactgctacttcaagtgggtaaaaatcggataacataccccttataatgtttcgacatttgaaa

SEQ ID NO: 316762 - DNA, 1798 bp, Cannabis indica
atattcttttatttttaagtatattctgttaaaccaagaaataccgttaaataggcacttttaatatataaagatatatatataaagaaaaacaataaataaattattttatatatatttttttatttctactaatttaagatactttcttattttattttgtaaatcaagtttgacaataaatattttaaaaataatctcaccgttacaaaacaaatatttagaggccttttttattcaactgattaataaataattgatattatagagtgtggttaaataaaattttaataaagcactttatagcatcgattattataaaataactgacatcataaggtgttaaatttttaataacaccacatatggggttggttattttgtaataaccgacgtcatagcaggagcatgcattggatgatgcgtgtcccctatggcatcggttattacaaaataaccgacactataggatttatataaccctattcatccctttgtctttgtcacttcgtcttcaccccaaacaaaataactagtaagcccttcacaaaaccctcgcccaatcaccgcctcacatcccctatttctccattttcatctattctcacccacttttttaaatattgtatttttcatacctaaaaatatgtccccagagtttgatcgtcttttgtttttttttttctagggtaaattgagcttagagggggtggttgtggttgttgtagctccggccgccgcttttggtggaaaaatcgttgaatctgattgtctattaagatataaatctaatctctaataattttattaatttaaattgctttatttttcattttataaactttattaggggttttctagatttttaagattgtgttattgtggtggtgcatggtagcaagattttggtcggtattggtggtcagattttagaaataaggtaaaaatctaaactttaatagtataaatatatatatatatatatgtatgtatttgtattttattgaatatgtattgtatgtatatattttgtaattgatgtacggataaaaatattgtacttcttcttctcatcttcaatttccttgagactttcttcatcaattgcttctgaaattccattgtggacaagcaatgccttcatcttgatcctccacaaccagaagtcattagttccattgacctttgtcaatctcaaatcctgttgcagccatcttcttgatgattcttggagccttcgaatttgaatctctattgagctaaaaccttactctgataccacttgttatgatcaatcatcacctctagacaatcaagatcaagtgctcaaagagcagaacacataaacatcaatggcagcagaatgttaataaactagtaaaaaccagggacaaaatcagcaagaacaagttgaaggaactgcattgattttattgataagtggaggaattacattgagagagaaagagagagtaaactgtacaatctcccgtgaaattatttggattggattctatataagcaccaattctatttacaacatctctaaccacgtgtttttacatgaaactcgattgcatatcaaatatttgaatctaaatatttagttttgttagtgggatagaacgggatcatcaccagcctttagtctgtcaataatgataagtttacgaaggcacgtctaggggctaccatctattactctgttaatatccacatcatgatagaattgattttattgtatcttttttatgtattgtatatgtctatattgaatattttaaattaatagttttgt

SEQ ID NO: 316763 - DNA, 1136 bp, Cannabis indica
ggtagttttttgaatgtaaaaaatgacctaagggagctctccttttatagttgacagtaggaatagaaaatttgggccattttgcgggccgggttgggccatcttaggcccggccggcccgacccggtacatattatttcgggtcgggcgcgggctggcccggtttcagaattgtttttaaacaccaccaccatgaccatgtttaagtgcactgttttctagtaaatattataaaccttgattaatctcaactcaatcagttccaaatatgcaagttacaattatcacagtagtattcaaccaaaaaaaaaaaaaaactaatcacagtaataaaatgcatttttcttctttaaaatgttgtttttaatattattttattgtttataatgtactgtttatattggaagaaagtaaataagttgaacgaatatacatgttattcagacttggccaaagacaaaaataaagttaatcccaaaaaataacataataaaatttcatttattacaatgcagtataaaatcctttttgtaggtagacaaaaattaaaggggttgtatatgtacatcatattggtatttaacaaattttataacagataataatcaaggactaataataggtgccaaaaatttgaccatgattacttgattacaaatttcaactaaaggttggaaatttcagctgcaaagaacctgtctcatctagcaaagaagacggttttatctgcttgggagtttgtcttaagtttttcatgtttgtttagctattcacatggtaatggtgcttagaagtgtgaacttcttgtaatggccaagttgacaaaaggaatttggaaattgttttttcactacaagaaaaggcatttttaccggcacagttcgtcaactgcgccggtaaaagttgtcgagatacagcaaaatctgaaattccacttgcatttaggcttcacttttaccggcgaattattacgccggtattaaaacgttttgccggcgtaataatgaatatgcgccggtaaaagtgacccaatgaagtgccaacaggcgcgagaagtttgccgcctttcatttcatttattatggcgcttgttcacttttaccggcgcacaattgcgccggtaaaagtgccaaaaa

SEQ ID NO: 316764 - DNA, 898 bp, Cannabis indica
tttgaacatgaaatatcaacttcattgaaatttagcattctaattacaaattggcctgaaaatcagctagaacatcaacatacagaatgccagaatcaaagtaagaccgagagcgcctagccacaaagtgggcgacttgatttgttgatcgtctaataaaacgtagactagtattaggtagagaggataaaagaattttacaatcattaataatcaaaccaaagacagaagacatttgctgcttactaaagattgcctgaacagtgagcaaactatcagtttccacctctaccatgttccaactcttacattttaaccaactaagtgcctccttaacccctaaggccttaacaacctcagcatggtaagacccgtggtagtacttggcaacaaaatcaataaccttgccatccgagtcacaagcaacaacaccaaacccgtaggcattatctttctcaaaggtggcaccatcaacgttgatcttgatcgtatttgtaacgggtttcatccactgctcaaggttgttaccatcactcaaaagagaagatgataacaaacaagttttgtcttgagctttatgccagtggtcaagagtagtccaagctaaagtgagaatctgagaaggagaagaagctttgttgtcccagactacacactttctttaaaatatgagaagtgttaccgtcaacctcctattataacctcttagtcaacctctgttttcgaaaacacatgtcagtaatttttttttttaatttttttcatggcgttgttcgttatgctttcaacattattcctgtaacttttcaaaaatttctaaatagtttagagtgccaaaaaatacatttgaaaaaccgtgtttttgcaaatgtcagttgtatataagaaaataaaaaaa

SEQ ID NO: 316765 - DNA, 965 bp, Cannabis indica
tgttctatgttatatacaaatagatcttgggtatattattaattttctaacatgctaagcatccatgagagctttaagagatttcaatttggctctccttgctaagcaagggtggagattattgacatgtgacgatagcttgatgggaaaaattttcaaggcaaggtacttctctactggctcttttcttacagcttcgttgggtagtaatccaagctatatttggaggacgtgtttttgaggccaaggagttggttcgggcaggtgtgcgtcgactttttggcgatgggtataacattggtattctatcagagccctggttacctgatgagttgcatccctacattgaataaaccatccagttctagtagggaatactgtgaattcattgatgaaggatatggcatggttgagtgggatgaagaagttatcaaatatgttttgagtgacagggatcaaaatttggtctggaaagtaccgctaagtaatcattcaggaagtgattcctggtattggatgcaagatgactcaggtattttcacagtcaagagtgcgtatacttgactgcagaccattaaaaccagcagtaatataccagataattctggtttctggtgtcaattgtggcatttgaaacttcccccaaggtgttaaatttcttatggagagtctctacaaatagtctaccaacaaagttccaactttcaacaaaaaaattccaattgatccttggtgtcccttctgtttggcagcaccagagacagctttgcatgttcttgttcggtgtagctttgctcaaagcttttggagccgatgtcatgtaccatctgctgcacctggtctgatggtttttacaagctagtttgaggttggtttgaagacatggaacgcatcagaaggtcttgaagcggtaatgatcttgtggtcaatttggaagcatcgcaatgagttggtgtggaactcca

SEQ ID NO: 316766 - DNA, 1017 bp, Cannabis indica
tttttgtgagggttcacccactttgcccttacccttgtctatgagagggtttgaagttccagtgttagtttgctcacgaacttgctcttcagtcacagcttctacagatggttctccatccgtcctagtcaaaccagcaaacatgctctaaagttgctccatggttgctttcatcttggcaataagcctttgttgcttttctagggctgcttgtgtagcctccaactctgcggttacttgcaccagactagtgtcatgttcatgatactgaccatctttataatatccatctttatagtagtcatcgtcatcgtcctgatcataatcctttaaattgtggccatcaccatgtctctctacgacgttctcgatattcttttcttgattctcaatagtggtgtccctctcatagttttacgtagcagctacgccttctccatcattgtccacctgtgcgttggttgcatgagaggtaccttcctccatgaccgtgtctaatagagttcctttgccagctgcctttcgcgtctttaccatgatcaaaggacaatgaacactaccaagcttccttcaactctcaatgaaagcaccaaaatgtttatagagtttttcgaaaaccaaatgtatttaaagcataaagaaaataggaaataacaaatgataaatagatagatttttacgtggttcaagcgttaactatccttagtctacgagtccctagccttggcctcattgggcaaatgtttatgagattacaaaatagctactaaaaagactactctgcttttcttgagagaactttgttagaatttttgaagagtgactgtaagtgaaataattgttctccccttgcgtcaagaaaaatgggactatttataggcagtcatggggtaaagggcgttcccttttaccccttgattaaggctcaaatttctacattttaagcatttaattgtttatataaaattaatttaattaaatattttcatagttttagttgtaaaattattttaattg

SEQ ID NO: 316767 - DNA, 562 bp, Cannabis indica
tctaccaaatcatgcccctcaaactttgatttgtactaaatcatgtcccctgaactttcatctatattttatattcatcaaacaaatactcagtgcatcaaaatttactttacaaatcacaaaatatggatggtcatctaatcgaacaagttgattatctatttgaagagcacgtgcaactaatctatcaataacacagattaaaaacactcttgaaaatttgaataacaaatttgcaaaaacttttaagaatgatcttaaaatattagagtatgaacctcaaatagaaaaaacaatcatagttgttaactcctagtaataggtttcaatcaaagactgtattttctgcaaataaaattattaaaaactttaaaatgtttaaaaatttatacaaccatctttttatatatatatatatatatatatatatatatttttgtatatttgtgaaataatcccttaataatactcaacttcaaatacaactacaacacataaataaattttgggcctaactggtttcaattatattttgggtgaatttcacaaatgcacaaaaata

SEQ ID NO: 316768 - DNA, 857 bp, Cannabis indica
gtagcgtgccttagcattagggcgttacagctcgtgatgtgcagctggtgtggaaaattccacttgctaatactggtatcaatgtggactggtactggtgcaaagaagcaaatggtgatttcacagttataagtgcttatgtactgttgcagcaggccaaaactagcaactcacagccaagtaactctggtttttggttgaaattgtgggagttaaagcttccccgaaggtcaaagatttcttatggcgagtgtgcacgaatagcttgcctacaaagttccaattatcaactaaacatgtgcctattgatactgtttgtcctctttgtatggctgctcccgaaacagccttacatgtcttggttcgttgtgtttttgcacaacaatgctggcgacagacccgagtaccaactgttggtactgctgcaatgactttcagcagctggtgggaggatggattgagcacgtggtgtgaggccgagagcttggaagtggcatgatgctatggtcaatttggaaggttaggaatgacttggttcggaactcaaaacagccaacatatgaagaagtgttactgttagcaaaaataaatttcatagattggtataatgctcaaaaggaggacatggatgcctctaataatgccaatagaaattggattgagcattggactccaccagctttcaaccaaatcaaaataaatgtggatggcgcactctttgctcacgagaagaggtacggcttaggattggtttctcggtcttctgatggagccattattcaagaaaaaactatgaataaggttggtacctttcaagctcatgaagtagaagcaattggaataaaggaggctttgag

SEQ ID NO: 316769 - DNA, 715 bp, Cannabis indica
ttagggcataaacccaacatttaatacataacaaatgatccatatattagcttgtattataatatttacaaagggtccatactcaactccaatattcaacccggactcggacccgaaccgagacccgaacctgaactcgaacccgggaacttggaagtggacccgaacccggacccagaccgaatacgtactaggatccagacctgaacccagacctgacctgggactgagcccttactggacctgaattgagccccgagaccatactggacccaaacctgaaccagattcaaactcatgaccaggactcagacccatacccgacccgagacgggtctgaccgaacttggaccaaacctggaccagaccgagacccaaaatcgggacccaacctggaccccaaactcaaacctgggacctggacccaacttaaggatcggaccgaatttacacatgaacctaaaccccaaaccaagaccagaatgggacccgagacctgaacaggacaatacctgggacctagacaggacggtacttgggacttggacccggaccaaaaccctgacccggatctagaccccaaactcggacccaaacctcagacctagacgtcagaccaaaccaataccccagacccgacctagagtcggtgttatggtcgagtttattaaaaatatattataactttacacgacctattaatacaagtcaatac

SEQ ID NO: 316770 - DNA, 511 bp, Cannabis indica
tagtaaatagatcctagtaaaataatttccaacagagctgccccaagacatagcagcctctagaaaagtttagtgttcggcaccccgatatctcataattgatggcattctgtaccggaaaggcttgagtatgccttatcttaggtgtgtttctgattcccaagccaaataaataatgaaagagattcatgaagggttctatggagaccacactagaggtcccaacctatctaaacaaattttaagacatgtatacttctaacccactatgaagaaagaatgcatagattacgtccataagtgtgactcttgtcaaagatttgcaaacatcccaaggttccctccgaataagaacacattgatgataagtgtaatgaccgctttagtaatttagattagtaaaggcaattagcactaatttttattattttattattatttgtgaattaatttaattgtggaccccaatatttaaaaataatattagagttataatttctcaattccggag

SEQ ID NO: 316771 - DNA, 696 bp, Cannabis indica
aacacccccgtgaaaaaaaaattgaaaaaaaaatttccgacatgtgttttcgagcgtggaggttgacggtagcactcctcaactttttaatccaattttttacataattgtctatattataattatttaattatttaggaaattcttcaaattttgagaaattcaataaatttaacatgttgaaaatagagttcaaataatttactgcacacgcgtataatatatatataaaaaaaaacttgcctgcaaaatactatttaaactctgtctttgacattttaattttttttaaatctctcaaaattttatagggtgtcttaaataagtacaatatagacgactataaaaaaattaaactaaaaaattctctcaaatgttgaaacagataagaagtgcatagtagactcattttaagggagtttattgtagaaacaccataaaaatatttcttttaaaataagaataatactataaagaagttatattataccctatatataaaatccaaaaattctacaatgcacccccttaaaaagatgtaccaatgtaactctattgattttggtctctgtaaataattttttagtcaaaaattttctcatggtcatgtacattatagttatttaagacatcctgcaaaatttcaagaagttcggaaaaatttacacgccaaaagcagggttcaaacagtgtgtt

SEQ ID NO: 316772 - DNA, 911 bp, Cannabis indica
tatttatataaatataaaatgtaaagcggtgacgtaacatacacgatttaatatattgaatttaaaattaaaatttataattttacgaaatttcaatatgaaacccttttaataaatatctaacaactcacctatatatgagattaatgttatgtgtatacttaattatatttttaatttttatttgagttaggtatacttttaattgtataatgtgtccaagaaaaacaaagactctgatttatagcacttctgctagcattactaaactaccaataatcagtggaataacagggaggaaatggtatgccaccaaagagcagctaggatccaatgaatatgctgaaagaaatgcatcctcatgaactactattagatcaggtaaactcaatctaatcttgcaaaatagttgtatataagattgatttttctgaagtagagtgatgatcaatgttcttacatgttttagtagtactgtatcataaaccaaatttaaattttaagttctctactacagttgcatcagcagatggaaaatgctgactttgattttcaggtatatcagttttgtaagccgagctgattgaagatattgtttggtggtgggttttcgtctttgcacaagccaaggtagatcaaaaaattataaattctagcattgtggttgctttttaaaaaaaattaaatatcattttagatcctatattttacaaaagttactaattggaccctatgttttgttaaatgacaaaatagaccctgtattttccaaaatggtacaaataggaccttgagtttaatttttgataactttttttttttaatataaccaacttgaaaatacaaacagatacagaaaaatgtaaatagttttgtcataacacttttacatcggattattattaaatttt

SEQ ID NO: 316773 - DNA, 1603 bp, Cannabis indica
tatgacaaacattctaaaaagataaattataagaagaagctttataagtaattaccatactatacgaagctccaacaaatgatggttgcatgagaacaacgaaaaatgggtcattagacttaaaacctttagctctcataagagcctcagccttatcctgtcctctcaatatttgttttcttataattttttgaggttttatacgccttggtacagaagattctccacacagttacagattcaacaaatcagttaaaacataggaaaaaaaaaagagttaataattacatgaaaattatataaatatatatatatatgtatatctttaggatgatcatgaataccttcagatttaccatagagactagttttccttttcttgtggggccaagaacaaggtaatggaggcttgtctctggttttagaaaaccatgacagttctgaattttcattagaagaatcaacatcaacattatgcttctgaaaatgattaggagtaagaggataatcaatctctagagtattattgtcaaatatcataatattgaaccgagagttcccttcatatccaaaaactaagattgcatttggttggaaagaatggaaacacaggaatatgaatggaaatgagaataggaatagaatgacatgaaatttaaaatgcataaaagaaattgacaaaaacatcttgtattggaatagtcttttccttccatttcaaaattgaataacctttccaccatattagtagaaaattcattccattggaatgacattccaatactttaaaattcaaacaaacaaaagaatagaataaaacttgctttctttctattccattccatttcctcacctccaaccaaatggaacctaacagatttccccagcttaagaaagtgttatgccaatatatttcaaccattttctatccatacctttccatcactacttttcgtcaatcctatctcccctcttgatccacatggaagctttacttgactcgataaggagtcacaatatttcacccaaaatgcctttggaatttgctgcacaagagaagaccattaaaaatggttaatggtagataatttacactatagttcagctaccagaaaacataactacacatgactgcaacctatataaatacatgtattatatacatatattctcctcatcatacaaatcaaagaagcaccattttcatgttgcagagactatgattaagtattatatatagaacttgaaaattcaacatatcaaaaagagacttactttaacatgtcatccactaattttggcacattgacaagatttccaaaccaaagtagacaaattattagacaaacttagggtaaaagaattgccaaaaaaaaaaacctaataattaaatatataatctttgacaactcatgtagaaaaaagtaaaggaaaaaaatgtatatacaatattatttcctcaaattcagacgaatttaaccacaaaatcagggctatcaacttataatatctggtgtactgtaaatgcataataaatcatcgaaaaataatcaactgaagttgatgcagagagagagagagtagtaataatttacttactaac

SEQ ID NO: 316774 - DNA, 1623 bp, Cannabis indica
ctcatatctggttaacaaaaatcagcgttaacactattattcatagacatgtttgacacaacagcagatgattctccttgaaaaagaatctgtggttaagtctgtgatctgatacccagttttgggattgaagaaactagagattttcgagcgaggcgtgccaagagtggctaggcatgacccttggagaaatctgtccgatacttgttgtaaccaatagttggtaacttcgcacctttcatccaaggaccatacaagagatcatcatcattacgattttccattctttccatgaaagccacacatttttcaaaaggatgtccaagcataccacatcaaaagcaaaattctggcactcgttcatatctgaaattaatccgaaaatcatctttaatccttggcaaactgatcattcgacctctaagtagtggtttgtccacagcttgtctaacacgaatccttaagaaaggcccccatccttcatcaagagagtcttcatggacatcaataaattccccaatgatgttctccaaggcagtcgcaagcattttcgacttgctaaggaagggcaaacggtaaatttaaacccaaaaaagagtggtcatcaagtgtttggctgtgaaattctgcagagtatcaaaggagcaaaagactacaagatggttctgaaagtaccaaggttccttgttcaaaactcaaaatttatctcctgcacaaccgaaagaaattttgaataaactatctccattgttagagattgtggcaggaaatcttcccttccaatggccaaacatttgattatagaaagtaggtttatgaacatagttatcagtgagaacccgtgctataaggatgtggctcgaggtaacagttgaagcaagggcgacttcagcaggcaaaatagcaacaaaactttcttcttctgtaagagttaatgcagaatctaaggagtgtagaagaggatccatcacgacaagaatgaagcaagcaaaaaaaaaccagatcaataatagcagttatcgcataaacacactgtgaggttgatgaaaactaaaagcaagaaaaaaatggggaaaggaaaatttcaaaaaactgttaaaaacccaaaaaaaaaatagttaaaaaaccaaaactgctacagacccatcagggcacacttctacttggtttgcggtaattagcgtatacaaatttgttactatatataatttaatttgtatattaaaataagaatatgtttctcataattaaaaaaatatacagttatttgtaaataaatatttttcgcatacaatataataaagttatataatgtatatattgctgatttttctattttgttattttttgctgaatcatatacaataaaaaaattattctcctatgctttcaaaaaaaaaattattctccttatttcctttcattttccttgccacagaagggttgaagattccaatatccaaagacaaatgctttttgtagtcttgtacattcctaacctctgccctcccccacccggaatttctttttttcaattatttccgtttttttatgtactagcaaaattacgtgcgaggcacgtatactaaattttatgttagtttttttctatgttatttgaaa

SEQ ID NO: 316775 - DNA, 1995 bp, Cannabis indica
tttctctggtttatcaactaaaatggtatcagagccgttcgattgacatgctcaatgcttccgcttcttcttcggattctctttttctcattactataatctgatcttccatggctcggggaagaggaactcaaaattacagtactcgaaatcttggagctgaggattccaatcctttttcagctctcgatgaaacaaacagatttctcacgatcgatccacgcagtccttattttcattctagtgcagataatgcctcatcatccttagttccaaagatcctcactggagaagataattacagttcatggaaaaggtctatgatggtggcgttgttagcgaggaaaaagattaagttcataaacagaaaattacctgctccagatgaagacgatgaggattacgaagcttggatcagatgtaatagtctggttattttgtggattctgaactctgtttcacctgcgataggtgacagtgtcatgtacgtgaatgatgcttctcaaatcttgtctgaacttgaagagagatttcaccagaaaaatgctcctagaattttcgaggtcaaaagatcgatgcagagtttgacacatggatccagtgatgttacctcttactacactcgacttaagagtttatgggatctgttgcaggaatacaaaccccaaccagtgtgcacttgtggagctatgaagatcatccaagagtatcaagatgaagataaggttcttgcgttccttattggtctcaatgagtcttatcttaatgctagatctcatattcttcttcaagatcccttgctaatgtgaataaggcttttgcttccataatttaggaagaaaagcaaagaggaattatcattcctcaaagtgagaattcgaagtcttctcttgagaatccagctcagtttgctgggagtgcacaaggaaatcgaaacaataatagatctgataacaggcaggatcgttttgataatcgttctatttgctctcattgtgggatacctggccacaccatagccaagtgctataggattcatggctatcctcctggtcaccgtttgtttggaaggtttcctagagaaattcctaaaccaggaagccaacaagaacgttcatcagccaatttctcttctggtggcagcaattttaatgaaggaatgagtgaggaacaaaccttggctgttcaatgttagaggctcatggctatgctaacacaaacgatgcaagaaagttcttaacaatctcaacaatctcagtcatctcagcagcctgagcagcctgttgtgtccaacatttttggtaatccctatcctattcccaaatttagttagataattgatacaggtgccacgcaccatgtttgttccaatcctaattggtttcattccattcaaaagaatactagcttaacacatgtaaaattgccaaatggaaccaacattaggatatcattcataggcactgttaaactgctcaatatcactctcacaaatgtgctttgtgttcttgagtttaagcataatctgatttctgcatgtaccttgtgtgattcttctaattattctttcctatttttgcctaaacaatgtgttattcagtatatcaccaagaatcgtgtgattgggatgggtgaaaggattggcaacctttattacttgtctgaaaccaatttccctgttatttgttcaatttctgattctaaaatcagtgatgacacattgtggcattatagattaggccatgcttcttgtattaaaaatcattccttgaataaagccttacaatttcaatactctcatgattccaattttcatcgttcaatatgtcatcttgctaagcaaagaaagttgccttttgtttccaatcataatatttccaagcaatgttttgatcttattcatattgacatttagggaccatatcatgttcaaactgttgaagggtatagatactttattactattgttgatgattgttctagatatacttggat

SEQ ID NO: 316776 - DNA, 767 bp, Cannabis indica
ggcctcgctctttcattgtgtctactactattcttatgtggtcggtggttagtaattttctatatgttatttatcaaaataaatatgtgtgacttgatattaaattgcaccaataatagtatgtcacatcttgtggtgtaatagtatgtcacatcttgtggtacttgacactttgaagtgcctcttagtatttctttttttttttttttttattgggcattgaggaacttttttgttttgatataattgtgtatgttacacttaattaggaccatgtaattttttttagaaaactctttagtttaacatgtcaaaaatacaatggtaaagaacagcataagtatacttaaaattttaaatttgtaagcggcataaactctaatttttttagcggtataagtattcaatatttgaaaaactgtaactttcattcagtttcatcaatacaaaactcgttattgtcggtctagacgaaaacatgtagtatcaattacttgtaaattttcttttaatgaatttaaaatgaaatctgtattgaagaaactgtatgaaaattataaaataaagttagaataattatcgtgcatataatatattttaactttatttttagtaccataattttttaaaaaaattcttatgtggtcctcaatatttacaaaataaactatcatgaaaaaaaaagaataattttatttacaacccacaaaatgataaatacaatccaatatttaaaataattaagtttaaaatattttttaaaaata

SEQ ID NO: 316777 - DNA, 1366 bp, Cannabis indica
taaaataatttctttcatctttaatatcatgcatttttatagttaaaaattatttatgcttagttccacattttataaaaaataatattctttgattttttgtatttacattaaattgatccacatttaatgcttagaagttataattttaaagcgaaggaaaatctattttttgttaaaaaataattagtttgttactgattaaattatgagaatcaatataaacataaatatttttatatacacttaagtggattctgaacccttaataatatccccaaatatcactgaaaatatttgttactgtcatttttatcgtttaagcacttcattttattttgttaccaaaaaccttatcattttcgggattaggttagagttttattagcttagattaaataagtattttctttgatttcacgcaattcccatgggttcgacctcgttcttcacaatctccatactataataaagatccgtgcgcttgcgagttgataaatgtaaaacgtactattttggtacacaacaggttcattcagttttgagtgtagggcctttataagtttgattaagttatttatcaagtgtcgttgtcgtgacatagggctgagatcgtcgagcatcattccactcaggtcggtctgcacacttgactttagacttgaggtaaaaaaaaaagtcaattctactacttagcatgtcaacataagatacggtaattaccgttgttacgaaagagttcttactctcttttgaaaccactgttaggttttttacttatcggttgcttaattgagcaacgatagttacataagattctcattggtaacaagggttaaggatgctttattacgtatcgattttggtttgtcttatcaacaaaataattgattattatcgcttaattatgctttgaataattgcttattctgtatgttgtaatctatgttgtgaattgttaaaatgttatgctttatgttatatttgtgttttacctgtttttcttgctgagtctttgtgattcatgggtgctctgtgatgcaggtaagggaaagaagaaactggatcagctatgagtcagaggtctcctggaaatgtacatactaacccgccatgctttagttttcagtggacaaggtcttctttttgttaggggtgttcatataatccgtaattcgtggttccaaactccaactaattcggaccaaatcatttaagatcggaccaaacgaatcttgtgtgaatgatttgactatctagactgtttttaaattctctagttttgtcacagttttagaaatctcggtagcggttcaaaccaaaccaatacgtataattattatatatatacttaatatattttttt

SEQ ID NO: 316778 - DNA, 711 bp, Cannabis indica
tatttgtactattttagaaaatacagggtccattttgtcatttaacaaaacacagggtccaattggtaacttttgcaaaacagagggtccaaaatagtatttacccatttaaaactgtttttagatgaatttcaatcaagtttatttgcaatactaaattcatcatgaatcatctaagcttttttttttcttctttcaaggaaaatgcaaatgtataagttatttatacttgatgtttcaggaagatgacgtaagagaagatgtaatattcgtagaagacttttattttaaaaataaatataaattaaaaaattagctataatcaactactaataacaattatatgttaattaatatttaaaggatgtttatttggtcctaaaataatcatcttcttaatggactcagtcctcttccttaactattctatataatcaaatatcttatctttatgatttgatttagccttaattaatactgtgttcaagtcatctctaaattaataaatgtaaatataatatatataaatatatatatatttatatatatatatgatatcttggagcatggttgccattaccaaaaccaattaatatttaccaataaaggtacaataactcttttctgttatggcaactttggcagggaaacttatgcatgctcttcagtatgataactgtggcaaagcttctgctactgctttaaaggttt

SEQ ID NO: 316779 - DNA, 2099 bp, Cannabis indica
cacacacatatatatatatatatatacatgctattgcccttataaccctaaggggttattaaccaattgggcttatggggccttttatggtgtactataatttaatgggccaactatagtattaagggtgctctcatgtgcctctaacacataattaagttgataaccatcccattatggttattagcaacattaggcacataattaatgattctgtattataaaattaaacctatgattgtattagtccattataacaattctaacatagaacacacttttgtaagctatttgactggcaaggtctcggatcagcttatacgagataatttttctcataatcaaacaagtttgaccgtgtgatatggaagccataactagattattatttccataagattttttttagcatatttaaaatgctaaccatggttaatgctgagttacactagacatgaccatagttagaatttgaaactataaatagcacacaacacttcatcttttgttacaatttttactctccaatattttgactctttattatttctttcctagctctctcggccaaacactaagatcacacctcccaaacaaatatcatcataataaagtcttgaccagcaccacccttacaccattattcctttgttcctcgctcactcaagtctaagactctaagtcaccatcattcttgttatgtatctcatacgtagcaaaaaccttctgtatcaccaaacaccacaatcatcctaatacatatatacatttccttatcgtattgacatcactatcaccactatttttacattcaagttttagtgttcaattaaatcttattgggagctacttaaggtttttcataagacaattattgtttctcaaggatcactcttgcaatcaaggctaggactccacattcgaggtaaggaaattaagtagaaaaacataagttttctgtatgtaataacattcataggaagagtgggaatagtaaaagagaagttaactaaggtcttctgcctgactctttattgtttgttatttaatgtactgtataatatatatttaaataatatgtttataagattcatgttatttatgtatgtttacagtattagagcatggccattgctaaaggtatatatttaaataatatgtttataagattcatgttatttaagtatgtatgtaaatagtgtgtttataagattcacattatttagttatgattgttatgttatttaaataatgtatagtagtttgacattatttaaattagatagattatagtttatgtgacatggtttgaccgagaagataatggttaaatacttgactgttgggtctatatggtagatagggggccatttagtagtgggtacgattttactgaacccagccctccgccatttagtccaatagctcgagtttatttgccaaagttagactcgggcgtaatcattattatgtgatttagcttagaaactagttattagttactagtgatagaattaagtttatgtagtactatttgtctaaatatgtgcatgtacgttctagttgtgttttattttatttatgtgactacttgacacacatttccttactgagtttagtagctcacccttatcaaattaccatgtgcagaccaggtaactaaaagtctagaatgtcggtggcgagtggaactttggatgcttgtgtgtgtgaactcgctgagggtcatataactgtgggcggttagggcgctctgtttatttatttacgctattaaatgtatgtcacaattatttttagttattatttattatttcttttatacgaaatttggccagttgtaaacgtttctaagtatcaaataaaaatacgatattataattttttgtgtttaatgcttgtaaataatatttaatatttttataaaagtacgggtgttacatatatataatataatctttacgtgttgtactaaataaacacttagaaattatataaattactactctaagaccatattatagcttctacatgccaaagcatgtacacttaactagtatactagtaaaaaattacgtgcgaagcacgtatactaattt

SEQ ID NO: 316780 - DNA, 603 bp, Cannabis indica
gcacaaagcataatgtactttgatttggctactgaaatgtggaacgatcttgctgagtgtttcaatgaaggcaatggccctcggatcttccaattgtagactcaactaaaccgtcttcagcagggtgacaactctgtttctgcatatttcatgaaattaaaatctctatgggatgaattgaaagaatttcaacccataaccacttgcacttgtggtgcaatgaaaatattcttggattactacaaccagaatcaagtgcttcaattcttgattggtttaaacgaatcctttgcctcggttcgagatcaaatctttctcaatgaatccatacctaatctatcccatgtctttgctatgatcgttcaagaagaacgtcaaagatcacttggttctactgatgtgatttctctagctgctgctgccagttctacaaacccctcaagggccaagaaaccaaggccatcttgctccaattgtggcaaaccaggccacttagtcgataagtgttatttcagacatggcttcccacctggttatggacacaaaaagaaacaagaaaagggcaaagctaaggcaaaccatgcctcttccagcaaccccaaa

SEQ ID NO: 316781 - DNA, 2383 bp, Cannabis indica
atgtaatggctgcaatggtgtgttgttgattctttttctgcccaactctgtccacacgtcaaactaattcttcgagttttataaatccatctgctcgtttcaagaactttgtcattgagggttccattggtatttgtttcactttgactaggtcttctaagtgagatgggagctggcgagaagaggagaactctgtgtgaaactccaacatgaaagaattccacgaattaaacttccttggagctaacttgaagtaccactactgggcggcctctgccaaggtagctgggaagattctatgtcgtacatcacctctcaccgcttgtaagtccattttcttttcaaaatatttaatgtgagacaaaggatcttctttacccgtgtacatttttcatgttagcattttaaacttgggcagtaggttgagagcattaatttttggtgagaatggtgatcctctagtttggtcaagttctagatttgtgatttgggccagtcaggccttgaacaagactcttaagttgatttatctgtgtttgcactaatggatcaacttaacatgcttattgaccgacttgtatcacatgatgatctcttagaactgggtcgggcacataataatattatttggctaaacaatgggagggatgtcttgtccgtctaatcctcttctgtgattcaaatcattcctaagattgtgcacggtgcctaattagtcaaagactgatttgtttggaggcctttgtgtctagctactgtgagcaaggggttggcccagtatttttgtctaaggacagatattaagttgaccattccctcctacgtaatgggttggcaaaacttgctcgtctaccatgtgacccacagtttgactcagtgacctcgtatttgatggtccattaacttgggtttgcttagtgtgttcagctggatgttcttctggcccagctatggcctagggggaatgtaagtatcagatactggctgttggctggtgagttggtaggctctcctgatcagtacaacaacctgcctggatcgattgtcaatcacttcttgttgggctctcatgctttctatctctcgatccctccattctttgaattggcatctttttttaatataaaaaaattatagttgctctagtatcttgctaatcgtaatgaagagtgttattgtggcattgtatctgccctagtatagctcgcaagttctgtagttcggtgtcatcaccgattggcctttgagaatttttagcagatgggattctagcaccgggggtagtttgcacagtcagagtacaagtggttccagtttcttgtatgcctgaagtgaacccagccagtggggtagtcatttcttgacctactgtttgagggcctattggtggctgaggactagtcagagtagggtctgtcctagctagatctttggggtttgcatgagcctacacgtttggatctgtagccattggatccattattttgatttctcatctgtctttgcacaaccatcttatgtcctgaaaaagacttacaacaaagacttgaattttgttgctctcaatgaaagcaccaaaatattgatctcgctttttagaaactttagtgagtcaaattaaagcgatttaagaataactaaaataacaagtgtgaataatatagaataaagaaaataccagaattatagaggttcgaccccttgacgattgtaatagcttactctcctttagttgtatggacttgtgaatagatgaacaagaaaaacttgatctttctgaaaagctcttcctgtgatctctgagtattttactcttaaatttagatttctcttgtgtgttttctctgaataaaattcgcatccctgaatagtgagacgattccactatttatatggattaattacatcaaattggtattcaaaattaataaggaatataatgagaaatatatttactttctataattacaataagcagaatatataggaaactaggtaggttttctttcttctcaattaacacgaaactatctcatgaattcaaggatattgtcgtaacttgcaagcttgaggatatattggatatgtctctgaaattgtctaactcgcatcccctggtcgatgtatgcgagccgcctatttgatggaagctagttgggtgtttttacatactctgctcggatgtcccaacttttatttatgacttcaagtatcaaatcttcctacacaactcattataagtagtattgcctatccatgttatggaatctgttccacgtgtcacctagatggatgccacatcaccatgtgtagaaatttatataacaacctttttgttattttgaaagctagttagttatcgtataatataatataattcaat

SEQ ID NO: 316782 - DNA, 1280 bp, Cannabis indica
attatattgaaatgagtttaatttagggcataaaacccaacaatacatgtattacttttttaaatttttgctataaattctgagttcttgactgatctaagagtaggtgatattagggctttcaaccttttctgacatacgcacaagttttagaggcctctaatttcttatcattttagcttgagattatctaaattcacccattcatgggattctaaaaaattttagatatccatcgtctttttaaacttctagatttggaaatttcattttagaatgaagttccttcctctttcatttgaattgtcttggtcagcatattagatatgtcttaccttctttttccccgtccagctctcaccctttgtctccctccttttataaatgaaccctggtgacttctgggggaggtgaacatcatatcgaccaggaccttcttcaaattctctacgagaatcatccttagctcggtgtagattcatctttgtcttgtgaaagctcttcaacttcaagttttgatgattgggaattcagtagtgaccactcaaaatccccaaagcccgtggtgctcagtatcctgaccagataggaggaaaagggtacaaacgatttatctaggaactgaaaaaaggttggagatgatatcttcctgcttcctggacatatagggtctgacctggtgttattgacacactaccagaaggtcgaccaactccattagccagacatagtgttgtaacagattttttgttacttttgtaatgcacactgccgcatcaaacttgttgtccaaacatagaatgatggtaaggacaaaacaaaccatgaggaaggcttcagagttcgatccccacgttgcttagttgtttgcaatggcgagggtagagtaagctaggcctccgagtgaggaggctaaagttgtaactagagacgttgaagtccaagagatgaggtccatcctactggtccctccgacaccgaatgcgaagaaaacaaagatgaaattcaagttcttccttttggcggctataatgaggtcggagaaccagtctccaagctgggtgatgtcttggtggcggaccgaggctatatttatgaggaatacaaggaggctcaacccatgagcaccaaagggaaaaaaggttctcgatgtgtaataacctagaattaagaaatggattagcaaaaccctaattagataattaagaataattgaggaattatattattatatagttcaatttatgtgaattaatatgattaattatatgttaagaccc

SEQ ID NO: 316783 - DNA, 1217 bp, Cannabis indica
aataatttcataattaatcaagattaactgctaatttccaaattaactaagcgggctttacaatggtaaattccttaggcaggaaattataccacaaactccgcttttacttgcctttaattaatgctaacacttttatcttgtctcgcagaaatgcatttcgagggtctcatgcagaataaagggaagaagagaataaccattttggaggctccttctgatgtggaggtggagcccctcaaaggcaaaggaaaaccaccgcttacaagaagaaagcctctcagactgttaacctcgaggtccctaagactgaaacccaggatccaagtcctcctctagtcaccgcaagtaccaacgagcccgctccaaatgtgaaccaaacttttgtctcttagagccaagccctcgagactcttcctatcgacgccaatagtcctagctcaaaattcactgtagaatttggtgcagcctgctggtgttactttaaagccttccttccccatgaatgggatctagtttgtaatggggatttggagaacatgctcgagaggagtgttgctcatggcctctcgataaactctatttcctttctcctcttacttttccttttaactattttaaaatttgctaacacattctctatctatccttagcaaactttcctcgcgttcgtcgtacaacggtgtggcatggacaagctgaagtacttggaaggcgaggttcagaaattgataggccaacacgaggttgtgaccaaacaatggaacgatgccaagttggagaacacccgcctaaccaaggatgctgagaaggttaagaagaaccttgaggccaagcttgaagctgccgaaaaggaggcaaaagataagatcgaggaatgcaagaagctcaaaaaggagcttgatgctgccaaggtgacacttgatgggaaagagaccgaaacccgagaacaatgcaacaccgttggcctccataccctttatcgagcttagatggcaaatccgaatatggatacaagtttcctggaagagtctgaagaggaaattcttgcttactgtgagattcttgcttactgtgagaagaccaagaaggaggaggaagaggccgaggtagcagaagaagaagatatgtccaagtctcctactatgtaggcttggtttttatttatttttattttgtttaggaaaacgggcctaaggccgagacaatggtttgcc

SEQ ID NO: 316784 - DNA, 1312 bp, Cannabis indica
tattgaaatttaaattattttatgtaacgtttggtaacaattttatttttaaattttttatcacaaaaatgcaagtaaagtttttgtttctaaaattatgtttttgaaaaataaaaatgtgttttataactacttttgcttttcatatttaaaaactattaacaaaattgtgttctgtaaattttatttttatttgctgattttatttaagtcgggtccgagtctcagacgagatcgggggtcaatagtaaaggtctggggacggggccaaggtccgagtccaggttccaaggcttcgtctaggttagagtcagagtctaaaatattaattaagaaaaaaatttaaaaaaaaaattaaaagtgatttatttttttcaaattttttaatattttgattttcaattaaaaaattaaaaagtaaaaataattttattaaacatgattttaaaaaaaaaattacttttttaattttaaaacaaaaaactaattaaaaatgtgttaccaaaactaaatacaccattaattatttattatgtggaattcaaagttcaatattgaagcaagtagtaaattatttcaaccctattttggtcatcctacataatttctattatgaaaatttatagaataaaataattataaaaaaccaggcaaaataaaatttttcaacttcacaatcatttatatatttatttttgaaaagaaagaaataaacttaattgacaatcattttacttgatcatatactaccaacttttggctgcaggccaatttttgggagcagagagggatgaattattggtttattttgtccctcactttcatgatttatgttcatatggtataatgcaaagcatgaccaattcacttcatccatctctaactaaattctgtccccatcatcaatcacttcacaaaaataaataaataaatatgtacccacattgccaagaaagaaggaaataataataataataaaaaaagcttcttttgtatttgtaatctttaataaaatttgctaatatctactattccatggagatggttggttgaaaaaaattaatggtgtaaaagaagaatcatatgaatgagaatggaaacttttgtagtgagaaaatgagaagtatctattatctaagttctaaagtgtttttggccaattttgagaaaaatgctagtgggcacatgttgttgaacaataaaacaaaaggtaacatattgttattggtgcaatttaatatcaaatacatggcgatcctaagtaataatgggcctaaaaaatttgtatggatgttatatctaaagtaaagtg

SEQ ID NO: 316785 - DNA, 1244 bp, Cannabis indica
attgtttgatgatatgccgattctattgatgtcatattttcattattaaaaattataagctgttattgcagttcatgttaaacataacagttagataagagtaaaaaaaggtgaaaaaatagtgttgctaggtgtttaacaccaagttatttttattttctcacaacttagtttcttaactatgggttttctaaattacagaagtaaatgcaaaggacatgattagtggaggtgctctgtgggaactagttcggatttcaagagactgttcccgggaggacattagaactcttgctcgtcgaatattgcattcgagccctaccttccgttctgaaatgcgtcgattaaggatagaatgttgatcattatgtaatttcagatgaatagactctataaaaattcattagtgctgtataggttttggtgcagaactgttagttttgtaattcttatttctaaatgagggtcatggtgaccgtctcattcaattttgttttgtacaaaggaagcttgggcttcaatttgtaattcttgattatctatttattctatcctcattagtacttattacttaagacaaaagacgaaaaaattaagctacagaagaaaaaacgaaacatttgtagctatttgaaggcgagccttatgtttcattcactattttaaaggtagacgcactatgacacattattattatttattgtaatttattttttgaaaatgagtatcaatgttgtgtcttgtatcgaatgagaaatgttaaaagagataaagacaccaaccgtattaagcactatcttgaagaatattattaatctacaaggtgccgtgttttggtgccttgaatagacagaaatgattcataacttaatttgtcacctgtgtcattcaataaagatttacctctatatttcatgtttgaagttgtgttcagcagtaactgtagtagattatttcaaataattctgactaacgaatttttctgttcacatctattagaagaggaatggtgacgtgaagctaataaactctttccttggcagcttgatatatatacatgtctgcaattacaaaggtgaaattgtagaacagaactatggaggtgagttgagtcttgctattagttttgggaaaaaagaaaagaaaatgataatggtccattcttcttctacgagattgagtaggttcatctgttgttatatgatatgaccaatgaagccctctataaaagctgttagttttta

SEQ ID NO: 316786 - DNA, 1368 bp, Cannabis indica
atgaggtaactgcggcgattcgcctttaatgagacaataattctttggcttggcggttaatggggtagtgatagaaaataattttaatacttaaccaaactatattgtttactcactttattttatttattttaatttttatttttatttttatattttttaagatatacttacttttataaataatgttcctattagacctcttaaattaatgtaaattatatgttagatctaactagaaagtgaaggtatattgaaaaacttacttataaaagtgggatattttaataaaatataacatgaaggtaattttgattaatgaataaaaacataggtattccttaacttatcccataatactatccacactatattcgaccccaatatatagttttcttttatttaaatttaaaaaaatttcaattattttttattatattttctttttctatttaccttaatagacactcgatgggttttccataaacgatggttatttccctacctcgaatccgctagttattagatagggattgagcagggatgggggacataaatatgtagtagagatgagagcgagaattgcattctccgtacattaaccgtccaatttttatccctagtaacaactataaatagatttttagtgattgtaaggttttaattaggggtacacatgagtttggttggcggcattagaagtattttaatgggccatcctaatgactccggtttgaagaagttataaatcatttaattttttattatacaactcaatcctacttaatacaataatataggggtggattgagttggattcattgggttgagatgaatattttaagctttaatatttaacgataaaataatttaacctagtgtatacacaaacaaacgatacatgtatatatacgtgtatgtgtatatgtaaacatagtgcttttaaaaaaatcgaaggtggtggtgatatcattgtgtgggtagcaaattaaataacagtgattgattctcacgttagacttgtttgtaaaagtagtagagtaactatggactacgtattagtagtgtgttttggtcaattcactttgtaaggttatcgtgataatataatctattcattaaaatataaaatgtaatatatatatatttttatatattttgtgaatgtaaaatatcttttatagagtatttgtagtataaatacctaagtttaactctcagttgcaaataaatacctaagtttaattttttgcggtaataatacccaagttatatttctagaactctataggtatctgaccgttaaatgtcaaatcattatccacgtataattttattattggtatatttaaactaattttttttaaa

SEQ ID NO: 316787 - DNA, 640 bp, Cannabis indica
aaaaataaattttataaaaaagtttaaaaaccaaacataaataaaaatgtaaaaaagataccaaatttaacatacagtgtaaaaatcccttttattttagtgatgtaacttaatatcatagttagtttaataagacaaaaatatacaaagaaataaaacttggtagtactaacaattggtaaatataaaatctgtcttgtatatgcgactgagagagaatatgaaaatatataggcttatatatatttatcttgccatctcaaaaaatatatattctaaaaaagataaaacagaattggcataatattatagaatccaaataataatataaataatgtattatttagggagaatagagattttgtttttttaacgaattgtactaaattcgaagaaatagagtagataaaagaaaagtaagtatatataacaaagcatatatccatagagctagattaagtagaaaagaaaacaacagtttcattggggagatgatgtctaatgaggtatagtaaaaaataagagagagagagtgtgtgtaattgcatgattaataaaaagagagagaacatgtgtgtaatgtatatatatattttttaggaaataaagaagagaattcgtgtgtgtaggtaatgtatgt

SEQ ID NO: 316788 - DNA, 1244 bp, Cannabis indica
gtagtggaaaccatttgagggcggtggagggtaattggaaggtctttctcacggtcatgaagaggatttggatgagggaaacttggtgtggctaaccgtgggacagcagagaccaaagattgtcaagccaaacgtgttaagaatggccatgcattcgccttacagaaatcggtgcgataccgatcatagctattagtcagaagtctagcacccttaagccatggtccatatggaagatcatcatcattcccattatccattctttccataaacgacacacactgctcataggggtggccaagaatgccacattcaaaacaaaattcaggcaaacgttcataccggtagtcaatccaaaattcatctttgatagacgataatcgtatcatttggccacgtagaagtggttttgtaacacaaagtttaacccgaacacggagaaaaggaccccaaccttcattagtggaatcctcaaagacttcaacgaattgaccaattgtattaccaagagcttcagcaagggcagtggttttactaaggaaaggcaggcgatatatctggatccaaaacggtgtgaagatcaaatcttcctttgagacatttagtcgagcatctggtgtgagtaagacaattaagtgattctgaaaatgccaaggctccttattcagaactcttcttctatcaccttcacaaccaaaggagacatggaacatatcagagtgaaattcagtgattaccacggggtagtgacctgcccaatgaccaggcatttgctcaaaaaaaccgagtttgtaaattggtctggaagatataacacgggcaatcagggaaaaaggagatttgtttagtgtgtttgttgtagtagcagtgggtagggatacaatattcctttcttcctctgtaagggagagggtggagtggagggaatccgagaacggatccatatcttggcagggaggagtaaatgggatacaccagtggaacaagaggggagtacacgacggtgggaactgaggaggagtatggcggagaggggaggagagaagaggcgggagcagttggaagcaaggaaaattcaaactaaggagaagataggtagggaaaacagttaaaaatcaaaaaagacagttgggaataaaaggataaataccattttggaccctgtgttttgcaaaagttacagattggaccctgtattttgttaaatgacaaaatagacactgtattttctaaaaaagtaaaaa

SEQ ID NO: 316789 - DNA, 655 bp, Cannabis indica
tgttatagttaagttataaaaaattaatcaattaccatataaagttcagccaatcatgacattataatgtgcatgcatggatttatctcttaattaacctaacaaattaattttgtgaaaagtactaacctaagtagtacacactttgtttagacataatttattttatttttaaaatttttgtgtctgattatgtatcacatatcaatatatatatccaatacttgaagtctggaagttatttatttattttttttaaacattaaatattgcaattttgaattgattaaattaaattaacataattgaacatcgtaaaagttaaagctagttatatcagaaatcaataatgaaacatttatatagtaggcaaacctatcattaacttatatatgaagctaaaaaaaaatattatatattaatattaaagacaagtttgttatcgatatccaaaatttatccttatcgacaacattagtccttggcttgaagtatgttattctcttgttattattgtataaaatttgattgtaatattttaagggaaaataacacaatataatcactattttcatttattatgaaaaatactattagaaaatatttcttatttttttatggaattatttcacaaaaatataaaaacaacaaaaaa

SEQ ID NO: 316790 - DNA, 983 bp, Cannabis indica
accaataccccattgagatgccaaccaaggtttgaggtgatccgaagtcaaattgaaagcataaactggaccacctttgtggatgccaaagaccgagctaatgtcaccatggcttgcaaattcttagctaattggcccgaaaggaaacatggaatggttaaggttcgcaataaagaagtcctggtcacatctgatgctatcaacatgctctacgaattaccagatcatactagagatgaacaacgattgagagtgactgaagaggatgaacatcttaattatgtggacatagcagaaactgttaggttcccaggattaaggtttcatgaactggatgggtcgccgaatctgttgcataggtgtgaaataaatctcgtgacaaaaatatggctttactttgtgagtcccgattggtgactagcaagcacttctctgatgtgcaaattgatcgtttaaagtatgtgtacgccatcataaaagggtacaagattaatgtgtgccaggttgttcggggcagttttgacttaatagttcaaggtgccgcgggaggtggagttgggttggctggaataattactgatctctgtcaagcatatgaagtaaaagaattgccatatgacaacaaagtaataccgcaaagaaagatggatgtgagcatggtgaataggctcaaggagccccatccctatgggcagccaccacctgaggcccaaccacaaggtagaaggtgccctgttgaataagatgcataggaggaggaaaatgtgccttaacaattgtctggtccaattgatccagtgatgcaatacacacatgcccagctcaactcatcattcacaaacaatcatatgcagaattacaggttcagaggagcatctatgatgagagtcaagtaactcaaatcaactctctatatccgcatgacattggatcgaggcccaactatctgcgtcaccgtctcaatttcaccctatactgatcag

SEQ ID NO: 316791 - DNA, 1198 bp, Cannabis indica
ccctgaactttcatccatattaaaaattttttactaaaattagacaaaagtctttaaatctaacaatctcaatagttcggggggaatttttaacggccaaaaaagttcagggcatgatttggtacatatcaaagttcgggaggaaaaaaatcataattagtcttattattaatacttatttttcagaaaggataaaataattattcacccaagaggacttttgtcttaaggaattattgttagatggtgttatgatggcatttgggataagttttacattctaaaatataggttcataagtcggctagctttgaagagtcctttgtgatcaactttgaacatccttgtttttattgtgtggaagtggaatggagaaccattctcatctcttctttgattgtatttatagcagtatggttgttcaaaacatttggctttggattatttctagttggaaaaaagcttcatgatgtccttaagtggattcaggagacaaaagcttctagatttaaaagaaaggttcttatgagtgtcattacagccacgatttatcacatttggtatgctcgaaacaagatgctttgggatcaaaagctacctactcttaaggttacttttaattgtattgataatagtgttcgtgctaaattgaactctttgaatactaagaatttgagtaaaaaagatagcaagtgagtggaagctataactaaagttttgtaagtaactttatcttgtagtgttgttgtttgtgattaaaagaaacacatatttttcactttgcatagctaggtattatattcctttttaattttttatttacgtttcagtaatttgctaagttaaaccatctccaataaatgatgcatataattagttaaatcttgctcaaaatatatcatgaagctattttcagccaaatttttgtatttgtgatctagtgcacaaggtgaaaattagttatagaagtcaatactaccattaatgttcattaaaaacatacaaaacaattaattctgtcagaaatttacctttgtaataacctacacacaacataaatgtgacagccagtagtcccgtgatccgtaaggggaaataccgggtaagctgtacaatcccacatcgcctggggaaagtcaagtgggatgattctgaggctgtgtgggtatgggactacacagttgaagagagcttaaat

SEQ ID NO: 316792 - DNA, 694 bp, Cannabis indica
tttttattttcttaggtgacaatttttgcctctattttattagaattaaatatttttgttttacttctcagaactattcataaaaattcacatatgattatttttacgtttttttttttttttttaaaaaaaaagtcttattaagaaaaaaaattaaaaactttgtaagtagaatttgttgttgttgttgtttcacaaagaatttcaacttaaaaactagcaaattaaaattggaacaagtcaaacaattaatagatctacatttagattagggagataatcattataagtgtaccataaaaaaataaatgcaatttcacctaatttattacggatatataaagatactagtacatacaagaaataatcaattacaataaagaaaataattacttatagttagttaaatttatttattttctatttatggaagagattctacataaataattaaataaataaataaataaaattccactaatttaaactttggacttcaaaccgtttacgtcaaaaagtagctctcattggtttgacatttttccaaaacacctttctttctttcaattacgtcacaatcttttctccaatttttatttaatttttctatctaccgtaatcttctgtattttcccatttttacccttatgctcctcgccacataatcagttatattctattatattcttagtgg

SEQ ID NO: 316793 - DNA, 1892 bp, Cannabis indica
tcatatattctttttaattttttgaattattttctttaaactgcaaaaaatattgctttaccagatagaatcataagtataatttagtagtacttaatccaattccctgtggttcgacctcacttgcctgagatactacttgattgcgtatacttgcgtagtaatcataattttcgtaacagaaaccctcaacgaactgacgataaaacctagctaaacccagaaaacttctaacttcaatagccgaattcagtgttggccaatcttgaacaacttcaatcttggctgaatcaaccatcatcccacctttatccactatgtgccccaagaaagagacacgagataaccagaattcacacttttcaactttacatacaacttgtaatctcaaaccattgtataactgatttgagatgtaacttatgtttctcttctaattcaaaataaaccgagatgtcatcaataaatacaatcacacatctttccaagtaatcctgggacatctgattcatacattccgtatcaaatatgtgacgcagcctttgcccaacattcaccttgatggtgtttcttgcatttcagacattctaaatagggtctgataaaggatcattgaccctaatggccacctcagtttcccctaaaactttaaataccccctgatgttttggaagcttcacccttcagtttgtgatcagggttaccaccgtcggtccccttactgacattaccaccccaggagaatttgatgtcgtggggacatcttttgtagtccgctccttaatcacatgtttctctgcctcctcaactatcaaggctaaattcaaacactttcttatataaaatgtcgtgagcagtggtaatcttcaaggcccaaatgattgtggaatttagttctccatatgagacgttctcacaatgatgtcataaaatttttcctcaaacagactcttgaactcatcccaagtatcccaccagacgggggcatgatcttgttacatgaaagttgcacaattaactctctctattcccgtcacccccaaattatctaggatacgggtaattgtactcatccactactctgctttaattatatcagtacctcccagaaaagttagaggttgcagcattacaaaccactcaaacacagaatctctatgcgacatcataaacccctagttacccaccactagcacaggtgctagtggtaacacttactcaacaggggaagctggtgtcggttgccttaaccgacgcaattcctcatcttgaaaaagtatgatacttcacttttcctaaaatatctgctgccattaccctccggattcagcggaggcgtaggcggtgtgggtggattggtttggtctacactaggctctactagctcgccctgtggtctagatgattatggaatgtccatttcaaaaacagctcaataatcaacaaccccggcaagttaagcacgaataccacacttacgtacttatttcctttaaaccctaactcaactattcattccatttaaataaacacttatcacataacatttgaaacatggcatcatatatcacataaatactatagatgctcacatactgtctaaaatggaaagcagtaaataaatgatcatataagcagtatagcatttactctcaacacttactgcaccatgagtcgagctcgtccctgacgatgattgtacatgttcaatcagtctacaggaagtttgaaaaccttggcgctctgataccaaactgtaatgtcctaagaattaggcacgttacccaagctgattaagaaatcctaatcccctaaacgggattactagaaagataaacacgggtaatttaaactttaatcgagaatagattgaaaatagaacttgtaataaa

SEQ ID NO: 316794 - DNA, 1296 bp, Cannabis indica
agaagggtataaacttattttcctaagatgtaagggtaattggttaggcacctttaacaatttcttgtacattgagctctttaatatattttcaaaaaattcaaagtactttaatatataccaatcattaattacaagctatgtgtattaatttatacaaatgtgtgtatatatacttttatttacatttagacatttttactcactgaattttgacatgtatcaaatgatattctttggactttttaaattgttaaaaattctccataaactattgagattgttaaattgaagaaattttgatctaatttcattcaattatgctctgattgtccatatactaacttgtgccctcgaaatttattttttacagaattatgtcccctaaattttaacttatactaaattatactctttaaattttcatccacgtcagactttttttagtaaaaattaaatctaacaatctcaatagtttgaggagaatttttaacgacctaaaaagttcaaaaacaaaatttagtatatgtcaaaattcagggggtaaaaatccaaaatagccttaaatttatcatgtattaatatatttgttatatatatgcagagatattgtgaaaggtgttgaatatttacatagcttgaaaataatgcatcgtgatttgaagcctagtaacattttgatatttaaagaagaagaagaagaagatgaaagtggtatttctatatgtgcaaagatttgtgatatgggcataagtaagccacttccttataatagatcttcaatcactaacacatcatatggcaccaaaggttggcaaccacctgaaagaatcaacattcatgatcaaacaaacaagataagcacagccgtcgatatgtttagtttaggttgcgtactctctttttgtatcactgaggggcgtagccaccccttcgacactcgtgatggtcgcaatcgtaattcaaacattgctgatgacaagaagaacttggagttcctctcatatttcggagaagctgaagatctcatttctaaattaataagtaaagatcctaaatcgaggtaacgctatcatcatttatcttttcaaacattaaacgttggaagcatattattcgaaaaatttacacaaaatagtatttttgataaaattttaataaatttatgtttaaataatttttgtttgtattcattaaattctacatcaaaaataaaaagagtttaagtttaacaaataaatacataagtttaatttttgacagtaataatacttaaattatatttctaaattattc

SEQ ID NO: 316795 - DNA, 993 bp, Cannabis indica
aaatattttacaaaaaatagtgtcttatgtaattattccaacaaataaatggcaatgggccaattcatgagttccatgatagtaaatttatgaagaaaattttaaaagttgttatgctaaatatgagatttttaaatttgactaaattatatagtatgtttttttttatagtatttgatatgcaatatatatgtaaattaggttttcaaattccatatttcatatttttatttgtttaggtagttttatttgtcactagtgctagaaaagtcactagagtttgctggcggtgccgaaaaaatcatcagagtagctttcggtatcgaaaaagtcatcgaagttgttgccaatgctgaaaaattcgtcaaaattggtattattgccggaaaaattactaaaaaaatcaccaagaaactgttttcttgatgatgaaattacttttttggcgatttttccagtgacaatgtcaattcttgaaactttctgacactggcagctactccgacgacttttccagcagtgacagcaaacttccaaaaagttatcgaaatcggcatagtcgtcgaaaaaattaccaagaaactggtttcttcatggaaaaagaaactggtttcttcatgaagaaaccagtttcttggtgatttccggtgattttttcgacaataatgcctattttgacgacttttatggcatcaacaataacttcgatgactttgtcgacatcggcatctactttggcgacttttttgctactgatagcaaacttcaaaaaattcgtcagaattagcattgtccccgaaaaaattaccagaaaaattacaaataaattagtttcttcatcaagaaacctgatgaagaaaccagtttcttggtattttttcgatgataataccaattgtgataacttttttagcgccaacaacaactctggtaactatcccgacgccgacagtaactccagcgactttttcggtgccgacatcaaactccggt

SEQ ID NO: 316796 - DNA, 804 bp, Cannabis indica
taaaaaattatattttaattttttatatgtggtttatattatagatagcacatgcataatacaaaaaaaaaaaaaaaaaaaaaaaatagttagcacatgcatttgatctgattttcaaagattctaaataatttattattcttaaataaaatccaaagattataagtgacgtgtagtaactaaattttttaagcttgttttttatattttaaattattttaaaacaaatgtcaatcaaaattttaattataattttctaagtattatagaaatgtccctatcaacaatgatagaattttttaattaatgaaaattaatgaaacgcgtttcctagctagctgtctccattattcaaactcgatggacttggtcaattaattggaaagaaagacaaaataaaaatgaaataggaagaatatgaataaaatggaataaaatttttattcttttatttgataaaaattatggaatcaataattgaataagaattttgatgatgggtaaagtatataatgaaatgaaatttttattattttgaccaaaatgtcttctactttcttaaaataatttttgttttataaaattattattatggtacaaataaaaaaaaatatatttatgtatcacttttaaattatatatttttagatctaattatcaagtaataaaatataaataaatatctaatttaataatatatagatatttaattaaggatgcgtttagaaagccacaattgtaattggattgggggtgtaattggaggtaaattacacaatttgacatatttgtctgaccatgtaa

SEQ ID NO: 316797 - DNA, 2089 bp, Cannabis indica
tgctgctatagtatcagatttttctacaccagcagcttattctcttgtccccttttcctgaccctcaacatatttattcccagcaggagctttctctttaatcatccccttattaccttcagtcttctgcccaattttctcttcagattgcttgtcttttttcctgcactcagccataatatgaccataccccttacaatgactacatttaataggcagccattcatattcaatgccttgttccatcaattgaccatattcatccaagaaccagaacaatcaatcaggattattagtaatctccatttctacaagtattcgagcaaactggaccctagttcgatccttagtatgcttatcaaccataataggttttccaatcgtactaatcaaagcacttaaagttttattcccccaatattgaaggccaagatcatgaagtctaatccatagaggaacaaatttaacaaacttgaccgcattcaaatcagtcgaccatagtcggactataaccggcttcctatcaaactgaataacaccattctctagcacttcatcccgagtagcttcattattgaacttgaccatcgtaagccccattgtcatccttgcaatctgattgattcccaaatgcccccagattcttcttacaaaaccctcaaaaactgctgctggtatgtttgcccttagcacaatacaaatgactgtcgtattccaattagcttcttccgacttgacctcctccaaatcaacctgagcaatcttttttccatctttaacaataggttcagtgaaagtgagtttaggatcaacacaaaattttttaccctcattgaatttctaccaacgattctgagatgttgagtaaaagctttcttccacttcagcttcctcaccccaacttttacatcttgctgatttcagagactccgattccccttcatcttcaacgatattcccactcgcaagttctgcctctgcaacaatcttcaaaccagaagtttgctcgattgtctcgaccacatcttcactttcaatccgcttcttaatcgcatcgttctctcctatcgcagcaatctgcttcctggggacctttttcctcttcgtcgtggaagagagagaaacgaaaccaggttagccactaaagtattattaaaaactctttcataatatttttttagtattattttaatactgtaatatgtttaattcagcattatttttgcaagttttcattatttattttttcttgaaagtattattgaatactttacaataatactttttgcgtaatattttatcactttcataaatttaaaatataattattattttaattgtcataatacatttttacacattaaaggtattataaaataatcaacaataatacatttttttgtaatatttttttgtgttattttatcattctcacaagtctaaataataaaaaaaaaatcaatttctatagtactttttttttcataacacaattgattagaagaattagttacaattttatttcataaaacttgtttcaaaattttaattatctaaaataacaaaagtccaaaaagtcaaatacaaaatatatccaatacactcatgtttaataaatctcattacaccaatatatgagtattgttaaatcttgaaacttgaaatccaaaggtcccgaaactttctctgatattcctacatacaaagcaataaacaaattaattacatcaatgctaggagatgctaagatgacaaattaaccacacaactctataatgttggtaaattttttaccccatgaacttaatcctgatctactatttgtatctgtcgaagtcaaatttagattgaagggagcttaatctgtagcagagatttcaaagatcagcaacaacctagaaaaatagagaaaatcacaatatagaagaagaaaattatccaaacaacatcagtcaacatgtacaatatagaattgatcagtacaaacccctttatcaggagaattagcttttgatatcatgatcaaattcaatcaaaagcaattactaataataatacctattaaggatgttggaattattttactagg

SEQ ID NO: 316798 - DNA, 751 bp, Cannabis indica
tggaatggctattccattttaaaaagaaaggaatgaccattccaatgtaataagaaaaaaaatttaatgattttttatcaatttttttatgcattttaaattttattccattctattcctattcccattcccattcccattcccattcccattcccattcccattcccattcccatattttcattcctcccaaccaaacgcctccccatattttaaattacttgtataaaatgattaattttcttattaacatgaaataagaacacaaaaagacaaaattccgaccaagggaatctaatgacgcagcggaatgatcactccaaggtgattcaactagcttataatgactaaaatgaactgatttgtaaggattttagtcttttcaacacaaacaaagtaagaataagcaatctcctccccaaaaggaaaaataaatgtttactagaccttattgtttgagctcgtcaaagtgttcggagtcccgagattgaagaatggacatttcaaaatccgaaaagactactctgacaaaaactcaattgaagaaaaaaaaaaggataactttcatgatgggcatcgttaagtcaaaataatcagcctattttgactgatataaagaagtactgccaaaacccaaatgaagaaaattgtttacgagtttaagactagagtgtgttattctttttcttacttttttttttcttagttttctcaagcaacaaaacaggaaacacagagagagagagagaga

SEQ ID NO: 316799 - DNA, 1828 bp, Cannabis indica
ccatctcggtagttggaaattctcttagcaaacctctgttcttggaaagaatctcctttagtattttttctttgtgttatatatataaaattctttacaaatactgttacatttactatgctaatactaattattaaagtgatttattcttattttgtttttgagataattattttctaaatttctatgattttaatttaattataacgtaaaaaaacctagcataaaatttacgtgcctcgcatgtagctttttgctagtagaatagatatatacctattataaaattagaaattgtgcgtatattcttttactttggatttttatgtgaaatatcatttaaagtatattgtttgttttttttttttttttttatcaatggcggctttgtaaatatatacatccatatcctaattaactaaaatatcattatattacacattttctaattgagtacgcataaaatatcattaagaataatcatcaattaaacgaactatattgacttgatatgaaagtagttaagatgaccaccaaggttgttgattataaatagcatataatcatttggtggtaattttgtttaggtgttcaattgtggtggtatctttcgaagaatttgtttgattaatgcgttttttattttttgtttcacagtttaagtcagacgctccctacattaacgaggagatcaatggaatacgagatgagtgtgccaaatttgtgaaacctttgattattgatggggtacaaacttaccactttttggttatgatacatgtgtaacaagttttatgattattgcaactaatttctgtattatgtaattagtttaaaattactttttataatacatgaaatataaattttaggatcgtttctagctattaacaattttggtattatataattagttaatagttagttttattgttatcgataatagaactgattactaattttataagtgttattttaactttttttgtaatctgtatttactattatataaaattattttaaaatttaaaaatatagatagagaaaattgcatgaaaatttataaattttctttacctacatttatgtttcattttataactgacggaatagatgaaaaaaaaaatttcagtaatttaattgtcattttataatcgacggtataagtttttagtgtcagttttgaaatggcacaaacgagtttgtcatttttaaaccgacgcaaaagatgaaaaagaacagtatatattttgtgtcagtttttaaatgaagagaatttttttttttgtgtcatttaaaaaatgaagctactaaaaaattatttgcgactatggtatatacgtcgcttttttaaacagacgcaaattctttgaatgatacttaaaaattgacgggaattgtactttttgtaggagtgattgtctgaaaagtatttctatattataaattattataaattgttcaaaatttaggggaatattttaaataattataacatacacaattataaaaaaaaattagattaaaagttttgccttaatatgaaacaaatagaatgcttcaatgtaggtgcattatagaatcaccaattgatacatatttatttggttataaatgataatttaatgataaaaatagttagtaaattatactcttataactttttacactattaaattgtgtcttttaagttatacaacttgttaataatatccctcagaatataacttttatattaatatagtctctccatcctatttttattaaattttttttttttttttgtttagtaaatgtagggacacaatagatgataattgacaaatgg

SEQ ID NO: 316800 - DNA, 2188 bp, Cannabis indica
acataaaaacaacgctaaaacaacataattttattttgaaattttaacacaaactcaatattctcattatactacctaaaaaaatcaatttaatggttttcattctagatttttaaaaaacaccgaaaaacaataacaatatattaacaaaaacaactaatatatgtgaatcaactcaataacgttaataataatagattagaaaataattaaagtaaacacaattaataatatcagatttatatttttctaaaaagaaaaaagaaaataaagaaaaacccaattttttaggtaaatattgacatctcctctcagttgttgatcttctttcgttggcttttcatggagatctctgatcgttggtcgcgctgccataactgaatatcgaatcaaagtttcttactggcattagtggtgatcgacgaaaagctttctgccggcatttatggtgttcgacaaaaatttctacatatttggtggtattgtttggagaatacgtcgattatggaggaaatttaggattttttggaggtgatccatgttcatgttgatttctgatctaaaatttttgagagaaactattttgggaaggtctcatgtagagaaatatttttgaaaaaaagaaagtatttttgaaaaaaagaaagtttacttttctatttttgtttatttttgcacttagagataaaaaagtaaagtttaaatgtaataaagttataagagaaaaaatctctatattcttgaatacattttccaatgtaaatcatattgaaatgataatatttttccttatttagtagtatcatgaaaaatgtgatattttatgtggattaaataatttaagatcttgaagaaaatcaaagagtatctttgccccgttgtcatctaatcctagtttgggtcccagactatgacattgatatagctggtacgagagctaggaatttcatgtagctgttaaacaagggaatttaggtaaattctactgacattggataaagttttaataatgaatttacgcttttttaatcactttatcaaaaataaaaaaattattcttttcatgattttttgcaaaatgacatttactactattggccagaaagctgttgaggacggcggatcatctgctattggaaaattgatcgatggtatcacttattagtctactataaaatttgggcattggtattaggcaccatggcctagcaccctctcgatatatcgcgttgcgattgtttagcgatatttaattagaccaatagtgatatttatatgtagaagggtgctagcaccacaggtgtcctttagcatttctcataaaatttcgacctattttagtttcattctaaggtgaggtaattagtattagcttactattgaatttcgacctattctaatttcagtctaaggtcaggtaattagaattagtctactcttgaatttcgatctattcaaatttcattctaaggtcaggtaagtttgttgttgtcaaagtgaaatgggaataaagtaatttcttattcagaaatggaacctttgcatttggttttgtatcgcataatgaattatgctatcaactatctgaatccttgatacttgcagatgatattgttcttaaacattgtattattttccccatatagacagactgaaagttaattagtttgatgatagttcgagagcaatcaattattggtttaatgaaatgtcaatattttaatggttgttagtggaccggctatactttggttaggtgagacgataataataactatgaaagcccttatattcaattcatacatcagagaatgggatggggacacatgcataaacaaatattgttcagctgtccaaaatatgaaaagtgatgctattttgttttctttctaaaaaatagccacagtctacacacatacacatgctggaacctaacgcacttagcagtatacgttcattaccaatcagaaaatctagttttgttttcaaccattggatttcatccaaggtatataatgtaaaatagaacctgctcccatattaatgggcgagataagacattataaaatcaaattcagaagtaacagaaagaagaagaaatacatcatcatcaagaagctaaaatgaaagacagagttttgttcatcccatctcctggaataagtcacctagtctccatgcttgaatt

SEQ ID NO: 316801 - DNA, 2014 bp, Cannabis indica
gcatgtttatgaatgcctgtaagttaacatattataatagcgatattagtgtacatagagatgctttgaatatcaaaagtatatgtttggctaagtactgattgatgctatcacatcggtatgactagcgtaccgagtatatgatgatattacggtcaatagtactgtcgtacgaacgttctacagtcagtaccgtgtcaaacacggcgatagggttatggttgggaatatgggcgtctgattataatctaggttattgttatgttattgattatgcttttcttaatgagtctgtcgactcacagatattgtttgcatgtgtaagtaagggcaaggcttaggttgagcagctgtgagagcgagcagatgaaaattttacatgtcaggacagttaggcctggagcgtacgatcttcgggacagctgagcgtattttgtatagccgctaggtgacaacttttgtattatgcaatacgaaatctttgtaaatattttgtaaaagggatcccgacttatatataaaagtatattgttatgatatttataaatagttaaataaagttttaattattcacaattttcaataaactcgttgattagcaacgagatgtacaattaagttaaaatcacgttaacatgcctaaagtagtagagtgttacaaattgactcgacatcatcgttggttaaaagcgatgtcaatacctcttatttgagatttccattgaggaatgtcatttgacatccatttttgtgaacatgtaggttgtgtatggatgagaaagaaaacaacaatctaattgaagttattcttgctgttagagcataagtgtcaaagtaatccatttcttccttttgcctatatcctttggcccccaatctagctttatgggtttgaatggttccatcgacattgtatgtaattctaaatacccacttacatcctatatgtattgatctaatttgtagatcaactacttcctcatatatttgcctctttccaaaaaatagcatcccttgatgacattgcttctgagaaggttttaggatcaccattaattttaaatatcatgggatatgtcattttcattccttatggtcaccttcttctatatgtataagatttccatttgattgttactattaatatatcctaaccttcttagcctttgacttctccttggcaattgttgttgctctacaacctttgaagaagtcccctcttgagattattcattttagatgaatctttgattttgattatcatcatacaatttgttcttaaagaattctacatctctagattcaactatcacattaaattccatattcaataatctataagctttattattgaaggcatagactacaaatacacttcttatagctctaggacccaacttggtcattttaagattggtactttcgtaataatctaaacaccacatcgatttgaaatattcaatattgggcctcttgccttgtcatagttcatatggtgatattaaacctttccttcgaagaaattctactaagaatatgacatgtcgttagccatgtttcacctcacaatacaaaactcaaatttgcatttaataacatagcattaactatctcaacataggttctattttttctttccgctacgctattttgttggggattatatggagaagttttctcatgagctataccatgttgctcacaataggatataaatttattgggaaagtattgttcactttaatcacttcttaggattttaatattttaatctgtttctcaagttgactttcatcttctaatttatatattttaaacacatcatcattactattaagtaaactcattagtgaatgtagaacaatcatcaataaatatgacaaaatatttatgtccatttctagtaatcaattcattcaatacacataaatctttataaatcaacttgttgacactgaaaagtggccaacaccaacttactaaattttcaagatgaataatgagattaagtaaa

SEQ ID NO: 316802 - DNA, 802 bp, Cannabis indica
ataataataataataatagactcaattgaataatttattaaattataaacatgcataacaccttggttgacctttaaattatatttcatacaatacaaacattagtacaattgtttgttgttattggttttttctttttgcaataaataagattatttatgttagaaattataaggaataattgtggctaaaatgttaattttatttatttatacactcaactaataactaatcataattttttttggatgataaatactttagtagattttatagcacttaacaacttatctaaaaataatttttatataaaaatagttaatagtattggatttttaatttaaattatttttccattgaaatgggcaacaaagtggtgtgggcatgaatttgagtgtgcatttcttgcaagagagagagagaagatagcttacccacttaaccttctattttatttaattaataattaattgaggtgtcccccacaattgaatattcttcttggaccccacacttctatctttccactctcatttttcatcacaatttaagtatttattctttattataagggtaaatggcggcaaaatccccaaaattttcattttggtttcacttaacccccacaacccaaatttttgcgggtaaacccccaaaaccactattctgttagcaatttaacacttccgttcaaatttagctgttaagtgccaggtttcattgtccacgtggacacaatatacacgtggcacaatttaattggcccacgtaaataattatattaaaaaaattaaaaaaataa

SEQ ID NO: 316803 - DNA, 1194 bp, Cannabis indica
agtatttatttattttttttgtattaaggaaaaagttaagaaaaaattacaattagaaggaaaaagacaaagatcacctcttggctctctctctctctctcagcaaaattttagaggaaaaccaattgtttttcaattattttatgagttctcagctatggttcaaagggttttttttgattcaagttaaggtaagtcctagaaactattattcctttgagtttttaagctattagttgacttatagcatgtcaatttccgttttaggtgctgtttgacttaaggtttaatttatttctatttctagtttatatatgagttgaatttgatttggttatgttggttttgctagtttgaggtgtggtgaatttcatttttgctactgttttttcttggaaactactgttaggtgattttataggtattctggaaaatttgattgagtttgggaatgatttgagaaagatatgaagtttttctagggttttctacaggaaatcggttaaccagttctgctagtactatagaatcgattaaccgtttcaccaggcaggatcctaggaacttattttccatttgggaaatttggtttatcgatttgggcagtttctagagccttagttttgatgttccctaaatatttagggtattaccatgctatttatcgatatgaaaacttctagttttgagtttaggtccccataaaggattttagcaaattgtttacccatttatgtgattgtgacatagggcctccattcaatgcgtgattttccattcaggttgaccaacacacttgaatttggaagcgatgtaagattagcatagaatatatatatatatgtatatgtgtatatgtattatatgcatggtgatattgtgattcatatgttaccaacactagtacggtagtggtattgagtgtattggtacatcatatgatgttcaaatagacaattcagtgttaccaacactagtacgattaagtatgtactgcatgtggtatagcactcagtagtacttggggtatggttcaaccctaccaacactagtacattagcggtacttagtccatgtggtatagaggttgtacttcagttaagaacgttcttgatcatctattaagccttgtggataggtgtatgggcgcctaaatacaagtcagtattgtattattgttgaaaattattttac

SEQ ID NO: 316804 - DNA, 1728 bp, Cannabis indica
tactatttcagtgattgtttatgtacaaaatcatgctctccagactttgatatctaccaaatcatgtctctcaaactttaacatgtactaaattatggcccctgaactttcatccatgttagacttttgtactaaaattagaaggcatttttatccaacaatttcaatagttcaggaggcatttttaacgaccttaaaagttcaaggggcatgatttggtacatgtcaaagttcacggggcaaaaaatcctaattattattattattattattattatgaaaaaaaaaatcttttagagagaaactgccattataaattaatgaaaaagttcatttacaacaacagaatgatttagttaaaccatacgacgtttcattagtagaacgacatacataactcaaagaaactctaggaaagaaggacgactaataaataatatctcaaattaaattgtgaaagcggttataatgcttttgatagacattgacactttgtgagacaacaagagcatgcgtttcaataaggtgaataacacaaatagaatgatgcaactattttaactaaaaagaaatggcttgggtttcaatctctttgacttgaaaacaaccctgaattggcttataaatggcagccacaacattaccacaagagtctttaacaataccaccaattcccataatcccgttagttgagtcaagggtagcatcaaccttaagtttcaattgtcccgaaggaggctaccaagcttgataaatttttgagggagaataagagctcctttgttgccgactggtatgagaccgaaattcaacaagaaagttgagagcattttcaaagatgattgaaggtggatgggttcgcttaccatagatattattattgcgatcataccataaataccacatgaggcaaatgatagtttccatttgagaattatcatagttatgaaagagagagagagaatgcacaaaatcactaccacagcaggaagatacagcagcaaaatcaagtcgaaagggtgatttaatgtctcgttgtgataattgcacttagagcatttcaaatctagaatgatatgcctcctgtaaagattcaaaaccaaaggtaaagcattatgtatcacatgccaaacaaatatcttaatttttcaggacagattgagatgccaaaaataagaccatcaggctgaattcaaactcaaagaagaaggtgactttttatccctgatttttgtagccaagtgatagcccgatttcatattgtaacaaccatgaggagattgctgccaaataaatttatcaacttgagcatataaactcaggagaatgttcaagatacgctcaacattataggggcagaaatgccgatgtagagcaacacagtcccacgaacaatcacgagtaatcaagtctgagactttatgatcatgactaccggtaggatagaaaacaggtttaaaattagttgtacctggaagccaaggatctgaagcacaagagatggaggaacccgtgccaactttctaacaaagaccttcaaccaaaagatctctaccctaaaagatattgcgacaagtatacgaaagattgtgacccaatttggcttgtaggaatgctgagtggcaaaagtagcgatgatagagagtacgataaagaagagaatcagtgttattgttacgaaattttgtaaatagtacacaagtgcacgtaatcaagtagtaactcaca

SEQ ID NO: 316805 - DNA, 1216 bp, Cannabis indica
taataataaattgtaaatataattttttatgcacatataatgtaattaagtactataaagtatatcaaattgtaaattttccttaatgatatttgcttcaaaaagtgggtaaactaaaatttatttgcttaaaaaatgtgcaaggaaacattattaagatattataatcaataaaatgtaagttcaagaatatttatgagtatttcttgatgagtgcacatttaacaccattaatgacggtacaccagggttggagaaaaaagttgtaattcgacactttggggctatgtttttgggttgttttggattgtgttgaggtgttggacaccatggagagcttccccaatctaaaagatgcatcgaaagcaaccgaaaaagactttttcattttattggtgtaactctgttgaaacttccaatgaggcaccaccatttggtttctattttcattttattagtgtaactcagttagtcgtaaatcaagtccttggtgaatacacaactcgaagagaaagaatgatagactatttgagtaagatccaagacttgataagttagctcaaaggttatacaataaggtagatccctagagaaaataatgcaacagttgatgcacttgccgtttagcaagcaacaccatttttgactaggcaaacttggtgccaatacagttcttgaaagaacaaagtattaccatcccagaagaggttgacatgctggataacagtccaacctggatgacacctatggtagtttacctccaaattagagccttgtctgagaacaaaaatgaggcaaaaaagatgagaagaaaatctgctaggtatctattcctagatggagtaatgtacaaatgaggcttctcaatgccgctcttaaggtgtgttactaagatagaagccgagcagttattgatagaggtgcatgaaggcttctgcggcaaacatgccaggggcaaagcctatccaaaaagatactccgacaagggtacttttggccaaccatgattgaggattcgatggactatgtcagaaaatagtgacaagtaccaaagattctcaaagatcccgatagctccatccaacaagctcacattgatgcagcctatgttgggttttgtgccctaaataaaacctatttcaatataatcagatttactaattaatattagatcaaaaattacattttatgttacatgattcacatgatttatttc

SEQ ID NO: 316806 - DNA, 1227 bp, Cannabis indica
ttatataaggtttaattaaattattagcatgacatatgtatcaatcaatatacacatgcacgtactgtatatatatagtaatttaactataatattgatgttagctatagtgaatctcccctgcaataaaatatatatacgaatgctttgtacaaagctacacctaaactgtgattaattaattaattaatcaacattattagcttttaaatatttttttctttttctatcaatattatatcatttgacttaatagtactacttagatacaaataaaatgtgagaaacatagaaagacattcattatcctaatggcattggttgaatataaattagagaaaatatgttggttaggaaataaacaaggaaaagggggaatcctaaccaataggaatttttttttatcaaataaccaataggaattttgtgttgtgtattcttgacaaaatctattggtcacggctggaatatagggtccacaaaaatgcatagaaaaagaaaaagccttggcttaacactaaagaagagtaatcatttttgttctctctaccaaaatcacttatctcattgccctactttataacaagataaaatttgttatcccaagcattttattactttttgtgatgttaaggttatcattacacaaacattaatttaaatactatgcggtttcaaaacagccataatgatttactttaactgccccactctcatatgacaaatatatagcagcacactttcgtgctcaagaaggatccaagcataatctcaaagactattaatgtaacatgagtaattgtagcctgtgatgttttacatactgattttatacaaaatgatgtgatgtattttttccaaaaaaaaaaaaatgatgccacaggtgggacaatatgtgatgcgatgagtagttagcgattttctatatattattgtttattgacatttttgaaaatgggataattgcggcaaaagtccctaaaaagttaaggttgatacagattagtcctcaacctcaaaaattggcggtcaaagtacctaaggtcgacaaagttgtgagtccgttagtccctctttctaacagatctgttaaatactaataacatgccatgtgtcaattttttattggtccacatcataattttaattcaaaataatttaaaattaaaaaaaactaaaaattatttttttcttttttttttacaataattaaaactaattaatttg

SEQ ID NO: 316807 - DNA, 1664 bp, Cannabis indica
taatagcattaaattgtataaattaattatgagtctaaattttgttagaaggttattttttaagcattaaaaatgaaatttccctttaaaaatgaaacactattattggacattattttactatgttttgaccataaataaaacttgataacttctccaatataagataaagggattatttcgtaaatatacaaaaattctataattttaaatatttttacgatttttaaaattttaattatagaaaatatattattttgatgttatttttctgttatattttttattatgtttatattatttttataaaataccgtaaaaatattaaaaaaaaaatagaacatgtaaattttatttgtgtaaatttttcaaataaaacaccatactatatagtatatagtatacacgcacgtaagaaaacataaatttatggaaataatcaataatcaatattcttaaatgacatttactaattaagtatatatattatgtgtcatagcttaaaaattgtcatggtgactttttcttacatggtaaaacatatatacataatattaattcaaaattttcttttacaagattttgtattctattgacatagattttttaattattagattaactgtcttaaaaaaaaatttatatttttatattatatatcgaaatacttgattcgaattaatatatttttttatggaaataataataaacaagtgttaattaaaaaagatacttgagtttgttgcaaattttttactgtactagtaaaaaaaatctgattatagctatattaaaagtaaaaaaaaatatgacaagttattttatatttgtatggatacatattttatgtattgatataataattctagcaaggaattaaatctaaattaaaaacctttctaacaactttttttttaccaaatggtgttataattttacaattctcttcagttattctcttagttcaattttcaaaaattgaaaagtataataaatgtgtataattattttgtttattcattccatttatagttaactactataaataaaaaaaaaattaaattctcttaaactctccttagtgtgtgggctcagactttgggaccaagttttgcaaagctaattaaggaattttattacttgtcttccatttcatcatttaataataaatttcttcaaaaacaaaaatcatttaataataaataattataataaattgctaaattagaaataaaagataataaacaaaaaagttatacatatgaaaatgtggaaataaaaatttatattttttcctgttaaaaattatgtacataaatgtgtaaatatgtactttcttgaagccacatggtaaatatttttttctaaataaaaaaggatagtattacacatctcttcctcactcttttggtcattttaacaatcttggggctcatatgtaagctataggtgtcttatttgagactgtcctgattagatcatcgataactatctcaagagcacaattggcacccctacatcatgctagcctttagaagaaccaatctttaatggcgtgtttactaaactgtaattgaaatcagaataatcaatgggagaaatgtatcggtttaaaatagaaaataatcggaatcaatattttattatgctgtttactaaactgt

SEQ ID NO: 316808 - DNA, 867 bp, Cannabis indica
gagaaacattgttcctttatttggccatttcagaaagtgccataagcgcagcactggtgcgagaataaggtaggaaccaacaaactgtctactatgtgttactgagggcagaatcaagataaccaccactcaaaaaactttcactctgcttgatacatgaatctcaaaaactacgacattattttcaagcacaccctattaaagtccttataaattaaccattacgacaagtattgtcaaaactcaatgaattagggagattgactaaatgatcgattgaattaggacagtttgaaataacctaccactcgaggacttcaatcaaaggtcaagctttgattgatttttcaatagataactcaagagaagactctagaataggaaataaaatagaaacatggaaattgttcattgatggagctttaaacgagaatggctcgggggtagtagtgtcgccagaaaactttaagtttcattatgcacttagattttagttttaaacttcaaataacgaggtagaatatgaagccttgttagcaggattaagaatagccaaaacactaaaagtcaagaacatctaatgctttagtgattcagagttaatcgtgaatcaagtcttgggtgcagggccggccctgaaaatatatgggcccaagacgaaataaattttggggccctcaaaaatatattaaaaaaaatataaaaaaaagagtgttatgggatttgaacccatgaccttgaatattatggcttccacctcaaccaactaagctatgaatatttgttgtttataatacacttaattttacttaaataaaagcctaataattttttttaatttttttattttgggcccccgaaaagtgt

SEQ ID NO: 316809 - DNA, 614 bp, Cannabis indica
taaacaactgctaatttccaaattaactaagcgggctttacagttagcttacgacctagaggtgccaaaggctgaatatgccaatgctgaacaaaggagagaagaggcaaagagggccttagccaacgctaatgccatatggaggctaccataaagcagagggtgtccgagtttgtggaaaaatctttgtcttgggagaagagggctaccaaggtagagagggaatgcggtgacaaatacaaagatatgcattccaaggccctttcccgcattaaagaattagaagttgaagtgcagcaggctagggatgacgttcagcaagtcaagcttgaggatgaaaaaagagaggaaactcaccactttgtctcagaagtatgaatgtaaaccaagatcatcgaagacaagtttatcaatgaatctactttagagaagaaactgaagcttcatcttgaattacagcagaaggaagaggcagctgaaatagaagccattaatagagctcaagaggcaaaggacaaactagctatggagactaaggctcacgaagaatcccgataaagaatcaccgacctagagggtgaaagctccactttgaagggatgtcttcaagagca

SEQ ID NO: 316810 - DNA, 1347 bp, Cannabis indica
acctcaagtcaaacacgcttaacaagttcttttgtgatggactactgaaaaataagatgcaccttgttgatatatgtagtatcatcaatcaatctatttaagtcctctttaattatgtagtctcatactaacacagtcttaaaattatcacacttgacctttctcaggcagtatgaaattgcacaacttatcaaatatttatctttacggatcacaggactactaactgtcacaatcactttccttattgggtccgagtctgagtccttgtcgaccacattttgtgacagtctatacatatatgtatctatacatatatatatatgtatatataatgtatatatagtctatggatataggtggaatggaagttaatgaaagactttgttgtaaatcttgtagtggtgcattgattggtgattagtattaaaagacggtggtagtatgactatacatattatggggatcatgtggatggttagctaagacaaaaaaaatgcaataaatatctcaagagaagagatcatccatttaataatcatacttacattattaatttgttttagattaataaactatatatatattttaaaaaaaaataaatagtacattaataggttagctaggcagcttttgaataacaaaaaataaaatatgaaaaattgtaaacataacatatggtggatgagaaaaaaaagaagaagaagaacttaatttgacaagaaatgaagaaacttttgcccatattttctcttttgggttacttaaattgttaataaaaataaaaactttggtctacacatgttcgttacaaaaattaatattattattataatgttatagtagtgtaacaccgaatcctttacatgtggccttatcaactataaggtgtttaatgtttatgtacctttaaaaaagatgtattgatgtatatttttatttacttatttcggtatttaaataaaaatttaatttattatttttttaataattgtgtacgttataattatttaagatattatataaaatatttcgaaataatttgcaatacataaagtaatgttcaaataatttattgtgtaatactattttggatcctgtactttataaaagttgccgattggatcctctgttttgttaaatgacaaaatagaccctgtattttctaaaatggtaaaaataggactctgaactgattttttgtcaaaataagatttaataataatccaatgtaaaagtgttatgacaaaactgtttacgttttctgtatctatttgtattttcaagttggttatattaaaaaaaaaagttgtcaaaaattagctcagggtcctatttgtaccattt

SEQ ID NO: 316811 - DNA, 576 bp, Cannabis indica
cgtctcaagaaactgtctcaatatttttttgttggtctggctagaatattatgtagcgtttttttttttttttaaaaaaaagaatatttatgtagttagatgtcttgttcttgaaaatgtaacaataaaagatgataaaaaagtttaatttaattgcatactttattatgattttaggattttttggttacagaccctaaaatcaattatatagacttttttttaatatttaattttttattttattaatacttatgtgtagtgtatattgcaatgcactttaatatctgggtgatttttgatttgatttagtataatgtaatagcaattatagtggcaatggtaatgtagtgaaataaaaatggttataaaaattcattaaaatatttgatttattattggaatgaatattgaaataagtgataaacttgtaaaattatttttgtattactttatatatttatattgagagtagtattaaagtcattttaattttactagtttttgtgatgtaattcttctattatagttaaaaggctaattagtaattttccccctcgaactttgacacgtact

SEQ ID NO: 316812 - DNA, 1346 bp, Cannabis indica
ttctagaagctctatctatactattttatataacatccttttaaataattattaatattaatattaatatttcttcaaatttgactaatctattcaatttttactatttttccctttaagcttttgaattataaaatgtgtagtcaatcacatgtatgtaccttttaatttcaataatttatttataaggaaattcaagttctaccgtacgcacgtagcttgtttgttttgctagagtgctttttattataatattgaataattagtaattttgtttttgaattttcgaacttactgattttatttttataattagtaaatttttacatttacaaactttattttgaatttgataaaataacatttaaaagtaactgatattacatatttctgtttaaacccaataatttagaatctgagccttatatgtactctatttaaaataataacagagtctatacagatgaaattagagattaattacagttttataaatattgcatacttatgccgctaaaaataaatattaaatttatgttacaaacttaaaactttaaatacttgtgtcactatttacccaagatataacacttgttctttgcataatttaatttatgttacaaactttaaactttaaatacttaagtcactatttactcaggatataacatttgttctttgcataatttaatttaatttatttattttcacattttaaggatattattccatctcatcatgtggacagaatatttcaattttgggtttcaatgtattgtgagaacgatgggtatcatcaacttgggcatgacccttttattcaaatagctttatttatttatttttaaatgtatttaaatagctttataaatatataaatatttatatacatatcattcaatatgcagcttcatttaaagtattgtcctccacaaaatatgatgtaataattaaggatcgcacaacattagtcttccttttgaaagtagttggccaatgtaggaaaattagtactgatagtgcaaaatcaaactaattaaattttaaaaaatcaaacaattaacaacgacaaaatttaacagacagtatagtaattgaagaaaaatagagataaacagagtataaaaaactaaaaataaataaatcaacaccaaaatatatactaattcaagtatgatagatcgatgtgatctatggctatactccagttctggagcaccactaaatcttctttattgattgaacaagagcaggtacaatacaatcgagaaagattctttgttgagttctctaaaaagtgtttcaactctcacactcttacttaagaatcttcttcatttacagaa

SEQ ID NO: 316813 - DNA, 974 bp, Cannabis indica
tttttttctcctcaaaaaggaagtagctttaattagtaatttatttggttctatattgacaaaataacatgactcacctagcattcttttttttttttttttttaactataaataatatttttaatggcttataattaagataagataaggtttggccatatgagttatattataagtacatagctagttcttttttctttttttttttcttttaactttcatgttttctcacatgaagtgtcttttttaattactttacatgtgaggagttcatgtatatttaaatggtatatatataataatataataaggggatgagaaagaaagaagattaattgatattgccctatactctcgtttcatatatttgtttatttattattgagaaaataagatattttattcaagctaggacatgatcatttagagaaatagagagcccttcaatctgatgaaaggttactagaattactacaatctttttatgaacattattattattattatttgtaaggatgaacattattaataaatattaaatagctgcgttttaatatattactatgaggtgataatttattagtatctcgatttaaattttatcaataatagtatgatatttgtagctgatattgggtactaaaatggtgccctttaagatttatcgttataatagagataaaatttcaaatttaaattttttattaaaagatatgttaaatttcttaattataaaataacatatttagcatagtacaatttttatttattttttttttagagaaattaggttttttttttattattatctaccattaatggaacaaaatattgcttaaatttcccaactttaactaaagtcatgttccttcaagtggaagttacacatttatgggtttatatacaatgtatgccaactataaatttttttaatcaaaaaagttattttatgagaaaaaaaaataaaaaatat

SEQ ID NO: 316814 - DNA, 705 bp, Cannabis indica
taaaatttattttttaaaaatgaaaatgtgttttatgatcacttttgtcttttaattttaaaaataaaaaataaaagtgtgttctgtaaattttattttcattttcatttaatgattttatttaagtcgagtttgggactggggctagggctagggttgggtctgggtccaaggccagggtcgggtctatgtttggggcggaggtccaagtccaggaccagggctgaggtctcggtctgcgttcgggtttgggttcagggtctaggtcagggttcggggtttaggtcagggttcggggtctgggtagggtatgaggtccgggtttagggttcgggtcaagtttggggttgaggttcggttcaggtccgggtctggggtccagatcggatctggggtccgggctccaaggtctaggctggggtcgtagtccaaaatattgataaaaaatcacttttaaaaattttgaaagtgactttttttttgttttcaaaatttttaaaattttgattctcaattaaaaaattaaaaaataaaacaagtttatagaacatgattttggaaaatattttcacttttctaattttgaaaacaaaaaattgattaaaatttgttttggtagagctttattttttgtttttcaataggttttcatttataatatgattatgtaattttgatagttattcaattatggtattttgtaat

SEQ ID NO: 316815 - DNA, 669 bp, Cannabis indica
ttttgtactttttgttaaacattttcctgacaaagcgtcttcttgataagagactcttattttcttacaaatcttttattgaattttctatttttttttagcctaatactctattattaaatagtttgttttaaagtcttattttccaacacaaaatgaattaaacaattctcacccattttaacatactggactttaaattcaaggaccaaactttctgaagttacaagaagtcacaccatgaaaaacttattgagagagtcctttccacaaaaacagcaaatttattctctaaaaagtttctccaaccataccaaatgcaacaagataaagtaggattgataaacacatccttggatataagacccttcaattaaaaatatatatatttatatatacaaagtatattttgtggataaaattgatcatgatggatggaaatttatcctatatataattttcagaaagagctacattaagctaattggttcaaaaggaattatttaacaggataaataaaattatacagcattataacaaaagttttctgtttggttcccgggaaagttagggaaaaaacagaaaagaggaaaatagcaataaattttaggcatttaaagaatacccaaattttagttcaattaaacataacccagaaattctttgtcg

SEQ ID NO: 316816 - DNA, 1203 bp, Cannabis indica
acaaccgttttgggaatcacactggtcaaccaccttagcggttgtacttcttccattcttagccgtaatcttaataatctttccacacctcgaaccatcgttgtaccaaccagttgagagagcaaccactctctcagtgttagaatgaaatctctcatcacactgggatggtgccccaccatcaccaccctcactaaaatcgttgttagtcaatttcgctggggtagaggatgtgattggtggagagcacttgaatttcgggaaactttttcccttgcaaattagagtgcctgaagatttgcatgatcccccaccactgcctccaccaccgtcacatattttggttccgatgtcaggatcgtcgtcgcactttcctttgatacaaatgagttgaccttcacaatcgtttagggtacgacatgattcgttacatgaagatatggcctccaaatgaagagggagcaataccaataaggaaatgattaacaaagtaataatactatacattttgttatggaaataaatttgtgtaagcctctttatatatagtgatcatgggatcggttctccattttattgtctgaattttatattcagattgaatgtatttagacacgttaagccatccaaaattttcaaatgatcattaagaaattaaataaaagtcttatcttctattatgtaacaagacacccccgtgttaaatatgtaatcgtcatgacttggctatatatgatcttttcaaaaaacaaaaactagtaaagtttcagaatttggagaaaatgaacataaataattactcattaattaaaaaagcatcacttaattatttgcaagtgtacataaattaataaactaatcaaataataattattatatatctagttcaagttgttacaagcaaagaaattagaaataattatatacttgtgaataattgtgatgtgatcaatataccaatagcactacaagcaagaaattaactaatgaaaagacttcttaaacttccaccaaatagaaacagctgactttttttacaagcgttgactcgatcttgtgtatatgtttttaattaatttttaagatcattgttattaggtaccaatggtgcttagtaacttttagacatatcgcattgtgattggctagcggggacattacaaatggtatcaaaaccttgacctagccggaagtgtggtcgac

SEQ ID NO: 316817 - DNA, 1402 bp, Cannabis indica
aaaaaaaataataaataagaaaagaataacagagagaatggtgttgcagctgtgtgctgactaattaactatatggaatggaatcgattctattctcttttgtggcttttatttaattttattttattgttgtaaacattaaattgatttcgtcacattaagagaaaaagtatctaaagtttgaactcaaatttgtcttattataatttttattttattcacagtaattcaagtgttattttgttgtacaagtaagtgggattctggtattaataaaaacctagagaaagaaaaattacgcaaatattaatgatatttgtacacaaaacttacattttaaaatatataacagattaaaaaaaattatcacgttattgtatataacatgccgaaattataatcacacacaaaagtttgttacgaaagtttgttgcacgcgtaactattttattttatatgtatttgaaataaatgatttgaatattataatttatattgtaaattattttaaatttctcaaaattttataaaataattgaaataactataatatatacgaatgtgaaaaaatataaactaaaatattattctgaatgtcgaaatagatgaaatgaatatgtgtttatcttaatttaatagtaatagaatacattgtataagcctaatattttagtatattatatatgtatgtatgaaaaatactaaaaagcattgggaacataataaatgagcctttagaaccattaggtgaagttcatttggaacctcaataggcggagtctccgagtggaggaagtgtttctctatgcctcgcttgttgtggacaacatttggaaattgcgtaacgacgtcgtacacaataattgctctcctaatgttcttaaatgtattgaccatatttgttcttcttttgcagaggcacatacttctctcttgccttgtcttccgccgccggtgaaggatagctggacgcctccacctctagattgggtaaaattaaattgtgatgttcgtgtgggcttggagagtatgtacacagctgtagtggctaggaatcatctggggagggtggtttctattcacacatcccggttggatttcgcgggagctctttgtggagaagcggcggcctgttgcttggcggtgtcggttgctttagatttgaagtataattatgttattgtggagagtgactcgagactagtaatcaatgccctcaatgggaaggcgtcccattggactctagagaactatgtctccttttgtactaagtcttctccttttttaatgtgttgtaatttttctaatgttagtaggaattgtaactttgcggcacacaatgtcgctaagtgggcttttactcaccaggtgtatggatcgatcccgatcagttctgttccgg

SEQ ID NO: 316818 - DNA, 685 bp, Cannabis indica
aaaaaaaaatagaaaaaaaagaaaaataagagaaaaatgagggaaatgatgtataaagtgattgatgtaatacattaatcactgatgtctcaaaaggtaagaattgtatgtgcatgtggtaaatatgtaataaatttaagcaaaagtgtataaaagttactttacccgtatgtaggtatttatgtaataaagattatattttgtatttttgatgtaaaaatttcttaattattttagtgggagtatactactcacgaaaatagtattgaattcaaaatgagtattactataattagatatattaaattattcttaactaagacaattaatactttttataatgatcattaatctaaagaactataaagattttgataaattagctttattgaaatacataatatatatggattgatttaaatatccaactaatttaattagtggttactttgtaatttaaaaaattaaatcataatgaaaaatcaaataaggctttttaattttaaacataggaatcaaaatatgattattaaattatcatttattaatagtttcattaaaaaatatgcgatacatagaaatgatattggatatgaaatttaaataagggataaactctaaccttattaaaataagaattggtttcaataaatctatatctatatataaatataaaggaaagcac

SEQ ID NO: 316819 - DNA, 1454 bp, Cannabis indica
tttaaaattgaaaaataaaatgattacagaacatgtttttgtttttcaaaaacaaaaattttactttcattttgtgattaaaaaattagaaaacaaaagtgttaccaaatggcgtatatgtaaatggaacaaaagctggtgaggaataactattctcttttaaggtgtagctaaagcattagctgtacatgaatgaagactaggactaaactatagctaacttccttatctcagagttgagaattcaaaggcaaccttgtggaatcaatacatattattctctgatataaaaaacgagcaagtctcaacaatcacactactcaagcataatttagatttaaccctagctagactcatgaaaatcttattatgcatcaacctaatgtgttgtgttgcatgtaacatgtatgcatacaagtacaaccaacccctcaagcatgttctaattttacatttatataaaactcataaaactagttgagaacatttaaatcacaccaaaaagctaagttatagtccgaaatcacatcattatttaccataaatatccaaaatcataatcacatatgtgttttgagatagagttgtaaatatttgtgtgtagtgctgctggtcctaaaaaaaaatagattgtgttgtgttgtgttatataaaaatatgagttgtgtcgtgtcgtgttaataattttatagggtaggcttgataggtatggccagcaagcttagtagtttcatgccgtgctcgaatttgtatcatgctttatttaggtcactcattcgattttcttaaaaagaccaactaattttcttatacgggctcaaattcatgctctatatttttgtattttaattacagttgagaagctaattactaaaatataagtgtattttatagcttgaattacttttatgtaattttttaacaataattacacgcaatcatgtacaaaattaattataattattaaaatttgaatattaatatcattttaataaataaataaataaatacttataatttttatttttatcaaattattgaaattttaaatttgtcgcgcttttgaactaatatatttgtgcttacgtgttaggcttttgggcttgtcgtgtcatgcttttatcaatttgcaacaccatgttgtattgtgcttaaggacatttttttacgtgtcgggtcatgatttgtcgtgttaaatagttcagctgttaggctaaaattagtctaagtttcgggtcgtattttcagttagttttcactcttgtttctagttttagggctattttacgcttgattcttttgtttcaggtccttgggtgtttaaagaaagtatgtacaagaattgaggaaaagtggtgaaagaatcgagaagaaaaaccaaagtttgtgtcgctgcctgttccagtcgcgactgggaacatgccagtcgcgactgggaacatgccagtcgcgac

SEQ ID NO: 316820 - DNA, 1600 bp, Cannabis indica
tatcttatgtatggagatatatcggcaaaggcagctcacatgctttccctgccgaaggtaatatgtctaaaaacatatgagaaactttctttccctacccttcttaaccagtgcagctaattgtaatggagattaacagtattcaaaatttgcattaactcctttgtttcttacattcaggtttctgatttcttcacaaggttaatacaaagggtttctccaaagagttaccagcaagcttttggggaagtttatgtgacccaaaaatttctagaaaatttttctggtgatcaggtataaattataaacaaattgatcctttactttctatatattaggagaagtaaagaaaagaaaacaatcttgttactttgcatttattgaaattagataaactgaatttcacaattttttaatgggtctttatctcatttaaatgagctcgggtttcttagtttctgctataatggagtctcagggtgatgtgtggtcggagaataaatatgtcattatattgaatcaagtagattttattacttttttcgacggtctgtccagttggttttcaatctttaattttattcacctcctattgatcctgcaggttcgttttctagcaagatcttttgcagtgcccggaaatcatcttggacagcagagtcatggatttcgttggccttacggtcctgtaagccattccattaggacaaactttatctattacatttggaataatatgcatatcttaatggatggtctttaataataattaatcacaagactacgatgtatctattatgtatctatattttgcatgttttgagtgtttgtcttgtaattcttttattatataattttatgtctttaggcaatttgtttaatataaagaatttatttgcaggttgcccttattactccattcaattttccactagaaatacctgtacttcagttgatgggtgcactttatatgggcaacaagccccttctcaaagttgatagcaaggtatatcattgtatgaacctaagtatgctgaaggtttatactatagtctattggcatcctgttttgggttgatcataaatattaaattagtgtgagtgaacacatctaaggcttgggatttactacattttttggagaaaagggatgggttggggtagatgattcatgcatttaaacatgttcttagagtaaattttgatatatattatttttttttaatgtaataatgtttcttggctttggagttatcgttttttggtaaaccttcattaaacatttgatcaattctgttctgtgtttcttatgttattctcctgtttaagtgtaagttgtgtaaccatattccatattatgtaggtgagcattgtcatggaccaaatgttgaggcttctgcattactgtggattgccagagggcgatgtggacttcataaattctgatggaaagacaatgaacaagctgttgttggaggttggttaaataggaaatatgatgaatcattattgtttcttgctttgcttttgcacaaaattctaagaaaaatttacacgtgtagtaattttatttaaggaaatctgtcttttcagagctatc

SEQ ID NO: 316821 - DNA, 1514 bp, Cannabis indica
ctacatctactttatttttattagttggttccaatacacaagagttatattctcaagagtacgtgaatagtacaaaaagagatttctaggcgaaatctgtatcgaagcttatgaataaaaggctcatgaaagacccaatgatataaacttgatattaagggtggttgtaatgttcttcgaaatagtaaaatcatagatacaagaatagagaatgacctttttttattggtaaatatgtatgtcgatagtgatggaataatggaggcttggtgttgtccatgtaagaagaactcaaggaaaaaaataaagaggaaaagatcttatggagcaaagtgttctagaaagtggtgtggaaatctaaaatgtgtttcaaggtctagaattcgatcctaaatcctatccaatcattatttatatataggcatatggtttgttagtaaaccctcacaagttggggtatctcacatcaaatctcaaatatttttataaaataatgaagaaaatatatgaataaatacaaatcttagaaatgtagcattgtcataggtaaatattctacaaccactgggattttcgtcaaaatttgttattttccttgtttcttgaaattggtcatgtggcattgtgctttgagaatggaaaatttgagagaagtgaccatgggatggcacacctcagttaaggtaaatagagagtcacaagtattgtgacacagctctcctaacattcccttgtgacccacacttagtaaaaccaatcaatttcttagtaaagtgtgccagcatgtcttgtaacctaattttgagcccgataacttcaaaattgtactatgatcatgagacatacttagatccatttataaaatattattcaaattaaagttgaaccaagtcatttggataaaaattgagagagttatgtcaattttattgaagggttgtaagtacatttcagctccaaatctcacttgtgtcatgttattacgagctgtgccacctcattatggtgcaggtcagccatgcatgttctcagatacctctgggtgtgttttaacttattttttttttatggtgaatcatattttcggggttacggggtccgaaaactcatctcgacatccaaaaccctaatgggagacttgtgccttcttttggtgccaaagatggcacatgtcaaccaaggcttatgagaagcctttgatggtatttcttgcttagttagtgatatggatgctagaaaaatactttggtcacattagttattggccaattggtgggagagagttgtgctatctttttggtcacaaagatggcacaggtcggccataggtgttctacacctgttggtgaattttctcacttattttttgtacgttgatgattgaaatatactttgtccaagaaaactcttcccaccatttgatgtggccagcgtctgccacttccttgtgcacaaaatggcacaagttcgctagatagtttttacaccacttgctggccttcctcactttgttt

SEQ ID NO: 316822 - DNA, 1807 bp, Cannabis indica
tttggttgctaagacttacttgatattctccagcttcttctacacctactctgtatccttcatatgaatccgatggatgaaagttgaatatgaacagaagtggacctctcatgtatgctattacctgtatgacaaacaaaacaaatagctttatcaccttaatgcggatttattcatgttattctccatcagtccatgagttgatctgataagatgtttgttatagttatgcagattgtcaactattttaaggcatcttcgatcgagtttgggattggaagtttcatgtgaataattaaatgggatagaataaaggggcaaatgaattacagtaatattgaaataccaaaatataattgtgacaataagtagatcgggaaacaccaagtaagttgtgcaatcccacattgtctggaaaggtaaagtgtgatgattatgagactgtgtaggtatgaaactacacagttaaagagggcttaaatgaattgattggtactacttatatcaataaggtgcatcttgttttctggcccatcacttagaactccaaagttaagtgcgcttaatttggagtaatcttgggatgggtgacctcctgggaaaactggaagcgtgcgactgaggacaaaacacactgcaaacgctcgtgttggtttgtagttatatacctatgtataagagccataattccgtgggaaaggctcaataaaagcttgaagcgggggcattacaataataaagaaaatttactactgaaaacaaaaaatgagagtaagtttccatacataccatggtagtatcattcacgtggtgaatgctaggtaaagctcgggatagtactcgttctttctcatccagctccatcaaggcctaggaaagaaaaataaatttgttaccaagggtttcatctttgttactatagaattgaaatgttgagaaactgcctttattggggaacatataacagagtaagtaaaatgataccttatcgaagataaataagttgtgatgaactcctttcgttaaaagatcccaccgacggttagctagtgaatatgaaaaattgttgcttggcattgggaactcgatcctctgtatacaaaaacatcatcagatgcatgaaatgaactagaattttcaaggatctaggtagcaaagaaacttcacctcgggatgcccgaattcattgcccatgaaattaaggtatgcgcgaccgcctattgtaaatgttattagtctgatcaactgcatcaaaataaaagtaactataaacataactgatttaaccaacacatatgatactgctagtattctgatcccaataggtttgagcaaccacttatcaaaaatgttgaaaagttcggttggccaaaagattgagaaacaaagacaagtagaagaaatgaagaaagcctacaaagtaaattttgatgatgagaaataaatcaaaccttgagtaaggaacaccctttaagcaatggttcttttgcaacaccagaatcacctgttattgtaccgagtaatatctctgcaaacgattgccccccagatatcgactgacattgaagattgagaggtgagacataatgaaagtattcaaatatgaacaaataagattgtggaagaagggattacaaaaagaggttacctggttatggttttcagcataaataagcatcttattggcacattgtacattacccattaatgtgctcacaatctgatcaaattagttcaaaaatcagtgcaaagtaaattaagataacagaaacatgctgagatgatttatattgattataatatacga

SEQ ID NO: 316823 - DNA, 3307 bp, Cannabis indica
tcacaaaggggtaccactatccactactagaaaattcactattcacgtcggtcaacgcgactattcatcgcgttgaccgacgtgaatagtaactgaaccattaggcacgtcaatttttaaatgacactaataatacataatttacgtcgtttagcaaagcgatggtaaaaacaaaaccgacggcaattgggaaaatttttaaataattctttcccttttgcgtctgttatgaacactcgaatactgtgtttgtttgtgaggtttaaaactgactataacttatacatttgagagtgagtaaatgacactaaactctatgaaatccctaaacctccgctttgaaatcagatttcactcacccccttttgcgaaagagctctggcgatcgaaatggtgaccccctcttcgagttcttctccttctcaaactgatcgtgacttcgtcctcttcaaccaaatctaggagtgatgggtggtcttagagttaaaaggaaagacgacctccaacagattgaattagaaggaaaaataacctccatctaaagaagccactaactccgaccctgaagacctcgaatacatgggccaaatcaaaaacgtaagtttcatttatattgttatgtatgtgttaatttgtatttagattagaagtaattaatcacttgtttacaattattggtctccaaatttttaggatcacagaacactaacctaaactccattatcatttagcttgagctccaacaagaccattgctttttttgggtttcgaaaacccaggtcataaatataaaggaactaaatataatgcaattatacttctcaatttcattattttttgaaccaaaataaaaatgaaaattaagatggtgttgttttgactggattttgaaaacaggtggggtttgagatggttgacacttttgctcaatcgcaaagcattgaaatgaagacagttcattgtaaagctatttttggacagagtatgtttctattcacttatttattatatttttggtacttatttttatgtttgatatataggtgtttgctttttctatttgttgggttttgttactgatactcatattttccttgcaaagcctcaaatctatctgaatctaattagtgaatttgtatataatcgagccttattcttcttatttactatttttttaggtgaaatttttttgaatatcaagtaggtatattatttttttaattggtgtctatataaaagtattgtctgttcattatttatataagatattcataatacaaacttaaaccccacattagctacccattctcttgaaagatcagaaagagagaaagagaagtgaaattcatattttcttaagccacacatcaatcaacctaggacttgatctattcttatagtgatttgaaaggactctcaacatcttgaaacaaatttattgtttatctccaaccaaacacaattatctacatgataatcaacactccatttcaaagtatattttcctttatattgtaatccccaccaaaatcttgatagattacttactctttcttcttatcgttctcccattgatatagattagttttgtcatacattataattattggcgcttcttgttctaaatatatgtgtataattcagtgtttgatgaagaccgaagaacataggactggatgctgaaattagtaaattgagatattgttagcagagtaaaagaaaatactttaaaggggaatgtgataaaacagaagattttgtttgcttttcaggtaagcttttgtttaagcatgcagctgagaagcttgtattttgaattttctttttgtcttgagttgcataaaggtcaattgatgattaatttgtctttggactgtaggttgtaaaacaactactaaggttgaacgctgaacacccagatactcatcgctgtttagtatgtatctctattatatttggccatcgtctttatatatgtccttttcaatttgtgatgatgagtctattccacgtgaatgccttgaatacctctgaagtttaaaatattactgatactattctcaatttatttttagactaagtttctgctcattaataaaatcaaagcttactttttacacgaacaaaaattgtagaataatcaaagtaagggaattactatatgccatttccttccaaagagtaaaaatgaaaataataataatgatctgtttacctcatgaaaagggataatttttccaatctttatctaatcactttttattgatattgttgtgcttcaacatgtttcaattcataattaatggtactctcaggtaagtaatcaccagttgatcaagcctaattctagagatgacctagataagcaaaaaagagacaaaagatttgcctctgttttgtttggcctagatatagatttggttagagggagcacccagaatgaaagttttatgggtcttagtgatgttaaacattttggtaaaatgcgagcactgtattcttggattttgcagtgtgacgaagttctttgttcagttactctatcaagtgacacttgtaaagtttaatgtatgtgctatacagttactctttccattaatcattattttcttttacagttcacaaataaaatagttaaatttcctttatagtcacattgctagtggtgttattttcaaagggttttgctttttatttttttcctggtagttggactaattattaattatgagatcccttgaatgagtattgaaatgattgtgtcaattaggtctataacatgtaagatataactatgtctggttgatttataattatgaacagtagcataaaatcaaacctcctatgtttcatgagaatttcttagaagagtataggaaggtcttctgagaagtttttgtgggaacctaagtaggattattgttgagtcttactcagtttaattcagttgcatattgtcaatatttactgttatataaaaccatattaaaatttcaaaatgcaggtaggaaaattgcatggaaatttgtaattttcccttacctatatttatgcttcattttataactgacgcaaaagatgaacaaaaaaatgtatttccacaaattatgtgtcatttaagaaccgacggtaaaagttttttgtgtcagttttgaaatggcacaaacttttttgcgtcactttaaaacagacgcaaaatgttataaagaatattatatattttgcgacggtttttaaatgacataaattggtttttgtgacactttagaaacgacggaaataaaaaactatttgcgactacggctta

SEQ ID NO: 316824 - DNA, 578 bp, Cannabis indica
gcaagcacaatgtgatagctgctgctacaaatgggaagtttagagcttctcggctttataatggtctcttacaacagaatattgattgttatgataaggctgtttggtgtaatttatcgctgcccaagcatagattcatcctttggcaggtggttcatggtcatctcctcacaagagacaacttttccaagtttcacattgagttagagactaaaggttgtcatgtttgcaactttgaagaggagagtcatagtcatttgtttttcagttgcagatactcaagaacggttgtgcagcgaatctttgactggtgtgggtatttgtcgtggccattggacttcaatggctggttatgttggttgtctagtaaaaatcctggtataatcattcttgtaattgctgtcacagtttatatgatttggaagaatagaaaccactgtgtctataatgatagttgttatattgtgttgaaatctgtaaaggaaattaaacatatagttcatgatagggtgtataacatgaaggataggaaagttgtgcttgctgaaaaaggcttgtttttgcgccttctttagtag

SEQ ID NO: 316825 - DNA, 902 bp, Cannabis indica
ttatttttatttttaaaaaaaaagcaaatcttacaaatataaatatatgttagattgtatttcaacattttaaatacaaatataatcgagttatattggatatataaatgaaaaaaaaaattataaaaagaaaaaataaatgtttggggttcttctaataaattaatatacaaattaaggcatatccatattttattctaatattattcccaataatttgtacgttcaaagattctttgaggaagaatacaataaggtcatataacgttaatttgaactgtgaacaaaaacagtacatataatttataataatatgatgcgttagtgacttaatgatataatataatgttttttttttcttttaaaaataaatgaaattataatatttaagggtaccaagtacatataatttaatttattattaatcaaacaaaatctcatgaaaaaacaaatttagatcccttaaacagataccaatgtatagccacacaaaagatatatattataatgaactatgtgttaggattaggtgtatgagattaagggttttagggttttatggtgtatgagaaatataatctaatcattttatatatatagtatttaatttctacacataaataatcaaagactaattctataatactatgacaaattatagttactaataaattgtataaacaaaaacgcgtgcgtaaccattataatgtcaataagttatccattattatttattatcgacacatattgcatatactaggtgaatgtacgtgccgagccacatattgctagtttcatttaagattttggtatttttaagattttgaatgtattttatttttaaaaattacaaattttttgtttgaaaaaattaaatatttatattgaaatattatttaata

SEQ ID NO: 316826 - DNA, 662 bp, Cannabis indica
ttttaatatatgattaaaatattattattatttaataaataaaaaaattctctcatcaattaaaaagtttaattaattaattaatttatatatataaagagagaatgagatcaaaaatatatatacgatatattttttcaaatcctatctcatttgcatagtctccctaaaaaagaaaattaaggttccaaatttatcaaatctcatgttaagaatctggtaaatagaaatcttcattatgttgatctaatttgttctcttatttaatcactaaaaattaataagtataattggtgccttttagcatctttatttattaagaaatattttattagcattttgaaatgaataaaatacagggtataattaaaagaataaactccaactaataaaatttattgtcaaacttaagaacatgcaaagatgatctcagacatattctaatttcaaatacaaatacaaaaatttcagttgcctaaatttaataaaaatcattttgtaagctttacaccttgtagatttttaattaagctatataagagatataataatctaagagaaaaatgacattttatttccattccttcaattattgattgttttaaggtaataaggatgagtacctcttactccacaaattcaattgtattataaattaagaa

SEQ ID NO: 316827 - DNA, 2495 bp, Cannabis indica
tacattagttaatctaaacatagtgttatttattatttaatacaatacgacccttatacggcgtaccaaacgagcccttaaagaaaaatggattttctaagatgtttctcatcaccagtcacttgcttgatgtccaaaaacttcaataaagagttccttcaactactgcttagattgtttgagaacagtacactagatttcgactcactacaagcctggccagaccatttctcatataaagagatgcaattcatgagcttctttgcgttcccttcattaccacggcaaaacaagattgtatcatcagtaaacataaggtatgaagttggcggggtcgaagaaccaattttgattccatataaggtttttctcctctcagatctacagatgattttttagagaatttcctgccatagaataaaaatgaagggagagagcaggtccccttgcctaatccctctttggggaacaattttcttgagagggcttccatttagaataatcgagtacgacacacttgtaatacatcccatgatacgcttacaacttcttacatcaaaaccattcgcttgaagaacccaatgaatgaaaggccactccatcctgtcataagctttaagcatatctaacttaattgccatcagacctccttggcctttttttctgtctaatcttgtgcatgatttcttgagttaaaatcaatgactcagtaatccaccgaccaggaataaaagtagcctgcattggggacactaaatcatccataaatggtctcatcctatttgagatgatctttacaacaaccttgagaggaaattacaaagactaataggtctaatttgatcaattttctcaggatttaacaacttagggataaggcatacaaatgtataattcaaacttggttcgatctcaccctttggaaaacctcctgaacagctgaacagaaactgtctcccacaatctcccaatacttgtggaagaaagatccatatagtccatctggcccaagagccttaagagggtggaagccaaagataatatttttttatatcgataacatcaggcacccaaacaatactgtcatttgtctccatatcaagcttatttggaaaaagctcatcacaatccacaggtgtagatggtctagcagacctcccattgttgtccttaaaagcccaaatctagttccttcttctacgaacaacagtcgcaacatgaaagaatctagtattctatttccaagtttgagccagatttccctccatttctgtctagtcatgtcctccttatgacgccacgcaatttgcagttgcatttgaatcctccttcctcctttactagattcattaaagcacttattaaaccatcattcaaagctccaaaagaatacattcaagcctctaaattcagcagtgtccacttgtacctatattaaaagtataatttgtgactgatgaaatttcactcgaactccctcacaatggatggcacagggttacacccacatccactttgatactattcgtcttgctctaaattattatgacaggaagagacttccagttaccgctcgtattggtcttctagatacttgaatgaggaaatatcagaatgcaaatatagctactattgaaaatactttaagtactagaacagtggtcatcactttgtatcctaatttcaacatgtctcttagagacaattggctaactaatgctttcaaagtggaagtgcaaacaataggaatagactaagacccaacttctcttggcgccacactccattattatatggcatattgactccaagataatgttcttgatcttaacatccatcaaacacaagacactttactcatctcagttgattacaaacaagtaccgatctacacacatgtcataaagcaaatgaccactgaaaaactcataaaacttttacccaaattgtgtgtcaccaaatatgaaaagcttcacaaaccacaacccatggttcaaaccacaactgagccttcctaccacaccaaagaaaagggatttgttgagcctatttttaacagaagttaaacaaaatcacctagatgttttctcacccaatatgtcatcacacccatccagccaacagatgcaaagatcatgtacttcgattcacaaggaaagctaatatatgcttttgaatcctcaaacaggcataaactaggatgtttgtaactgccaaagttgtcttgaagatgatgagccctcacggcgtcccactccaagaaagcaactcaagcaaaagctaaaaaagagaaacaaaaacatttgtctattaatattttcattaataaacaatggcacacccttcaacttgatccctacctcaatagagatctccatgaggaagtttacatgaccatacctcaaatattactctacctaattctatttgtgcagatagaacttgtaaagaccgcttagctttaatttagaattagcagataattagggttaatt

SEQ ID NO: 316828 - DNA, 3054 bp, Cannabis indica
ggtggaggattaatgggttctttgcatacttctgaattgaattagcaaattaagtagaaggacaaacccaagtccattgctgatagaggtaatggtattgcttttgatgatactgaaaaagaaatttcacataatggagaagatgatgagatagatgttttaactaaaaaatttcaaaaatacatgaaaaagaaaagtgacaaaaagaatttttcaaaattctctaaaggtaatactttttcaaaaccttcaatgactaacaatcaatagagaattcaatgcagggaatgtgaaggctttggcacattcaacctggatgtaaaaatacactaaaaaagaataagaaaagatttaatgtcacatggagtgatgataaaactgatagtgatgaagataattctaacaatgttgcagtaacctcagtttcttctattttgttttgtgtttcacaggtgaaagaaagattggtatgtgttaatattaccattgaaaagtagagtctaattctgatgaatttgaaatccgtgaggagtccttggctaagtcttacaaggttatgtatgaaaagttgatagaagttacttctgaaaatagatcaatgtaaaaaaccaataaataactgtctcatcaaattgaatctcttgaattgaaaattaaagaatatgagactgatttttgtttaaaagatgaagaaattattctattaaagaaagaacttgaaaatttcaagaaaagtattcaaatgcttaaccttggatcttctatttttgagaaagttcagaatgcatgtcaaagaagctttgctggtcttggattaaatggttctaaaagtcctggaaacacaaaatttgtatctagtgttccaacaaatttacttgctgcaacaaaggcatcgtctgcagaagaaaagtcttcagtaagttcaaaaaaggtaagatatcatgtaagtaggtttgttccaatttgtcatttttgtggtattaaggggcatattaggcctaaatgtttcaccatgtaaactatatttaaaacaaattattttggtaatttaaaacaatttcaaaagaaacatagtgcttcacaaaaaaagtggattgaaaaagaaaaatatctagctattttttccaataaaagtgttgcttcacaaacatgatattttgaaagtggttgttctagacatatatgacaagaattattttgtgaatatcagaccgatgcaatgtggtgaggtcatgtttgacaatggtttagtaggaaatgtaatgggaatgagaactctcaattttgaaggattaccaaggttgaaagatggtatgcttgttgagggattaaaagctaatttacttagcattagctagatttgtgatcaagggtgtatggtctcttttgacactgatcattgttatgtacttaatgatgataatcaatgtattttgtaaggattttgatctaatgataattattatacccaattcctgttttcatttgtcattaagctatcaacaacatcactaatttgtggcatgcaaaacttaacatattaactataaaaatctaaaaaagttgtccaatataggtgttgttcgtggtctacccaaactgggtgaagaaagtatcgctcttaaaactccctaataaaatggagtcattgagaggaagaaccaaattttgtaaaagatggcaaggttgacgttgaatagtaagaatctgacaaaatatttatgggcaaaggctataaatatatcttgttacacaatacactcagtgtttatttgtctaggtacatccaaaatatcctatgaaatctacaaagccaagtagccaaatataagtcattttcatgtcattggttgtgcttttatgttctaaaagatcgtgaaaatattagaaaatttgatgctaacagtgatgttgagtatattcctcaaatagtaggactttttcgtgcttacaacatgagaactcaaactgttatggaatcagctaatgtggttgttgatgctatagtgttttgttctacatctaaccatgaagtgcaggttttgttaatcaaatgaaaaatgagttcaagatgagtatggttggtgaactttcatttattttgggtcttcaagttagacatatggaaggcggaacctttgtttctcaaagcaagtatgccaagaatcttgtcaagaagtttggtcttgaatcggctaaataggtaagtacttcgatgagctcaactttgaaattgacaaaatatgaacatggtgtaaaggtagactctacactttatcatagtatgattggtagtttacttaacttaactgctagtcatcctgatatatattacagtgtaggtgtttgtgctttttttcaaagtaattctatggaacctcattttctgttgttaaaaggattattgaatttgtcaatagtactcttaattttggaatctggtattctaaagatactaattctagcttggtttgttttagtgatgctaattgggcaagagtactagtggtggttgtttctttcttggaaatagcttggtatcatggcatagtaagaaacaaaattctatttcattatctactgctgagactgagtacatagttgctggtagttgttgtactcaattgttatggttgaaacatttgattgattatgttttgaattgggtattttttaaaaaaaaattgtaaaaataccagtgctataaatatttccaaaaatcttgttcaacattctcgtacaaaataaattgatataagacatcattatattatggaactcgttgacaaccaaatattggagttggaatatgttcatactgaaaagtaattggctgatatttttaccaaggcccttgattcaagacggtttgactccttcacaaaatcactgggggtttgcattttttaattcttttcatttggctctatattttgtacaaaatttttgagtagttcttatcttgcatctgtttttctttcattcttggttgacgaaacatgattatgcttttgggtgataattagcttagtgtcttgtactctttatactttt

SEQ ID NO: 316829 - DNA, 742 bp, Cannabis indica
tacaacaaaatatttaaaccttaattacaacattgtaaactactcaaaattttctaacccttttgtaatatagacatatcctaaataactagttacctcaaaggtgtaatattgtgattagtacaatttaatattaaatcccactcatttattttaataaaaattataataggacacttcatagtactagttatcttagttaaccaattaaccctttatttttattttgttaaataccgatttaaattacatgaagcaccatcttgtattattaatcaactaattgagtttaactaataacaacctaaacaattacagaaattaaaaatggagagaaaataggtcaaaaagattagatcataggcttgtttgttgttggaatgcgtttatggccctatcaacctatccaaagatttgcctgaaaataattataatgtgttacagactacagtcattgtcaaccaaaaacaataaatcaataaaacaaaaataaaaataaagtctttagtgaatgagtgtgatgtgagctaatgcgttacactctctctctggttttgaggagattgagatttttacaactttcaaaaaagcataaacaaaaaagttttgaagaaaactaaaaaattaaaaaaaaatatgtaatatagtatggagaataggaaaaaggacatacacacccacatggccttattggctgtatatatatataagaaaaaaaattaaaaaataaaaaactacaaaa

SEQ ID NO: 316830 - DNA, 764 bp, Cannabis indica
aaatcataacaatcatgcccttaagtcataaactttattccaaaatagaccacataaatttgacttatttatttgatgacccaacacacattttatatatacaattgtgaccccaattatttctaacatattttttcaaaaaatttagtcatcctaatgtaaagggaaaaatttaggcatttataccaaatcaaagaggttaggcatttcataaacaatcagattttgattttatagttttagatttaaaccgaaactccgatcagtagcagaaaatatcaatgagcaaaaaacaaaatattatttctgaaatcaatgaataagaaaaggcggtagagaagattgaatagaagaacagaaagtggaaagaccacatgaaatcattttctatatatatataattttttttaatcatgacaattgtgattttttacagaaggcttttggtgtgggaagccatacagtaatagaactcactgatttgtcacgcgctgtcactcgcggactgcacgaaatctgcactatttatctaaaagaaaaagttttaaaaaatttatactatatattatggtaccgtttggtaacacttttgctttctaattttttaattacaaaatgaaagtaaaatttttgtttttgaaaaataaaaatgtgttttgtaatcacttttgttttcaattttaaaaacagaaaatgaaagtgtgttctataaagtttatttttattttttattttttgattttatttaagttgggtctaagttc

SEQ ID NO: 316831 - DNA, 1269 bp, Cannabis indica
ttgtatatgattctttttcatttttgtttatgtatattatagtgtggattgtgtatatgaacttttttttttttgctaagacttgaaacaacttcagtaaacagaggctaaaatattggtgagtacaaagggaatcacctcccaaagttcaagaaaaccattacgagattgattgagattccatttggccaaaacatgagccaaatgattacagttcctagacatccatacgacattaacatccaaatcaataatcaaacttaaaacctggcaaaaggagaaagatagtttccaccaaggagcttggagcttcttaatcgcccaaactagtgattgacaatctgagatcaagttgacatcacaaagtcccaacctttgaatcacattcaggccagtagaaatggcttcaagttcccccttaataatagaagaggcatcgaacatagagacgaacagcgtaagcactccaccacagctatcccaaaccacgacccccactgaaccctgtccttccttatttgcatagtccacattcactctaattctaccaagtctaggaagacctcagcaaatcgaatgaattccagggccttcgctatgagactagaccaaagcaccatcagtctgagttttctaatggctcaaaaaggcttcattaatcttgttcctcatgttctgaagaggccattgtgcactgttatggaaataattgttcttgaagaaccacaggttatggtaaaggacagcagcatatactaagaattccattttctcagcaggctccaagtttccctgtaggaaagggggattaagaaactagttaatagcctcagcaccagagtgaagagggaattcatttatatggatatgtcacttgctagataactagaggtatgtagtaacagcccaaaaggagataaaatgagcactagtatcactgtcgtctaagccacaaaggacgcatcttccaattggattgccaaaaatcgttgccaatcgggagccaaaaggaagacaatccttatacaacttcaaaataaatactttcaatctttcgtgtagagaagtcttccacagagtagagaaaatttcatcattagagaaacgaccatgattaaagtcgtggtaagccgctttgagggtgaaggagctatcaggggcagatttccaaagtaaatgatctttaccaagaaaaaatataatgttgctagaaatgatagcaatggctgtaactggttcaaaaatctcagagatgagatgggcattcca

SEQ ID NO: 316832 - DNA, 1256 bp, Cannabis indica
aaccctttgtaatctaccttgctaatctgatctctgaaatacaccaagtagtgaactcccttcaactattgatgtgtgcttacttcctcccaaagtaaggcttaaacaaatcttctcctaaagatatatgctcacttcctcccgaaaatgagacttggaaaagtcttctctcgaagacccacacttgttcaaagcttctcttcaacctattctatgaatagtatgagatcataataagaaaaccaaaacctagttgaacactctaggttcttacaaatgaaacactcttctcaaaaagaaagatatgaaaatatgagactagaaagataaaaacgtttggctgctctctaggtcctatttatagaacatagcaaccctagaaacagccacaaaaacgatttccccgatgtacaaaactttcttaaaaaatttcctgatttccagcattagaatcgggttttgcagcaacaaatcaggactagaaaagaaactttccaaattgaaccaagatcatgaatttggacttcaaatctgtcaaataaaatttatttgatatgttctaataaaggcaaaaccgaaattatccattagaaaaagggaaagtcaagtttcccaaagttagataacttttcataagagaattcattcttttacaaaaagtttcttaaaccaaaaagagatcagctgagaaagaatctttccttagaagaaaagagtaattggatgcacaaaatcattgtaataaaaataatttaaatactcaatcaaaatgcacattaattaaaaaatattttgacaactagattgtcaaaaaaaacacctagcaataattatttaaagaaatctataaaattttgaaattcggaaaaattttacacgccgaaaacagaatccaaacaaactgtgtgttacacgcgtgactattttattttatacgcgtgtgaaatagacttgaacattgctttctatattataaattattccaaatttctcaaaattttgtatgatatcttaaatttttataacgtacacgaatctaaaaaaaaattgacaaattttttttggattccaaaacacgtagaaagtgcatcagtatatctattttaaggggtgcattgtaaaatcacccaaaagtttttgtaggagtgtttttggataaaagtaaaaaaaaatggaaaaaaaattagagttgttttttctaggtatttctttcctaaaaatatatttgagaaattatttttaaaatttaaatattt

SEQ ID NO: 316833 - DNA, 521 bp, Cannabis indica
ccctcccttcaaaaaaaattgcaacacctctttcttcctctctctcgctgtttcagctgccaagaagaagatggcataaactgggcctccgatggtctagtctgaccacgaaatgaagacccccaccccttaaaacctaacatccatctatttctctcgctaaatcgtattgcaaggttggcatttccctctttttctgtctgaatggtatggcgtcgatatgtttggtggcgctgagactaacttaggtatggcttttctatctctctctcactgtattgatctctctttctctctctctctctctcgataatgttctctctctctctttgtcgctcttctctgtagatcatcgacagaaaagcttgctttggggtttgcaaagttggccagagtctgggttgcagaggcggtggccggggagattgggatttactgggcttgagtttggtttcgatattttagttaatgtgctgcttgttgattttattttctcttctttgattagtctatgttgtgtt

SEQ ID NO: 316834 - DNA, 615 bp, Cannabis indica
tcaatatttccaatgtctctgcaccctattctcgacctcacagcaatcacatcctttgtagaattttctctaaatagggccatagtcctaaatagtttcacaacttcatctttagaaattgggcaggtagatttgcggcggaagcttccacttatgatactaatttttatatgatcacatttggctgctaaggagatcttcttagagtcccatctacacaaccaacacttggttctttgccttccaagtgttttacaaaatacctctttggattcggttacaattacttctttctgggatcacgtttatcgtctgcctttttaaagcaagtctgaggctcttgcgaggattattggtggcttaataggaaactacatcgatgttcatgaggactctctcaatgaaggatggggcccttaaggattcaggttggtattgatgtttcaaaacctcttcttcgtggtccaatggttactttgccttggattaaagatgaaatgtggcttaattttcgttatgaacgcatacctaatttttgtaacgaatgtggtgttgatcgagattttcggcaaccgatttaataatatatatgagaaagctgtaggaagtttaatg

SEQ ID NO: 316835 - DNA, 716 bp, Cannabis indica
tttttttttttttttgctttaatggggaaattcaaggatgtgtagtatcacgatgtggattaagacaaggggatcctctatctctttttttatttttgttatgtgcgtaggccttttctaatcttatccaacatgctgaacggaatggtagattgcatggtttgaactttggaagacgtggagttaaagtttcacatcttttctttgcggatgatagtcttgtgttttttgaagccaacgaaagagagtgtaggtgctttaaagagttaatggacaaatattcaaggctttagaacaagttgtgaactttcacaaatctgaaatgtgttttgggaagagggtttcggagtctgcaaaggatagaatggcagcgttgttggatgtgttagaaatttattggggtcacaattgtatatataaaatgttcgttgggtcatcaaataaataagtcaaatttatgtggtctattttggaataaagtttatgacttaagggcatgattatcatgattttagtatgtggataccaattagacaatttctaatttgatgaggggctaaattggaaatagtcaaaaaggattaatttaaacaggtattggtccctattttttgcatcgcttcatatcgtattcttgaattcccatcatcaagaaaactcaagttccagagagaaggttttgatgcaaaaattaaagatcataccaatcaaaggtt

SEQ ID NO: 316836 - DNA, 1005 bp, Cannabis indica
aaaaaataatattcctcttatggctgacaacgaagaaattaatccttatgaagaaaccactcatcgtcccgaattagagccaatgagtccccaaggatcatctgacttatcatttgaacaaaccacaagctctaggaaaacccagaatttgggaaccagacttgaagggcctagaatgaacaatgacatgtctcgtcccaatctagttaatgaggatggcgcctatgacccaacaaagtatatatcaatcgttgaattagaaaactgccatctcaagcgtcgattggaagaggcaaattggtgtaatgctgaattagagagtgaggcagctgtagccaaagtggcacaatggaataactcccaaaatcaacctgaccctggagagagagaaccgcaaggcaaacctcgagactcgcaaactaggggcaggaggcagccggaaggaatcataaaacgctcaggaaagacaacctgggtaaattgggtaacaccttaaaagtgagatgccatgtgattgaccaggaaccagggaactggaaattccccatagaaataagggaagtctggggacacaacctggggtacatgggtcatcactaagagattgccaacattctttccaaacttataagaaaggagctcacacaaatctcaatagggagaacgcaaggaatcatacccaagagagaagagcgaggcatgaagaggcaagtgttaccgctaggtgcacgataactcatagttgatccatgcaagtaggagagaatagtcgtcgcaacaatgatcaagaaggaaaaatacggtctatgggtggaacaagatccaccaaccgtcatggcaaattgaacctaagagaacgcttgtgtaacgccctaactattaggcacgctacccaaaacgcttaagaaaccctaatcccctaaacgagataactaataaaattagcgcacaaattaaactttaattacaaatagaaggaaagtaaacttgtaataatttaaactt

SEQ ID NO: 316837 - DNA, 774 bp, Cannabis indica
tatagcatcgactaattaaaatacctccaaagaaaatgcaatagcctgatgttgattttttatcatcaaagcaccctgtccaatctgcatcagtgaagctgtgaatatcaaatctgttagcaggtttgaaaaccagtccagagtctattgaaccagcaagatatctgagaactcttttacatgctccccaatgttcaaatgtaggagcttgtatatattgacttaatttgcttattggaaaggcaatatcaagccttgacatggtgaggtactgcaaggcaccaatgacacttctgtagtgtgttgggttttccatgagagtgtatgttgttgctgagagttttgtggtggaacacataggagtggattggggttttgagtcaagtaactgtgttctagccagaaggtgttgggctttgtgtcctaaataaaactttatttcaatgtaatcttttctattcaattatcaataaagaaacaaatttattttcattacttatttaatgtgttatttagttcatgtgatcatttatgtatttatttgatttataaattcatccaaatccttatcacactgatattcttgtttattgtgttgtcaacacaatggaaagtaatcaagattgtgtgattaaatgtattccaatgatttatcaatacagagggtttaattgataggttaatctacaatgtagtttacttgcaccttggataagtgctaagtctttttcaaggcattggttaaagtaagcttgggttggatgtacggagtat

SEQ ID NO: 316838 - DNA, 804 bp, Cannabis indica
tatatattctatatatggtttttggaaattgtattgttggaactttttgaaaatgatcaattgttaaaaagttattaaaaaatgtattaggtctaagatagaaattttgtatataatataaaatataataataatagaaaataattaggtatttagttattataataatttgatagtataatactatcaactaagtcttcctccttattaggtctctaatcaaaagcatgtaattttatttatttgattatcagaagtatacaattgtatgatgagaatatgtatttatagcgttaggaagagaacttaactacataaccctagttggagtagaaatgctcatcaaaagtccaactttcaattaaattttatacacagagatatgttaactaactattgatcaccaacatgacacaacaaaaaacctatccaatcaaatctaaattttaataaaattaataaaaattaatgtaagcccaagtaaaaagtctaacattctctttcacttggctacattaattttaattaatacatatatattatagttttgtttgaaaaccactcatggattgaacaaggaaaataatatttgtggtcactttaaaaataatagttctttgatattatcttaatatatatcggttcaatttaacatttgatattaaactatgaaaatcatattacttttaaatcaacaaaagaaattcataatcacaaatattaaagtactaaattggcatgatcaataaattcagtagtgtcgtaagaaattattttcaacatgtgatcaatttaaaataacat

SEQ ID NO: 316839 - DNA, 689 bp, Cannabis indica
aggtgaggtagcggcccgacaagctgaaagaacggggtccaacaaaatgagataccaaaaagttgaagaagaatgagttccgagaggttgtacgagactccgattcccggcttggatgattcgccgccgactccttcgttggaggtattgtgtttttttttttcattttttttttattttgtgggttgtttgtttggtaatttttttgaagagtataaaaagtttcatttttatgagttttttattaagatttatatttgtctggttactgttatggtcttctctttttcagattttattatacaaagtttcaaaaatttacatttgattaaagatatattgtctactgttttgttaatacatttatgtttattatatgctaaaatattgtcatggtatttttataataatgttttatgtattaattatagagtttttttacgtaaaatttttatatatttttgtttattatgattttatataatttgcatgtttgtttattctgtttttataagattttttctggttatcgaagctactcatacaatttagtatattatgtattattagtattattgttataattgagtatactgtattgtttaatatatttctttaaaaaaaaataataatttgttaaacctttttatttgttaaacgtttttgtttttatcatttatacattttta

SEQ ID NO: 316840 - DNA, 940 bp, Cannabis indica
ggcataaaatcccaacagaatatctcaatgaattttgtgtgatttttttattattttagtataatttaattggacatcatttcccataaaaggagagctctcctagctcattttacacatttctcattctctctacaaggtcagagcttctctctcttcacattttctctctcttaaaattgtgaagtgaagctagacttagccattttttatgtgctctcttgtaaggcaattagtttttgtgatattaaaggatctaagtaaacgtagctccattaccatcgcgtaacagggagtgaactattattataattgtaacgttctattcctttttttttgttgatacattaattggccgctaccacttatcaaatgatatggatttgattgcttttcaacatcaacactcctatagtgtttgtttttattatggaataccttactagaattatgaaaagattagctagaagccataattttggtttcatactcgatgtgatggaatagaattaaaccatctatactttgcgtggatgatgttttgttattctgccatggagatttcaaatcaatatttctactcctgtaaggattgaagctattttcgatgaaatcacatatttttcctaataattttatgtctgccatctaattgtaatggaatggagactagtgaaaccaatagaatattagaatcatcaggttcagtaaaggtgagctccctttcagagattaaggtattctaatatgcttaaagcgtctttcaaaggttgactatgaaattttaatagaaagaatggttgaaaaattcaaatatggagaacgagaaacttatttgttgtaggaacagttgtgttagtgaacaatgttagcctttagaggcagtttttccaaccccatttataaaaagagaagctaaagggtgtgaaaatacccgcta

SEQ ID NO: 316841 - DNA, 732 bp, Cannabis indica
agatcctggtaaaataaattcgaacaccttgtacaatgtgatttacctaaaaggtaccctcaggtatagttgattaaaactttgtttatagctttgtcaggtttctcgcctccccttatctcttctatccaggcgattttaagagttgatttggggaggtggcagctgctgtgtcataggttctgttagtctagattttgagagagagcatttagtttgtcccctcgctccttttgtatgattctagactgatagtcatggctagagcgaaacaatcatgtcgtagagtgccgccatacgatcctcatgttgccagggtcgcaataatggggagaataagagttgtagaggatgccacacatcgttgtgaggatgtggatccaaaagtttgtcaggtagaggcacctaaggttgatcagggggtcgagagttctgactttgaatctgaagtggagaaggatgcacctattaggagaaggacttacagaactggttctgtcctccctaacaaccgtcttggtggatgtgatgctaacggggagccgttgaacaagcttggttagccttcagtgatggattaagaccatatgtttatgcagtcttcagagtcctaaatattagatgctagatcacagagagacaggtgggtctctcccatatctttcctcacccttgagacttttgacgagatactagctagtggtctagtgaggggtgtgttgggttttatgc

SEQ ID NO: 316842 - DNA, 1036 bp, Cannabis indica
gtattaattaatgattttattttcaataaaaggcccaattttaatttttcgcccaaggtccccaaattggttgggccgaccctgatgtggtgtggtgtggtgcaggtatgacaactttttaaaatatattttacttaaccgcaccacacttcagcggtggtaaaaaagttaacctgcactacaaataaaattaaccaccacaccccaatccaaaatgcagtgtgaattttgtaggttttgctgttaagcgaatatttttgctcacccctagtcattatgtggtgtatctagtttaagaaaaataaaaagttgcataacaatactaatttacctcgtgacttggtggtggggaattggcccatgaatttttttggaatttccaacatagccaggctcgaactaagccttctctctctattagacaggtgacctctttgccttttgttaagattgtttcgaaatggtctcctccgttagttggatccatcaaggttaatagtaatgcttctattgataaaattcacatttgtagttaccttggcatggtggtgcgtgattatttgagtactgttcttgcttttgctgtttggcgcctagaaggttgtcttgattatgaagtaatggaggctttgccgctacggaattccaaggtccaatatctttgctttgggtatgataatatcatctttgaaatggattgcttaaatgttgcacaaaaaatggtgaacaaagtatctctaattttctctttgggtcttgtcttgaatgaaattagtaatttttgtaatggttttcatgattcttttttatattgttctagagattttaatgttattgctcacaacttaactaaagtcgttcttacagcatcctctagtactgtttggtggtcgagttctcttaattatattcagaacttattaataacagatgctattcagtaatactaatacgatctcacctccttcttcgttgattttatcctaaaaaatgatgaaaagatatttttaaatgtgatattgttgggttttatgcc

SEQ ID NO: 316843 - DNA, 598 bp, Cannabis indica
taatgtaccacggaatacattccgtaaaagtacatcacgggacaaaatcgtgtccctatatatatacgtgcaaaatcatatgggaaataaaaaaagcaagataaaaaaaaattaaatttaatctcaaaccactctatatttgtaaaattctcatatcaagatttgttgcaagaattatcaataactcaaaatttgataccctataaaaagaaaagctttgttgttgatcctcaagaacaagcacacacgcagtctacttaatgttgttgttggcctacaccaatacacaacgatgcttctttgctcactataaacatattcaggcatgaagtaatatgaatgagtaaattagagtaagatgatcaaaagaattgaaaagaaataatatgaagggagctttttatttttttattttttcttctcgaatataaaataaaattaaactttatataagggtaaatatcattttggactatgtattttgtaaaaattaccaattaaattaattattttattaaacgataaaataaactatatattttccatgtagtgaatcagacaccatccaaaaacataacaaacatcaacaagatcaatt

SEQ ID NO: 316844 - DNA, 1585 bp, Cannabis indica
ctcctaaggaggaccctccactgattcccactgaaggaaggacccacatggagtagcccccgggcaacataactagacctcatccctagtattatgctagagagatggggccgagaattggtgagccatccattagtgaccccgtgtagacttcggaaaagatctcaagttagccagacttagagaagtcgtgtgttaagtcagccaaactcaagaaccatgtgctgttgattgtgatgtatttacacaacagagatgaaaatttttgagatggatggatgaccaagcgtacatcctttgatctcaccaggaggagctagaccaccacaatagagaagccagtgacctgataaggcagttcaatgagaacactactgaaagaggtcaggatctcatcagagatcccttccaagggagactagtcgaaagatcagggaggatgtactaacaaactatccaaccaggctcttcaagaaccaagacagaccttcacttgcctgatggtggacaaactttgccacagagatctggtggagagaacagccatatctcggtgaccaaaggtctagggggccagccagggatcttaggctctacgacacccccacttggatagcctctggccaactagccccttagaggtgcacccctggctggccagcagggtgaactcccgtcctaggagctccatgagtaagtaactcagaaaggttcgagaatgagtggaaacaccaaaaacaacaacttgagaagtgagtctagtcacttcaaatatctagatctaccaaacttaagaaactggtgtgatctaccctctatcaacacaccatctgcacaagccgattgaggggtaacgagcagccagaccctacctagcctagggctagccaacctccaccataccctatgcttgagctctatgcaaggttcacaaggcatcctgtagccccacaaatttctaggtgtgcaggctgaccctagcaactcttcctaaacctctagtggcaaaaacttcagggcaagcgcaacaacaataactctggaagaaacagtggcaaaatgggaaagtataatacttctcccatgccacgaaagaagaaagataaggaagagcagtacacctgcttcaccctcttgacgaaaaaacctgaggccatgttcatggcaactcagggaactatcccatacaagaagcccccacccatgaaaagggagatgagcaagagggacatgtaaaagttctatcgattccacaatgacttcggccatgacacaaaagagtgtcaacatttgaagagggagatgaaattcttggtaaggaagaataatccccatctacatcgttatatgcagaacgacaagacccatgcacaaggtgcccaaaatggagaccctatgccacctctagtggtcggtcacttaggagtcattatcgatagaccccacatcataggcgagatcaacaaggatagggagcactatatatgcttggacaatttttcacgagtgtaaaagtgatatcctcactatcaatgatagaggctccaagcaactaaagcctagagaattgttggaaatattttac

SEQ ID NO: 316845 - DNA, 1678 bp, Cannabis indica
acaaccacatccaatccaccttgaagatagagcatcaggcccaagcgcaatagtgtttgcgcccacaacaagaaactaacaaccccttcaaacaagatccccaaaagctaatcggaatccaccatgaacaacgtccctgacttagttcactctgagaccagagtgagcacctccatcacctatcaaatcgacgagttgctacaacagacgaaaatagagaaaacacccatcaataagaggagaagagaaaacttgagaaacaacgtccgtccgagggcataggtgcacccatgcacctaatggcgataccatcccaaaatttaataaggggccaatacatgtaaaatataataagtggatatctcttcttgattgctcctagtggtgtgttgcctaattttttcatcagttatttcaagtatcgtttagggtttatgagtttttttttttttagtgtagcgtaatggtattcttacaatcaactaatagcttataacttaaaggtcttgggttcgaacccatgacctctcccttttcctatccctccctcaccactaagctagccttagtggcttaaaaggtttatgagtttgaggtttaaaaactacaacttagaaatgaggatagtctgattctaaggggcctaattgtgcaaattctggatcagaatgggaaatggtattgtcacaaagtataatgccccaaaaagttcttggaaaaacagagcacagttgaaatccaaaacctacgaattacataaccttaaaatttctagccctagattattaaaaagttcatgtaaatccctctcaagaaataagtgacaaaagggaaaatgtatgggaagaaaaacaagaagaaatcagaagataaatgaagaaacgtcacttactagttcaatgtaaggagttaagtcccgaagaatttttgaagatttttggtgcaaagaacctgaacgtcatcgattctgggtttgagaagcgaaatcacttgatactcggagaaaatatgtaagggattatgagggcatgcaattttaaggagcaaattggtttgaagttttttgaattctgagaacttcgtgaaattgtaatgacaaaataagaggaatttcagactttatacccaaataatgaaaaccattctatcacaatgatagttgatcagacagattacaactattggaaaaatgggagtcaatgtaataaatgctgaaatgatgtgtgcttcaaagttttgaactactaaaataaagcgtgcaattttaaatggaaaaatacgattgtaccctttaagtaattaagaagtcattttttatttcgatcagcaatatggtgctgacacgtgtaatgaagctggaatatgaactaacccggataatgcaataataaatactcagacaactcgcctcgagaagtatagttgatagaaatattcaaactcaccctctttaagataatgtcgacccatgaataataactactgactaatgagatcagcgagacgaacaaaaaaaaaatccatcttgggatacatagaatacacaacagtaaaaatatttggaaatggtagataatgaattatcgaaagagctcgcaggtcattgacccacatattcatgagtatgttgaaagactaaaaaatggttcacctcacaattgtcatatggtgataagcg

SEQ ID NO: 316846 - DNA, 541 bp, Cannabis indica
ttagggcataaaaccaaacagtgcgtcgagaggcagtcatgggagctgctgtatgtgcggaattaacatcaggtggattgtctgatgaaagatttgcaggtggagatgggagaactccatcctgggatctcgtagagggcctttccattgaaatgggaagggtaacgtctaatactatatgagaacttcagagctgaaaaagagaggagaagaatatctcttattgattaatgaagctgaaaaagaggccgtatataggcaatgttacaatgaccaaatgagacccaacaacttggggaaataacagaataaccaattacagaaaacagttgtaaaacaacctaactaattataatctcccatcggtctccctctactcttcgtcggatacgtcggaccaccaccacctcccgtcggtgtccctctcatcttcgtctcatacgtcggaccatcaccacctcctgtccgtctccctctctctctttctctctctccaagctcggtatatacttttttatttattatatatatttattttatt

SEQ ID NO: 316847 - DNA, 1844 bp, Cannabis indica
ttgactaagcaagtaatcatacaacacaaatttaattttatctttataccaatttctgtctaatcaaatttaacaaaaacttcaacaagaagaggtattgaacagttgaaccaagtaagtagtatctttggaaatccttccaaaatggaaaaaatcttaaaataaagcttagcccaatgaatacattgaatagtaacacacatacacactaaaggaaaaaataaaacagaggaccccaaatagaagaattatattttgtcgtcatggatgaatggttctggtgcaactaaatctagagaaaatgaaatgaatgggagagtaattgtcttacaagatcctttagttcaatcccaaattaacaaaagaaaaagaaaaatggtaacttgaatcatttgcgacgaacagaatcaaattaagttccatatacttgtttttcattaatcactaattctgtggcttgatctagtttttcgctaaaaacaccaaatttattcccaaacataacctaacaataaattttacaatgtttcatgacagaatttcataaatcataaactaataattttcagtgtataaaccatgcaatagaaatgacggtaaagcaaatccaaccaaaaaaaaaaagaaaaaagaaaacagagaaagaaacaataatagaaaatagaaagattttattttattttatttagaaaatagaaagaaaattaaataattggcaacagtttgtaagcattgaacgacactataaactaaccttaaaaagaaaaagaaaaacaataaataaacaacgtacgacaacaaagaacaaacgaaattcttacaaagaaactggaaatatagtggaaaacaaaagatcctgaaataaattttgtgaaaagttaatgaatgaaacagaatctttctcataccttgtcttgaaagtaattagaacttgttgggtagatagaagtggaacacaattaaagaaaatcagtacatgtattgtatattatatataatccgctgtatatgcggttctgaactctacgtatggttatctggatagaatcttgtgtatatataatatgattttttttaaggaaaaaatatattgttttgttctgaaactgaggatattttatgattatttaggctgccgaatttttttaattttctaattttgttctccacatatataatattgtaggacttggaaagccgccataagcgttgagctcaaaccagaagagaaagacattaatatccatgtaaagtgcattcgttaaaggtgaaaaggaaagggtatattggtcttttgggagtgagcttcggtgctgacaatggacgtgctttagatcttaattttcggttctgacaaatgctagtttttggcatgacgtgttgggaagctaaccttaacgtatggaggagaaagtgttaaaaaaatcaaagaaaagactagcgaagaattgcgggattctcaagtgtgaaccattttggtaatattattattattttaaggaaaagtgaaaagggagagcagataaaattaaatatggtaggaagccaaaataaataaattgtataggtaaacggcggcaaaaccatactttgattttggtttcgttaaaccccacaacccaaaattttgagggtaaacccccaaaactactattccgttagcaaaaacacacttccgttcacctaacctcgttatttgcctacgtggctcagtccaagtaagcagcagttcgccaggtcataaattattatgacttggaaattaaaaaaaaaataatgttttttttgtttaactaatgactaattacccaaaaataaaagacaaaacattaaaagaaaaaaaa

SEQ ID NO: 316848 - DNA, 663 bp, Cannabis indica
ttcgatttttgtggttaaatgttacaaaccgtaaaatttaggtggtttagccgccaatatccctatataaaaatatgtatatcatttcttctacaaataaattaaatctaaatgataaactactttaggtgttatacatgtattataaataatatttgtattatgtcattttgatttgttcaataaataatattttatttatgggtgattgattaatgtcttactgaaattataatattttatttagaagaggtaatacaattttaatcacctgtaatttaacctatcaaaatccttagtttgggtctattgaaaacatcatactatcatctctaatctatccatataaagctaaatttaaaagtagcgatgtgtcattctatattttttttaaatttttttttctaattttgtgagtgatttatcttttatccaaaaacataatacacatcatgctctcaatttcttcaaaatacaaaacttccacattgttgaataactatttataggcgcttaatgtggtactagtagaatgctacgtgcgaggcacgtatatatactaagttttatgctagatgtgttttgctttatttaaaaataatacaataaataattaaaaaaatattattaattatagttcgagattattaatatatattcaat

SEQ ID NO: 316849 - DNA, 979 bp, Cannabis indica
tattaagcctagatatttttagattttgataagtaactacatcttttctcttataagtcttaaatttatttttttcagctgaactaattaatcaaattgagcaatttttttattttagaaaacctttcattcaattagtgtaagaaaataaagaagtgattactaaatagatgagtagatacaataaatattaaataaattaaatatattttttaatattccatatatttttttttttattgattgaatctatattcaaaacacttttgaatccaaacatacagaacaaaataataatagatgttatagaaaacacataaataagaaatggtaaaaaaaaagggctatttttaaaaatacaaatacaggaaaagttctaatcaagtttacggtcttttatcttttaatgcaagaatgaataagcaatttttttttttttaatttgatccagatttcttgcaactgtagtccaacaacctccatctttactggcaattaaaatccagcgacctccatctgcaatgcgatctttcattcgtaaatggtcaattccttccgtacaatctaaatcactattctcatctctgtaattcctaggtggttgtattctttgtttttgttttgattatttgaaaatttaactctagtgaacctttgcttctggtgctatttccattactggaacactcataagcccagcaacattgtagcaataagggtatagtttattaaagttgtagtatcaaaattggcaaggtaatatacaatgttatttatatacattgtctattatagaattggaaattcaaataatgtaacgtaaaactgtaaaaaaaatattaaaacttccgtataattggtaatttaccaacaaaaaaaaaaaagaaaaataaaaattaagctacgtaacttgcaacattaaaaaaaaaactagttaaagtctttaacaaaaataaaaataaataaaataataatttaa

SEQ ID NO: 316850 - DNA, 668 bp, Cannabis indica
atttttatttgaaaatttaaattctacacaaaatgttaccaaattttgaattttatttcattgaaaaaccatttttaaaagttataaaatttccaaaatagtgcaacacgtatcatgggtcatgtgcgagagacaaggctgcatgcagggttcttggccgaggaagctcggtcacgaagggcttcagatagcctcgtgtccgagaaatctcaaacatcccctatcccaactcgtgtcacagccgcgtgactcccgtcatcagcgcgcgcacgtggtgtcaaccctaagctagatatttttaaacttcaaataactaattgaatttaaatccgaattgagttctataaaagcctaaattgatttatttttcatttactttctagaaaaaaatacttctagtacgaagataaaaatattttttatcgaaaatttgtaattaactaacaatcatcaattaagtacgtaaatcaacatgaacacatccaaatcttcaaaatcatcgttttaaatcatatttcatgaatgtaaatcattaccaaggctctgaggccagatgttagaacttattttactaggatctagatatactaacaagtatatttgattataatctataatctaacatcctaaatatgaatttcctaaacaatcaaataaacacataagag

SEQ ID NO: 316851 - DNA, 926 bp, Cannabis indica
agatatcaatttgggattttgttcattactccctgattttgttaaatatatgttttggctttctgtatgtgttatatattcggtgtttagtattatatacttaattttaatattttttaacagttatttttggttgttctaaattactttttttttttaatgtatttagggtaagagaaaattttcaaggtgaaggttctcttttttgatgttatggtagtccccactgacaaaagaattattgatgtatagttttttttattgattttatttggttgttttattttgtagttttacagttattttaaaatttttttatgttattgttctaagattgaaattttaaatacttacgttcttattgaaaaaatagttattttctgagtgttctggtgttggtctggtggttcggtacgtaagtgttgaagatagagacttcgtatgtgttttggggtgtgtatagtataaaagaaaaaaattaaagtgtgaaaagtatttttgcaaattttttcgtgtggtagtaaaattataaaagtgcccctaaaatctagtattttgtaaaatctcttaataaaaagtaacaaaaggggtacatttctacaactgtataggaacatttttaacaggtcgcataccatatgagacatcatttaatagtgtcataaattataaatttatgggtaaaagtattattttttttcaaaaaattgtatttttaattaaaatatgtaattcaacacttgatattggtatattttgtgttttcaaatctttaataattataatctgagtttttgatgtgtatattgttattattaaaatattatatatataatttttaaaaacttataaataattcataaatttgttaaaagctcataaaattaatccaacaccatgcgttaaagcaagtttttttttttttt

SEQ ID NO: 316852 - DNA, 871 bp, Cannabis indica
aaaatatttccaacaacaactgcatcaccctcagtgcaggtatgatccctatgaggataccctagctacccctatcagtgcaaatattatctccataggtgacaacgagtcacaaggtcaaattttggctttagaggcaccacttagaggggttgagtttgggaagaggaagagaaaccctcctatttagtttaaagactacacgaagatgaagaagaaatagaggccttctttgtcgtttgatcccctggcgccactggatgagcaattgttggatactttccgaaagtggcattctagactcattctgaaccatcgacttcgggatttgaaaacgggtgattacggtccatcattcttttggaagttgtggacactgcaggaatgacttacaaattgcgtaagtaaactaatctgtactcagttaaagttcagcacggcatttcatcctcagacggatggacaatctgagaggacgatacagattctagaagacatgctacaggcatgtgtacttgactttgagggatcatgggtaaattaccttcccctgatcgagttctcttataataacagctatcaagcaacaatcgggatgaccccttacgagcttttatatggaagaaaatgtagatcacctattcatgggatgaagtgggtgaaagaaagttcttgggtcccgaggctgtttagagaacgagtgaggcagttgacaagattagagcgcaaatgctcgcagctcagagtagacagaggagttatgctgatccaaagtgtcgggatattgattttcaaatcggggacaaggtgtttctccgaatatcaccgatgaaaggcattaaacgctttgggaagaaaggaaagcttagcc

SEQ ID NO: 316853 - DNA, 1002 bp, Cannabis indica
caccaaaatttaataagaacactctatttttaaaaatatgaaattttattaagaaaaaattatacatgattcaaaaaagaaaaaacaatgtgtgaaaaaaattgaaataattattgaaactagcacaaaataatataaataagaaaaaattgaaaaatatgagttctttttaaaaataaatttaagtttatttgtacaatattttacttataattttgttgagtataaataaaattaactttgtatttattttattttgttcaaaaatcaagacatggcagagaaaaagtatttacaactgtttagtgactagcctaactcaattattgagttcatggtagattgttcactatttcatgtattacactggtggagttgagattaaaagctctagaggcacttttatttggaaaaataatcatgacaatatttatttaattcgtgaaaaattaggcaaagtaatttgttcttccaggtggtacttttatattcctaaagtcggtgtctcaaacttgcctattgtgggatattgttcgcttgaaatttttttaaaaagataatcataggtttttttctttatcgaaataataagatcgttatgctcattattaaacttgttaaagaaatgaaatataactaagatgtattattttaattagaggttgtgatccaatcattctcgatactatgttggactcggagaagaagagcatagagttttagttttcaatttttggacagagaatgtggagtgttcgatggttgtgggaatgcctaaaatagaatggctcaaggtgattaaaaatcaactctgtaaacgtttaaaattctcaaagaggagcttcatcactggagtaagtatgtctttggcaaagaaagggaggatatatgtttgcttgagtttttgatctcgattcaatctctccccctaagaatcctacttcattggagatttcaataatcaaagataaactatatgtaacaccctaactaccataggcg

SEQ ID NO: 316854 - DNA, 1338 bp, Cannabis indica
ttagaagagtaaaacgataattttgaccagctctaataatgaattaatgatttgaagacaaactacttatattgactaaatcaatagactactaaaaagaattctataaatataattccatattattaaagagtgcaattctatattctcaaagagtacaattttatatttataatggagtaataatataattaataaacctgagtattttattgatgagttaagcactttcacaacatatatgtttctcaacacaattttccaaaaatggctctcaaacgctagtcaaaactagtatcaagagaatgacaggtattcgtggctcgcaaataataataaccgtttgtttattctttttcttttttcatgcaaatacttccaaccatttattttaacaatatatattttttatttttattttttttgagagaaatatattttttatttttatttaaatgatattcagcatgtattactataagtgaagatgcaacaaaaaatgataatgaattacttttttgaagatgatgaaacacccatgtctgagatatgttccactaagagaaatagatctcttaagaagatagcttttcggtccaaaataccagtttttattggccaaaatacaaactcaaatttaaaaacacccactcaaatatcatttactctaatatcaaatttcccaacagaaaatattatggcctctaacaaaaggaagcttggcatggagagaagttcaaaagctaccctattaaagaagaaaagatcaaccattcatgtctctaatggaaaatcacctcaaacttctatagcaatacctaccatatagactcctctacactaaacactagggcgctttaagaaggatgtctataggtacgccacttatgtcacattttttttggtgaatcagaaaatgtattctacaaaacttcatttacaaactagcaaaaccatttataataggtctgtaactctaattcaacatttgaaacaaatctctatcttttttagttatcttcttaggcattatccctttaattctattctttacatcactcttaactctctttacaatggagtcaactgtatatactttgctattccaaaaagtttcatttctacacctccaaacatggtatattgcagcagccaaagttgccgaaaaaacctgtttatgaaacttgttgattttggattttgaaatccacttcaatagtccctgagtagtgttgctagccgaataccatttaagccaagattgaatccctgttaaaacattttcactcaagtgacaattgaaaaaaacatggtcctttgtttccctattcaacccac

SEQ ID NO: 316855 - DNA, 1635 bp, Cannabis indica
ttgagcatcgacggcgtgggtggatcggggttgagcgtcgacggagcacggtggggacggggttgagctttggtcgagttcgtccgactgtgtgggtttttttctttttgggttttggtgttcggctgagagagatgaagagagaggaagagagaggctgatttcaaatgagaggggtagttcaggaaaattggtaaaatggtcatatattaccagttttaataattttgcatttaagggaaaaaattttgggtaatgtaagtatagaaattcaaatttcccgaatcaaattatgccttcttaatttttccttccaaactttgacataaatcaaatcatacttcctttactttttaggttgttaaaaattctttatgaactattgagattattaattagactaaaggaattctgtcaaattccgttcaattttatgaatccctaacagtgatcatccatgtaccaaatttgttcatgagacttaaactttcaaccacattaggagttcgttattaaaattgaacaaaagtctgtaaacttaacaatttcaatagttctaaaaaaaatttaacgacctacaaaatttatgagcacaatttgatacatatcagagaaaaaaacataattaacctaatatatcataattaacaattaatatatatttaaattttgcattcttgtattaagttttcatgatgggattgctttattttatattatgctaatgaacatttgtaaattatatgtgtctagtaacatttcttacaatagtcaagcctatctttccaacttccatattaatttatttattttttcatttatataagcagtttacgtatgtaaacaaatatctaagaagattaattttataataaacaatacttagtttaatcatatttaatcatattttattttatcttaataaatcaaagaacaagaaaacctatctctcattattgttatttatattatgaagtgaagtagttatctttgtcatatatttaaacataaaacaacttatcgacaaaatacatacaaaagttaggtttgtaaattctatatataaataattttttttttttgtatctttcttcattttttaaaataaaaattaattaaagctgtattgaagaaaccaaagatatgtaattgtatatgttaggatatagaaaatgaagacaattatgactcatatttttcttggtaataaccaaaattgttgactaattttattataacaaaaaacctaaaataacactagtcaataaaagttttgaataatattgtaaaaaccaatctatatacattctctttcatgttttatatttttttttgttttttttaaataattactgttattataaactaaaatcatttacaacaacaaagaaaataagataataaatttctccaatccaacaaatgtcatcatccaaccctaaagtaaatttagttgtacaacttgattagtagttctttttgttgaaaattattttacctgaatcttagatctactcacaagtatgttgattaacactctaaatatgaacttctaaaacgattataaaattaaacacatataaagtatgagacaccttacattgggtgcagcggaataatatgtctcattccgtt

SEQ ID NO: 316856 - DNA, 1301 bp, Cannabis indica
aagagctagagaagaagcaagaacaagaaaattcatcctcgaagttgcatgttgacggaagttgtactgaccacctgttcggtataggcattgtccttattacacctaaaggcaatagttgcacggggcaataaagtttagtttcaaagcctccaacaatgaggctgaatatgtagctctaattgctggcatcaagttagcaaacaaagtgcaagcagattacctagacatatacaatgactcttagttggtcgttaatcatgtcctaggtgtatatacagcctgaggccccgactcggtatgtcatgcaagggtattaaaaaaatgagttttagaagtagactttagatttgtaagcttttagaatcaaaaaatatacgctgcacaacaacaacacatatgttagaccaattaatgaataaaaatattttttcagttcaaaattatgtcaaaaacttgctaacaagataacattttaaattcaatctttattatttagttcaatatgtgtacaaataggtccctccaagaaaatacacaggcaaaggtctatagtatttggtaaattacaattgaccaagagaccataagtctgctcaatcacttggagggcacccacaccgtatagcatcgaacaagaactgctaaacttaagcaaaatataaaagctttattaagcaaaaaattgaaagctaagtaagtgcaaatggaatacgtcaaattagacataaaaagcataattttgggattaaaagttgtccagtcagctacatgtctgacaaaagaagataaaattaggattaaagaccacttggctggtcatttgtataaaagtaaaaggccctaaggccatacataaacattgttcaatagtaaagggccccaaagccatgcaaggacaaaaatattatttgttcaaaagtaaagggcctaaaggtcatacaagaataaaaaataaagtatgcaaagtaaaatcataaaaataaataaaagcatgaaatgaatataagtctttagacatcctcgggaataatgagaggtgtaggcaggttcaaatcaactgaatcttgaacaacatgtcatcctagacggttagggcttctaaactaggttgtacggtctgatcggtaaaaggttggttgtacggtctaatcaagtatctgcactggttgttcctcgtatgacaagtccggctgaagtcttaatgcttcataactcagaacatgggatgagtctgagatatatttccgaagcattgaaacatgaaacacattatgtacagctgccagcgctgggggcat

SEQ ID NO: 316857 - DNA, 4707 bp, Cannabis indica
ttctagacctgctaattacacctaaaagaacataatctaagcaataaaatcaagcaataacctttgaaactaaaatcattattaaagaccaaagtttaagttataaaactcaaactttgtctaacaaccaaaccaagccacaaactaacataaattcagctgaaataacataattttaacctcagaatataatctcaaacagcatgaacaactacagaacctaacttaaagaaaatcatacaaaacctaacttgaaacttaaagaaatcaacaagagatgagctagaacattaccttgagttttaatacactaaagacttgctagaaatctctaaaataaggttggaaaatctcaaaccctagctggttctggggagctcaagaaagagagagaatttggagagagagagagagttaaatgtttttcttggttttctttgtaaaatcaatgagataattaaaaattatccaatataaatctttaaaatcaaattatttaatttaatataatcccactaaagacaaaagaaactccttggcaaaagactattttgccctcccatataccaaaaagtacacttgtcacttaagggtatttggtcattttactaactcgaataatttctgacattcccaatgtgtaactatgttgcctgcgactacaaaaatactaaaatgtgattccattggccaaacgccgcgttccaatattttcgggcacaaaaacatgcaaaaacataaaattccatatgtagcataaataatacaccatgaattctaataaatttctgtaaaatgataaatcataattaatattatagtttcataattaagccctaattatctgcttattttcaaaataaagctaagcggtctttacaaaaatattttgacatgatgatgtaaattttaccaaagaacctcataatattagacttgggttagcaagtgatggattcaattcgttttgcaatatgagcagtagtcatagtacttggctagtggttttagttccttacaacttacctccatggatgtgcttgaaacaaccatattttatgttgtcattgttaatacctggtcctacagctccaggaaataatatcgatgtatacttgcaacctttagttgaggaattgaaaatgctatgggatgttggtgttaatacatatgatgcatttagaaaattgaattttaatcttcatgcaacagtgttgtggactcttaatgattttccagcttatggaaacttatctggttgggtaaattgagagaagttagcttgtcctagttgtaatagagatacccattatcagacgcttgaagtatagtaataatgaatgttacatgggacatcatcactttttacctataagacatagatgacgtactcaatattggttgtttgatggtactaatgaaaagaatagtgcaccaaggcctcttttgggaaatgatgtgctcaatcaattacgttatcttcaatttgctccatttggaaagaaaatgagaagaatctttacatcaaaatagttggaagaagaaaagtattttctttgagttaccgtattggcatacattgttgttaagatacaatttagatgttatgcatattgaaaaaaaaatatatgtgaaaaggtacttaacactataatgaatgttgaaggaaaatctaaagataatgtgaaagcttgactagtcaaagacatgtgtattagcgaagcatttcatccaatacaaaagggtgataaacttttgattccaaccgcgtgttacactttatcatctagtgagaaaagtattttgtgcaagtttttaaaggagatcaaggttcctgatggttatgcatcaaacatatcaagatgtatggaaaaaaatgatcacgcatagagtgaatatacttctaagtattgcatctttaattgtcaaggctttttatcagtactatatctaaataagaactttcaatttttttttgttcattattttaggtcatttatattaaataacatatgctattttgaaaaacagatgcagtcagaagaaagttcgttctgaaactcgcaatcttaaggtgttagaagaatgcaaaaataagaaagtacatgtacaattcaagatgggaaaatctgtagagaaatctgcttaatattttattactcaacttggagagcttttgaaaaatacttcaaatgctccgctgaatgttcaaacttgggattgtattaagcaatctaaaaagaataaaatttgggagcttgtaaaggtaagtttcaaagattattgaatgctattgcaatccaatatgggaaaagccttttagtctttaaaaatatataatttaatgctttcttttacaaaaaacattctttacctcccctttagatttgcatgatacaacttattacttaattgaattttttttattatttcaggaaatatttgaagtaaaagaggaagacaaagaagttttcatggatcaatatcgtgacaggtaccgaagtaggaagtacaagttgaaagtcaaatactttgacaacaagatgactcaaagtcatccaaaattgattcccgaagaacaatggaaatggcttgttttctattggtcttcagaagattttaaggtattaattttactagtttatattagaattagatttattctatggctatatattgagttgttgtatgtttagcttaaccataatctaaaaaagagaacatattagccataatcatatttgctaacttgtaagtataattttacagaatataagttcaagaaatataaataatcgatctcgtgtggatatggcacatacttctggttctaagagttttatacgaattaaagttgatcagatatttaatatatatttcctttacaaaatattataaattttgatgagttcttctatttttttttttatctattttgatattagagttgataatattttaaaatttctattattatagttgatatagattaaatattatctttattgttattattagaaaaattaaaaggtggagagctttctgctagagaatttgtattataactcacaagaaaaaagatagatcttgggttgattctatttcaaaaaaatatcatggtatgatttttttatgtgtctaaatgtttgagttgtttttttttttactttgtatgctgatacttgatagtctatgtaaatatcatggtataattttcttttctcaagagtatattgaaaaataaaaacttttgcttgatgttgtaagaaatttctgttatagctttgtgggggttgttaagtgtatatttttagactgtttttacaggtataaatgatgttcttattgattgaataagtacaattatttatattacttctggcatcatgacaagtttggttgctttttttacttaagttggtattctctaagaatgattggaactcaccttaattgaacaagtaaatttctcacaatattgataaagtcatgtgttattaaatctttttaggcaaaatataatgatgagttaatagtaaactctggatggagctacttcaacaaatgaagatgagattttctgatttgttttgtgttcagaaaagctttcccgtttacaacgatttggcttaacttgaatggcagtaaagaaacaagaaatgcaaaaaatgaaagaagaaatgaagtctgaaatggatgaaaaattaagtaaaataacagcacattataaagccaaatgtgatgctttgcaagcgaaatgcgagacaatgcaactaatgtttgaaaattttatgagagaaatgaatggttttcgatcgcaatcacacaatgacacaccaaattctttatttgaggaggatgattttgaagacttggcctacacttgatgggttattctccatacttgatgatttttttttttttatttttattgttctataacttttcttattttcttttcctttataaagataaacaacttaattattgtcttgcttctcttaaatatcttgaacgcgactcatatctattttgcttgcttttatttaaatctgttcatttcattacctaagctatcacaagtaattaaagtttgatgaatttggtatgagttatttagggacaagcaatggtgatgttacatattgcgcagaggggattggaacaacaaacattacaagatggagctcggtaaaaaatattatgttttgatgatttggttatttagtttgatttgatattactgtttttaaatattgaattttaagagatcattaaaggatcaaattgatgaatggacaattttaattgagttttgagtttgtttgccttatttttatgtgacttaattttgagaagaaggttgtaggatacatttaataaatcaaattactaacgtcatccttatctaatatctactctaaaaaaatctacatattttattttagattaataatgagttgcaactaaaaagatattagtgacaataaaaaattatggatcaacaagtattagtaataaatttttactgtcattaaagaaatattagtcacaattttttgttgtgactgaaaaaatattagccacaattttttgttgtgactaaagaaatattagtcacaattatttgtatggccaaatatatttaggttgtggctaaataaatattagtgacttgtcaccaaaaataaataatttgtggctaaa

SEQ ID NO: 316858 - DNA, 824 bp, Cannabis indica
cattttttttcttttgactcagtttgaccgagtctttacacgtgatgtccctcaaaaatagttttatcatattataatgagaaatgttaatcaataggtgacatattgttattaacataaatcaatatcaggtcctacatattttgattttataaataatataggccaatgccaaccacttgtaacaccccatgtctaaatggtgttgagcaccttattgtctaatagaaatgctcttttacaatatgacttttaacactaaccgtaaatattggttactaacttttacaataagagtattagacaagtaattctaatttaatcagttccactattaatttgttttaattagctacataccttgcacgtacataacacaaatttaacaattcaccatatatcttcatgactagatcatgtacaatcatgagaggagttgtttagcgatctctaccatatgaaaaaaaagaaagccagaagaattaggcacactaagcatgacaagtaggagaaaccctagagccaaagcaggcctaatattcatcaaataattttgcaacaaccctattccttcgtaaacatcatctatgtagtactcaaagtactgtttttcccactccatccattctgaacgaagccatgatccattttcacattctttatgattggcttcatcaatctctaactgctttatctcctgaatacgcaatcgaagcattatcatgttctcatccacaatccttgatcccccgtaatctcgaccgttcgcatctctactaccgcatgttagagatattattacaatggaagataaaccaagatat

SEQ ID NO: 316859 - DNA, 592 bp, Cannabis indica
ctgaccgacccaaaactcacagagatcttgaacttgataggactagaggatcacaaatctaacaagagatcaatgctctcgacctactgcccaagtttaaaatgccaacatgaaaaatgtatataggcaaagaagatcctttatcttaccttaaatatttttgagatgtaaatagacttacaagcgatgagaggtgatgtacggtgcagaatcttccaagctactttggcagaggccgcccaacaatgatacttcatattagctccaaggatgttcaattcatggaattcctttactatctgagtttcgttccatagttttccttcttctcgataacttccatctcatttagaagacctggtagaagtgaagcaaatatcattagaacctttaaaggcttacactagtaggttcacgactgaagcaacaaaggtcaaaggactgaccgaggaaggaagactggccacaatcctaggaggtattgaacccctaggagaattatggaacactactagaaaattgggttttagtgacacacattgagtaactctaaaagtgtatagtgacacttcaacgcgcgtcactaatgagg

SEQ ID NO: 316860 - DNA, 1158 bp, Cannabis indica
ttcaacaaggtctcaaattagagttgaattactagaagatcaaattaatatactactaatctctgtatagtagtcctattcaccaaaaaaaaaatatctccagactactctgcaacttataatactctatataataaatagatattgttggatattattttagaacactccgaataatttttctactctattttttaaaatatatcaccaaacatctactttttctattttacaacatatttttacattataccatataacagttttttttaaaatacatcacaaaaattatgttttttacattttattatatttttcttttgaataatacattttattatattttataatatcaatatacaaacatatcccaatacaaaaataattactaaaatttaaaactataaataaaatatgtagagcaactagtaatattttataaatgtagagtaagaatagtattttttaaaaaaactttaaaatgaagaaagagtttaaaacatatctgttgtagcatatttttagtatcatagtttaaatattttaaagttttttcaattttaaaaaaactgttgtaagtaatgttagatttaattcagctttctcaattaatcttataaacagttggctaacagactacgacatatgactaatatatatatatataatgttattaaaaagtaattataaagaaacaattaaaattaagtgaaagactctcaaaattagttttacctgtaggaacgttttaacatgatccatcaagaaaatgtcatagctggagagagtagtgtagatctttcgacgaatgggtaaggtgaagtagtttacaatgaagtcatttgttccggcgcttattacgaaaatggccttattaatgtgatgttctgtttcttgcttcccaatgcttgattcaagccttttcttgtactctttgaagtactccaattgttttaacaccggaagtacattctgacatatacattatatagataatatataaataaaatattcaattatataccaagagataattataatctcttacagaatctattcgtctaacattatataattatatgttagaaatgattttttaaattttttataacagtaattattatagttataatactatttttataaattataaaaagt

SEQ ID NO: 316861 - DNA, 1615 bp, Cannabis indica
ttccctaccccaaacaataccctcccaagtcaaagaacataaacctcctgctgaagctgtcatgaactcagtgtgaggataatatcgacctttcaaaacacgactgagcaaactattcggttgttgaaaaatacgccaagcttgcttagccaataaagcttgattgaaatgcacaaaagatctaaatcccataccaccatcaccctttgacttacaaagaaatttccttttcttccaatgaattttcttgttgtcagaggaagaaccccaccaaaatctcgccatcattgcctcgacttctttgcaaaacttttgtgataaatgaaaacaactcatagcgtaagtgggaatggattgaacaacagctttcaataacacctctttgccgcctattgaaaaaatcttgtcattccaagcatgcatcagcttccaaatcttctctttaatgttgctgaacaattgagatttatcacgttcactataagcaagtaagcctaaataagtttcatgacaatcacaaattggcatgcccaagatttgttggaaagaattttgaacaaccaccggagtattaggtgaaaaagacatcaccaatttgtcagtgttcaattcttgtcccgaagcacgatgataaatatcaagagctcttttgatagctccacaagatctgtcatttgctttacaaaacagaagactgtcatccccaaataacagatgagagattgttggagaatgacgtgagacagccagcccttgtaaacatccaatttgttcttcgtatttagtaatctagacagcccctctgaacaaataaggaagagatatggtgagaggggatctccttgacgtagccctcattgaggaatgactgaacctaaaacttctctattaataagaaaagaaaaggagtttgtatgaaggcatgtcataacgagagtaatccaccttatattgaaacccatcttgcccataactgcagccaagaaagaccattcaactatgtcaaatgctttgctcatatccaacttgagagcagcataaccttttttcctctctttcgatgttttaaactatgcaccagctcaaaagccacaagtatgttgtccgtaatcaatctattagaaaggaatgcactttgtgtctccgagataacagaatgaagaacttctttgaagcgcaaagccaacatctttgaaataattttgtaaataacattacaaagactgattgggcgaaagtccttcatctcctatggttttttaatttttggaatcaaagtgatcaaagttttgttgaaagttgctggatttcctccatgatttaaaacattcaggactacctttgtcaccagatcacccacaatatgccaataatgttgataaaacatagctgacataccatccacaccaggacttttatcagaacccattgatttcagagcagccaatacatctgaagcagtaaagtcatgtaacaagaattcattttgctgagatgtaatagtagttaagatggtagacaagacatgagatagtgcccaatgatcctcctccgatgctgtaaaaagtcttgtgttgtcgagtgaatttcgcaacaccaaattatatagtattat

SEQ ID NO: 316862 - DNA, 1402 bp, Cannabis indica
atgtttgacatagtgtatttttattttctaagtattttttaaaaaatccaaacagatcatgatgatttgttggtaacgaatgaacttacaaaaaaaattattattaattaagattatatttaattatagaaaattaagcaatatatataatatatatatacctgttgcataagttcaatcatacttgtttgattattttgatcaccaaatatactttgaatctatacaatcacgcattaaaattaaaaaaaaaaacataaccattatataataatatttaactttcaacaaaaaattaaaaaagtatacttgactaaagtttgatgatattagtggcatatagagcaatgagcttgacaaattttgtatggaaaaagaaactttatcaccagattgagtatttgtattattggaaggaacctaacaatataaattgtaatcaataatgtaattacaaaataaataaaaaaaaaactaccaaataaattccataacaattacaataaaatataaatgtacctttttaggagatgtattttcttgaattattttttttattttttctagctttcttaaaagaacttttaggcctagtagatttgccacgaactttttccttaaatttgacattcttaatgttcttttcatctttattgatagcaagcccatcataattcaatagtttaacatttgagttgttggagctacaaatgtcattggtttctttttgtcttaagaatgcatccacatcctctataattttattgtaactatttaaagcaattatatatgtttcttcatattctgctgactttattaatacttgtgtttgccttctacacaagtctttatagcgcaatcccaatctagctttaagatcctcagaattgatagacttcaatgtgtttactttaattccaacctttgcatgttgtgtctacctttgtaatacatatctatcaagtatttttgaaatattgtagaaagaaagaactttcaaagcatatgcacataaaattcctgcaaactcaaacttcttacaagtgaacacaaacaaatattcaaccgtataatcaattgactttccatgatgagtgactttgtattttgtcaatattgtcgtttcatcacaaatatgcaaagcataatcataagcattgcatacctcaacttaaaataatttaaatatcgttggtgtgtatatctttgcggcatgtttcagtatttcagcaagaaaagacaatgacacgttactgtgagaatttaggggtgttcattagaccacatccaatacttttaggcctatccaaatccaatcccattatatattgggtgttaaattttatcatctgatccgatccaattaatttcagccatccaatcgattcaacatccattaaat

SEQ ID NO: 316863 - DNA, 1254 bp, Cannabis indica
tgcaagaataaaaaaggaaaccaaaaggatcttttgggaacgcattgcctcgtctctctaatctcgtggtactagagatgtcttccgagtacatattgttgaaggcaaaaggctttgcgattgcagaaccaagatacgatcttggaaggacatgtccaggtgggcttggcccactttatcttggctgagggttccactggtgggtcttgggtgctgacctagagtcctcgtgtccaatgccagaaatacggataacatttaccaccccaagcctccagaatgttgcgtagggtggaagcttgcatcactctcttaatttggacatgtggaaatcaaggaatgaaattatggcattttgaatacttctcgaccgcggaaggtggcttccttctgtgatgatgatatatccatgtgtcaatcgcgcatgagttacaaggcacgaccatcgaggagttgctttttagaaacgattgcatttttttacggctattcattttttggcgcaaaaatccagaaagagcattttcatcattgatctatgccttggttatggggaacattaattgtaaggatacaggtagattgttggactccctaaccattggatgaagacttatgtctctagaagtggaattgtggtcgtctacctcttcttcacggggatcgttttctgggtataaatacctcttgtaacttccaattaccacttttccttatttttcaagtttttcatagggatggcaattatacccgcgggttcgggtacccgtaggtacccgcccctaatggggcaggtacgggggttgactttcaggggcgggggcgggtatgggtttaaacattcatacctgagtcgaaaacaaggcggggcgggggaatagatacccgccccgatatgatatatgtacatatttaagttttaaaatcataactactacaattaaaataacttcatgctttaggctttttattgattatactttttttttactatacacactattcaacttaagtttattgttttactaagtttttttgatttattttttaattctctttgaaacatctattttttttacaaaaatatatatgtaatgggtacccgatggggatccttccccccgacaggtaactacccgtccccgcccccgcttttaatttaaatgggtagttggggcaggtagtgggggtgaatttaataaacgggtatgggggtgggggaggaatccccgcacccgtcccgccccgtttaca

SEQ ID NO: 316864 - DNA, 938 bp, Cannabis indica
atattaaaatttaatttttgtaagaactaaattttatgtttgagtaaacataaagtttttattttttttaaaaataattttatatttttattaaattttaattattttttaatatatgagttcataaacattaataaacttgatattttcttaaaaaaaaaatcttagtttatttagctatttattggattttcaattagttttgtttgattttttaagatacgtgattataagtaaaataactttaaaaatatttttttgaaataatttaagtttctttaaataaatttaatatttttatcaagttttttttttaataatatttattaatattttcagaagtaataacattataatatttaaaattatttttttttagagggacaaagttttatatcagtcaaagttgaaaagtaaaaataccaatttttaaacagtaaaagaacgaaaacctaacaaaaggagataattatgtaactgttatattttaaggggtatgatcatgtagtgtcgaaagttcaaagaacaaaaatactaattattcttgtttagtaaattgcatttgaaaataagttggtcatattaatagtgacacgttcatattctgaaatccatagacacaaaatttgtgtacacatgtatcattaatcgttatcaccctgtattcttgtacttagataaaaattgtctctccaagtgaaaagaataaacctcaagaactggtaaaatttgtataagttatttgcaaaggaaaagcattggtttgtttatttagagacaaaactaacctcaataactgttgtacaaagcagttcaaacttcaaactacctcaataactgttgtgtgcacgtaggcctttactgttgggaacttagtggtgtttggttggaggtaatgaaataaaatagaatggaaaagaaacaatcttcattccatt

SEQ ID NO: 316865 - DNA, 1430 bp, Cannabis indica
aatacacgcttctcggagttcttgatgtgatgagtctgctcgttcttaataagtcgctcgatcccactcgattgcatctttcgctgcataaacgttagggcacgctccaggttgccatcaagcaccttaaccctaatccctctgcattgctgaagctgttcattcggccgtttcaatagggttgccgcatgcttcgccactgagttcattttacacaaatcggttgctctgaacaaagaaattttgtacctttaaacaccagatttcaccaaaaacaaacaaaaaaaagtacaaatttgtaaacccatcggattattgagagagagagagagaacctggccgtgatataaggagacaagaaggaaggagaggcgcggcggagccggagacggagaaggagacggaggtcgagggtgtgtgtgaatcactcttcactttttatttatttatctttattttttgctaaatttatttaattattattattattaattttaattctattcaactagactaattcggcatataaacgagacacgctagtcataaagtgagcaacctgattagccggctgtttgacaaaacgttaagaaaactaagaaaagataaaaattatttacaatcttcaatcacaccaccaaaagtgaatgacaaaacattcaaatttctaatcatttgtaccaatactagataataagattagataatactaacacttgggaaagcacgcttcaaccacgaaagcacttccttgacaatcacggcttcaacaatctttagaagaactcgctaaatctgtagtcccgaaatcccagccatgacccagccttaatgatctcgaacaaccccaccaaaatcatgccttccctcctcaccaaacaacgcaaaaccaatattcacctcgagttgttcataatctggttcagaccataactcagtctcatccaaaagataccaaatttcaatcgaaggaaacaaacttctttctcgagcttttctccactgatcaagtgatatgagctaaaatgacaacgaactccacctgacttttttttacctttccacgagagttgattctgtgagaaccgaattgtccaaaccaacatcaccgcatggacactttgttcctcacccaaccatgagaacgagtgaaaaaaccaatccccaaatgaccctaaatcaatttgaactatagccaaacccgctacctgccaacatttgtctaaaatcacagaaaactaaacaatgttaaattgattcacctgccccatgacaaaccagacacaacaaaaaaacatccacatgtttagtctccaactgaactctcattggaagacgcccactagccaccctccatacagttttttgcttttagaggaagttttaactgccaaaacttcttccaaaatgccacaacctgtaacaatttt

SEQ ID NO: 316866 - DNA, 1369 bp, Cannabis indica
gaattggctttgttgttttgaaaggcgaaagccatgtttgaagaagggtcggctgtaccagcagcagtactatttttctggttttcttcttgtgtcacaagatgaaaaacgcgattaactttgggaaggggatacatgagcagaatactaccacgcgcttgagaaaagtggttagataatcccatgagaaatgagataacatactccatatgatagtgttcttgcaatttttttacacctccacaagtgcaacaattacaagtgcaagttggcctgtaattagatagctcttcccaaataattttaagtttggtaaagtacatactaatactttgattttcttgccttaggttcatgagactctttctaagattgtatatatgaggaccatttctttgatgaaatcaaacctttaagtcaacccaaatggctgcagcaaattcgtcatagaggatactagaagaaatatccttagaaatcgaatttaaaatccaagatattacaatgttattgtttctaatccaagcattgtaaaggatgtaatcgaaaggtgaaggtttagggatactaccatcaagaaagcttaatttgttcttgactgaaatagagagctgcatagccctactccaagaaatataattatcttggccagttagtaattgggatacaagaacattacctgggttatctccatggtggagataatatggatttgttgggtcttcaagagggttcttcacatttccaatttgtaaatttggattcatttgtagtgtgggattatgtgttgcagatggagtagaatctctgatttctgtctgagatggggattgatcctcacttgacatggtgaagactcaaaaagaatgaaacgttgaacagcagtataggttgcgccgagtgaagagctcgggaagaagttgcagtggtgatggcgtcactggagacaagaacacggcgagtgcagcggaggaatttcgaatcgatcaggggaaagcatttattccccgctctgataccataggaaaaagaaagtgaattctatattaattgaattaattattacaagggaaagagagctatatagatatagctttacagaaacaggggaaccgactaacaggggaaccgactttacataacaaacataacaaccttgaccaagctaacaaccaaaacaactaacagctaaattacctactgacacaaataacagaaataacaaaataaactaactgatattctaatattttcatataatactagacacaagttaatactacatataattttacataaaaatattgcataaaatataatttaatataaatattatacaatataatatggtgtaatacggcgtaccaaa

SEQ ID NO: 316867 - DNA, 886 bp, Cannabis indica
cgcggccacgtattttgggaaaaaatcaaggcaacatttcccccaagtcttatttagtagtaggtaaatgagacttgtgagccatctccggtcttaataaataaagtggcacgtgccccaggcgcgtgggcaacatttatgatcgtcatcattgatttttatttctttttgcaggtaacgatttgctttccgtccattgatagactcttccattaatggtggtgttagagaggtactcaaatgtttcaaccaccctttcttctttttacaaccgttcatcccatcagttggatcatagaatttgaatcgttacaaatcttcactgtacgatggtgcctgatcaatgttgtcttacacccctaatggtctataaaagccagggcttttctctattgggtcactttcaccaccttgcaattgttagtctatccaacccatttgacaaaattccagacacctctaattttcttctgttcttcctctgccgctatcagacgaaatattaccactgagggtcgtcaacctcttccttactgcctttgtgtaagtttttttcaaatgctctctattttttcctttgcttgttagggcaaatataaatgacggtattttcacttgattgtgcttggtttccgggcacggttgctatggtggatgtcattgcgatgcccctcaaagtggggcgtctgacgaccactgttgtttgttgtattttcttttatattattttatgtttttcattgatttctttgtacgtgcactgccgtctttctttttttgagagttgaaaatggcagtttcttgttcgcttgcttttgggtgttcgaagcgacttccataccctttttcttttttgctaggatgttttgcacccgatgcttgcctt

SEQ ID NO: 316868 - DNA, 1921 bp, Cannabis indica
agttgtaggaagccattcaaatacatcaagatgtgggctacgcatcctctataccatcagcaagttagcaaggtatgtcaaggtgaagttaaaggaacaaagatgtttcaaattgttgcaaaaactcaggctcaagagaagctcaatgaatgtcagaataaattgcaaaatgagccattaaatagagagctccagtagcagaaaattgaggctaggaatgtttatgctagtgtgcacaagaactactgctctttttttgctgcagaaatcaaaactgaattggcttaagggtgatgggaatactgttttttccattaaagtatcaaagaaaggaggtgtcaaaataggattcttactattatcaatgctgaaggagacagagttgaagatcgtgtaagggtaactgaagctttcttgtcctactatcaacacttattgaggattagtatggagaataggaaacctgttaaatctaggaatgtggctcacggaccagtgataaccagccagcagttagaattcttagtaacaaaatttacaaaagatgaagttaaaaagggtgtcattagtatttctgggattaaagctctaggccccaatggatatagcaattcattctttcaagacaattaggatctagttggaaatgaggtgtctgaagctgttctatcattcattcatataaggagattacttaaagagatcaattcaactgtacttactcttatccctaagagcaattgtcctaacaaagtaagtacttatcgacccataacctgttgtaatgtcctatataaagttgttactaagctcatctgtagtagacttaaatgcatttcactagatcttgtagctcaaaactaagggggttttatttagggtagatacattgctcatacataatgatctgtcaggaccttataaggcactatggaaagaaatccaccaagcctaactatatgatacaattgtacctccaaaaagcttatgataccatggaatggggatttcttgaggagatccttcatgcttttcattttcctatcaagtttattcaacttgttatgcaatgtgtcataactcccagcttctctcttatgtttaatggaaccctacatgacttctttgaagctaaaagaggactgagacaaggagacccaatgtctctactttttgctcttagaatggaatacctaagtaggattatggaagaagttggaaggaaaagagatttctgatttcatgaaagatgtggggatatgaagctaaatcatctaagttttatagatgatgtgcttttgttttgtagaggtgattttaaaagcatctatcttacgctgcagagcttaaaactgattttaatctcctctggtctttagcctaacagtagtaaatttgctatttactgcagtggcatggaggaaaatgagataaaaagagttattgatatttcaggattcagtaggcagggtattccttttaagatcctaggcatacctatttgtgctaagaggatatcttctggtgattgtagagtgcttgttgagaaaatgattggcagaataaaggtccggagttccagaaatttgtcttttgcaggaagaggtgtcttgattaattctatgcttttggctatccatacttattggagtcaaattatgatacttctaacaaagttagttaaagaaatacaagacatctacagaagttttctatggaaaggtaaaagccaaatgttgggaccaaggagcttagcttgggacaaggtgttgaagcctaagaaagctggtggaataggatttttaaacatctttgactggaatcgagctaccttaataaaaaacatctggtcaattgcaataaagaaagataatatatgggtcaagtgcgtgcacaatgtgtacatcaagcaagaggattg

SEQ ID NO: 316869 - DNA, 849 bp, Cannabis indica
cctccgagctgcaccttcctcatctttagtgtcataagaagtatcaggatggacctcgccctggtcctccatctcttggacttcaacgtccccaacagtatcttcctcttaagtagcaggtcgggcctacttagtatttggcaaagtagcaagacgagcgatttgtgggtcagacaatgaagacttccacatagtttgcttagttcgtgccatcatcctcagcttggacagaactttgttggtatgtctagcgatggtcacagcaaacgaagcaacgggtttacctgcagcagcaggatttggacagcctacgggcaaggtatcagcgatatctagacagataatatatgtctagttggatggaaggtagcgtctccaccactttctaagctcccaaatgaagagtccatagccttgaccttcaatctggaagggagaaaagtggtgttgcacctcgggttctggggaaggtgtgtgttcactacttatttcccaatattcgaagctagagttggaaagattgtcactggatgaggacagactcgcacaaaggtgaggatgatcctcgtataagacttaaagtagatcctggtcgatatggtgttcgcctccccagaactcactagggttcatctacaaaaggtaggacacaagatgagaatttggtcggggtaacgagcggaaacaagttggtcataccaaccaagttcgatcaagggatcaaaaatagaatttttgcacaacaatggaatttttagtcaagaagttcaaaattttgaattaaggtctgattctcacaaaaccccaaatggataagtgaaaatgagtgtcgtggggttgaaattaaaa

SEQ ID NO: 316870 - DNA, 971 bp, Cannabis indica
gacatttgtgaagaagaaagaaatccacgactacgcgtttactattgtgccaggtgcaaatatgtggctcacgtacattgtgtaatatctgaggtatgtcacgattcatgttattaattcagatatttaatataatattttaggctaattaagatatttgcttttgaatttttcaagcagttaggtctaattttaatcttatatgtattatatagtttttcaataattttaagaatttttataatataagaaatatatttattaattttccaaaattatttgggtagtttaaattatttaaactatcattagggcgggcttcccaaaatattttatatcatctgctaggattttacattcttattaaatccttagttatcggatgttgtcttttttcctggcccattggccctcctggcttaggcgtggattggtcaatatcgtggtttcactattgtaattggatataggtttttactactacattagtcttgtctctttgacatgatttttgtttcgttgctgatacgtcttcttagtttttcgatggctcaacatcaaatcattgttagttgttgaaaataacaagttctccgcggttgaagagagttatgagtagtgcagttacgtaacttgcacattagttgagtattcaagttaaggtgttgaatgaacctactacaatagtttctactggtttgtcttttgagaagtggaagaaattgaataggttttcttaagggaatttttcatgggccaccttattttggcaattattttcaaaaataacgttgtttttgttatgttaagtgtctgtatatatagttgccgtttttttggtaattttctatttttaacgctttctataatgggctttgtagtcccggtttaggctgtataacaaaaacgaaaacaacaacacaacataaaaaacactttcaaaaatgcaacagacagaaaaaaaaaaaaaa

SEQ ID NO: 316871 - DNA, 736 bp, Cannabis indica
tatcttacaatctaataccccttgagacggagtgtatatatcgtataactctattttgtctttgagagtgtgaaactgagttggaagttaggctttagtacatatgtatgtaatatgattcttatttgagtgagctgtcttaattatttcttcttgaattttttgtctaactaggtgacaatcgatttcaatatgctttgcccgtttatgaaaaactgaatttgcaactatttgagttgtcttgttatcacagtgcaaaagtccattgtgctcaattctcaattcattaagtaatgacaacaaccaaacttaattcgcatgtggtgttagccatggctctatactctatctctgcagaagatcgagacacaatgtgttgcttcttactcttcgagaacacaagagaatttctaagaaataaataaaaaccaatagtagatcttctagtatcaatacaagatgcccaatccgcatccatgtaagcttcaagcttaatttctaagctgacagagcaaaacaacccctatccaagttttcctttcacatattggagaaccctttgagctacatttaagtgattggtcctaggtgaagttaggaaccgactgagcttattaacaaaataagcaagatcaggtcttattatcgttaagtattgcaacttaccaacgatcttcatgtagatagtaggatcagcaagcttatcatcaccatcctggctcaattttaaattaat

SEQ ID NO: 316872 - DNA, 982 bp, Cannabis indica
cctagtcacacaatcgggacaaatagggttaatccctaattactctttcacataatataaagtcgacattcaaaatacaaattatcatatagagctcaaaacgagctttccaacaaaataaagaacgtccaaaatgaagtcccgagtcaaaagttatggccaaaacaaaattgagaaaagggatggctctcttgtgggttttcggccgcggcaacaataaatctggccacggccactcggttcgagaaacccaaaaagcctaattttaaagtctgaaaatgctcacttttccatatattcgaatcttaatcaaaccatacacaaaattaacttcttacagataaaaatcatcacaacaaagaggtaacaacatcaattccaacattaatcaacaaaatcataccaaagctccaaagcttgagcaaaatcaacaaaattcaacctcacaccttgaatcatcaaatcccaaaacacaaactcaagaacaacactaaaatcaaagcttgaaactcaatcaataactcataaattctgacctaaactcacattccatgctcaataaccttatatcacaactaaattgtgctttagacactcaatttaccaagatcaaacatcaaaactataaacatgcataaacaagaacaccacaccccttttcatgctcatcttaaaattaaatttagtcataattaaagattaaacatcttacaagaacaccaaataaagctttaaagcaaaccaagattcaagcttttcttctcaaaatcaagatttctaaaagaaagggtttgagagagagagagaggggtcgggtgtgagggatacaaaagccagaaatatagttgtttacctctgatcaaaatatagttgtttacattgtgaataataatgcaagcaaacacaattgtattaagttcaaatgaaaatagtacaaggcatttaagataaggaaaaacctaaaactggttacaactttgtc

SEQ ID NO: 316873 - DNA, 1139 bp, Cannabis indica
gttttgagttcgtgtttttaagctttgtattttttttcatccttagtcgtactttgtgttttttcgaatctatacgattttcatgtgtataaaaaatttaacatgtatttacagcactatctcgaacctctccatatattttcaaaatatatatataaaaaaaaacaatagactatctccactctacttctaaaattccaaacaagtcatcagattgaaactattattattattattattttcaatgcaaagaatatgacagttaatgaatcaacaaactcctttcaactcatctaaataaatattccaattcgacatcatttcatttctcatttcttttaataaataaaaagcaaccagtcaagtatggttgtccatcatcatagtaattagtcgtgaaaaaagtagctaaagatttttcaattgggactcagcctcgtgatgatcgtatctgacaagtacagaatccaacggttgatagccctccaactacattcaattaattaatttaaacggtggattaaataacttaagggtaacattagtggagtggaccccctcccaattctatgggaacagtctttattttttacaattttatttaatgcacgtgagaggttatgatccaacggtggttatacatccgccacaccggatcatggttgttaggtaacttcatttcacgatttggaggccaataaatgaaatttcttttatgtcaaaactcgtatatctcttaattggaaaaaaaaaataccttttaaattatttacggaaaagctgagcattatattaatattaataatgatgaagctgaaaatgaatctttttaattattttgtacagacatatattcgaaggagtgcataaattaaataataaatattaaatattcaattataattaaattagatgttattttttaatatctaattggataggatatttaatagaatgtccaaaaattaaatacagtctcatatcaattaaactaattagtagaataaataattaaattttagggattttttcaataatatacttaaaatacaaattaatttcaaaaataccttaacaaatctcatttacaataataccttgccacgacttcaaaaaataccttaatttgaaattaatat

SEQ ID NO: 316874 - DNA, 1439 bp, Cannabis indica
tgattgcaatctagctaggctatctcatggtttagcaggctgttctaatagaatggacactaggcgaaacatgagaagccaaggtaatagggttggatctggtggcagtcaggagttccatttcaccctaatgttcgtggccgaggtacaggccaaaaaggtagggaacatggtcagggtgatgttaacccaccataagtagcctaggattgggagaatagggttgctaaaatgcaatctagaattaatgagcaaggtgaagagattcggcatctgagacagcagggtgctcctaaagtgcagattgctcttgcccatctttgtatgtgggggtgggttatcattgccaatcgaatggaatcactttatgaaaaggttccgtaaacaagcacctctagtccttctaagaggcctacgcgttatgaaagatgagaagtggctaaccattatcacaaggatttttaattttacgggagtcactagcaatgacagagtggcttatgcaatgttccaagtctaggaagatgcctagtttggtgggaaattgtatcccgtacccgagacgtcactggaataaccttggaggagtttcaagatctgtttaatgcaaaatattttagtgaggcaattcgtagtgccaatagaaaagaattcacgtagttgacttagaaggaaaaatatgtcaataagagagtatacgacagagtttgacaaattggaaaggttagccttagtaatagtactaacataatttagtaagaaagagaagtatctagatgggttgaataccaagattagacacgacctgatgattacaacagatgatgccaccacttacgctgatatggtggggaaagcactgcgagctgaaggagcagttgagtttattcaagagtcttgggagacccaaattgttggtggagcatctcctcctcctacctctacttatggtaagggtggtagtgactcaaccactgatcataagagaaaggttccatctgcgttcggtggctcaagtaagagcaaaaggttctaagggaaccatggttgttgtaacgattagggttgttttgagaaccgatacacttacccagaatgccccaactgtaagcaactgttggaaattattttaccaggatcttagatctactcacaagtatgttgattaacaacctaaatatatactttctaaaacgatgaaataaacacatataaagtttaggaaaccttacatagggtgcagcggaatataatgggtatcacttgctgtgtgtgggcactactctaacactaagaatttcgaaatctttaggaagaagagagagagggagtggtcggccaaagatagagagagagagagaggctctagtttttctgaatagaaaagtcagaagaaaagtgtgtaatttcctgaagccttcactatctatttatagcat

SEQ ID NO: 316875 - DNA, 2939 bp, Cannabis indica
tgactaatgttttgtttttttacagccctcttgaaaagactcggccctactcctgagatggtcaatcgacatagcctcatcctgactcttccccacagccttaggtcgtgcaacttccttctaaacgaggccaatttgagatctatggatttccttactgacaaggagtatacttatgattataagtttcccaagtattcttcttggcagcaggttcctgttccagaggtggataaggcctggaatcgtgtggctcgggcataataccttcaaaacacagtccctcgggaagccgatgaaggagcatcctgaggtaatcaatgtgcttggtcacccacaatacttagggctgaacgtaacacattagttacattttgagataaccgccttaatttttatgtttggaattcccttctcgtagatttaattgctcgtaggtttgaaagctggtacctagattccacgtctagattaactgtaatgagtcatattatggtatagccgagcaatacgacaccatgacagatagggcaagtcatatagatgcgagttgtgatttagaaccaatcgagccatttgatatattcaagattacaggctatagggattttagcggatattacggtccttctactccctcctctagtgatagctcgccttctagtggttttggtaaatttcttaggtggaaaattacactccacgcttccctttcatttatctttaaataattttaacactttatttcgcctcgcagacatgcgttttgaagatgttatggaccgaaaagggaacaaaaggggaaccaacttaggggttcctacaaataccgaagtggagccttccaaaaggcaaaagaaaaccactacccacaaaaagaagaaagtgtctgagcctattgacctcgaggtctctgaaactgagacccacaggctgactcctcctccggttaatcccaacaccaaagaacctcctcccgagacaactcatgcctccgcctcctcgagccaggccattgaaacattgtctggtgtagcagggaaggctggttcagaattttcccaggtgttgggactgcctgcttgcgctaactcaaggccctcctcccccacgattgggatttaatcaatcctggggatccaaaatagacgctttcgaggaacttgcattatgccctcatggtaaatttactgtatttgtctatattatttcttctttcatttatctccttgtttcttatattcatttgctcgtaattctctagacttctttcctttctttttcctcccatcagcgattcctggagcggttcgaatacctggaaggcgaggtcaaaaagtcactagcccaacacgaggccgtgattaaataatggaacgacgctcagtaggaaatcactcatctcaaacaggaagccgagaggtcgaataaaagctttaaagatgccgagaatgccacaaagaccaaaactgatgaatgcaatgaacttaagaaagcgctcgcggagaaagatgctgaaatcaaagggaaagaggccgagctcgaagggaaagaggccgaaaccacagagcaatgcaatagcgtcggcctttgcaatgtttatcgagccctgatggcgaatcccaacatggacacaagcttcttggaggaggatgaagaggaaactttggcttactgtgaaaaagccaggaaggaggaggaagaggtcgaggcactggaagaagaagatctatccaagtctcccacaatgtaggcttggtttttatttatctccttttttttatatatacatataaggaaatggccttaaagccgagacaatagttttccccttgtggcactttttgtaaagacaaatttgcgaagttggatggccaactttgctttttattttatcttttaatgccttgtacttttatgtttgaacttcaatatgtagttgtttgcttgcgtttcattcacaatttaaataatcatattttgatcatgtaaatagtattttaggggtttccatcgctcgcatatttctttagcattgagtggttaatagtctacttcacgcgcgagcagtttatcatctaccctgcactcgattcgcgagcagtcattgatttcacctcgcagtaatcagtagtaatctgtttcaagaaaacttaaatatatttttaatgaccttgtcactttgtatatatttttattgcttacatgagtagttagatcttctacccacgtgttaggtttaagtacttttttcaagacaccttgatgtctcgtttaatactttccttcagtgcgagccgttagtattcaactttatatgcgagttatgagttatatgtcatttataacttttccaaatgaattccagttaatcatacatatatgcccctcaagtaattttaaaggatcatgctttataattacttatcgaaatgattatattattcacaactgaagttcaaaatattacatcagtgatgcggtttacaatcattaatttaccattaatttaatctcggaagaactctcccagttcaattgcttactttatcaatcttacagaagcaactggttttaataaagtaggttcttatactcagggtcaatccctaacatattctcacaattgtttagatatccaaggtcaattcctgccatttcctcgagttccaagtgaattaatcctagtttcagttgtttgtcctaactgccactggttgatgaccggcttttctgtgttgtagctctttacgacaaccattgcgagccggtatttgatttctttgcaatacttccacataacttcttgactgaactagttgacctagtccaattaatgtcgggcgaccttcttaataccccccttttgggtgtcatcgttcttttcctacaatatattatcctcccaagataaccagggtatcctttcctcccacagg

SEQ ID NO: 316876 - DNA, 714 bp, Cannabis indica
tgagggaaccaaaagtaagttgaccccttatcacataaaaaaattaattattttcataccttaaatatgggagtagaaaactttgcttgaatttggaatattttcagttgttttcttaccatactttaaaaggacaatttacattttatcacttcgcatttttaattggaagtggaagtagaaaacattgcctgagcttgggaccttagggaacctaaaatcagttattttcttaccaggttcaaagataacaatcttaattttcaaagcacgaatcagtataagttaagtacggaagtaaagagttttacctaaaatcaaagactctcagatccagaaataagccactctattgtcatgccttgaattagtattttgccaaattaattagtttaggaataaatgcataaactgaaatccgtgagtatatgacctccgtaactagaaccccaaggatttggaagtaagtgcagcctttttatataactcgaataaacaataatataaggtttttatctaacggaaagttcttgagtttagatgacatatacttatctggaagcagaagttagaatttgtaatattcagattaaaatagtatttaatttttttttttggatattaattgtgcgaggataattatctcatttatttgtgttgttagtgattattgcttagagtagttgtactaattttctagagagagttaaagtt

SEQ ID NO: 316877 - DNA, 1212 bp, Cannabis indica
gacctcacttgcgtgagatactacttgatacgtacacttgcgtaataaacagaattttcgtaacacattccatgtaatttttttttttaccatttgtttcttttctcctctccctaaagccaagaaacttgtctcatcaaaatgacaatcaacaaaaggtgccgtaaatatatatccagttgtgggttcaagatatttatgatagacagagattcatacccaacatatattctcaacctcctatgaggacccatatttgtttgttgtggtgaagcaatcagaacatataatgtacatccaaagattcttaactgttaaatatttggctcctgactaaaagccaattgcaattgggagcatttgtgatacaatgttggtctaatatttacaagtgctacatcatgtaaaatagcatgtccccaagctgaaattggaagttttgttctcataagtaatggtcttgtgattaactggagacgtttaatgaatgattccgctagaccatcttgtgtatttacatgagcaacttgatgttctacttttatccttattaacgtacaataatcattaaaagtatatgatgtaaattcaccaacattatcatgaggatctatcttgattgcataatctagaaattgtacttgtaatcagattatttgagcaagcaatcttacaaatgctacattatgagtagaaaataaataaagatgtgaccatctagttgatacatctaacaataccataaaatatctaaatagttcacatggtggacaaataggcccacatatgtcgccctgaattcgttcaaaaaattaaagggattcaattctaactcttactagtgatggcttaatgactaactttccttcagaacaagcagcacatgagaactcattggataatagaatattttggttctttaatgaatgatcgtgtgagttctttattattctatgcatcatgattgaaccgacatggcctaaccggtcatgtcaacaataaatgaacttttttaggtttgtgaacctctcgttcgcaataacgtgtgcctattgtacttatacgtgtaacacgtacaaaccagaagacaaaccaaataatttttttaatatgcacttttttcttgaaagaatagatataatgtaaagatattcaatactattttcatctattattttcatatgatatccattacgacgtatatctttaaaa

SEQ ID NO: 316878 - DNA, 1360 bp, Cannabis indica
gactgccagcttcgcctgctgctcgtcgaccccactcgccggccatcgtcgtctccggtggctgatgaaagtgctgccataataattaattaattaattaattatagaccatgcctgttactactactgatgagactacctattcttctggatatgtcatatataaatgtatatacatttatatatattgcattgcatgagtcagaaaatgaccaataaataagacaacgtagcattaaattagggtacaggacaagtagtggtcttagttgtggatttgacatgtgaaaatttcaaccatatttatttaaatttattatattatttctcgtgcttaatatataacacatttgtctcatatttaagtatcattaatttattaactaatatactcttgtagagtgtttccattttcagtctattttttttaaccttaaatttatatatcttttctcacaaaaatatttgtatgctaacacttttactctctaaattttcacaatgtattaaattatatttttaaggtcgttaaaaatgtactgaactattaaaattattagatttaagaattttttttctaattttagtaaaagaagtttatcataaatggaagttcaagaggtttaatttgatacatgtcaaagttcaagaaacatgatttggtagatatttaaagccaacatgatttaatacatgaacaatcatagaattagtaaaattgaatgatgaaactggataaatgtccttaaattcaacaattttaatagttcaagggagaatttttaatggttaaaaatattcaaaaaaacatgatttaatatatgttaaagttcaaaaacaaaaattataattaacttataatgtaatgtgcacttattcaaattaactatatttaagaaaaaagtaatgtcaagttagcttaattattatacttaattcagctaataataataattattatctttaattataaaaattgtatctcactaaaatatatataatatttaatattattatttttatatatactgttgactcttgcaatttagaagtaacagctatgattaaaagttattacgtaattgttcttcttcttcttattattttaaactgtaaattgttattaatacttctgaaccgtagtagaccacattaattatggagatgaagagaatactgacatatgtaatgaatgaatacgtgagaagcatggtttgaaatatggagctataaatttcataagggcacctccgactgtatctaccaagttcctcttgtcttaagtaatgcaaagtatttatatatagggtcaatttggcatagctgtgttgtgggaaaaaacagctgtagctgtgctgtg

SEQ ID NO: 316879 - DNA, 1018 bp, Cannabis indica
tagtgttttgtaaatatttttgggatcccaattacttttgtaacttttagtttgtaaagtttaaattattacaagtttattttcattccaattataattaaagtttaatttccgcgctatttttattagtaatcccgtttaggggattagggtttcttaagtatcttgggtagcgtgtctaattatttagagcgttacaattgaagtcttgtctttagctcagtcattcaatcaccacatgctcactgtctctttttagtacggtgtggggtcttaaaatattacgtataggtgatgttcatccccatactcctaacacgtccaccgtgttcatctgtaccaagcaccagggtcagaatctttagtgccttcgagcataagtgttccctcttcgacctaccttttttaggttattctacaaaataaatatgggtagtgtaagcatattccatgaccctaccttatgaaaaaagtttcatccatgcataccctagcctacccctattatcctattatttttgcgagtatggtatgtagtattaccttaacgagtatagggtacacccacgggtaattctatctcgataaattttaagaaaaataatgataaaaaaaatcaattaaattatgttcaatatgacataataataaataataaaagtaattttttatgtactttccaaatatacaccaaatgcattcaaatatacatatatatataactatttatacgatcgggtagggtaataaggcaagatacacctatacgtgtaccctatcctatactcgcattgggtacgtacatgttttcatactttcaccttatcatatactctaatccaataggtaatacccgaatcatacgggtagggtaccatcagataaattagtttattcttagttatccctaatcgtaaaaaattcttacagaaatatacatattaaatttatttattttttgacgtggtgatcaaaatcacacatgattaaatgtagcaattcataatccgcgacgaca

SEQ ID NO: 316880 - DNA, 508 bp, Cannabis indica
ttaataattaccttatttttttttagccattaaaaaattttttaattttaaggtatttgatcaacttcgaatatctcaaaataccctgatatttataaaattaacttatctcaagtgagcttatctcaaagtaagaggagcgccaaatcctaaagccagagcgagcctttgaaaaaaataaagaaggggtacagacccctatacaaagccgcttactgaaagccgcctctgatgtacaaaggggtaaaaacaaaggagactcaagcaagaggtgtgaatatcatggcgacgtgaggcacactacaaatgaatgtgattatctgagagacgagataaaaaatatgatctttccaaattgaatctttagtggaaggtcagttcctactgaatttatgtctattcttttagacgatttgtcttcttaatgaagtcctactgaatttatgtctattcttttggacgatttgtcttcttaatgaagttctatttctattcaaaaaaaaaaaaa

SEQ ID NO: 316881 - DNA, 538 bp, Cannabis indica
ttttttttatatatatttctgaaagtgaggttccgaaatttaaatggccttaggctcatatattctcaggatcggtcctgatccaggttcagttcttgatcgtactctgcaaccgcaacagaagatatgatcaatggctaaagaactgaatgaaatgatacattatagtctactattattattgtacggtttttttgtataactttatgtgtttattttattgtttttagatattttttttttcatatttagtttgttaaattataaaatttataattaatatacatgttagtaaatattaaattttaataaaataagttttaatataatatatattaaataattaaatttttttattttgacaaaataataatgaaaaattaaaaatataaaatataaagaatgctattacattttttcttaacattcttctttactttaaatagtgaatatccattaaagatgataaaaatatagagatttttacacttgatgtcatttttacctttttttactatttttatttattctcggttat

SEQ ID NO: 316882 - DNA, 1132 bp, Cannabis indica
ccactctcagacgactgctcttgaaacccctcacaaaagaagacgttgatgtgagaattgtgagaattattagggttgtatttgttttatatatttattgagtcattgttaatagaataaaatattataaatttaaaatgatacataaaaatttaaatttgaaaatttaaaatatctaatttactaagaatatttaatttaatttttgggtcatgagaatatttaaaattagtacaaaatagagtaaatattataaaaaatagaatgaattatttaaatatttatagctgatatatactataaaattatatatcataaatatattaataaatatcgcctggcctaatgcaatcctaaatcaacttacgacctaatgcaatcctaaatcaccttacggccacgacctggtggacggttctgcactaaggctcagttcaaatatgaactcatgtgggaaagggatccccatgtgttctgggttgttaagaaggcttggagtgttaccagccatgataatccaatggttaatatgtatcgaaaactgaaatctacaaaagagcaactcatgaaatggaacaaaatgcattttaaaaagttatctgtccaaattgaagaggcccgtgccaaacttaaggagatagaaggagtctcagtttttgatgagaaggttcacacggaagctagagcggtgcttgatgaggcgctgaacagggaagaaattttctggcgtcaaaagtcgagaattgcctggctgaaggatgggggtcgttcctcaaaattctttatggctagcattgtcaccagaaggagacgtaactacatcccacaattataattattaaataaatagaattagtatttaaataactagagcaaaaaaatgacatcactgaagaaagataagcttgcttcattaaggaagcaaaataatggaaaaaatataacttatgggccttataaggggtttaaccataagggtttgttttaaagacattggatatttcaaatcaacccatttagctctaaccctaaacctaatgaatctctataaatagaacataatggcttttgattcagatgatgacctctagactctctcttgtctgacaaattgaataaaaaagaaaaccta

SEQ ID NO: 316883 - DNA, 1168 bp, Cannabis indica
aggtttactatctttttaattttcctggtttccagtttgttggagagatacgtgggtaagatgatttttttttaaattaaaaaaagattgtttaattttttaggtttatttgttaacgggagatcaaacctattaacatcgttaaatttaacagaatattcttataccgttagataggcacttttaatatataaagatgtgtgtgtctttgctgatcaattataaggagaagaatatttggacggattaattataaaatatctaaataaataattagtagaaaaaaattaaataaatcaataaacagtaaaatatcaattaaataatgaaataatctcctattctgatttcctaaaatttatcaacactctgttttgttaagtttgtgattgggtcaatttgtttccctattgttacaataaggacaaaagaagcagcccctagaattcccctatatatatatcatatcatatcatatgagattcttataagttgaatgtaaaatgctacttttaagcagaatttacaaagctctcatttaattaaacagaaatgtaatcttcttatgagacgtgacttttttcttttggtaaataagtaattttatgagacgtgactttgaaataatcatgaggaactttttttttttttagttaattaagctttgcatattcacatcaattgatattttagtataatcacattgggttttggttttgagtgtgactgtgattctcaatttttgtcttttgtcatataattaagatcaaaatatgttatataagtaagtacataccaaatcaatattaatagaagaataataatttgaggctgtcactcttatcactaagtcaaatagtgtttaaactaacaacttatggaacgtgaaaaacaagtcagctccattgaatttgtggccaagagggcaattaaaaaaaaaaaaaaagaaaaagaaaaaggtgcctaaccctgcaatttctgaatggctgccaaaaaagatataaagaaataaagaagataaaattaagaataatatttttttgttgacatatatgatataccaacaagcaaagggtactggtctaatggacaaccacaaatgcatacttttctaaatactaggtgattgttacgtgccaagccacgtagtgttagttttatttaatat

SEQ ID NO: 316884 - DNA, 991 bp, Cannabis indica
ttaattaatattaataaatattccaaacgaaaaggcataaacagctccaaaaggagagaatggtttaaaaggaaaaaaaaaataaggagaccgacctgaatataaaggaatgcactaattgattgtgtaacagtcaaaaactttctatttgattgtaaaaaccataatccacctttttatatagatacctaattaatcatattattagtaacttgtgtaataatacatacactgtaaaaaattatcattctttgacactgttagagtctttacgatgctttctttgtcaatttttttttttaaatagtgacctctacatttgaagctcttttttttttcatcacctccatcctttctaagcacttccacgtaagttatttttttcctaaaatttcattcaaacatacatgattcattcctaaaattttaatacacactcagatatgtttatatatatacaatgtaagtccttttgttagaaaacattaactaaattaattggttttgttggattaattcattattatttcatcaccaacatctttttccttggcacctatgtaagtattttttttggctagaatttcattcaaacatacatgatccatttataaaatttaaacagacatatctatacaatgtaagtcttcttgttgaaaaaagttttaactaaatgtattgattttgttagattattaattcattatgaactatacatatacatgtaaaaaaattaatttctccaacaatagacgttgccaattgtatatgtaagaataattcttttttaaccgtagatgttataagttgtatatacatcatatcatgtggcaacagaatttttcattacttcttgtatatatgtatatgtatatatataattttaatgcaaggtgtaatgtgaggtagcactttctaggagttttctatcttattttttaaattcccaattttcttaatttttctcgttatacaataatctattaataat

SEQ ID NO: 316885 - DNA, 1410 bp, Cannabis indica
agtacacatggtttaactgatatgataacctacaacgtagtttacttgcaccttggatacgtgctatgtcttttccagggcattggttaaagtaagcttgggttggatgtatggagtatgctcggaagggactgatattgaacttggattagatatgataaacttaccgtaatcctgagatggttagttttagttcaattgtattattgtgttcttcaatctatttagtaaagtcgaccaatggatcttctcgtgacatatagattaaggacattggagtttcaattgagtgggagcgctaatcatagatacggaatctatagcttctatccggacatagaagtgaaatgataatttccttcgagcttagctaaatagagataaatgatagagcgctcattttagtgattatattagtttactgaaatatcatttataggttgctaagtattttaaggataaaatacattgaagggtgtaacggtaattttatccatactcaatgtaaatcatctatagaggatcattgcttgttgggattataacaatggataactagaaaaaataaagctttctctctcttcgaccttgcagctctctctgagctggtgccatggctaagacaagatctaagcaccagggtaagctaaaattaattgaaaaggtgattgtgaagaagaagaaacgaggccattcctcctctgaggtgaagaaaacaaaatcgatggaagaggtgctacgagtggagcctttcgaacttactgatgaagaaggggatcgtcaaatcgcacatcagggagccacactgaatgattttttcccaaagccgttaactctcagatcttcactaaatgcgattctgcaacaagaggaggtacaacgtgatttcaattttttcctagcagctaatcatgaatgttcgaaagatgtagcaaatggtagtcatgctactcctccagtactaaggtctggaagtgcagtaagaaacctatcaaattcatttgagaattcaaaaaaactagctcaggttaaagttattcttaatgatatagcagaggagatatccttttggaactcgtcgttggtctgctatattcttggagcaaatccaccattgaatgtgctagatggttttgtgaggagattatggaaggataagattgataaggtaggattactttcctatggcattttcttgattagattccatgaggcagttgatagagactctattcttaaaggtggatatatttttttcaataaacgtctagtcataatgaaagcttgggatccaaatgtgaattccaagaaggaggatgtgagcagggtaccaatttgggttacactggatgatctagaattgaagtattggggtgaaaaatcccttttcaaaattattgggcagattgg

SEQ ID NO: 316886 - DNA, 780 bp, Cannabis indica
tcatgtgatgaagatcaatatcaagcatcctggatcgcctactgatcacagcaccagttctaattcctcaaacaacaacgccacaatcattagggtttgttctgactgtaacaccaccaaaacccctctttggagaagtggtccaagaggccctaaggtatatatttaaacaaatatacatacaattattattagtttattattatgttacatattaatctatattctaagatgttaatttgtatattatatgttggggttgcagtctctttgcaatgcttgtggaattcgacaaaggaaggcgagaagggcaatggctgccgcggctgctgcggccgcaggatccaccaacggaacagttgttccggtggacaaaccatctatgaagaatactaataaagaaaagaaatcaaaaagtactactactgctactactcataataataacaataattgtgttccattcaagaaaagatgccaatctagagggaggaggaagaacaaggtttgttttgaggatctgatagtaagtgtgagcaagaacacttcggcatttcaacgagttttccctcaagatgaaagagacgctgctatcctcttaatggctctatcttatggtcttgttcatggatgaggatcagatcatctattattattattattataattattcaaattttatattgctgtgtcttattatcatcatttcatcatctacctacctctctccgaattttattagaactttcgttgtggtgttaattactttttttttttttt

SEQ ID NO: 316887 - DNA, 871 bp, Cannabis indica
taggaatatttatgtatataaaatgcatgtcaatcatatatattaggggaattaccctctccaaaaatgtatgtaagattatttttctgattttttattttatgaccatatttattgtagtaataatgaatttctattaattttttaaaaaaatttaaaaataataccagtcatttggtcatttggaatatactgccagtcatttcgacacaaaaataataccatcacgattcacgacttataattcaagattttaatgtcaaaagcataaattttgttgcccaaaccttaaacttaaaataaatataatatactagctaactttatgagttactttatgtcgcaaattatatttaattatatagttgagattaattaattgggaaattaagagggtaataaattacagttaaattacaaatgtaatgcatatatcataatatctaatttgattgtgcaatttaagagtgtatttatcattgtttttctaaataagcctatttttaaaaataattttgattatctcaaaaaaaaaaattgataagttttaaaataaatattctaatagtatattttaatatcataaaatcattacattacaaaaataaaataaaattgttagctaataagttttatatagttacttcctataattcattataacttacttaaataagtttaaagtaaagtaaaaatattttaaacaaattgaacactatagaataagctaaatataaactcataattttaaaaaataactataatttaaaaatataacgccccgatattttgccttattttacaaaaatactattttcatgcataatttgaaaagataaaaaaaaaataatttaaatacaacagtggattt

SEQ ID NO: 316888 - DNA, 2159 bp, Cannabis indica
tgaacccaaatctgaccccagacttagactcgacgtaaataaaatcaaaaaatgaaaatgaaaatgaactttacagaacacacttaatgtgcaagataaagagatcagacacctaagacagcaaggtgctcctgtaatccctactccagaaatgcaagtagctcttgcctctacggtgcaggtagatccagtcgctgcagtgaaccgaatggaaccactgtatgaaaggttctgcaagtaggcacctccagtcttcctgggaggtcccgatgttaagaaagctgagcagtggctaacggttattactagaattctaaactttatgggcgtcactggtaatgatagagttgcatgtgccacattccagttcaaagaagacgctttggtatggtgggacatggtgtccatgactcatgatgttactacgatgacctgggaaaaattccaggaatttttcaatgcaaagtactataatgaggcagttagaagcgcgaaaatgaaagaattcactcaactgacgcagaaagaaaatatgagtgttactgaatacacaactcagtttgaccgcttggcaagattggcctcaaggatcgtgccaaccaattttaacaagaaagagaagtatctggatagattgaattcgaagataagacatgacttaatgatcactactgatgacaacaccacctgttgatatggtgggtaaggcactacgagttgatggcgcagtggagtgcaccctagagtctcgagggactcaggttgttggtagggctcctactcctcctacataaggctttagtaggggaggtagtggctcgaccactgaccaaaaagaaaggcacctactacatacggtggcttaagttagaacaagaggttccgagggaaccagggctgaggtaatcgtcagggtagctttgaaacccgatacacttacccagaatgccccagttgtgaaagcatcatctgagagagtatagaaggcaagggtgcttccagtgtggtatgtcaggacactataaaagggactgccccaaactccaaaaagaataacagaagactgcaacaaaacctgcaccatcgagggtgttcacaataactcaggctgatgtagaagctagcccctcactgtagcccctcactggtaacaggtcagctctcggtcaacaactagggccactcattcttatgtggcagccagaatctttagtaaattaggtagaccgcatgatagttatgatacagggtttggaaccctactttctagcggagaattagtcatctccaaaaggtggattaggtaaatatcgatcagaatcgaggatagggagttgagtgctgacttaatagaaatagatttaacagatttcgatattatactgggaatggatttcttatccaagtactcatccagtattgattgtaagcagaagatggtaatcttcccactagagagtgaggaaccgtttgtttttgttggatcagttctgggatctcggatcctagtaatttcaatactaatagccagagaattgttacgagacgggtgtctagggtttgtgaccgtggtattggataccactcggcttgaatcaattcggccagaggacatcaaggtggttaggaattcttagttgtttttcttgatgaacctccgggtttaccaccgtagagagaaattgattttattattgatttggcacgtggagtagaaccgatttctaaggccccttattgaatggctctagcagtacttaaagaattgaaaattcagcttcaggggttgcttgacatagggttttcacggcctagtgtgtcactttggggaggccctgtactgtttgtcaaaaagaaagatggatctttgcgtatgtgtatagactaccgagaattgaataagctgatagtcaagaacaagtatcctttacctaggatcgatgacctttttaataaacttctggggaagacggtcttttcaaagattgaactccgatcgggctatcatcagttgagaatccgagaggaggacattccaaacacggctttgcgcactaggtatggacattatgaatttctggttatgtcttttggactaactaatgctcccacaacttttatggatcttatgaatagggtatttaaggatttcctcgata

SEQ ID NO: 316889 - DNA, 1271 bp, Cannabis indica
aataatcaacacataggaatacagcatagggataattagagaaataaaattttaaaccacattctttacaattatatgaaattcatgacgtcgtctcacgtaaatttctcatttttttccctagtaaccatataaccgtcttcgcctctctttaaatagggtgatctcataatctcaaagcgcatttattaaaggacacattatacatgataatgtcattgttgggtttgaaaggcttcatagtatgagaaaaaataaatttgaaaatggttcaaaagtggcattgaaaatgaatatgggtaaagcatatgatagggttgaatggggcttttattgaaacaatgatggaaaaattgggatatgccgaagaatggattgtgaaggttatgaagtgcatttcatctgtcaccttttcctttttgatcaatggtgtgaggtacaaggcaaggttactccacaccgagggttacgttaaggtgatcccttgtctcccttcttgtttcttttttgtgcagcagtgttttcaagcttgataaacagagaggagatggcagtaagacttcgggggctgtcctttggaagaagagagttaaaggtctcatatttattttttgcagatggtagtcttgtattttttgaggccagtatggaggagtgtaattgcttcagggagctgctgaataaatattcaatagcatcgggacaattggttaattttcacaaatctaagatgtgttttggaagaatggtagatagaagcttgaggagtacatttcaaaacttgaaaacatttactaacacagtcttatagttataatttagggctatttactataattttttaatgattaggaaaattatgtaaaacaaaattaaaaaaaattaaattattttttcaaatgaattatacatttggggttaacatgatactaacttatcaattagctaagcaatcacgtcattattttatttagagtaatttgcggcataacctccttaagtggttaggtttttgcaactaacccccaattttaaaattttagtggtaaaaccttctaaacccaagttctgttagcacttagccctttccatctatttttgggtgttaactgccaacttgaaatgtctacatgtacacagtgtacacgtggcacgatttaattagtccacgtaataaatatttaaaattaaaaataagaaaataatttaatttctttaaaagaaaatatttaaaattaaagtaaaacattttttcttcattattttctatt

SEQ ID NO: 316890 - DNA, 1569 bp, Cannabis indica
attttttattttataaataaaattaaaagtcacccataaatttcttaaaaaccaagaattttagttatatagacacactttatatagaatagatatgtatttataagaaggtatatatatgggttatattagattatacggagttagctataatttatagtattccaacattcatgacatcaaataccaacaactctgctatttataaatgaataattaatcagtgtacgcattgcatgcgtttttaataattaaaagtgtttctctacaataatattcagtatatatttatttgtttatttataatgttttggattaattattattattattatctttctttctttggtacgtcaactgtggaatgttgattttggatatatgtaatatgtatatgcacaaacatacaggttcatcttataggaaaagtggctattttcatgaaatagctttatatttttggccaatagaccaaaaaaaaatcaattaatttggaccactactgctactactactactactagctacactttaactttactatcaacgatattaatttacttggcaaaagtacaagaattatttctttaattttttccttttaacaaagcgggccaccctaaattccatacaagtgtttaatttaaccagtttacataatattatttattattattattattattattattattattattattcataacaataacaaaatagcactaaccattccatcataatagatatccagtttggtaaataattaagttagtgtgtctcccttaataattacttaaaattttaagtttgtaagttacataaatttaatgtttatttttagtagcataagtacttagtatttgtaaaattgtatttttttttaattttattagttattatcttaaacaggatacaaaaatatgtagtatcagttacttctaaatattcttttaataaactcaaaatataatctgtattgaggaaactgaagaaaaattacagttttataaatattaagtatttatgtcgctaaaaataaatattaaatttataccgcttacaaaatacttttataccattatttacatactttattatgtacgtgactacctatataaatatataattaattgaataatacattaattaagacaattaatcataaattataatatatatatctatatatatgtatatacattatgaaagcagctttatagtaacagtatatcttgaaaagttgtcacaggagggccaataaaataagaggggaagtaaggctggaagaaggtggtagttggttagtcactcatgaatatcaaaatttgtgtatgtggcatatacaaatatatattaaaagcattatatatcttgcaatttttctacgtgtaaatattattattaatatagttaatgatgatatatgtaataatttttaagaaatagtagtttccagtagagtgccaaataataacaatactcatacatttatagggatatgattttgttccgtgattatacttttacggaatgcattctgatgtacggcagctgtcagatgaggga

SEQ ID NO: 316891 - DNA, 842 bp, Cannabis indica
tttaatatttttgtatattaaaagttttattataaattttatttttctattaggggattcctcgccccgttcctgcccccattaggagattcactgccccatcctcgatggagaataagcgagaatggggattaaaatccttaacggggatggggacgaggggagcactccccgctaatttcccacctcatgtgcatccctaggtggaacgattcataacgtgagcataacttccaaaagtttccaaaattatatatatatgtttggtcgacaaagtaaaattgaccataaatacacatcagaaatatttatcaacttagatgagatatttatcgtgaaaatacatgtatatataatatgatgattaaacatatatcttcacttctatatgtatatatatatatatcaatttaatcatgtcgtaaaagctccacaagtatatatggttatttatcatattactgtcattaacattgttatcccaatttttgccctctgacgtgacatcacacgatgttgacacgtggaatcgactctgggtacatgctcgcaagacacaagccgaacagggcacctcatacatttgctcggacaaggtcccctagaccgagcagtgagcaatccgcgcagcacgccaacatttaacaaattcagctttcgcatcttgagtcatcaaggaaatccctataactttgggatcagattacagagatatggcaagctgtccaaatcccacgattagtgtattctgtatttactatgcaatctttcaccttatatcaattgtaactagaagggaaatacttcctgtgacagtcagtagtcccgtgatctgtaagggg

SEQ ID NO: 316892 - DNA, 527 bp, Cannabis indica
agagagagagagatgatttatcagacttaaagctagggttttagtcccttagaacttagagcttagcacttttaagcttaaaacttaggattttagggtttgattaaggctctttatataggagagcttacacccttcaaatcccttaaaaacaagtaaaataagttattattcacctattaaattagtaaaatataaatgactaaaatgtccctcaaaaatagatatgttccctctatttttgtgggatgttaaggcccaattcgtagtctaatttgctgtccatgtgtgaagttatgcaccaaaatcttgccaggccaaaagctggtcggccatgcatctataggatgcatgctggcctgccatgagatgtctagaacctggtcggcctatgctcctctagccgggcagcccccttgaggtggctggttcatcacttcattgtcctgcttaagtattcaaggttcttgttggttgaagtgctgagtagttgacttggccttctcgttggtgagttgtactgccac

SEQ ID NO: 316893 - DNA, 2151 bp, Cannabis indica
ttctcataatgtattattattttcatatatcgatcattcaaactattattattattatgtttcacttattgtctcattgtatcttacttattttatcaccatatctcattcgttgtcatcactgtatcttatcccgtgtcattaccgtagttcacttgtagttatcactattgtattttccaaatctatatcttaatcttaaatttcatctcgaattttaaatattttattaaatatttaaggtattggagaaaattcattattttattctgttattattaatcaatatattttaaggcaaatataaaaaatgtgataatttagttatgagaaatgctaaaattaaggcaaccctccttgatatcataccactattagtgtaattaagaagcaagttttatataacttaaaaatttaagatttatggaatatcactaaccaattgtacgatgctacctatgaaaggtgttaggcaataactatcttctccatattatttaaataatattttttaatatttatagtacatattaacaaaatgaaataaaatataatttatatattttaaaatatgtttgaattatgaataatacttttgtatataaagaaaataaagatactttatatcatctcttgaaatgagtatttgcttcttcactctttaaaattttaaggaatctctattataaagtaagtagctattgagagagtgctctaagaatatttttaatgattataaggttggggtagacaacatcttatctaattcaattgtactcaacaaatctaatccaatctaattacaaaagaatagatatctaattataattggattggattgagtattaaaaattaaattttaattggattgaattggttattgaatgtcaatctcaaatttaattaaaaattgacctaatccaattatatttatatataataaaaaaattattctatatatttttttgacgtaaaaaaattatttatatttgtttatatagatattaattatatttttagtagttttgttttttttaaaaaaaattgtaacacttggttgtttgtgtatttgctttcatgatattgcgttctattttattacttagtaatgttgttatgttagttatgttaaacttttaattgcattatatttataacaaagatatttttatgaaatactaaacttaaataaatgatgatatttagtttttatgtattttttttttatatttttaagttaatattaaaaatgaggtgtgtaattaaatatgtaattaaaaaaataatctcataaaattagtaatgagattagattaaattggattggatcacataataattttctaaatctaaaattagtttaaattagatgagataaaaaaaaaaatacttaattagatggtatgttgaacataaacattcattattagtattaagtcaaataaaattttaaaaaggagaaaaaagaaattaagttgggcaacggtgccctatttatcacacttacaaggtctcctccacctcaccaacagctctattggtggtgatgttgtgtggcaattttatttatttatttatttattttgacaaaacatattaagtcaaaactctatttctaaaggtttaatatataaaataccacaaattacttttacaagagtaacgtgacactgtatttggttctctgactctatgactccgttgtcctctcatggtaaaagaggtcacactcttttctgatcttagtaaattgggtgacattagaattataaatataatcattaggatcattaacaatgaacattaaccctttcgaaaaagaaaaaaagtaattaatattaacatattaaatggtgtttggtttattggaatgtaattataatagttataggaatagtaatagaatgtaatggtaatcgtaatggaattacaattatgggattatttttactatatttggttattattattattattttttttttgtaaagaaagaatgtcattcaattaaagcaaatcagctgttacaggaagaccaataaatataggacaagcatctgtccacaactgaactcctaaaggactagtaacagacttagttagtgcatgggccgacaccattcgcatcacgcgaaatgacacaacaagaac

SEQ ID NO: 316894 - DNA, 611 bp, Cannabis indica
cttatgtaattattcttttttattaaggttattgatatagattatactatagtgccaagccaatagttggagaatgaaggccccataatctttaacttttagcttgttcataaaagaaacaaaaaagaatgtggaatcttgaccaaaaagaatatttggagtaatatgaaattttggcggctaaatcctctcaactgtcatttcacttgtacttaattctctaaattcaaattttagtggtaaatttttcaaactactgaaccattagcaaacttaagtatcatttattaatctcagctaaatatcatcataaatagcttatgtggatatgcttctacacatgtcaaatttacactgttacactatatataattattttaaaaagtaaaattattttaattttttttctaatttctgttttacttttttttttcatcatcttcatgctaccaccaccaccaaccacacatcactaccgaaaccacccatcacccacccatgaccaccgaagtcaccactaggggtgtacatcaaaccgctcaaaccgctcaaaccgcccgcaccgcaaaaaaactagcggtttgaaattcttcgcggtgcggttgcggttt

SEQ ID NO: 316895 - DNA, 827 bp, Cannabis indica
cactagtcactcaaaaagcccatacgtgacaacagacagcccctataaatatatatatatatataaaagataagtgataaatctataaaaaacttatctaataatttcaaaatcgttataatcatcgtagttgttactatattcaaagttgttgtgttatcagtatatttcacttatagttatgattctcaattttaagagcataattataataatgaaatagatggagagagtatgagtgaataatggatataatttgatgatgcaaataaattaaaaaaaaaatatataagatgatgcaaataaactaacaaaaaaaaagacacatgtatggttataatggtgagatagagatgcatggagtaagagtgtgagtaaatggtcaaagagtgttagttaaaaaatgtataactaattagaatttattgtagtctaatatttttataacaaattagagattgttaataaagtatttttaaataaatattttactcaatatatattttgaaattatacacatttatatagatctaacaataattaattagtatatttattatgtatatttataaaatttaaatataagtttaattagggattttattttaaataaatctatgggtaagtgattatatggttaatacattataatgcatttaatattgaattattttcattgttttgctatctcaatttatttcaagtggaatgaagaaagaaaaataaaaacaaataaatatttatggtggaattttatatgtttacaattatataaattgttatgtgtatgaatatgatgattttttttttgtttgtttgtttaatta

SEQ ID NO: 316896 - DNA, 851 bp, Cannabis indica
atctagggatcctagaaccaataataaatgctatcactgtggcaaaataggtcatatataaaaaaaaattgttatgaactgaagggaaattgccaagagggtaaagaattgacaatcaaaataataaagaataagaaacaatagccaattatggagagcattgtgaagatagagaggtgttcataagacagtctgcaacaaaagcattggtcacaaatgaagtgcctcagaagaatgagtggatcattgattcaggatgcatgtaccttcaacatggcaaacaataaaacttggataagagacttgagagttcaaaaatatggcaaagtgatatttggcaatggctaaacttgtccaattgaaggaattagaaatgccatgtttaaaatgaatgatgggacaatgcaagaaacaacgtgccagaacttgcgcaagaaatttgatctgaggtgaacattattgagtcatcttattcccttagccaacgttgccacatgttcatgcttccgtaattgatttcatttttggtgtgttataagaaatgggcatcaatgaggacaaatttcgttggtaaaaaatccctttttcgtcagtattagccatcaataaggacatttcgttgctgaaaagtcgttgggaatagttcgtcgaaaaaaataattatcaacaaattttaatgtcgttggcaatttataatatcaccaacgacatagtcgttgggaataataattaatttattttttatttttaaaatttttgtacatcaacgaccataattcgtcattgattatattaatgacgacaacgtcgtcattaagattttttgaattaaaaaaattagtaattatatt

SEQ ID NO: 316897 - DNA, 4411 bp, Cannabis indica
ctattgacaattggactatgattaaaattagatcattagatctgttaacaagctgatcatagcaatttagatcaaatgactaatcagtttgttaaaaagttttgattaaataattaaacaaacaatcaaacaatgtaataatattgggaaagtaggctaagatattttattttaacattaaaatgcttaaaaaatatgttaacttgaatgtaaattaggttgttagaaaatatttgaaaaatatttaaaatctaacaaactcctaaatatcttaaattcaaatttgtaatttaaatatccaactaattttcaaatatctagtttatttaaatttaatttaaattaattaaataactaataagataatataatataatatcttaatttgaaaattgtagatatttcaaatcttgtaatttaacaaaataaacaaatttgaaaataggatatttattatggttaggatatcatcaattttatttaaaaaataaataaaataaaatatcctaaatttaaaaattttatagttagaaaatcctaaaatatccattcaaacaaagttaaccaatttttcaaaatttcctgttattttaacaaaaatataaattttatttaaaataaatatcatagtaagataaaatgtcaaaataactaacatttatctcatcttataatttaaattaataaaatataatttaaaaatgacaaattttgaatttctgatatggttaacaatttgaaatttattttgattattttttaggttttactattattttaatgtcaaaataagatcatttaaaattttaataataaaatatgtaaatatctgatcttataattaaaattaaccaaaacaaaataatccaaattcaaaaataaccataatggtaattttgtggaaaaattaatttttcaaattcaaatgctactaatacctaaaactaacttaaattaattaaaaaaattaataaaaaattattttattctaataattagatttttatttaaaaattaagattctacaaaaatttgaattttatttcattgaaaagtgatttttaaaacttgaaaaatagctaaaacaagtcaacaaatgggagtatgcattgcatactccacccccgcccccgcgcgcgcacacaagtgaggaggctagctgaggaagagctcgtactacaccttagtagaccaagaaacctcggcgtgattgggcttcgaatagcccttgtttgagaaatttcgaacatgcttcttgtttgaagctcggtcatgaccgattgcctcccagctccgcgcgagcatgtggtgcaccctaggctagatatttactttcaaacttcaaaaaaattgtaactatttcaatttaaatctaaattgagttctgtaatagcctaaatccattaatttttcatctactcccagtacaaaaattagtttttgtcaaaaatttgtaattaataaacattcatcaatcaagcacataaattgttggtgttttgaccactttgaacaactaactatattaactgttttttttacagctcaacatgtgattatgcttgtcaacaactgtcacaactatacatacctactccctaactcgatctaggcaatgaggcagagaaaaaccaccactacaagactaagttagtagtgtccaagagtgagagatagagcttctgtagtaaggagagaaaacagagaaaataaagtgaatcaccatgattatttctgcaattctaagttagttctttgagtggattgagggttgtaaaaagagattgttcactcttgaagtgacttctctcattgtgagctatatttgcaatcttgtgtattcatgattggtgattctaagttgtatttctctcttctagatttcattacaatgttatgacatttatgattcattcatcttaatcaagttaattttcgttagatttcttgttctattttgattatatagttgttgtcattgtaattgttgtccttgaattcttgttatagtgatcttgatcaggttatgatctgcaacaaatggtatcagagctggtgtagctcaagaagatcaagaatagttcgatcatagattcaaggttcaagaatggcaatggctaagttcaaatttgacaagttcaattgagaaaaggacttccggctttggagaatcaaaatgaaagccctacgtgcacatcaaggcatctcagaggccattgacactactgtaatataagaaattgaagataaaaagaaagtgaaggagatacagatcaaggctcatagtgccatattgttgtcttttggagatgaagtccttcgagaagtgtctgatgaacagacaactattggtctctgcgacaaattggcaaagatcaaattgaagaaatctttggccaataaactgtacttgaaaaataaattgtatactatcaagatggatgaatcaaaggagctaaggaaaaacctggatgaattcaacaagatcatactctagttgaataacatatgtgtcaaaatcaatgaagaagatcaaggtatcattattttaagctctctacctaaatattttgagcattttattgacactatattttatggaaagatactctagccatgtcagaggtaaattctgtcgtgaattcaaaagaaattcaaaagaaatcagaggacagaattgaatcaagtggtgaagggttgttctccaaaggaagaccagacagaagagagtcaaaagaaagcaagaacgaaggtggatacaggccgaattccaagtctaaattcaagactggaaagaggtgttactattgtaataaggaaggacactttagggatgagtgtagagcactaaaagccaagactgacagagagaaaagcaagaatagaggagaagttgatatagtttctgatggctatgaatctgccagagttttggtagtgtcaaaggaaggaggcagtgatgaatggatcctggatttaggatgctccttccatatgtgtcctaagaaagagatgtttcaagaactcaaggaaatctcaggtgggacagtgttgctgggcaacaacaaggcctgtaatgttcttggcactagttctgtcatgataaagatgtttgatggcaccacaaggactcaagaagaagtgaggtatgtccctgacctcagaagaaacttgatatccattggcatgcttgacaatctttgatgcacaatcaaggtggaagatggggtattaaagatatccaagggatcaatgacagtgatgaaaggtgaattaaaacgtggtctatactctctcattgggtgaactgtcattagaagtgcagcacctgctgttgctggtcaaaatgatgacacaagactgtggcatctcagattagggcatgtaagtgagagcggaatctcagagcttgacaaacaagggctactcaaaggaaaattggacagaaaactacccttctgtgaagaatgtgtatttggtaaaagctacaaggtgaaatttaccacaggtcaatataccacgaagaataaacttaattacatacactcagacctgtggggtgcatctagaaccaaaacctttggaggagccatttactttatgagcatcattgatgactaatctagaaaggtgtgggtgttcttgttaaaaaccaaagacctggcctttcaaacctttattgcctggaagaagttgagtgaaaatcaaacaagtaggaagataaagaagctcaaaactcataatgggtcggaattctcctctgacatgtttgcaagcttctatagaaatgaagacattgccaggcatcacacagttgtcaagaatcctcaacaaaatggccttgctgagagaatgaacaggaccctgttggaaagggtaagatgcatgctcataggggctggattggctaagcatttttgttgtgaagctttaaaaactgcttgctatttgataaatagatacccttctacagctcaaattttaaactcctcaagaattctgggctggcaaagctccaagctatgagcatcgcaaagtatttggtttcactccttatgcacacatcaagcaagacaagctgcaaccaagggctcttaaatgtctatttctggctactttgatggaatcaaaggctacaagctttggtgtttagaggaaggatacaagaaatgtagaatcagtagatatgtcactttcagagaagatgaaatgccactcaaaacaataagggagatcagttgagaatattttaccaggatctagatttactaacaagtatgttgaattaacatcctaaatatgaattctctaaaacaatgaaataaacacataagggtttcagaaaaccttacattgattgcaacgaaatataatgactccttccgttaaagatctctagcccttgattcct

SEQ ID NO: 316898 - DNA, 924 bp, Cannabis indica
atcccaaaataatgcttgatctttagcttctgtaaagatagaatggtacagaaatacggctaactgatatttattaatttctaggacaaaatcaactaaataattataaaaagttgagcaatcaacaatcttcaaaatgttataaacaagaaatagcaatgtgtcacaatatagattcagttagatgcaataaatattgagtattatgttctcacctctggcatatggctaacccaagagagaaagcataaaactgaccctgaagaacctgtggccacaagaatatctagaagctctgtggaaggtccaaatgacaaggaaaatatagttgacggatatgtccctcttcgaaaactataagactgttaagaaaaaactattaggctttagcatttaatcctatttccaacttcgagaagacgacaaaccagaccaattctcaattgaccattgtagaaaaatctggtttacagtcttgcaattctaaaaatttgtgtgaaaatatcttttagtgatagtaatttcaaagatggaaaactaaatgagtaacccaacaacggtacaaacctatataacatacacaacatttggaaaatataattgatgaaaataattactgtcataagaacaaaaaaaatattattgaaactatgatgggaacctccatgggtaagtaaataagcttgttttcacttcctgcttgtagagcaggccatgtcacatatctcaatctgattctgtacttctgttgaaagtaatcagcaactcaaattaagacataaaattacaaagtacctcctgcacatggacatagagaacgtatttcagagtaaatatatctagcatttaaagaagaacacatatatggcaatgttcatttttccctaagctgggtatgcgctcacatattttaaaaaaattgtg

SEQ ID NO: 316899 - DNA, 1159 bp, Cannabis indica
tactattagttttttttttttccttttttctaacaaaaaatattttttaaaaatctgtgttcctttcatcttcttcctcggttggtaccttcaacccttaccaatgtaatgggttgggttagagccctaaaccccagaatcccaattttcaatgcttttgccgtctgaaccttatcgctaaggccgatcttgagtaataataggcccaaaaaatttgttgagtgtgtattttatctaaagtaagatgtaagtatattattgagcctttttctacaaaattttttaagaatatcattttttttaatgcaaaaagatatactatataaaaaatttgaatcctgggtttgagtgggccctaggcacgagcccagcccgccttagcctaggatcgggcctgcttaccgcacacaatatcattgcctgagccaagtcaaccttcactagagcgagtttcgccgatcacagaggaagtctccggtctgacgctgctggaggtcaccgacctgacggaagtccttagtgagaaattgggcgtgaagtgaaatggatcatcgaaaaagtatgtttgatttctcaaaattactataaaacaattcgtacttttttgaatattcttatttttctttttctttttttgaatatttaaggaagagaatggttattcaaaaaaaaaaaaaaagaaagaaaagaaagaagagaatggaagtgacaattttgcagttcagctagcagatgagaaacattgggatgaactagttataatctttgttgtggtatacatcttcccttttaagtgtttctattagttgacagacttgtatttccccagttgtgaatgtgatgatattatagttttgtggtttttgttactgtgaaagtgggaagtaattatcttttacattatgttagggtagactatctcattagtttcctaaaatatttgtgttgatgatttgaagtcttggtatgaaagtagatcctgaatttgagattgttgttgaactagcttgatttttaattgagtaattggcggctaaactctcctaactcttattttacttgtaattaaccatccaaacttaaattttggtgggaaaacctaccaaactcatattctgtttgcatttttaagatgtcgtcccataatctctgttaattt

SEQ ID NO: 316900 - DNA, 1274 bp, Cannabis indica
gaatttatacattaaatataatcatgaaataaatcatgtgaaccatgcaacataaaagcaatttctgatcttttattaattagtaaatctgattatattaaaatgagttttatttagagcacaaaacccaacaagaacatcctattacatcggttggttagcaccaagcctccgcatgtgatttcccaaagatgcttgaccaacatatttggggtaactgtcttgtcttgtctccttctagcttaactttcttttattttatcaacacctgaaactattttcttgtcttcaggcttgtattggttatacctacaccatggataacgaacaaaagaaagtggtggagcttgctgagaatctaggggttgcagaagaccctgttatcgctacggaagaccatgtgtctactttgaaggagaaggttgattctcttgagagtgaaatgtccaagctttgagaagtggctaattgtgcctagactcaagagaataatcaaaagaagaactttgcagttgttcagaagaaaccttctaatcttgaagaatcttctcgtgatgccctggatgagcagactattgtggtagatgatcttaaaaacaagtcaacgtcttgaaaaagagagtgactacccttaaggatcaggctcttcttgatgttaccttctatgatggcttgtgcttttatggcatctacacggcttaggctgttaatggtggagccaagtcattcaactggaaaggcttccctgacacagaggtgcaagacttcataaagtggtgtgagcagcattttggtgaagaaactctcaaggaaattaacttcactgcaaatggtggtgaaccagtagtcgaagacacttcacgagatgaaggctacaaccctgaccatcctgacttccctccttctactggtgatgcacctcttactgagagtgaagggagggaggaaataattgttgacataacaggctttcacgatatgttttgagtctgtttttatttttttatttttagtatttagctttagtgtgttagttggatattcccatgcggcctttcgatgtggataagccttattgaaatgatatttgaattttattttagttaaatcaaatattacttaataaaacttttattccaatacttattttttaatttactttattatttatcgcttgaccatttaacacttgtactatacaccatgtcttaagaaagtcgattactgagagtaatgtcactgcttcttaaagttatctttaccatgagagtact

SEQ ID NO: 316901 - DNA, 558 bp, Cannabis indica
tattgggtgagcttggaagtacgacctcaacttcttattgatgtattgtactgaatgttatatacaatcttcttctctttggaagactgcactcacagcatgttctctaatagccagatacacgcctagctcttcatggtccaaacgttttgataggacaggaggtggagctagttcttttttcagctcttggaatgctttttcacactcccctatccaatcattttttgtttcctctgacgatgttgaagaagggtatacatttgtctgtggatttggacacaaatcagcttagtatagcaatacgtcctgctcaagttttcttctattcccttgacatttactatgaagcaaaagaatttgcctgaggctagtttgaaagaacatttaagggagttgagcttcatgctatacttttagaggatctagaagcattcatctagatcctccacattccctctaactttttagacttgactagcatgtcttccacatacacctctatattgtggccaataagatgtttgaaattttttttcacaagcgtctaataggtgg

SEQ ID NO: 316902 - DNA, 812 bp, Cannabis indica
tatcttttaataaaaaaaatatttcacttgtttatttttataaatctgtttaattaattttacgaaattgtttattttgaggtttaataaacatattaaaaatgtatggtttcatgtaataagttttcaaaatgtataaatttttaaaataatttctttttgtcacattttttggtaattattttatttttgttgtacattcatgaaaaaagcccttaaataaatattagtttgtcgacattcattttctctattttttttttttagtttttaacacatgttgcccttaaaaggtaataaaacttatctacaattattagtggcgactcacgatagtcgttcttaataacctaactattagaggcaactttgtaccactcctaaaatagctttacggaaaagtagtgtttgtctatattttgggttcatttggtaggttgtctaagtgtggtattgtactatataacaaagaactatatttataaacattttgtattatataaattattacgatcataaattttaatacaatgtgaattgtattatgtaatacataaaaaatgatataagcttatttataatatttagaaagggttagggattgggacccggaccttgactctagacccagtccttggaccctggatgtcatgcccccgcatcaagtcttcattgggtatcctcctacgaactcatgactcttatacataggtacatccaggggcggacccacattgtagcgagggggggcagtcgccccccctgaaaaaaaaaatcgagaaaaaaatgtatatgtatttcaattagttaca

SEQ ID NO: 316903 - DNA, 1360 bp, Cannabis indica
aatttaaatatattatatattttcaaatatatcttattcacttaatttattttatgtatttattaatataaataatgtgaaaaaaagagaagaaaataataaaaaaataattaaaaaaatgtttagctaagggtaaatctattaagagcactcccatcaatttctttactctattatttaaatatatcatcaaaactctgctttatctattttaccaaaaaattttacattatgaaaataatattaaaatatagttaactcaattagttatctctacatttaattaagcactattcattaagctaaaaaatatgtaaaataattaaagtttataacctcactcgttgaaagctcaattttataattttttctctataataaaaagattgaactattttagctcatctattgagagaactctgagctataaaatattgagttattttaactcatctattaaaagaatcaatttaagagtacataattgtggaattactattttatatatattggcgagtagtcctattttattataattattgtctatttgtaataggcgttattttattattttaaatatgtattttatgctgattacgatcgaccataggcgagggaatcatatgttttggatgaattgatattactagtatatgcagctcctagtgtagacttgtcttcttttcgtttgtctccttcatcttctagtttttatttgtgacactctcgccttggtcatgtttcagagtctcgtttaaaaatttttagcttccaaaggaactttaggaaatgtgcaacctcatgatatttctaattgtagtggatgtaaacttgcaaattaaatatttacctttcaataaaagtacaatttgttctgttgcatcccttaatttagtacactctgatgtgtgggaaccctctcttgttgttacaaaagggggttatcgatactatatttcttttattgatgatcacactcatttttgttggatttttcttatgaaacattgttctgacttttatagtatttatgatcgttttcgagcttatgtaaaaactcaacttgatgctgctattaaatgttctagatgtgacaaggtagtgagtatactttaaataaatttgttgattcacttgccttagatggaaatgtgcatcaaacttcttatactgaacacccaaataaaatggtgtggctgaaaaaaaagtataggcacattgttaaaactactcgttctcttttgttgtcatattttgttcttagttagttttggggggaggccactacaacagatttcattattaccggcggaagcatccgccggtaataagtaactagaccgccggtaataattaatac

SEQ ID NO: 316904 - DNA, 1682 bp, Cannabis indica
aatgggctgattcaagatgcgttggaaagataagaaagagatctaaaacttttatgttttgactttttccaaaatatgatcagaacatagtcgaatttaggcttgaagtttcagctttattctcttttaaaattttctctattttatagatcactgttttccgaaatttgtccaatttatacattccaagtgttgaaacctgaaaccaaagaaaacaagcgtaattctattccaaaaacaataattaagaagaaaaataactataaaatgtgacccgaaacttaggctaaaaatagcctaacacttgcttaagcccatacagagctttgtgtagtttgcacactaagtgaggggcagatggaatctcaaatcctgggggttgcaccatataaacttcctcattgagagtgccatttagaaaggcattgttgacatcaagttgcttgatagtccaaccacgagacagagcaatgcttagaacaattcgaatggttataggcttgactacggggctgaatgtttcagtaaaatcgaagccaggttgttgatgaaaacctttagcaactagtcgagctttgtacatatgaggagttccatttgaattctctttctctctgaacacccatttacaacctataggagttcttccttcgggtaaaggcattaatgtgtaagttccattccttgttagagccaacatttcatctgtcatggcttgattccactgttcaagttgaagagcttctttaactgatctaggtatttttgttgtaacataggcctttggtttgcgtatgccagacttagcacgagtctgcatagcatgagaatttactggtgtggtctgtagagtagcagcattaggtgttggagcaggttgttgatgttgagaagtagcactagtctcagtagttattgttgtatcaccagtagcaggagcaaagacaacaacttgagtattggtgattggttcaacaacattatcattgagtgaaggcctttgttgctgtgaagaagtatgcaactcagagacagattcctgcacatggacagaagtgcttgccacaggtggcacaaatgtattagtgataataggttgggaatcatcattatgagagttagacatgttggctatgggaatttgagctggagtgaagaactctgtgtaggaataggaatcagtggtgagtttgggaatggatgcaaatggaaaggatgtctcatcaaaaattacatctcgagagatgtataatctgcctgaaacatccaaacatttgtatcctttgtgattcaaactatagcctagaaaagtacgcggtgaggacctaaattgaagcttgtgcttattataaggtcgaatatttggaaagcatttgcgtccaaaaggtttgagttggctataatcaggtgtgattccaaagagttttgtaatgggggatgtattctacaatacaggggtgggtaatctgttggctaagtagacagaagttctaaatacttcatcccaatatttgagaggcatggaagcatgtgcaagaagagtaagcccattttcaaccacatgtctatgttttctctcaactaacccatttttgttcatgagttgttggacaagggtgtctatgaatgatgccaaattgttttaagtgatcaataaaagatctaaactcccctccccaatc

SEQ ID NO: 316905 - DNA, 763 bp, Cannabis indica
ctcatctcttctctattttctttctctaaattataatattacataatactaatatttcataatagtttttataatttttaaataattatattaggtggaccaatataaatatgccacgtgtacatgatgtacatataggcagtccatatcagcagttaactgaaataaataaatgacaccttaaatttgataacggtttagcagtttggagggttttaccaccaaaatttgatattggatggttaagtgcaagtgaaatgatagttgggagggtttagccgcaaattactcaaaaaagaaagtaatactgctgaataaaatgaggaaggaagcacggaagtggataagtatatattattttatactttcggtaaaataacgacagtatgtgaggtattaaaatagctgacgctatacacataaatattactaattttatgtatatatttaaaaattccccttattataatgcttctggtttggattgggttgtcttgtttgcatccaaatttctttagcaaaaggccatttatttaagtgaaaattacatgaaatatgggattttgtaaaaaagttacaaaaatatggcatttataggtttgccactcttctatagcattttttcacatttaagattttctatggtatttgatatgccatagttttgtaaacctattatccaaacccatatttcatgttttgtttctaacttaatttagtttttttttttttaattttattttacatttacattttagggttt

SEQ ID NO: 316906 - DNA, 753 bp, Cannabis indica
ttttttttctttcttcgttgaaccataacctgagtgttttttttttcttatgctcttcctcttcttccacctaacaccgccaccacaaagcaacaataatgtgcagttaccgagttcagtagatgaatttttcgacgcaccacacaaagcttcaggggaatctcaaaagcagcatatttgatcatggagaactcgcagattttggtgagatctcacagatctgggtcagatctcaaagatttgggctagggaagaagcgtagaaccccaaagctcctgtggcatcctcctcctctatagctgtctttttctgccgtagctgtacacgaactcgaagtcaaattacgaagggcaacacctggtctgtggttgacgacgaggatggaactacaacagttgtggctaacgacgaggatggaggttcaacggtttattgctgacgacgaggatagagctttaaccaagaggatggagtttgaatattttagcctttagtttgaaatttatatgtatatagactgtatatttaggtataaatttctagaaggcaggaagaagaagaacgaaggagttgtggtggtgagtgaagaaatttttatttttggtggattttaatattaagttgtggttgttggaaaagttctcattacaagagagaataggaggattacaatcaaaatactcaaactagaaataaaaattatttcatcaagattacaagaaagctagagaagaagaagaagaataacacaca

SEQ ID NO: 316907 - DNA, 924 bp, Cannabis indica
ggcaacgattactatcagcccctatatcggtggcaattgcacccgggatcagaaattcatatactcgatttagcccaccaatgtccaacagtcattctttcatgtacctgataaaaagtcataatttataactgttgctgtcaaaaaaatatgatcaagtttattattaagagttagaaatcatacttgcaccaaactcctatttgttgggctcctaagtatttcatgttgcacaattcctgaatgtcactcttagaaagccaagtagagtcatctacgacctcaaatagctcattatcaacttggaattggattatggatggcttgggacaccttctaatgaagttccaaaaggcaatgatggaggaagtttggcgtggttggacaaacaaccatgaacttttgccttactcggcctctcagggtgttttagaggctgtgttgaaagaccgagtaaatcttcagaggcttttgtgcttctcttcacgagttgcttctgaagtttcttggtaggtggttgtgtttatatatatgaaaaaacagcaaagttagcaatgtcatgaaggaataaacacaataagttaagtaaacaaattgaaacatgtcaaatattttccaacaggtgtaagatagtctttcggccatcctacataacattttatagcttgacctactgtcgtcaatgaatcgtcgactatgggacacggtagcagtgcattctccacatgggcttcttcgatatatactcgacgataatccttgtgtaggtattcatccatgttaatggaaaactttccatctttcaaatatttctccttgaaaatgtggcccgaggcaacctccaacaccatcccactaggctccaacagatagtgcatccaacatggtaaagtctgtaaatcaaaaacaaacaagcaacaactc

SEQ ID NO: 316908 - DNA, 538 bp, Cannabis indica
tttagtcacgaactttttagtcacaatataagaattgtgatttataattaatcacaagttttttaattttattcacaatttttattgtgattaaaagtaaaaatttttatagtgtaacgtaccattatattttatttcatttaatcgtgaaaagtgacacagtaaatggtaattgataaattatcatttttacttaatgattaaaaaagctaataaaataaaaatatgaattattgtaaaaaaatgtccttttattttattattctttaacatataaaaatgatgaatggtatctaatttgtatatccatttatcaattatcattaaccacataatacattttacaataaaattaaataaaatgggacggaacgactacgcaactgtaaaatttatatttcgaagaatattattcataaatcgtatatcataagggacacaacttaatagtataaaaaaatttagaggcgaaaatgcttataatacttgggaaacttataaaaatactagaatttgggttaacttttataaaaatact

SEQ ID NO: 316909 - DNA, 880 bp, Cannabis indica
aaaaaaatatggttgatagaataggaaattaaattaataaaataaaaagaaatataatagtatttatggagtaaataacattttgagttctgtattttgcaaaagtaattaattggaccctctgttttattaaaggacaaaatgattctatattttctaaaatagtaaaagtaggaccatgagctcaatttttcaacaattttttttttaatataaccaactttaaaataatatctaacatgaacaaatacaaacaaataagataatatatgttacatatattatcaatatcttcattaattcaacaattatataaccatgcactaataatacacataataccattcaaaactctaaatcttttatgaatattttcaatatcatgtttataaaaataaaactcaataatcttaataatctaacatagagtgaggctcatgataccttgttagagattagatctaaattacatatagatcttaactcatctcaaattattatatgaatcaataagatagaagacatatatctaatttcatgatattggatataagatgataatggatatacggtcttccatagactaatcttttctctataagttcgatcactcaattgataaaaatagaggagaagaatggttgagattacattagtcttggggatcaaatcttaatgttcattatatagctaaccaattagagtatcataaatcctataattagatttattattggatatcacacattataaagcacataccgaataagatttattgaactcatttaattagatcacttccttagtttaatttaaaatattaactcaaataaattatcttaatttataggctaattagtaatttttcctcccgaacttt

SEQ ID NO: 316910 - DNA, 814 bp, Cannabis indica
tctttagcagtcatattatttgtaggacataatattttttttattcttttaagcatgtcaagaaacatctataaatcttcaaatggttgaacttatttcagagcataattgtaacaaatgattttttgttagtacctcactaattgtataaaattttctttctccttgcaggtgacaccatgaactagaaagcagtagaagagtggagtttagatagatttgaagaaaataagtgcttgaaaaggttcaagaccaattccaaattagctctaataagaggacacacatgttataaaattatatacttattatattatttgtctttattttacttactttagagtttattccatattttgtagcttgttagctgtctaatttctgtcatactaaaaataataaatttgtctacttcttctctaacttcttatcatcattgttggcaatgaaattttaagaataagttcatttttatttcttgttgttcaaaattttcaaaatgattaaaagtttcatgaaataaatcttaggcaaactcagctaatttaagtggccttcctcgagttcataaaattgtattaaataagaaaatttgtgctaaaaaatgcctgcacccttaaaaatatagttgcaccgatgtactttttttttttttttttgaaccgttataatctcattttttttatatattatggtgcatattgaagttattcaaaacattctacttaattttgagaaatttaaaataatatattacaacacaaaatgtaaggttcaaaaaatttatttaacacgcgtataacataaaaatgac

SEQ ID NO: 316911 - DNA, 621 bp, Cannabis indica
tggtaaaatattttcaacacctagaaggcaagcggggtatgattctgttgaagaatttgaatcgaaaacctctggatcaaagaggaaagacgattccaaaaggctaccgaaggataagaaacagaagaaacacaacaaatatgtacccctttatgatgaatataccgagcttaatgaaactcgggaaaaattctatctcgcacatgtacaagaaatcatttttagtgagccaaaacctataagacacgcaagatataaaagggacccaatgaaacggtgtgaataccatggaaacattgagcatgccacagaagagtgtcgtcagttgaaagatgagatagaaattctcatagcgcgaggacactttcaataatatgtaaaggggcaggacaatacccatgatcagtccgattttcccagtaactcaatcgaccaaggatcataaccttcctctgcaggaggaagagatacctcagttatcttgagagggaacatgtcacaagaagacaatgggcaattaatccggtaaagcaatcatgtaaaagtattgtgaagtgagtaaataccggctcactattgttgccatatcaaactgccacgtggaaagctggtcgtcaacca

SEQ ID NO: 316912 - DNA, 991 bp, Cannabis indica
cttagctacaaaaccctagttgggctgggcctgctcatcaaaggcttcagtcaactagaaaagcccacacttctgcttcacctagactttactcacagatgctaagcccattaacaattgatcaccaacaacatgggctaacacagcaaagaactatccaatcaacccaagttttaataaaaccaataaaacttaatgtaagcccaaataaaagtctaacatattttgcataagtagtttacaaaataaattacttaagaagttttgcatcgttacagaaaaatttaactaattaaaaatacattatcatttatatatattatcactaaaaaattgtagcattagctataaaaactattatttataataactaatgtgtaattgtagtcatgtgactaaaacaaaattaataacaaacttctatctaaatattaactttaagaaaaaaataaaaagtgcactaactattatcctatttatatcatctattaatttatatatatatatatatatatatatatcatatgtaggcggatctacattttgggaagagcaagaagtatctatgattacaatgatcttatttggttgagtttctgctttctgcgcttttaactttcctaaaaaatcttctgaaagctataccaaaattagtttctattaaaatagttttataaaattaaaaactgaaattcactaataacggaactaagtaattttggaagtgcaaagccaaaaaatagcttttaaaacccaagccatgccaaggccaatgaagattgtatcatatggctaccatatcatattttttaaaatatgtgttagataaacactagaatactatataattaatatgttgcatataatctaaaatactatattaattcaataatctagaaacacaattaatctattgagataattgagaaataatagagacaatgggtagtgcaatattaactaagtcatctttgagatctctaaaatagaa

SEQ ID NO: 316913 - DNA, 900 bp, Cannabis indica
ttatttaataaataaatatctattaacttttgggattggcgtatttgttaaaacgcaagtatcaatattttagtattacgtaaaatctacttattatttaaaaaaaaaaattaattttacttttcttttttatttgaataaaataaaaaaatatattaattaagcattttgttcaaaatagtagaacgtatttcagcggaacaatcctccaactgaagcacacaacatgtagagaaacaagagtttcttgccaagcaatgagtcaacttgtttgcagattgtttaacaaaacacaactcgatacatgggaaaactaaaaacaaattacgaacatcttgaacaagtaaaccaaattgagaaaccatagaaaaattactttggatagcttggacacaaaccaagctatccgtttccaaaataacgtggtcccatggatgatatgcaatccaacttatagattcttcgatgcctattattttcgcaatttcaggttgaacacagccaatcttcctcgtagtgaaagcttctagcatattaccatgatgatccagagctacgcagcccacaccaaaccgaccctgctgatcaaacaaagtcccatcaacattaactttgatcttctataacaggtgcattccaatgctcagaatgtcgtcccccttcattcaaggagacaaagaaagaccctttctaccttaagcacatttatacatatcaagcatgttttttgctgatgcaactagcccaactgaccacagccggttcctccatctcgctagcacgtcccctgccgaataactgcaggagccagctgccaaatgttgcaggcccgccccaacatccagcaagctgcgattccaggcagctgtagcaaactcacattccaccaaggcgtgatgc

SEQ ID NO: 316914 - DNA, 539 bp, Cannabis indica
gcaacaacaaatcaccaaaacaacaaaaatcaaaaaactcacagtagaattatgacaaacgatcttctccaaagtatgtctcaactcaagaagtcccttagcagccgaagtagacaaatcacatcccctaagctccaaaaccctcaacctcccaaacggcaaaagcgaaagcggagtcgggtccctagtcggaggcgaaagaacagaaacaaccttaagcgaagtaagaagtctaagaatcctacgaagctgctcaagcgcacggtgatcgccaaggtcagagacataagcacgaagataatcaaccggagcaccagccaaaagactctcaagctcgtacaaagcctcgagacgagactgaacatagtgaagacccgccggattaagcttcaaaaccattgttccttcgatcaatggaccagcttgttcctcaacaaacttcacaagcttctccagataccgatctccggtcacaatcgccataattgaaccaaaaaaaaaaaacagaaaaaactcagaaaaaactcacaccgaaaacc

SEQ ID NO: 316915 - DNA, 1249 bp, Cannabis indica
agaaaaaactacacaccgaaaaccgcatctatagattttggactgtatacatatataggtttagagagagaaaggaggttttgggggaattgagagaagaggattagccatggatgaagcttgagatggtttttctgagaaatgggtctaatgattgattggactctctctctctcttttgttaatttgttaaacaatttttaattttgtttaaataaaaattagtgttgtaattaattaattaattaattaattggtaaatactatttgggacaataatattattattgggcatcagtactgcattttgattagcaatattccaagttatttttttttaagttatatcagactcgatatttgattatgattactatgacaccgaaaaaggatgagtgatattttttagcaattttctttcagatattgtattttacaaaagttaattattatattttttattttgataaataataaattagatcttgtattttttaaaatattacattgaattgattttctgtcaaaataaaacttaaaatgttaattaggatttttaccttctgaatttttacatgtacaaaatcacgttcatgaacttttcaggtggttaaaaattacttttgaactattgatattgttggatttaatgacttttgtctaattttattcaattttactaatatgacaattatccatatactaaatcgtgcttcccgaactttgatacttacaaaatcatacccactgaactttaacatatattgaattgtgtttcttaaattttcatccacgtcaaactttttttagtaaaattagacaaaagtctttaaatctaacgatctcaataattcgagaggaatttttaatgaccaaaaaaattcagggacatgatttagtatatgtcaaagttcggaagcaaaactctaaattagtcaaaacttaataataacttaatctaaaaatgttatgacaaaactacttacatttacggtttttgctcatgttagaaactgtctttaatttaattatattaaaaggaattattaaaaattgaattcagatcatatttaaaaaatacaaaattaattttattattcgacaaaataaaaaatctaatcagtaaactttaccaaaaataaaatttaaaataatatcaaccattaaataattaatggtgttaattagggattaatggtttaattaattaagattaagaatatgagcattgttattaggtactaatggt

SEQ ID NO: 316916 - DNA, 1435 bp, Cannabis indica
taataaaatctccagaattgagaaattataactctaatactcatttctaatattggggtccacaaataaataaattcataaataattataaaattaatagaaattagtgctaattgcctttactaatccaaattactaaagcagtcactacaggtagcttaacgtatatccttgtcagctatgcataacgtatttcacatttatatgttaagaaaatacgtttgagacccgacacatgtcctgaattataaagctttagagctttaactagatatttcatatgaggatcaactagtacaaatgcttgatagaaaggataaagtccttcgaaacaagaccatagttctggtaaggatcctctggagaaatagcaaggtggaagaagccacttgggagttggagtctgatatgagagctcaatattcagagttattttggttagattttaaggataaaatccttttaatgggaggataattgtaatgactacttagctttattatgagaataagcagataattatgtttattttcagaagtagacttttaattattatttttatgattatgaagatttatttgaattctaggtgtattaattatgatatatatttatatgaattttatatttttcatatttttatgcccggtaacagtggaatgcgactgttggcctaggagtcacatagatatagtatagtatcttagttttagtggggctgtatattaaggcatttggaatgtcgggagtgtttggggttttggtttaggaccattttacccccaagtatgttggttacttcttggttaagtaagggtaaaaagatcattttaccctaattagttttttttagtaggatttttaataaatcctaagcttatttatggagtaatagactgattgatattaggaagagatgagtcatcttccctttagttgatacttagccatatagaaaaaaatcaaagctaaaaccttgtctctttttctctcttgtgttcagccaaggtagaagcccaaggaaaccagaatatttcctcaccattctgtaccaatttgaggaggaattcaacctagaatcaagatccttggtagcgaactcaaggtaagttctttttctcttaaaattgtcaatttttgaattaggtttttcatacaattttgtgattggttgctgtacgttttgatgttaatttttattttttgagtgattttaagttggttttggtaattgttgttgagcttttaagctcaaactttgttatttaatggtggattttgttattattgatggattatgcaatttcagttggattatcacgtgttttcataaaccctttgattagcaaatgagtgcacaacattaagaaatcacaataacacgcctagtctagtaggatgctagagagagagagagagagaggagagagagaga

SEQ ID NO: 316917 - DNA, 724 bp, Cannabis indica
gtattttatttttttttctaaataaggatgcaaaaataattcttttctttacacattaaatttctagaccagccctaagtacaattttaacagtcaaaattcacaaaaaataagatactgattcttattgatatattttaatatagagttacaaaaatagtcaatatagtgttaagtactaccaaatatcaatgcttttgagggtagtgagccaatatttgttcactgagttaatttatctctttctatctaatatctattgcaattcatatagtcaaacatagtacaaattctattttgttttttcacttgagataacttttttttttactttccaaaaatatcaccactttaattatattgcttaacaaaaatgtcaactaagggaattattaaaaacatctccttttgttatattctgtcaagatttttttgtttttttgtttttagttaatatgaatggttgcaggtaaattcattgattcaaagtgcaagcactttaattgttcaaaataattaatcatctaaataaactaatttcaattaatagaaagtaaattgaaattatttaaacattaataagtcagacacaaaagtgtgacaagtgtttgtattttggatttctccttaggtcatgagcaaaaatgttaaaaaatataacataagatcatgtttaaatttttatatagatcactccattgaatgattgaaaggacttaaggcc

SEQ ID NO: 316918 - DNA, 809 bp, Cannabis indica
aaggtgcaactttggcacttgggttagagccccaaggggtatccagttttgtgtgaatgggtaaggagacacacactagacccaccacatacgcgcgcgtgcaccgtctgaccgagttagtgtggtgtgacactttatttttgtagaaaatttatttaataaaataattatttttaccttattttatttatttgaaaatgtgtttgatataaaactgaatacttagtcgtatcagttatgagacacgtttagcaataattcctccacgattcagaaaacgttcttctttctaaaaatctatatgcgatatcataatttttagggtgtattcgacggttctctacagtccagtgggatttcgatcgatacagtatgactaagttattttatcctgggaacgactagcaaattctgactgcttgcacatttttgggcagtgtcgaaaacgtcttagagagagcgacctagtccgcgactcaacccaaaattttcattcgataatatcattcttcttttatttttgttagtagtttactcaacattagctctttttgttcttcgctctctcgacgcttctctatacatctattccgcagttttggtcatcttctcatagttatgaaatagttttgaaaaaagtaatcacaaattatattttaagttgttcaattttccatgcactacatgtatataaaatcgtttggttattttttttttcagttttgtacatatttaataggagttttttcatatgtatgagaaaagtagtatagtttactttttatggtataaataaataatattatggg

SEQ ID NO: 316919 - DNA, 720 bp, Cannabis indica
ggtaataaataaaagatttggacatctatataattattaatatttataacatatattactttgtatcttaatttgttattatgtatttaaacacaattgtaaaatatggccaaaatgtagtatttactattttttttgcgttaaacttagcacattttctacctaatacattggagatgaattaataatatacactgatatatattgttctgtgtgggataatatatttgtttttatcatatatattttagtacgctttgaacttggtttcaatgttatttacttgtatgaatttcttattttttatatgaaaatttgattatgaagtcgtttactctattctaattagtgttaatcatattttaattttagtatgttatacatgaaagaggattgtcattccagaatactagaactaattttaccatttaaaaagattacttttaaatattagttactctttttctttaaatattaaaaattgaattattttgttatagtataaatagaaacagctcacactgtactgtattttttggtctagtttttacaattttaaaatttaaattcttaaaacgcaattgcaatttgaaaaattagaagaattagtttggttaatttgaaaaaaacaaataaatctacaccactacaaacacacatagaaagaaatgtgtagaagggagataaagctgattcgtattagatttgtttttttttttt

SEQ ID NO: 316920 - DNA, 2846 bp, Cannabis indica
actcaataataatcattgttggggtttgttagaaactgttagttgttagactggttagtgtttgttttagcataactaagtcataaccatgtgattgagttttagtaacttgatcaatgctaaaagtgtgatcgaagtgagtaattacctgaatgattattattgacacttgtgtatatgtgaaagtaatgcttcttcaactgaaatctcgtaaagaaatttcgccacaaataacgattagaatgtatataattatgtttttctttgctctaaccactttcgtttaactataggggaagaaataaagaaattttgtgtaaatagatgaagaacaaaaaataaaaaaataattaggaccacaaaatcataatcatacctgagtgaagccttgttcctcctctccgatgagtgattgtagtatgagaaagaaaaagataagattagaagcttattaattagtaattagggagtttgcttgtgccataagaaaacgtgttacctttttattttttattttttttgtatggaggcatatttatatacagagattattgtgcttgcagagagtttagagagagagtgtgagagagagtttagagagagagtgtgagagagttcagagagagtgtgagttcgtgagttttgtggctggagagtgtggagagtctggtgagttttgaggttttgattgtggttcaaagtttagtggtcttttttgcaccctctcgagacttcccttcttttatttacactccttcctggtctcatatttttgtcctgatattttgtttgctggcttgtgcttctgtgtgagtgattgggtgcttccttttcttcttgtttggttctgtcatcttctaagagtgcttgtgtggggtttctgtggggtagagtgttgtgtctttttgtagtgtttaaggtggtgtttggtggtttcgtcctttgttgtcgagtatggacatagttaatgccaccaaccctgcattcaatggtaagggtaagtgctttactcgtgcggaatccactataaagttaactccttgtgcctcttctcagcaggctttgtccacttattgccttgtgggaaaagtaatagcccctatgactgttaatgaagattctgttagggactttgtggacaaaacttggaaatttaaggtgaatgtggttgctttgtatgagactactaatatccctaactggtttgagcttggttttgctcgagcagatgaccgtgcttgggctagtgataatggatcgtggtgtgtccgaggctatactttcattcttaaagcttggacccctaggactgcgctctccatttcttttgactcgacgagaatatggatacaaatccataaccttccacgggattattactcagctgaaaatggaaggatcttggggggaaagctggtaaagtcctctcggtggaattggatgaaggtgctccggctttgtggggtaaatttcttaagattttgattgagttgaatgtgaactctcctctgttttctggctgtttctttgagttggaatcgggtggccaccgttggattcagttcaaatatgatagaattggaattttctgttacaattgtggtaaactggggcatcaaagaagaggctgctctctttctttccctgtcacagtggtcaatgagcttggtattccttatcccatgtatggcacgtggctttccatggcttcttcataccttgatgttttctctggcgcaaactcgttcttcccgtctcaggcttcatcttctcgggctagccgtgttgtgaagcggaggaagtccatgccggcggccatgaataggagtgcgagaagcttgctcgaccggtcatggtggggcgtggttcgaagcaattggcgacagtgacaggtcaaatttttgctttggataggctagaaagtcagaaagtgtgggtacccaagctccttgctgtcaatcgacagcctggggtttcctctctgggtaataagtttaacgttggagaagatgataggcaaaagggtacacaggtttttccttcttctaatttgaattgtactgatcagcctttgactttgttcaatggtttggccctaggtgatgggcctaatagggaggttattgggcctgcattatcttctactgggccggctattgtatcaaaggaaaaaactaagcagttgggcttttctcgtgagccgtgtatgccaaatagggtttttaaatgtggggccgacccgatttacgcggataaaaaagaagtgaggggtggtgagatagatgtgggccaggaagcaattgggccgtgtggtagagacttggaaacaattgggccgtgtatcaacattaatggtaacttggacaatgggccggccactactatttctaatgagagctctatttgtggtcaagaggtgaattttcatcatgatgaaaaattagctttgactaattcttttcaagcacaaggcactcttttacaagagcttaagaattttggaaacttggacctttatgagattaaatcaattggaggtgacattggggttcctactgttaggctaaaattagtctaagtttagggtcatattttcggttagttttcactctttgtttctagttttagggctattttacgcttgattcttttgtttcaagtcttcgggcatttaaagaaagtatgtacaagaattgaggacgcgtggtgaaagaatcgagaagaaaaaaaccaaaaattgtgtcgctgcctgttccagtcgcgacggggaacatgccagtcgcgacgggaactggcagaaagattttcaagaaatcgcagcttaaccccgtcgcgacgggggcttt

SEQ ID NO: 316921 - DNA, 988 bp, Cannabis indica
aaaaaaaaaaaatataggctgcaattagtttttagtttcttatatttgtacttgtttttagttgtatttttttatttctaccaccttgaggacaaggtgattttgaagggtggaaaagtgttacactataaaatagtgtaggggtttagtagtaatttctacagagtgtgaatcactataaatatgtaattgtatagctattatgggatatggattgagtaaatagaactttggttcaattgggagtttgcactgactcgaagagtgcatttcagagatttgtcctatctcgaagaagactattatctaacagaaagaacttataatatgaaaagaacccatttttcatatccaacaaagtaaaaatcacccaataaaatttcgagtaaaaaaaagcaatcatcatataagtaaacgaaaatgaaagaaaaatacctgttaatagcatagcaacgaatttgcactccagatcaatatgactaagcaagatagtaaagtcaccatgagactctggagacgagaaagactctctttattgattgttattttctttgaaaagaatcgaataatatggttaagtataggtcggtggaaacagacctaactaattaataactaattacaagtaatataaaactaattacacagtctaatagctccccttaagatggcgtgtgtataaattgacgacacccatcttggatacaatatcagaaaaaacaaaaggaaacaaggccttggtaaatatatcagttaaattgttctgagaagagacatgtagaagcttgaggatttcttgatggactttttcacggacgaaatggcaatctatctccacatgcttggtgcgctcatgaaagacatgattttcgataatgtgaatagcagcggtgttcacaactagaaaaagggtctttctcttcggtttttaagtcagtttgtcttcggtttttataaaaattcgctaccgaagttatttgaggcgatg

SEQ ID NO: 316922 - DNA, 2160 bp, Cannabis indica
ttgtcacctaacttgccaaaaaaggactttacaaattctaagttcaattaaatgatctttgaactaaatatccaaatattctccaccactatcagttcacaatatcattactgtcttacctaatggtttgagccaacactataagttcttgaaacttcttaaacattttttatttcttatgcatttggtaaacatgaccatatctagagaaatagtcagtgaaagtgacaaaatactcatatccactcaaggcttatacatttagaggtccacaaatatctgaatgaaccatgaccatatctagagaaatagtcagtgaaagtgacaaaaactcacaaccactcaaggcttatacatttagaggtccacaaacatctgaattaaccatccctagtggtgctttggccgctctccctttgcaaagaaaggtcatttggtcattttgtcttctagacatgactcacacacaggtccacccttggttcgtctatgtagtctatcatagcctacatgaccaagtcgtaagtgtcacagaaatatttcgtaatcattatcgatctttttccttttattggtttctaggcttagctccactaaaaatttcattattaattgcaatgagtgcattaggtcgtagaatataaagttcactttccaaaatagcaacacacaatcgaaatccattacaagaaatttttaacttaaaactaaaaaaaatgtcaatatataatgttgtgattgtaaactggaaacataaattaattttctactaaaattttgaataaaaaaattatccaaaaataaaaatttataaccaaatttaaggtaagcttttcatctagcttggactgacactgaatcaccatttccaacttttagcttcaacttattggatttgaagcactccccagtttcaagcagctggaataaagagcaaatatggttagtagatcagaatcaacaacccaaatggatttatcattctttaaaacacacaattcaaagacaaaagtacaagcattataaccttcattttatgagcaagaagtctgggacatttagatttaaaatgtcccttctcaccacaatgtatacatttaggaggtatctttaaaatctttctactaggtaacattaaagaacctgtgcttaaatgttgccctattattcttattgctggttcaatctgtcgatcatgagtagctagagaaataaaagaacttcccctaattttttcaactgatcatgatggtgtagcattattggaggtttctttcttagcaattttagctttctctttgtcaaatgatgttgcattgctggagaatgacttccttgctgttgacaatctcttttcataagcttgtagtttagttttgagcttgtccatatccgacgggttccaattgttgatcatgaaggataaaaaaaatttgtgatactcgaaagataaactattaagaatgaactaaacttgttgttcttttgaaagcaaaattctcagcaatgaagctttatggagttttgactttaccaagagtaaatgtgatgttattccttgacctggggacatcttcactctttcaagttcatttgcaaaaatgttcacgtagataggattaggatgatgattatgagccatctcaaggactacaagcatcaataaacaacaattaatcacatggttcaatataaattcttacacataatttggaaaatatttatcaagtattgaagatatgtgaaaaaatacaatgaaaacaaaacatatcaaatattatcaaacttttttaactaatgatatacagtaactcggtaagcgaaaatgaaagtatcatttgttaaatagagtagttatctcatctaaaatgggcacattttagcaaccttttattctatcaaaataggaattcaacgttgtcccggtaaatgagagtcaaggttatttctattttatgagcttcaaccatcgtctaataaatgtaacctgttgaccttagatttggccaactgacagcaaaatcgaatgtaataccgatgcttgctacgtgttacacaatcattataataaagcaattccaccccaaacttaaaactttgcttgtcctcaagcaaaaataaaaataaacaaaataaaacaagaggcaatatgatactaaa

SEQ ID NO: 316923 - DNA, 477 bp, Cannabis indica
aaaatcacgtaatacgcctaaaatagttagggtgttacactctaagacagttttcctccctattatttcacttatcattttacagtaataactcttctctctcccgagagcccctcaaaattcgatatttatgaaaacattagtgtcaaaaagtgcaaaaattgtataattttaaaaaaaattaactaatttttcttacctaacacaatcggttgtaagaaataaacaaataatgtaatcaatagactcaccagcagaacacttcattaaaaataagaggcgagaaattatccaaagcctattatttattattgattcaatgtataaataacaaggacacttcttaggcttcacgaagatttacaatgaaaagttggacccaacacttactgaggcattaagtatgagggaggctttgagttggctcaagaataaaaactggcaacaagtctttcttgaaaccgactgtcttactgt

SEQ ID NO: 316924 - DNA, 1309 bp, Cannabis indica
aaaaaaaaattagaccaatttatacattcaagtgttgaaacttgaaattaaagaaaacaaacataattctatttaaaaaatgataataaagattaaaattaactctaaaaataacataaataataggttaaaaatatcctaacaatatctcaatggaatatcttaaccatttttagaaaatatctcaactactttgaaaaaataatttcttaatcaattacaaatatttatttcaaatttaatatttaaataaaactgaatgagagaatctaatcatatcttcaattgaaattaaaacttaaccgattttttataaatatttatttcaaactcatatttaaataaatatctttaacaaaatgagaaaatatctactttttagagcaaatatatcaaccatttagagtgaatatctccaactacttagagtgaatatctcaaccacttagagtgaacatctcaactactttgagagaatatctcatccacttaaagaaaatatcttaaccactttgagaaattatctcaaccattttaaaagaatatctcagctacttaaaaaaataaatatttcttaatcatgtacaaatacgtatttcaaatttaatatttaactaaatatctttaactgaattagaaaatctctcaactagctctagaaatatctcaactattttagtaaaatatataaagcataaaaatatttataataatatcttaaatttaaatttaaagttaaccaatttttgtataaatatttatttcaaactcatatttaaattaaaatgtttaactaaaaaaggaaatatctcaaccgcttagaaaaaatatctcaactacttatacaaaatatctcagccacttagagggaattttcaaaccactttaaaagaatatttcaaccacttagaggaaatatctcaaccactttgagagaatatatcaaccacttagagcatctctaatgaagaatgcttgatgaggtggaaagcttaggtggaagaataagagaatgctacactattggagataaaagagtcatttgcggcataacctacttaagtggtcaggtttttgcaactaactcccaattctaaaattttggcagtaaaacctcctaaacccaagttcagttagcacttagccctttccatccatttttagttgttaactgccatggtggaatgtccgcgtgtacacgtggcacaattttattggtccacgtaaataaatatttaaaaaataaaaaataattatttaaaataaaaataaaaaataaaaatttccttttctttaaaaattaaaaaaa

SEQ ID NO: 316925 - DNA, 794 bp, Cannabis indica
ttattattattattataatatctctttttagtgtggacaatgcttatacttaaaattataccacatatgactcatatattgttaactcagaaatttttttctagtgacgtggacattaatgtttaacacgtggcatgaagaatgacgtcacgaagttgagtagacccgagtcatagcagtcaacctaggaggggaccctagcctgcacctaggttaactccgggatctctgggatagaagtttgggatcacttaagatttcacccaccgctcaagttggcatcctcaattaaggttttagatttcaggaccatcttagtgaaaagtggtcaaaccttgcattgggacatcaactagacataccatgaacatatttgaggcaccagaatcagaattagaatcagagtaagttaacttttgagcacctgaggccccggggccccaagcacccaacatctaggttgacaatctatcaatctgggttccttccaagtttctgatcggagatccaacttttgcatcaaatttttcttcatcaatcggggaaacaggtccttttggaggaaaaacaacaattcatgggcacaaataccaaggcccagcgcctactgacattgtcaacatggccatttaaaatggagtttttcaggaattcttttgagcaatcttctacaccttcagaaaatattaagattaaactatttccagggactgaatagaatttctgaaaggccaaaagagggacccattgccgaggttgacacctggggctgggccctacgcctaggttgacat

SEQ ID NO: 316926 - DNA, 3153 bp, Cannabis indica
tcatctaagacttggacatgtgactgaaagggatatcagtgaattagaaaaacaagggatactcaaagacgaattaggtgagaaacttgagttctatgatgattgtgtctatagaaaatgctacaaattaatgttcacaccagggaaacacacaacacagggaaagcttgattacatacactctaatctatgggggctttcaagactaaaacattaggaggtgcaagttacttcatgagtatagttgatgactatactagaaaagtctaggttttcttactcaaaacaaagaatgaggatttcaacacctttgtcacttggaaaagactcattgaaaaccagacagtgaagaaaataaagaagctcagaactgataatggattagaattctatttagatgagttcactaggtctgtcaacataaaggaattgataaacacaaaacagttgtgaaaaaaccacaacaaaatagacttactgaaagaatgaataggtctttattagaaagggtgagatgcatgctcaagggagctggccttgaaagaaattttggggtgaagcactaaagacagcatgctaactaataaataggtatccctcaactgcactaaagtttaaaactgatcctcaagagatctggacaggtaatgttccaacaattgatcatctcagaatttttggatgcacaacttttgctcataccagacaggataaactagagccaagggctcacaagtgtttgttccttggataccttgaagaagtaaaaggatacaagatgtggtgtttagaagaaggacataagaaatgcataattagcatggatgtagtgcttaaggaacataaaatggctatgaaaactgcagcaaccaatagttgtcaaaataattaaagtgtgacaggcatggaaatacaagatgataaggaagaagaagagaaattagttcagttggatacattggaaccaacacatttagagattgatctagaagaaattgaagaagaaacatctccaacaaactcacaagactatcatcttgttagagacagagaaagaagacagataaaacaaccagaacgatttggatttgatgactacacatcctttgtacttgcatcagcagacgaaaatgaaagctctataccaagtacttaccaagaagctattagttctaagaattggaagaagtggcttgctgcaattgatgaagagatgacttccttaaaaagaacaagacttggaagacagtcacaaggccaccgggacaaaatttgattggatgtaaatgaaccttgaaagagaaaaaatgattgatgggtgaagaagtgagatacaaggcaagattagtggtaaaaggctttaactaaagggaaggtatcgatttcagtgatattttctctccagttgttagacagacctttataagaattatgatgaccaaggtagcaaaagtttaccttgaaatggatcaaatggatatcaagacatcatttttgcatggtagacttaaagaataaatctacatggaagaaccagatggttagtaaagcagcaaatctgatcaagtttgcctattacaaaaatcacttcattggctcaagcaagctctaaggcagtagaatctgagattttatgaattcatggtcagcattggttataacaggagtgactatgacccttgtgtttattataatagtgaatcaattcggttgctgttatatgttgatgatattctcatcattggaaacaaaaaaaaaagccatagacaaactgaaatagagcttaaatgtagaatttgaaatgaaagataggtgaagcaaggagaatacttggcattgacataaaaaatgacagactagaaaaattatctctctctcaaaggagctagatacagaaaatgattgacaaattttgcatgagtgaagcaaaaccagtaagcacacttttggcacaacatttcaaactcgctcaaggtcaatctcccaaaatagaagaagacaatatgtacatggatacgataccttatgcatcttgtgttgggagtctcatgtactgtatggtgtgcacaagatctgatctggcttatgcattaagcatggtaagaagatttatattagatccaagaaaagagcatttgtcagctatgaaatggatacttaggtatctgcaaggttctatggatgtgggacttgtctatgataacaagtctaaagatgaaattgaagtgaatggttatgtggattcagactatgctggaagcatagacacaaagagatccatcactggatatgcttttacagttctaggtggatgtgttacctggaaatccaacctacaaaaggtagttgctttgtcatcaactaaggtagaatacatggctacaacagagaccataaaagaggttatttggctcaaaggtttcacaaaagagttggggttcaaatcagacaggataacagttcactgtgacaaccaaagtgcattgtattggatgagaaatctaatatttcatgagaggtgctaacatatagatatcaaattacatttcataagagacatcatagctgagaaggaagtgagtgtgaagaaaattggaaaaaaagaaaaccctacagacacgatgacaaaatatgtgaatttagctaagtttagacttttctaaacttgctaaacatcctcaagtactagttgaggattcatgactagttcagcctcaaatttaaatggcttactcctctcttaatgaccaaggtggataattattgtgattggtcatcaagtgaggatatttgtggctctaataatttataattattttaactaattatttgttaccactgttagtatcagtccaagaaccaaaggctatatatagccatcccttcccatatcattggcaccaattttaagagagatcattagatgagttaatgagctagttcggagagaaaaagatgagagaaaagaaagttgtaatggcctatggtgtgtttgatccttagtgccacaaatgaggtttgtgtaaattgaagcaaggcttcattgagtgattgtgtctgggaacacattggtgaacaactacttagtaatcgattctttctagcttaataaatatcaaagccactggggttgttctggccgaggagtaggca

SEQ ID NO: 316927 - DNA, 1354 bp, Cannabis indica
tttagtgtataccctttcttttctttgtgtagttatcagtcatatactgtctctttcgttttcttttgcccgtttctttgtgaaaattttcttgtggcttgggggagcgtagtgtctgttgctttgcatcatggaaaaagttccgactaaggatgtttcagtgaaaacggtggatgagaatatgaacaacactctggtgcgtgacagtgccctagaattggaaatgctggagctctttgaagatatcaccctagaagatgttgtagctaacaaggcttgtgtaggcaaagtcatagggtgtaaagacatgtcggcttctgtggttaaaaagattttgactggggtttggcgtagacttggaccgtggagaatgaaaaagtgtgaagagggggtccttggcttcttctttgagcatgaggaggactattcttttgtcttacagaagaggttgtggctggtgaatggtgtgttgctcaacatcaaaccctggccagtagaaggggaggttcgagcgggagagtttgctgtggctcagttctgggttcagatacatgggctacctacacggtgtctcaccaatgataatgctcccattgttgctaagaaaattggagagcttgttgaaaccgatggaaaaagcaagtctaaactggttcggagaggatatttgagattatggattgatatttgggtttctcatccgatcccaacggggttctttttgacagtagatgggaaaccagagtcatgggtgcagtttaagtatgaaaagctccccatgctctgttttaactgtggtaagttggctcactgggataaggtttttcatgccctgataataatggttacgccgcggacgggggaggcggtgccaatgtatggtttgtcgtttaaaagtgatacgaggaagagtaattgcttcaattcaaaggggaagggagttctcaaaatgactttcgattcaagggatataccggaatgggagttgaacgggaggagtcggagagggttctagaaacgggttgaatcgaggcagctgtcgaagaagagtggctcgacggagaaacgggtgacggggggtgcggtggcctccaagtatcaaattcaagaaaagggtggtggcgagaaagacaagcaatcgtacgaggctgatacgagtagtgggaatgtgggaattgaatcgagtacgaatggtcatggcgtatcctcccacgtggaaattgagggggaccacggagtattggcggctcctcagaattatttgaatttgccaaatccgaattttgcaaacatgcaacatagagaggattgttggaatttattttaccaggaacttagatctactcacaagtat

SEQ ID NO: 316928 - DNA, 1047 bp, Cannabis indica
atttggttattgcgtttactagtagttggaagccttatgaaaatagctactgttcgaatatccctccttttagccaatgttgtttagctcactgttttccaatagctttcccgacgatcagagccttcgagagtttctttttgtatcctgatactgttgcaccgaaacactatctcttctggggtgtaaagctttcaagtcagctttggaccgttttattcaatgattcaaagagccaataatttcctttccccaccgagccaatttctcagcacacagagccaacttgtcactaaactcctgcagatgattttgttcccagcaatctttcacaatttcaaagcataaaaggatctttcaaccaagtattctcaaataaaaaaatgagaaacatgagagaagctacctgatactttcggttcaagaaagagaggggaatggtccgacgtagagtactcaaggttggtaaggctagcttcaggaaatgcaaggctccgagattgcgatactaaagcacgatctaatctcacctcaacccaagcattcgtgccccgacccttctcccaagtgaaaggatgtccatgaagctctaaatcagtaagtccacattgttggagggtcgtgttgaaaccgttaataagccattgagggtaccgtcttccccccgcttatcttcatgtcgaacagtgttattcatgtctccaatgacacaccaaggtaagctcgaatgattggacaaggtgcgaagaaggttccatgtgtgttggcgtctgcttcgatctggctcaccataaagactagtgagtcgccactccctattgttaggagagaaaacaactgcatcaatatgattatttgaaaaacccagtaaagtggcttctttcttttctttccatagcagagcgagtccaccagcttgacccagagcttcaataacaaaaataccttcaaaattcaacattctagccaatccctttatttttgatttttgacactttgtttcacacagaaaaatacaattgggtctcttttgagaaactgtttctc

SEQ ID NO: 316929 - DNA, 626 bp, Cannabis indica
tttaaaaaaattaagaaaatagtatgaataaaccgaaaccctcctttgttcttcgtgcaacgaaaccctctcccatttgtccattttcttttttttaacccaaaacctagtgattcaagcctcaatagtagctagatagtaaactatagaagacggaaagcttaatggctcaagatcgagggtcgttctccaagcaagccggccaacatacttgaacaaaaacataaggtaagaaaattatatatgtattacataggatgttaaggtacgattattgtcgttacgactcaataatgattgaggtgatggttattaccattaaagtggcttaaatatatgattgtcttattagacaatgacaaagaaatgtgggcttgcctgattaggaaatgcagtatatggatgccaggatatgacatatgcttgcatgattaaacaatgcgatatatggatgcaaggttatggcataagcttgcctaattaggcaatgcaatatatggatatcaggctatggtataggcttgtctaattaggcaatgtgatatgcgggctcacctgattaggtgatacgatatatggatgccaggctatggcatgggctttcctaattaggaaatgtgatatac

SEQ ID NO: 316930 - DNA, 2212 bp, Cannabis indica
gggaggaggagttgaaggtggagacagtgaagcagcttgggagaagtggtcgactgatggcacagaacaacaggtagcaaaacgtgatggaagaagatgtaggagctgccatgcagttccttcagtccaaggcactctgcatcatgcccatatctctggcttctgctattttccgaacacaccaaccagatggtccaactatggttaagcctgaatcaaacacgtccctcctaatgccaccaacagaaagatcccaaaccctgtggttggtctattatcactcatgacatttgagtattctgtactcttagttcccaactcatgccgagagcgagagagagagactgtcaagtcaatgtaactgttcattctcatgttagtttttgtcaaacaagggactagagttttcatggctaggaagaaacagaaacagtagtaaggcatgtgatatttttttttgccttggtcaagtctatggaaggttttctctttgtcaaaagctcatttgattatcttactcttcttagtatgagtggtggggttttagtggtgatgaccaaaaatattggtggtgggagctcttcttttcatttttttttctttctctctttctctttttttttttttaacttggataatggggtgccggggccattaaaaggaaatagatggaactatgatgtatttgacgaaaactttagtgcaagttgaaaatagataatggttggtttttatcataaagctattttggaagcttctgcttttcttaaatatatgttttattatttatgtttgaattgatcggtttgaatttgttgtttacttaaaaagtaaacttgtccctttttttcaattttggtgaatgattatacaagagaaagttattgggtgagagagaaagttagaaaatgatgtttagcaaaaaaatatggtaccattttcactcgtttgtccacgggaaaaaaaaagttgattaaagtataacttcgatgataagatttttttcccttctcgagtaaaatatagtttaattcaactattatatttttctagtttgaaaatgaactgttgatgcttaatattaaactaactaaaaataaaaagtgaaagtaacccttttcttttttgtgtgtgttcagttgatggtactgaaggggtacttggtttattggtttgtgcttgatattttgtttttaaaacttattgggtctgaaaaatcgacattcgtggacgacttttagggtggattggtttattaggtagggactttatcaacttgaattaatcatactccattcagatcctggaacaatggtctgaaaacagaactcttgtgagcagacaaataaacaaactggtgttgctttgaatatattacctcgacggaaagataatcattgagacatcgaagaaacaaaaattagcatatgatttccatgtcttcatgcataataacacagtaactttttatacatatgtaaataaaaggatatgttatttttaaacattgggatggtctacgtggctctgaggtgttctagttttacatggtttaaaggccggcggcagtagaggacatagtaaacagaactaatagattggatgtggaacaagaggttgattgggaggttaatgaagaggaagttgtggaatttggtgaacatgctctgaatggaaagatcattgctaaacgtctaggattttgaattttatctattaaataataatattttaattatatattaaaataatttattattatttaatttgatatttaataattaaaattgttaatcaaaattctttttagaaatattattgtacatgtgtaagagaccgtcacaaggcactgcgttacgcttatatgtcatatgccacgggcatatgtgtttttccatcctcaatttcttaattaattaatatatataaaaaaaaattagttcagttatatttagaaatttttacatcaaaaatacaaaatgtaataccacaacacgcctgtatcaatttttttactcttcttctttattttattactattttaccacatgcacacccattccatgcatgagtagacgtgtgtgacctatgatccctatcaatcaaccatccatcatttccctctcttcttttttttcttctttttccttttattttccatatctttttcattttttttttaaaaaaaaaattagtaacctccattgctgaa

SEQ ID NO: 316931 - DNA, 2548 bp, Cannabis indica
taagcattcaacatacataaatttaaaacaataaaaattaaaatcaacatcaagtaaaataaactattaaaagaagaaacatggttccgaaattgagaaacagaaaagaaacttaaaaccactaatacgaagtacagatgaaactcaataacagacctaaaacaaattataaaataataatatttatcaaagcacaagaaccatacctaaaagagataaaacctaaaatatggagaaacaaaattaatgcaatacaaacctcaatcaagcgaggagtttgattcttctcattttacaatcagtagaacaataccaagacgaaaacgactcgacttaaagaagaagaaaaatcaaaattggagatgtcttcttttttcaaggtatttcatcaaacatatggtaggtgaacctttatatacatatatacacaaagactcagcttataaaaaagataaaatataaaaaactgatttttaaacataaaaattacaaataacagcaaaacccataagaaagctaacaagcaaaaattgatttcgaagttgagaaaccaaaagaaaccctaaaaccaactaatgagcaatacaaatgaaactaaaacgattgaaacaacaaaccaaacttaaaaaagactaataaacaacgtgaataaaaaacattagcaacatctaaaagtgatagaaacaaaattagagcagaaaaaaaaacttgaaacaaacctcattcaaatgagtagcttgtttctttcccattttaccatcagaaatcaaccagaatccttcctctgtttaggtaagagtgcaacaaaattattttcgtcttaacttttttttccaaccgatttgacacccatatctggagcttttggatgtttaacaagtattttatttttttttgcagcaggaatggagaagatgatgaaggatcagttattgccattatatagaaaattgtagaagaacaacaaaacatgtaagaaatcgtggggaggaagttgagatgatggaaagatcaatgttgaaatcgtgtggagaaattaagagggagaagctgaatattattatgagtataatccaattacaaaatatacaaaactaaaaaaaatgaaaaaaaaaaaaaggaaaaaaaagggaaaactttgagtgaaatagtcatatataacatgtgtaagaggtattttagtaaataaaacaataataaaggtaaaaatattgtccatactttatgggggataaaagtgtagtaaaagtatcattttgtattttttatgtaattttttttttatacatgtgataagtatttagaattttctaaatatttatgggaggtcttaaatagttataatataagcaattataaaaataatttcgaataaaaaatatttttaaatgtcgaaacaaatataaagtctaccagaacattcttttagagggttgtactaaagaatttttttttttcataggcatttacctattattattttgaaaaacaatttggttacaaatttttttcctcaagctcaattataatctgaaacttttctttttctgattttttaacaaataatcttattaaaaatacagatgggtctaagttaataatatgtagtttgaaaaaaaaccatgggtgtgaggacattgatatttcctgtgtgctcagcaacttggagctaaactaaggtacatagaagaagtttgcttgtgaggtcatgagtataaaaaaatattatttattttaaacttatataattcttttaaataatatataattgatgggacaagcatacaaatgattcttcatgctggaattaatactatcagaatatataaataaaaaaagattaaagaaaccacctaacatgatcaaagtggattaatatattattgagtgctcctccaagtcctagtcataccgaagctaataatgctttattttattatagaaagaaaaaaagattcctgcatttatgaatctaagattctattaaatatgcttttaaatacaccatcatcaactatgaaatatatatatatattatattgccggcaaatataacttggccgtgacgttaagtagggtacttatggcgcttctatatatgcttggtggggtaatatttcatcttttattctggatttttttttgataggattttactacggtaaattataggaatgactcaaattatataaataaatatttttatttcaaaagttacaagataaataatttattttatatattatttattatttatattattttttttttgtcatataacaaattaattttttaatacatattttttaacttaaaagtaaattatcatacttaaagatcatgatatatttatattagtttttgttaatttttttttttttaattttgtttagcataatattttaatgtatgtatataattttattgacatgctacatatatttgattattatttttatatattttaattgtattgatttattatttattttaaataatatttaattagtttctattttattatatacaatgatagtatataattttg

SEQ ID NO: 316932 - DNA, 1834 bp, Cannabis indica
catgaaaataactttattttttgtaacaagtaaaaaacctgtaaaaaaattgtaaaacaaattaaaaaatgattttaaatattttgtgtaaaaatctttattagtattattgtctatcgagtttttcgaaaactgaataaaaaaaaaattgagctaagaagtaattaaaagaaatatgtagaagacttttataacatggttcaggttttattaaattttattccacgagtcaatagtatggtgaatacaatttgacaaagtttaatactgagttttgaaccctctgaatggtgatggtggagcccttttcatagagtgtgtgagtatattttctatattgagcccactgatggggtatttgcaagagtgtatatagattaccatgttaattcatattggacttaaggcccaatgttggttcgttgaagatgagttctgcacatagaactattcacgttgacagaccgcacgtgagccaacagttggtgtatggggtagggctgcacacgggtcgggttttcgggtggtcgagttcaggttttcggattttaggttttagaaatgcacaaccgaacccgattttcaggtggtcgggtatggcgagtttcaggtcgggtatgcgcgggttgggcgtggtcgggttcagatgttactgggctgagcccgaatgtcatttctgggctcaaatgaattttaatttttaaaaatgccatattttttttttatttttgtcacattgacttttgggttcccgagaaaaggctcacacaaccaagtttcatttatcacattggctttttatttttatcacattagcttttgggttcccgagaaaagtaggtggtccttacttgcctcagaatattggagtccctacttcgtaaatgccactattaagatatgtcattatcattgttattgtagtcatgctcttcgggacatggttttattgttttgaaaaacgattcatctactgtagccacttgttttgcttaattatcttggtctggttcaaatagtgagtattgagtaggtaggtattaaatgaacagtaaaaagtaaagtgtgataaactaaaaattaatattcttaactttttaatataataaaaaaatattttttttgttgtattttcgggtcacgggttagaacccgactaaaaaaactacattttaatatctgaacccaaaacccgtgtgggataatttcgggttgaaccccacccaaacacacgggttttaatattttttttgtttttttggcagcgagtcaggacgggtggccgggtttttcgggttcgcgggtctaaatcttcagccctagtatggggaacgaccatgtcagattagtggctttggtaatcccaatgttgatcgtacattttttggtcaaacccctttttgtgactaggtaaaggagacattctagcgaagcgaaaacatgcccggatcacttagggattcctaaggctagttcgttttagggttttatgccccaaataaaaaatattttatgattattttaattgcttggttcacatattttgttttatatgattgtatatttaatatgtaaattttattaaatacataacatataattatatacaattatagtgatatcattacggtggaaaattattattattatatgattcaaatattttagtctcgagatttatcggtgcactaaatttatactgatgtgataatcggtgatgcggtctatttacactaagacaaacattatgtcttttccccactcccatcactccccacacgcaccaaggaagctccccactcccgtcattccccacatgcaccaagggagctcc

SEQ ID NO: 316933 - DNA, 1163 bp, Cannabis indica
tatagtttttgaatttcaaaaattaagttgtgtaaccactctttacacacttaattagtgatcatgtggaagttacaaaatattaactccacctcttatatgttacaactatatgtaactcccaatcacataatattgtgattattacatgcatataattcccaattatattatatgtaataatatatataacatatcacaattttaatcttaaacattatattatataataaataatataacaccactaatgtttattatattattaacataaaatacattatttttaccatttaatattcatttgcaacacatggtccgtcttatgttatcatgcataaacatataattctatattaataataataaaaaaaatctgacatagcataaaactgagactaatttaaagaaatggcagtagtgatagtggataataattttgaatagaaatttttttaagtaattaacgagaaagaaaaattaaataatgcttctaattattggatgtaaaagcatacattatattttcactttccatctacaaaaaaaaaaaaaaaaaatcacttttagtgatagtccctcgaacttcatcttaaagaaaaaaacaataatacaaattcaaaaagacatgtagtttatgttaggcatcacacttatataaatttagagttaacatatcaatttaattaatatatgtgatttatttagattagagttaaaagcttagaccataaagcttgtcacctcaaaatttacttcaacatcataaattgaggtctctatatttatttcaacaatatgtaaaatggagtataaagttcttatatttatgctttcacatgtttttacagacttccttcacaatgagtttcattcatttatcacagctctaatttcaaaatatacatatttattttctttattaatatatattattatagttgctactgcttttgttggtattattatgagtcatcatcactcaagattttgaagctctggtcttccatttttctaaatatataaatggcttcaaaattactccaacaattcctttttctgaatctataagcaactccatcccttgattttgaagtttaccctttaacacttttattaaaaatgtatcattaccttaatgcacaattacaaataaatgttga

SEQ ID NO: 316934 - DNA, 886 bp, Cannabis indica
gagagagagagagaattttatgactgctaaaaacgatcagggtacggatttgccgtcagtctctatgatcgacacctatttgaccgtcacaaaactaggtagaataggcattggtaaaaaaaatcgcgaggcatgcatatgtctcgattgtttaaagttgttggcaataactagcactgtacctaatggtttagaacagtcggcaaaggaattgacagctgttcaaactgtcaacaatagtaagccattattgtcgacaattttaaactatcacattaaaaaaaatccagacttgagctacatgagctcacacctgcttagatctaccaaaatcaaaccagaataacacagttctaaaacaaacaaaagttcatgaaatagacgcaaaaaattaaaatatctaaacacataatttcaaatatcagattaacaaatttagagttggtcgagttcgatctacaactccgaccaaccgtgattctaaactccgacgcaagcttggccatttgcgagcccccaatatatacaaaacaaccataaatctgtagacaattaaaaaaagctcaaagattcagtgaagagagagaacccaagatctacataaaaaataaaaataaaaaacataaaagaatacgaagatcaagaagagagtagatgaggtggatagacatttacatcatgaaatatttgggggtcgacgatctcaaacttgtgctccatttggggtcgttggttgtcgaaaatgggttgagagagagagagagagagagagagagagagaagtgagatagtagaaaattaattttaaagttgtttagtaatgaagtgacgcgtagttatttactagtttgttttagagtagagagagagagagagagagagagag

SEQ ID NO: 316935 - DNA, 2780 bp, Cannabis indica
tagggtattgtcatgctatttatttataggaaaacttctgattttaagtttaaatccccaaaaatgttttaggaagttgcttactcatttgacataaatgttacatatggcctccattcagcaagcaatattttctttcaggttgactggcacacttgaatctagaaacgaggtaagattagtataagatatatatacatatgtgtgtgtgtgcgcgcacatgtgatatacatgtttaagtttactacaatgtatgaattggtatcatagtggtacgactatagtctcgggttagcagtacgagcatagtactagttttgagtcttttgactgatatttaattctataaagtattaattgatgctatcacaacggtacgagcatagtaccgggttagaagtacgagcatagtactggttaagagtgatattatggtcaattatacttttgggtatagattgatgctatcatagtggtacaagcatagtgataggtccacagtacggtgatagtgctagttgagactgatattatggtaatgaacgttcttaatttatttattaagccttgtaggtaggtgtatgggcgcctagttgtaagtcggtaatatgtttatatatttttatgttttttttactgagcctgtcgacgcacagatatggtttcatgcgtaggtaaaggaaagacgaaggctgagcagtattgagttcagagcttgcgggtgactgtatatatatcaaaatggttaggcctacagtgttcggtttttgagacgacatggtctcatattttgtagtcgatgggtgacacttttatgaaataatatattttgagtacagttgtaaacttttaacgggattctaaatttttataaatatatgtatttattaaaatttaatttatcacattttttataaaatctttgattaacaaaggtgtggacagtaattagaaaataattgtagcgtgcctaatcaagtaggaagttacaattcggtattagagccaccaggttgtccttcaaagattgtcaagatatgtacaatcatcatcagagacaagctcaactcacactgtaagcctttacttgtttagtaaattatatgattaaaaaagcatgataggaagcatgtaagcattatgttagttagataatgcattgcctaaagttccatgtatgcggtatctggatcataagttcgatcgttgtttgactgacctgacttatggttttgcaggctagtcttataaatggacgataaaacacaaggagttaggataacttggctgagactggagaaggttggggaggttagaatcctcttcgtccccgtggctggggtagagaccattgaagagctcgtggcagaggtaatgttaacctgccataggctcctaaagactaggagcaaaggtttgtagaaatgcaagcccgaatccatgaacaagatgaagaaattcagaggctaaggtagtagggtcctcttgttgtgcatcctcaacaaatgccagttgcttatgctctagtgttgccaacagaacaacttattaattgtaatcaaatggagcctttgtatgagcaattcattaagcaagcacctccaacctttatggatcttatgaatagagtgttcaaggatttcttcgaaaactgtgtcatagtatttatcgatgacattcttatatattcaatcaaaagcagaacatgaacaacacttttggaagattttataatgacttagagatcagaagatgtatgctaaattcaagaagtgcaagttttggctatcacaagtgtctttccctaggtcatatcgtcggaagggatggaattatggtcgattcgaggaaagttaaatcagttaagagtaggccaagaccaaagacagtttctgaagtcagaagtttcttggattggatgtcgacattttgtagaagggttttctaagatttctatgtcgttaacagaattgaccaaaagggataaaaggtttatatggtctgacaagtgtgaaactagtttccaagaactaaagcaacgactgattttggcaccagtgttagcttttccatcaaaataagagaaatttttggtgtattgtgatgcatccagacagggtctggggtgcgttctgatgcaagctgacctatggttattgcttatgtttcttgtcagttgaaggagtatgagcaatattacccaactcatgatttagaacttgccgctattgtgtttgccctaaaaatttagcgacattatttgtataaggaaaatgtaagatgtatacaaactacaagagtctcaagtacttctttactcagaaagatttaaatatgatacaaagattgtggttgaagttagttaatgattatgactgtgagagtttatatcatcctaggaaagccaacgtggtggcagaaactttgagcagaaaaggtcccgcgcaagttttcaataccatgatgatctctcctcagctagcaacagacatggttaaggttggtattgagtttgtggtggacatactttataatttaatgctttggttcaatttgctagaaagaattagatgtgtgcaattagaagattctaagttaatcaacttccgagaggaagtgttagctagtcagactaaggacttctcagtctcaaataacgaagtgttactttacaaggctaaggtttgtgttccgagcagtgatgaacttaggaaagaggtattggatgaagctcacactacttcctattcattgcacccaagtacctgttgggttttatg

SEQ ID NO: 316936 - DNA, 937 bp, Cannabis indica
aataatttataatatagaaagtagtgtttaaataaattattttgcacgctcataaaataaaatagtcacatataatatactatttaaattttattttcggcatgttaaattttttttttgaatttcttaaatttttataaaatatcttaaataactataacgtatatcaatatttactacaaaattattttggatactaaaataaaaatatatcggtgcatctattttaaaagtattataaaacttacctatatatctaatgataggctttaataattggataagaatgtttgtttattgtttaattatataattataattattatacacatgtataggtatttgtataataataataataataataataataataataataataaggggcatatggctttttattttatataataaagttattataatttatacatatatttataggtgtgtttacgtacacttttatattattataatattattactatctgattaaggtaatatatatgactaataataggttttaattagataagaatgtttgttttagtgtttaatgaattaattataattattataaacatgtattatttgtatattatgataataataataaggggcatatggctttttatgttctaaaaatactcctttcaagtattaagtagataagaatgtttgttttggtggttttttttattattaataaaaatgtattttttatggattgacttggaaagaaatatattgaatggtgtaatgaagatttcttttttagtcttctcattctcacttctatataatttaatgggggaagaataattcatgatttttgtaagaagaaaaaaaatccaactttctataaaataaataaaaaaaaatacaattgtatagattcggtattaatttatatatttttacgtttactgaaaat

SEQ ID NO: 316937 - DNA, 742 bp, Cannabis indica
caaaaaaaaaaaaccttgaaaaatgttactttgtttaaaaaatacacatcaaaatattatatctttcgattatatcacaatttgtaaaaaaaatcaaattttaaaaaaattacaaaaatttggcaacatcacgcaaagcgcggtttaacatttaaacttttgcagagaattaaagctttggagataacatttccaaatttaggaattaagggattggtattagaaagagggtcacaaattcgagagcaatcagacttagggcttctccaacgagccatcaaagcattatatttggtgtgagattttctccaaaagcatatcatttactgctgcatattgtcgtctgtggtacagtacacgacatatatgcagtgcactgtagcacactacatactttttttctttttatatatttaattatgtcatatatttatattattaattgtatttataaaattacaatgtacctctttaaagtagtgcactgatatactcttacttgttttggatctaaaaaacttttttagtttattttttttatggtcgtgtacattataattatttaagatatcctgcataccaacaaattcgaaaaaatttaacacgccgaaaataagattcaaactgtgtgttatgtatttgactcttttatttagaaggatacattttaatttattgtgtgtaaatttaaatgtgaataccataaattatttttatggtaataaaaataaatttttaattt

SEQ ID NO: 316938 - DNA, 803 bp, Cannabis indica
tcttcgcaaccttagttgaattcaccttcccttgccttcttcctcttgttttcttcattgctccagcacgagctgcaagatcaagagagagagagagagagagagagagagagtagtttgtctagaagccgctcaagtaaattcacatttatatactcaattcaactactaaacaaatatattattgattcttggcaaagataggttacgagaattaaattttacctccaaacacacaagagtatgttgaacctcttgatttgggtagacaagtccaagaaggaataacacagtaatagctccatcctgtatgaggatcatgtggtcaaacagagtcccatcattcctacattcagaagctatgaatttcacttgacattcatctataagctcaaattaccaaacaacaaagatacaaactacaacaagaaagaaaaggtatttgagtggctataagtttttaactttgctggtactaatcataaattatgtaaattattctagttttaaataggttattttcttcaaataaaaattaaaataaaatttaatcttaaaagctataaagaccttaggcaaactgtgctaaactaagactaaattaacattaaaacacataatatagctcaatttaatatcaaatcatcaattattaatttgttagactttttatttgggctttgaagcagaaatgtaggcttttttagttaattgaagctttgatgaacatgcctaatctaagtagggttatgtggctaactcccctccctaactctatagatacatattgtctcatcacaatt

SEQ ID NO: 316939 - DNA, 1116 bp, Cannabis indica
tatataagtgagaaaagtgaaaaacctgtatggtgtggttcttgagaagcggatgatcaaatgcaggttgtttgtatatatcgacacagtcgatcacttcaccatcttcactgccaattagtcaatttaattttatttattatcaattaatatatttttggaaaattctataatgcagctctttaattaaaggaacaacgatacatctctatctgttttactattcgaaataattttttagtcaaattttttctcatggtcatgtaaattatagttatttaagacatcctgcaaaattttaagaaaaattcagaaaaatttaacacaccgaaaactacgttcaaacaatgtattgtacgcgtgactattttattttattcgcgtgtaaaataaactgtttgaacattgttacctatatcataaattattttaaatttctcaaaattttgtaggctatcttaaatagttataacgtacatcaaaataaacaagtaaactttttgaacctgtattgggaaattttttacttttaatcacaacaaaatttgtaacttataaaatgaaaaagttaggactaattgtaaattatatcattcctgttgtgactaaaaaaattcatagctaagagtattagtcacaaaaattataatttattataactaaatgtatttctagtcacaatatatattgtgactaaaattaaattagtgataacttgtatttaaatactatgttttagtcacaaataactttttattgtaattaaaaattacatttagtcataaataaattatgttgtgactaaaaaaattatcactaaaaaataacatcttttgtagtgttggttcaatacattaaaaattaaaaaaaaaaaaaaagaaaaaagaaacgggccacattctttaactaaaataaattttaaaactgaaatatgaagaaatgatgacttgatatatcaattgtataatattgttcgaatatataagaaattgacaatagaatagacttaaaatttactttaatcgtttttctgttttcaaaagtggaaaagtgaaaatattttttaaaaacatatcctataaaattgtttttacttttctaattttataattagaa

SEQ ID NO: 316940 - DNA, 912 bp, Cannabis indica
ttagaatcccttaaaaaaggtacaatttataaataatattttaaatattatcatagagttatatattttacaaaatattaaaaaactccaattattttattgaaattgttattaattgcaataaaaaaaaataaaaaaagaatatgaaaaattgttattgaaccatagcatgtttttatactttttcatttttggcaaaacctaatcaaccatataggcatatagtacttttaatttcaaaacacacatttatacaaaagataatgtaataattaatgattaaactctaacacatatattcctggcctaaatattgtatctaatatatatgtaacttagactctaataaaccacaaagttacattgcccgtgtttctttaccaaaaataaaattgaatttgaaactcatcttgttgccgtggacgggcatgtatgtttttattttttaaaggttaattaagatttttttttaaactttaatatgtactaaattatattttttgaacttttctgactgttaaaatttttttctttaaggaattttttcctttaaggttaattatgtactaaaccatatactccctagactttgatatctatcaaatcatgcccttcgaaatttgacatatattaaatcatgctccctgaactttcatccatgttacttttttttttattattattaaaattagactaaagtccttaaatccaacaatcttaatagttcaagggtatttttaacaactttaaaaattcaagaaatacaatttggtacatatcaaagtttgagggacaaacatcctaattaaattttttaaaataattataggtgataaacccaatgtttatttttagcggcataagtaccccaaaattttaagtttgtaagcggcataaatccaatatttattt

SEQ ID NO: 316941 - DNA, 1121 bp, Cannabis indica
gataatttgtgtgtgtttgtgttcttgatttttttcgggtgagttgggttttggccgagagttaaagagagagactttctgggtttttcatgtttgattatcaggcagaaaaatttgtttttgggttattcttgtttcgggtagaacaagagagaagaagcaacaaaagaaaataagaacacctttagaaccctagaactcatattcagtagaagaagagaagaaacattagtaaaaactaaactccatatagaaccttagtgtttcggttgtagcaagaagagaaaaagattagaagaaaccctagttgtgattgtaaagaaaagaggaagaagagaaaggaaaattttgggaaaccttagattttaggtgcgactattctgagagagaaagaaaatttgaaaagttttgaatttgggataagtggttgccgtaggtattgactattaggtttagaagagataccttttatattttagggtttggtgatattagggtttgtattgttgagctttgggttgttttttctttgggtcgaaccacttgagtgagtgaagagagtgttgactctcttgttaggcttggtcttgttggatttgtcattgttgttggacctgaaagaaaagattgcaaattgtgaggtttttaataataccaattttattgtggatgcacaataaaagtaaaatttgaaaaatatcacttttgcactattgtattaattttgtgtctttgaagttgtgttgggataaaagctgtagattttgttaaaattccaacagtggtatcagagaaaattaatttctgcaaataatgattcaaattaatacattcaagaagcaagtctggaagatatcaaaaatcaagaataggaggaattcgattttcaagaacatgaagatggcaatcaagaggaagaattagatattggagatttagaggacattccgttaaatgatccaatcgaaatttttaaacctttaactgatttaattttttacaaatacaatatgagtagtcttaaaactgatattgataagtttgatggattaggtgactacagaatatagaggaggaagataagatctctactggcataacaaagttgttgagggtccttg

SEQ ID NO: 316942 - DNA, 1133 bp, Cannabis indica
atttttgttattttttacaaaaaatattgcgagacggtattttttactaattgtaatttcattttcacgcgtcccatatcccccaattcgaaaccctagcagacccattcccatttcgaaacccagtcacgccagccatcgtccgccacccactgtctgtccgttgcccaccgtccgtccccctcccttctctttgtctcagtacgcacctttgaaactcgctccctctctctctccactacaacaaaaaactgttatcagaagcgattttttttttgttccagattacctcttaattcattccagaagattatttggcgcaactagtcattccggataacccgtgcctgaaacttgatatcaggaacaaaatatagcgacatgcctgatgctaaaatatctgaaacgaaaataagttgttcctgacaagtaaaattcgttccaaaaaattaagagagcaactcgatttttacgtattattaggagcgattgttttgttatcaggaacaaaattgtcgttcctaaagtcatttttcaaaataattaaatttatttaaattaaattaaataatgaattttttttaatatcacattttttctattaaataatttctttaaaaattaaatatttatatttaatactaaaagagttcatacattgttttcatattcaaaagaatttatactaaaagagttcataaatgttcatactaacaaaagtaataaattaaaaatctaaaatgtggactcattatcatcaccaccattctcattccttcaatcaagtctgttgcgaaggtgtaggttgtactcagcatcatctgtggcatctattatatcggtattatcagcatcactttattgatataataaacttaatgaaactttattatatttaatacaacagcaaacataaaaaaaataaattcaaaaaaaaaataaaaataaattattacttaaagatataagaaatattcttctcatcccaaaataataaacaaatcatataaaagaaactatatatatatatatggaagaggttttaatggttacatttttattgtaattatcatggttacatttttttaagtccattggattactattgttgaccgagattttcggcaactatt

SEQ ID NO: 316943 - DNA, 869 bp, Cannabis indica
acaattatcatacagattgtgaatatcttataaataccatgccaaagcaagaattttaccaaagtaaaaattttcataaacacaaaaaacccaaataaaaatttactaaacaacattccctccaaccaatctagtcattactctctactatacagttgctactaactgccgccgccgtcgttgtaccaccaccaacttctccggcgccagcctcaacagctccacataactccaccctaatggctttcctagtcttcacccgtatccgcttagcccaacccaccaacgttccccaaatccacaatttgattcaccaaatggccatattcgagcgcctaactcacctcttcaatgcctaacccatcttctttgatttttttaagttaatgatattatcgaatcgggacagtcccgacccgaaacaaacataaccgggcggggcagggcagggcgaagacccgaatagagacttgattgtcccggggcagaattgccccatcgagtcggggcccccacccgatccgcgaaaaagcccctatttgccattcctactaaaaatacactacataaacattcaaacacacaatcacataaaaaatgcttacatcacttacactgaaaactcattccaactgtctactccttcggtttttggaaaaccaatgtaataaccttcactaatttaaaaagggtatcttacatgtatcaattcaaagtacaaactataaataatataagcttctacaaattacagtggaactttaccctgatcaaccaaattttcttgtttatgtacacaagatccctttacatccttgttaaaatcctcctctgtaaagtccttttttggcaagttaggtgacaaaata

SEQ ID NO: 316944 - DNA, 1190 bp, Cannabis indica
tccatacatccaacccaagcttcctttaaccaatgtcctgaaaaggacatagcacttatccaaggtgcaagtaaactatgttgtagattatcatatcatttaaccctgtgtactgataaatctaggaatacatttaatcacacaatcttgtttactttccactgtgttgacaacacaataaataagaatatcagtgtgataagggtttggatgaatttattaatcaaataagtaaatagatgatcacatgaaccaaataacacattaaaaaagtaatgaaattaaatctgtttatttattgatatgaatagaaaagattacattgaaattgagttttatttagggcacaaagcccaacacctatttcatcttcaatttcgtatagtccttcccaatttgggtcgagtactcccacccctggttcttgagaagcaggaaatattctcgttaagactagatctccaaatgcaaacttctgatctttgacttttgaattaaaatggtttgccactttcctctggtacactgccatgcgtatttgtgacgccttctagagttcttctacgagatccattgattcctgcaatagagcttggtttgtggatggatcataagtagttcttctatgggaggggattatattctccaaagggaccatagctttacatccgtacactattgaaaatggagaatgtccggtagttgttcgggttgtggtcttgtacgcccatagtacatgcggtagctcgttcgaccaattgtttttgcaagccaagagtttttttcttgagggtgacctttaatattttgttcacggcttctgcttggtcattcgccttaggtcttgcaactctagaaaaacttttaataactttgtatttctcgaaaaattctgtgaatgcttgacagtcaaattgtttgccattgtccgagactatcatatggggtagtccgtacctagggtcgaccctgagggtaggcgggttaggcgtgcgccttgggccctgaaattgtgaaaaaactattaatatatagataaagtattaaataagaagaaaatataataaaaattgtttggtgtggtggtaaaaggtcttactttaaagttaggtctgggatcaattcccaacctctactttttaatttttttaaaaaatatttaatgtctagttatgaaggattgaaccttg

SEQ ID NO: 316945 - DNA, 595 bp, Cannabis indica
ttgttataaaatctctaacaatttgtgtcctaaaaaatttaaatagattagtaatattatctattgaagaaaaaaatattaaataaacgttttttttttgaattaatattaaatgaactttactatgattattaaaaaacaattttgcatctaaaagggttgaaaaataattttttgataaatttatcttttggtggatttaaaatatgtttcttcatcgttcaatttcttactttttatttatatacttgtagtaaaaaaaaattgttgtaaaaagccttttattcaactagcctaagcccccaaatggctagatatgacccttaataggtatctcgtactaaattaaaagcttgttttatttatttattattaaaaaaaaaaaaaccacccatgctacaataatggatttcatgtttttattaaaaaaaatatcaatttttttcttttgaaagaaaggtttcattaaaaaactcaatcaaatagacacagataaatcagaaagagccattgaacactactacaaatataggctttagaggcgatttttaaggcctttcagagttggttttggcaaaattcgctatcgacgctg

SEQ ID NO: 316946 - DNA, 1421 bp, Cannabis indica
caatagtctttttagcagctaaggtatatcaacattatttcataatctctgcattgggagactactaagtaaggttcaatagattcaacattatcaaactatcattataatatttgcttatcttctgaaattataagaaaaagtagataaagctcactaaaataaaacccgagcttcttctcacccttattttttaattactcgaaccaaacatcacataaaaagaaaaaacaaagcatatcatcaaatatactaatgcaattctattaaattaaaaagacttgctttcagtggtaaaagcatatatgaaaagaaaaattgcagttcatatttctaagtatttaagaagatttaataatttggtgcagatatgtattcatgagttcgtaaaacaggtagacattgttgaaacttttcctatgaatattatgacatacttcatatcaagttcaaacaaagtttttcatgtggagttgcaatactgttttggagttctaatcccatttagaagacttgccatttctaaagaaacaaaagacaacgaaaatactattgagattaaatgctccttatatggacaattgaaaaaaaaaaaaagtttaagcatatgcatattaaaagagaataatatattagtaatttttttatagtttttaagttataagaatgcaaatgaaaaaaaaaatatggtagcttgatgaatgatagttatacttaattcctacactaactctttttgcaataattaattcttcattccatgcctttttgtaatcataaatatcataatcaaataatctctgtttatttcatagtgcaataaattttgtttcacatagcttggcaaaaaaaaaaaagagaacatggaaactatttttttttatcaaaagcttccataaatgtataaataataagaagagatgttgaagaaagaatctctaatacataaaattaggagaaaaatcctctgtttttccagtataacatcttcagtgtactcagattgtaatccaacatatttataaatcaataatgtatttacaattatttacgattaatctattaaaagtaaaattatttaatagcaaaacctaatataaaaaaaaaaagaaacagtaactgtatgtaaaagaggaagataaaaaaaatagatgtggtcatgataaatgtgatcaatcataaagctgcccccaacaattgcaaactttatgattgttgtagcattttcgctgtatcgagaaaaaatatactcccaagaaaagttgtgacgaatagaggttctacttgtatttacaaatataaagaaactagtaaacataaccgtgctttgtgcggttttgtaataaaataaatatagttttagagttttattttataaaaattatcagtgatcatctttattttgttaaatgttaatttta

SEQ ID NO: 316947 - DNA, 1373 bp, Cannabis indica
ctcttcgattatatatcacatattgacttattttctgaagtctagtgaatcgaagagaatgatagaaatcaatactgaaattgacagcataaaaatattagtcttttcctttccctttgattatatatcacatcaacttattttctgaagtttagtgaatcaaaggagattggaatgactatttgcagtaaacaaaaataaagagaaagaggaaagagaggtagatccatttatggatctttgcttacccttgtagagcttgaaaaatcacttggaataatgcagttttttttctcacttctctcagttttcttttctctctgtttctgctttttacgtatcaattgccaaagattattttttttcaaaaaaaccttttctccctttttttttttcaaccgttccccaccctctctctctttatatccaaattttttattatttttttttgttgataaagttcacttaatcgtgaaagtggtggaggtggagaaaatatctccttaattttctcttcttttttttttgactgactcattcctattataataataataataataattattgttattaaaattttatcgttcaacagatacaaaaggcaaaataaaggactcattttagcactctttttgtctccaaagagaattatacactaatacacaactctcaaaaactagacactgttttttccaattatcataaaataaatatacatataaattatcataaaataaatatacatataaatgatcataaaataaatatgaaactgaggttggcatgaccttagtgacttgtgagtgaagcaaactgtgacttataattatctcttttcaaatagcaaagagaagcaaaacaagataaataagatgatgttatgttaatgataaatgtataatcttaattataattttgaattattattaattaggatttagtgatttacatttataaactcgactaagtacaattttattagtatatttttacattctaattacaataagtttcttctcttgtttcttttttatgtgttcaatatcgttttttgtttataatttttccaatttttttcttctttagtatatgaaattactagtctcactctaaacttgattcccatcatgtcatgaaagaaaaaagaaaaaaaagtgaagatattagacccaaacaaattgatcagcacaccattttcatgtgtagttctaagcaattccattttgatttctgaagaaccaaacacataataatcactttgtttgtgtaataaattttagggtgattctataatggaccccttaaaagggatgtattgatgcacccttaacttgtttcggcatccagaaaaaatttttaagtctaatttt

SEQ ID NO: 316948 - DNA, 1464 bp, Cannabis indica
acttgaagattcaagccaagctgtttcgcgcaaataatggtgtctaccctcaataacctcttgtaataatcgcctataactgttagaagcttccctctgatcagatctaataaggtggttccaaatttttgcatcgttaattttaagtatgatttgaggtttttgggtttggggtttaaaatctatggctagaaattgagaacaactcaattctaaggattctaggggtgtaaattctggactaaattgggacatgatcacagtgattaatgcctcaattcctggaaaaataaagcataaacaacccaaaatttgtgaatcacataaccttaaaatttctagccctagtttactcgaacattcatacaaagttcacccaaaacaataaataatgcaaaccaaaacacatacaaagaaattaagatcaaaaattaagaaaaatcaacaaaagagcatgttacttactagtttgatgagagattctaggtaatgacaaactttgggatggaatctccgatttgaaagggtcctgatgatcttgaagctggcgaatatagtcaaatgaaattcaaagaaaaaaggtgaaagacagtgagggcatgcaaaggaggagttggttgagagattcacgaaattggaaaggttcgtgggtagcaatggcaaaaataaatgagagtttgaaatttatacctaaatgatagtaaccgttcgaaaagaaaattgatcaaacgaatgggaactgtgtgagaaaagaacagttggagcattaaatgaagaaataatttgccttgaagttttgaatcgccaaaataaaagcatgtaaattttaaatgagaaaaatacaatggtacccttgaagacatttaaaaagttcttttttattagaaagtactttttagggggaaattgttataccagagaaagaatatgaatcagcttaagaattgcagcattaaatgcacattaaataacttgtctcgaatatacggctaataaaaatattcaaactcgctaccacataagtagaagcaagataagaataataactgttaacgagtaagattagcgaaacaataagtccatctcgggatgaactgaatacataattgttgcccctgattttgcccaatatacgtggaccaaccagtcaaggacacgtggatcgaacaagcttaacattcaaattatttgctaagtctttatgtaataaggcagcatctgggacatgcctcccggagaagacataaggaaccccatacgctcccgaaagccgaagtaatactaaggcatctccgcgaggtgtcaggcttcccctgagcaatcaagtcgcatttaatgccgcatgggaggaaacgtgttgggactactactgtaaagaccgcttagtttaatttggaaattagcagttaaccacgtttaattatgaaattatttatagctatttaaataatttattatgctgtt

SEQ ID NO: 316949 - DNA, 503 bp, Cannabis indica
aaaaaaaaaaaaatcaatctgcaatacggcaaagcttttaaaactcaaattattatagaactttaaaattgatattaattaaaatttgaacttagccataaaaataaataagtaagccttagtaagttgaaaataataaattttttctatatattttgaaaaataaattagttacgttatatttttatgattaaatattaataatttaattagattataattaaattcagggccctgaggtgagataaaggaggcggccgccttaagcctctcaccgctcaggctctcatttcgaaaaaaaaaaattaaaatatagttagtaacaaaataaaaaataatacttttaatattaaatatgtattgtaacttagtggtaatttgatcagccgaccctcactaaattaacaggttacttatatatttaatattttatgatagggccactatttttgttcttacaaatatataggcgttcgtatttttttttatattatatataataa

SEQ ID NO: 316950 - DNA, 605 bp, Cannabis indica
gagtatggatggtgaagttagaaaaaaaaatggagaaagatattataggtattaatatacagtgtgtctatttttttaattttggtaaacttgtgtttaaaaattttaatatgcaccaaatgtatgcatacagggcattacgtatgttcataaaatactcaattcagtggctaccaacaacccacaacatgtcatccagaggaatatagggcattaggtatgttcataaaatactcaatccaatccaatcttcacaatctaatccaattcaaactgcataaatgcggatatgtgtggaaattcttataaatacgaattggattggattagaaaatttaaaattcggttgattgacatataaaagtaactaatacaattcaatttaatctaatacatatgatacttacaaaagtaacatatacatataaaagtaaccgatattttaaaatttaatagttaaatgtatatttcatttgtatatgtaaggaaaatataatttaaaataaaatttaacatttctttttacctacaatttttttcttcttttaaatttgttattttattttgttattagagacataaaataacaataatttattttattt

SEQ ID NO: 316951 - DNA, 1500 bp, Cannabis indica
gccaaaattaggctcaggctcaatatcacatgtgatgtttccaaagaatgctcaaatacgattgggttggactatttgactaattatgatggtacggtcacaacaccaagcccaacaggcccaaaacaaaatagtcaagtcagacattaacattatccatgacccgtcattgagctcacaatgatccgacccgtatacgagaccgagtcttatcactcatccaacaatctttgaagtggtcagttaattgaccatgtaaataacgatgtaataccctagagttatgaaatggattagcaaaatcctaactagatagttatgtgagaaattatatcattatatagttcaatatatgagaattaatatgatttatgacatgttaagaccccattggtgagccaggggtattttagtaattttgactcgagaagggtaaaataatgaaattaatttactaacgtgcttatgggactatattattatatagtatgcctgtattatctttttcaagtgtgttctaacaggttggcgtggtatagtcacaaccgggtatttcaggccgaactggattcgggcccggaatgcaatttggattgaaattattgacattatatttatgtgtgaataatctgaaattaattgggttttaattgtgcatgaaatgtaatttttttctcatgtatgctatagtgaatgttatatggccctaagggcatcttagtaatttggcttatgtgagttaagtgttgtaaaatagaatttttggcaaaataaaatagaattttctgacctttgtctcctccttacccgacccctctctctctcaaaccctctttgattttcaaagttgaaattggtaaagaattaacttgatttggagcttggaatttgtggatttttgagcttgaaattgaaggaagttctagctatatttgaggtagcttttacagattttaactttgtccttcttgctgaatttttttgatgatagagcatgaaattggttgttgatgatgttgtgttgcatgtggatgttctctagttggtatgagcatatgtatactttgatcttgtggtttttgtgtgagctatgtattgtttgagccttgaatgaattctagggtttttcttatgtcttgaattcagtttattggtagagtttgcagctggaaattatatggttgattaggttgaggttcatgtttatgagcttgagctttgttaagttaaagcatgatttttgtgttatttgggcaatctaaaattgagggtttattgctggaaattgatgcatgaattatgtgtttttgaccctttaataattgtttgcaacttgatttagtgttttgagagtttggatgttaattggggtgatttgattgagttttgttgctgaaattcgtgattttagctgctggtttcaaggtttgaaacccaggttccgcagcatggtctgagcatgtcgcggcccgcccccttgaatggaacctgggagttggt

SEQ ID NO: 316952 - DNA, 1692 bp, Cannabis indica
ttaagttttgtatagatttgatatattttctgtagttttgcagttttaagctataaagatgataatatttggtgcacaaaaataataattgagatatatgtagaagtcgggaagcaaaacgtggttgaaagaagctgaaatgaaaaaatattgatccaagcgacttgttgcctgggtaataggtgataggtcgcctaacttacaagacttgattattttggcacgtgcagattaaaaaaaaataagcaatcccaaaaatatgattcaggcgacatgttgtcacttttacgaaatggactaatttttgcacgtggcagataaaaaaaatagggcgtcccgaagataaggtccgggcgacatgttgcctgtccttaggcgacatatcgcttgacgcaattttcaaatttaaatcctaattcaaaatggcatattttctatctttttgggcctatataaagaatgatgtagataacctttggacgactggagagatataaaaagaaacctagagatcagaaaacatattgaagagtaagagaaagagattttaagtttaagcatcagcaactttcattagagtcattttcttcttcttcttcttctttatttttttatttagttctttaattatgaatatgattatcgtggttattatgtttgtcattatgatttaaacactgtttctagagtgttaatgagactgttttagattatgaattaaagagtttagattattctcatattcttgttatttgtttatgcaattttgtgttaattatcattttattagtgctttgtcaccattaattagtatagagattttaggtttaacacttgggagaggtaatctaaaatcagacttagaattgcataatatatgaaaagtatgagattgaaagatttcactaattctatgagttttaaagagaattatattgcttgattgattaatactgaatagaaatattgtgttagttaattaagttaattttatcatcactagagaagagttaatatattacattaggattctttaaactacaaattatacaatgaattaggataattggtaaactgaggttcatagtttaaaattataaaaatcaatgctgtgagcctttatttttgattaaaatcattatttgtctatttatttttcaattattctgttcttaattattatttacttttaattgttttattaaagcataaaataaaataaaaaaaagaagtataataattagtaaaatttaataatcaatccacgtgggtttgacaacttttttttatcaaaactttgctataataatattatatacgcttgcagaaaaaattatgtatcaagtttttggcgtcgttacaagtgattgaaatttaaaattataaattagatatatttgttttacttaatggattatcattggcttgattcaaccatccgccaagaagaattataaattattataccgaatgagaggagagattttgaggatgaataaaaagatgacttcgtgcatgaagagtcacgtgaagtttatgtggaagagaatgtgacactcatatgtgatgaaacacaagatcctattgattttttcattgtagtagaaaagagattgaggtagatgtgaaattttcttcatttattgatatattatttttttttttgataaatcaggacattatattgcacaa

SEQ ID NO: 316953 - DNA, 1077 bp, Cannabis indica
aaaattaacaaaaaaaaaaaaaaaaaaggtggcatcgggccaccatcgaacacccatcggaccaccatcactatggatggaaatagtgagtatggatggtgaggttagaagagaagagacgggagaagggtattatgagtattaatataaagtgtgcatatttttttaattttggtaagcttttgttcaaaaatttaatatcaaccaattgtatgcatataaattcaaattttccaataatttaatgaaatatagcgacataattgttgtctctagtacaagtttcttattaggcttcgacacataattaagcattgttatgggataccaaaatacttatagagccgaccctatgccgatcgggccttaggcaaaaataaaaaatggggcctaagtggaaaagtgaagttgtcgaggtttgagcggtggggggcctaaggcagctgcctccttcgtctcacctcaggaccgaccctggatacttatgatcagttttttataatctttattaaattagtaaaataagtgggatctgatattgaattgtacgaataacgatgttacacatcacaagagtactagacaccataagtatttttttttaatatttctctaaataattttatacgacggtataattatattaaatatggtacaaatttttaagaaattttgaagttgcgagtgtatcagccacgaacacagcatgttttccgattttcaacatatgcatatgtataatctcaattttgttgtagtgaatattcaacacttgatgataatcgtcgagacatgtacattattagggcatgcggcgagtcgcgcaagggtgtagttctaagcattctcttccatatgtacactcctcacgtccaagaacaatttattcaactcgtcacaacatcttgaaacaaaattaattaacattttgatttatcagtaattaaattacatttaaggtgcgtttggaagtaactgtgtaattactaggtagggtaattactagggtagtaattacacattgcagtaattacactatattttaaaatgcaaaatgtgtttggatatgaagtggta

SEQ ID NO: 316954 - DNA, 1319 bp, Cannabis indica
ctcagatttggtcaactgacagtagagtcatatttattacagatgcttaacacgtgtacactataagagcagaatagtagaataaacacaatatttgtatagaggttcggctcccttagctagcgggtaatgacctctcctcttttggttgtattaatactagagataataccaattagatcacaagggttgtggaatctgaagtggctctcgtaggattataatatgagaatcaagttggtaaatctcaagtgagaatgaagccttgggtgtgtgagagggaaagggaagagagagttagggtttcaaactttagtgagcttagaggcttaggacttagagaactagggttatgctaatgctcttacatgaagataacaacctaaaattcctaaaaaataggaattataaagtattatttatgtaattaaataataattggttaaagggttaattattccccaagaataggggagtagctgatatttctcccctatttttatgggttgttgaagcccaaatcgcaacttagcttgctatcccagatgaaggatgcacgtcaagtgcctgccaactgtaggctggccggccaagtacctgccaggtgcaggctagctggccaagtacctgctaggtgcaggctgactggccctacaatagctgaagggtggcctgcctatgttggccaccccaactctcttagggtggctagttcgtcttctcttcgtccctcttaggtactcaaactttccgtcagctgaagtgttgtctagatgacttggtcttcttgttaacaagttgtactccacgtgacattgatcttgtccacatagacataccttgtcatgtggataaaaatcgggataacaatagacattaaaaaaagagaagattttgatagattattttcttatatattattgttcaaaaagtcttatatattatattatcctaagttttaattttttcatttaatatatagaatatataaaattaattgaattttttatataattaaattagtattaatgatcaattttttttttccaaaattaccttcaattactgaaattttaaatttagtagattttatttattttattttattataaaacctttttatattaaaattagaaaagttttttttaattttaattagactttaggtggtcaacaattataattttatctatcttatttaattttgtttaaatatttttgatgcccacatttaaattttatatgcatttccaattaatcttggaaacattatttcatcatttatgttaatcatcttttattttaaaatctaattaatt

SEQ ID NO: 316955 - DNA, 1726 bp, Cannabis indica
gaagctcaacccttcacaatatgaagtaaagagtcttttttgttgagaaaagaattcgaaaatctcgagtgaggttttggtttcaagattaaaatttactaatgacacatggagacatttttcatcagaaattttagaattttgattgattatgacactacttgatcctgccaccttaattgcaagatcatgcataaggtcatgcattttgcatgtccttatataacctaatttatcagtccttggctcttggaaaaaggatctccaaagtagatttataaaatactcataaccaatttcttctagacattggcctttgtcatcagagtattttataaatccttgtgccatccatagttgtatcaactctatcacatcaatttcatgatcttttgggaacaatctacagtaagcaaaacaatgcttcaaatgtgacggaagatgattataacttagcttgagggtgggcatgatatcgttttcatattgatctattttagcaaactcagtatttaaaaaccttgacaactccttttgtgggtctccagactgccataacctttcctgcaataatcttcctatagttcttatggccaaaggaactcccttacatttttcaacaacctccatccctagctccatttcttttgagccctccaccggctcttgagctttcttaaatgccattcttttaaataataaccaagacatgtctatgctcaaaccctttacttcaattggctcaactgtactctgagttatcctagcaaccttaatactacgagtggttactaagactctactaccctttcctccacactttagcaacatctctaacctatgccatacttcagcatcctcattccatacatcatccaacacaaggaggtatttttttccacttatcttacttctaagttccttttgcaaattttcaagattgttagaagtattagaattcacaattttcccaacaagtaatttcacatcaaaatcatccgaaacacacacccacatttttagttcaaaatgtttttcaactgtttcatcattaaaaacacattgagctagtgtggtttttcctaaccctccaatacctactattggaatgaatgacacatcctccccaaaatctttttccaccaacatttgaataatctccttcttttcatcctctctcccaataacttcctcttcactcacataggagtaggtctccctcatactacttccactaccaactatcgtttctattggacgaacatctaaatgaaaactcctattgactcttagatcttctagttgttttcttatatctttaatctgatgtcccatcttaagacgaaaaagtagctgattagagctggaagagaaaatacgtacctgtctggtaaacttattcccagacatcatgactctacgctgaagaattttggtgtgaaacttgtccaccaagtcatcagcaaccaagaaagcatctccaagctgtttgagccaagctttgacactttcgtcaacagccatcttctcttctgcatcaacaagtacacctttgactgcttcagtggtgacaacaagttttcgaaactcatccttcacaccataaagcaatccgatctcttccaatgctgctgaaaccagcatctctgcaagacttccagcaaggttgattaaaactccttcggccattttcactaaaaaaagtatgagaaaggaaggttaatag

SEQ ID NO: 316956 - DNA, 837 bp, Cannabis indica
aggaaacattggaacacttatttatcacatgtaattgaacttttcatttgtggaaagcgtccctgtggaggatctttccaagatctgattctggtattcgtctgtgggactgggtcaagttcatttgggggcgtagaaaaccaagcattaatatagatgaagtttttctttatgctttgattgtggtcgacaccatttggcggacacagaatgataaggtacacaatagaagtctgtccaatatttttcattgcgttgactatatttgtaactcttatgcagattacaacgcttctcttattcccgctccttcctcgtgtttggatgtttgttggaacctctccctcttgggtggggtaaaactaaactgtgatgttaaagtaggaatgtatagcatgtgtttagttgttgtggcaagaaactatatgggagtggtgtgtggggctcatccgtctagattggagttctctgatgcgttttgtggtgaagtggctgcttgttgtgtagcgctggaagttgctaaagaggaaggttggacgtttattattatagagagtgattctagaatggttatcaactcgctcaacatcgagactttcgctgggaaattgagaactactctaaattttatttaagactctctcgattttttgatagttgtaatttttatttcgtaagcataaattgtaattttatgacctataatgtggccaagtggatgttcactaacaaccgatatggtaggtcgattgtttcttctatggcgaacaatattttatgtaatgactatgaagtctaatttctatccatgcacgttttattttttttttaaaaaaa

SEQ ID NO: 316957 - DNA, 983 bp, Cannabis indica
gtatctaacaatgtttttttgtgttttatttaaattgtgccgactattaaaagattaataaaagagattattacattgaattttttacttatctattttatttatttatttgtaacaagacttaactagtgttgaggtacaatgatgattatttagaggctaagatgtaggtataattattataaaatatttaatatgatataagtcagatcattgatatcatcactctttttatcgtgatcatgaatgcaatataagtaaaataatattatttttaagtataaatattttttaaaaaaatatatgtattttttaaaatcaacttatcaatccacttaacttttaataaaattatttgcttaattttttttaaaaaaattgttttgttttttctttctataataagtgtttgattgtataaaaaaaagtatttataaatgtatttattatttcactttgacattatttcaaaatttgagtttttttttttttctaaaaaaaaaataacaaacccatcatgcctcactcacatttctatgtcttctctctcaaatttgataaatgcacttgaagaaacaaaatgcacaaattatttaccagcccagcaaaaataattaaaatgatgagtggaattcttatttgaatatccaagaattaccatgactaaaatcagactcttatggaaaaaaaaaaaaaatcagattttctcaaattattgtaacataacttagatttaaaaatttactatagtgaaattgatcacatcttaatactcgacaacaattactcaaaattggatttttttttcttttcaaagtataaatgtcacatggaacaagaaaattcttaaaacttttactattttttatgtttaacatctaaatgagtaaggaaaataaccatactagtgttggacaccacaacacgtgaaaaacgtaattactttaattattgaaaaagtaattacaccaagacttaaacac

SEQ ID NO: 316958 - DNA, 732 bp, Cannabis indica
taactaactggacacttgctttgatataaaggagcgatccaccatggaataggacactacgaaaactcttgcaacagtggaccaagtagaccgtgatctgactgaaccactatactcctttgtcttcttgttatttccagttttttgctaagtacttacgttcccaatttgagtactcgccgttttaggttgaatactcgcaggttgtgcttcgtgtaatttcttcttaataataatattattattcatttttggtgttgcgaatttcgctcgacaacacctagacatgctgatgtttagaaacttttgttaatttttcatgattttattttgcaaaatattttcttgttcttgtatggcctagaggccttttacattcgaaaaatatttatatattgccttaaggcctttttattttggatagatgaacgatcaagcagtctttaatcctcctggctttacctttttatgctagacatataagtgttcagacttactttttcatatttaatttaaagtatgccttttgtacttacttagctttaaattttttgcatatcaaagctttaaatttgcttaagtttagctattcttgtttgatgcttgtacggtgtaatgaccgctttagtaatttggattagtaaagacaattagcactaatttctgttattttgtaattatttatgaatttatttaattgtggaccccaatatttagaaataaatgttagag

SEQ ID NO: 316959 - DNA, 791 bp, Cannabis indica
cactacgtggcttggcacgtaacaatcacctagtatatatatatatatttatatataacaaatagtgacttgtaatcatcaatatgcattcaaagtgaatatactataaaaatttatagagataattgtgctagcttcatgaaacatgaaacatgagaatattttttaggttcttatttagtagaacaatatggagatataaatacaaataataaaatatagtgataataaaggataacaataaagatgatgagaaatacattgagccgatccacgaaacaaaattgaaaaagaaaagaaagatattgtttagacctctcgtttaggggagcagatggtatagcagtaacattgggagaggatgggcatgagtggcgtctacacttcaggtgtagtcaacgaatcagatatgatggatataaatagatgtggcttaaggttataatataggtagggaaaaagagaagaattagcaaattgttagtcgatatttttgtttttctaaaaaaagctaaaatttgattttgaaagtataatcaacataacttgatatgagaattaaaaaaatgatacttgatttaccgttttaacaaatgagaatgtgttgatatatagatttttttaaaaaagttttttattagttattgaattaattaatattttatatgattaaaaatgtgaaaaaaggagaaaaatttagagtaaaataaaactattttagagtgccactacatcaccgcctcatacttctcatttatatactaggtgattgttacgtgccaagccacgta

SEQ ID NO: 316960 - DNA, 2155 bp, Cannabis indica
ttttgagcacacgatcaatgtaaaccttttgagataagtcaagaacttttcaattcctgtcacgatgaatctcaatccccaaaacaaaagatgtctctgcaaaatccttcatatgaaagttggtagatagaataattttggtctcatttagtattgacaaatcactgttggcaagtaaaatatcatccatataaataacaagaaatatataatgaatcccaatgatcttaattgtttgttatgaaatcaaacattgtcagaatttcatcaaactttaagtatcattggatcatttcaatttgcaaccaaatttttatttctatttttttgaatccttcaagttgagacatataaaccttctctctcaattctccatttaaaaaagtagtgttaacccgaaaactttccctagtgatgtggacctcgatgtttgacatgtggcatgaaggatggcgtcacagagttgagtagacctgagtcataacaaccgacttgggaggggaccctagccctgcgcccaggttgacttcaggatctccaagatggaagtttgaacttcaataacttgaatccaatccactatctttcagtatttttgtatcatgaagacatggataaatctaatccaagaaccaatagctgaaattacaagaacctgcaatccggaagccaacctgatcacctagagttttcacctgaggcccgagttgacaacctcaactagggtttcaactagacataccacgaacatatttgaggcatcagttagaattttagcaagttgatttttgagcacttagggccctgggaccccgagcatccaacgcccaagttgacaatctggcaatttgggtgccttccaagtgtccgatcagagttccaaattttgcatcttcttcgtcttcatcaaaaattgagaaataggtccttttggagaaaaacataattctaggatgcaaatataagggcccagcacccaggttaacacctggggctagccttgtgcgcaggctgacattttgtcaacctgggccatttaaaatggaatttttcaagaattatttcaagcatcttctcctttctcaaaaaatattgagatccaactattttcgggcaccaaacagaatttttgaagggccaaaaggaggactcagcgcccaggttgacatattgtcaacttgggctatttccgatcaagttcagcaaaaagtgttgcagtcattttttccataaaaaataatgaagattcaagcaagctggaggggagaaccacaatctcgagtccttagaaatagggcccaacgcgaaggttggcctagggctgggctcagcgcccaggttgacaatcaacctgggacattgccttcaattgctcaaaggtcatatttgatgcgattattgaatttgaaatagtcaaaatggggtaagagaccttgtcctcaagttcaaacaccatggaagtatcaaaaataaaatctggggagcttgggagtaagtaccaagcacctaggttgacaaaaggcctggtgcgctgggttcttcttattcaaatttgatgttgtttcgatcgtccgtctagttttttacaatgacaaagatctatgaagtcagagaaatcaaatccataacttttcatttctcatttctagctcaccctgaaatgaagagttttgagtgtctcttttctgcaaaaacaacaacatctctaagaaccgatgaccagctttgccaaaacacataaatagactaagtgatgtcaaagtatcacttaggcatcctaaagtacatcccttggacatttttacacttacccagcatcctagttgacatcatatgtcaatatgggcattgggatgtcaatctgggcgctgggatgtcaacttgggcgctggatgtcaatttggacgatgggtcatgagctgttttttgtaaaatagccataactcactgaatttttatctaattgaggtgattcaacttgtacttcgaagctaattcaatgctctatcaattcatgtctcacactccagacgtaattctaaagctatcaccgtcaaaattcacccccaagggagctataaaaataagctccgagttacctataacaggaccgtcgggctccaaaatatggtcatcaccaccaagagctaatttt

SEQ ID NO: 316961 - DNA, 1054 bp, Cannabis indica
gggctaaggcaaaggaaaaggtggtaagttaggttagacttgtccctctttataaaacactgaatagttccatcccgagaccctggctgaaaatgagaaatgataaagtcgtgttagttgtcattcagaaatattagagcatcaccaagcaatgaataggtcatgcatgtgagcatacatttaatttgagcagataatcactaaaatacaaaaaagaaaatgaccaatttactttacccgatagcccaagtatatgtatatgagattgtggtaaatacatattggtgactctcacctgctttaaggagactgggaatgtaatcttgccagaaaattcaggacatttaacaatttctttgcaaatttccctccatgacctgcaaacaccagaacatgcgacaacattcttcctagcaggccatgtactttcacttgcctctaatcttttgatcacatcacgtaatagttcgggtggaagactagcccaccggctgttctgaataatcagaggctgctcatgcaattcatggactgaaccatgtgatttccccctactatggccaggcaatcttacctcaaaacttcgtcttgacagactgccaaaaccatcccgaacatcacgaacaatgctgcgaaacgacatctactccacaaacgctagttgtcccagatgttagatattgatgtaccttcactagagtttcataaattgtattccactattcaaaaagtgaccagcgaccattaagcactgttcatctgcaaaaaacaaataaatgttcaaaattccattttaaacatttgataatcaagcaagtaaaagacacataagaagaaaaatgacgaaaagcacagacaagaaaaagagattctcagaaatgaaagcttctcacatggagctaaagtagtcttaagctctacactttagtcagaaacatctttaaatggattctacaaccttctttttttttttctttttcagaatctaaattgtccatttttaatagaacctttaagcgaaacacaagagagagagggagggagagagagagag

SEQ ID NO: 316962 - DNA, 1009 bp, Cannabis indica
tgtttttttttttttggctaattttctgatttgatatttttttttaggggtggaattttctaattagttttatttttctagaaattcaatgttgtaatagcctaatagggtgatggaaagtcttgtatgtaaagaatttagcacttgtctttccttggcttgctattattatgcaaagtccccatctaatctaaaaacgtgactctttgattactaatacatattcttcttgcatatatattttttttaattactaattataagaataaaataccaatgaaatctaaacaactgggacattcactgtattggacactaatctagctattgtcagctcatgaatttacatttaaaaaataaaaaatccaatggaggactgttcaatgttgtacagcaaattatatttacagaaacaaaaattatttaaaatattagattctgaatagaagtatttccaaatgggtttctttattataaaatttattgtatttaccttagtcttgttcttggaatttcgctctagtatattgtgtgtgtgtgtgtgtataacaaacagtactgaaaatttgaccaattttcagtctggtgtctgtggcaggctgcttcatcagttagtggcaggctactaagcttaaaagcagatttgatctgagattccattttgactatatgtaaaattatcatattaaagctgattcgagagttgagacattgactcttgaaccatatagccatattcttcatttgtgtgttaatttttcttatcagatctataatgtttctaagtgtgatcatgtgtgtgtgtgtgttttggtatccatagatatagatataaactttcatcatcaatagagaagcaaaagaagaacatcatatcaataataaaatttaaagcagaaaaagacctctaaaaagctttgaacaaagtccatcaagaaacaattataataaagtaggatttaattttttttttttttttttgaataaataaagtaggataatttaattt

SEQ ID NO: 316963 - DNA, 1170 bp, Cannabis indica
tttaaaaatccactgttgtatttaaattatttttttttatcttttcaaattatgcatgaaaatagtatttttgtaaaataaggcaaaatatcggggcgttacagacacgggccgtgatcatacattaggaggagcaaggcaattttgtttttctttttataattcttttaagttataagtagtataggtttatggtattggtaactggtaactggtaactggtaactggtaaggtatacaaaaactgtagacagactcgtgtatgcctggaaagtgcttttattacaactaccaacttattagaggcaccacatgattcacttggtgatcaaaggccttgatagaatgattttttttttttactttatcaaaatttaatttgaattactagttatgaaatgtttttttttaaaaatctatttacacttcctacccaacatacacattttcatttcaccataatggatgaacataaacacaccaataccccacttggagaaccaatatgatcaattataagaaaaaatatttgtacacatttatacataaatataatatttacaattgagtttgctcatactcaaatccagtacctctttaaaatgtggtgtgttattagttgttattgaggtgatttaagctctaattccatatttccctcttcatgataagctcatttggaaagcttccaagaatagtgggttctcaatcaagtctgcatattggatgcttaatcaatgtagaattgcttcctcattctaccaactatctagtagtattgatcaaaagagacctagtgatcattacaaattacaatttatgtgattgaattaacatcaatgaacccaaaatatccagagttagagcccagtgaacagggccggccaaagggtagggcagccggggcctcggccccaggccccacaattttagaaggccccgaaaaaattaaaaattgatatatatacatataaaaataaaaaaacatataatatattaatacttaactcaataagttacatgaaaaatgtatggcataattggtaatcggggcttgtgttggcattggaggttgtgggttcgatccctacttcagtcattttttagactacttatttgttaaatgtacataaataaataacgtataaaaaatatatttgaagtaattta

SEQ ID NO: 316964 - DNA, 757 bp, Cannabis indica
tttttaatttataaatattaataccggcggaaattgattgtggtccgccggtattaatgcatctgcgtggaaaagtgcagatattaataccggcggaccccaccgctattaatccgccggtattaatattattaccggcggaataccattttcgtcgctaatagtaacttatagcgaccaattaataccgacggataattaccggcggaatccgccggtattaattaatgccggcggtctcctctattattaccggcgggtggctccgccggtaataccaatatttgttgtatagagacatttacttattattaaatagaatagaaaaaatataacaacatatttcaaattttaaataaagcatcttatcttcctaataaatttaactactcttaaagaataaagagtaagactttcttattaattgattaaaatatataaactaaaaataattagatacaacattaatcaaaataaattcatactactaaaacataaataaaacataaatatgaagattagttttacattaaatttagttaaatggctctccaaatcaaatattaaaaatgatttttagggtaaattttaacaagtttttttttttcttattcttacacttgttagtattttcttaaaattttaccctacatatatcgaaaaatcataaaatttcacattgagaaaatggacctatttgtactctttgaatgtaaatttttattttgacaaaaaatcaattcagggtcctatttgt

SEQ ID NO: 316965 - DNA, 561 bp, Cannabis indica
aaaggtgctttcccttttagatcaaaattagagagagaaggagaataataaagagcaaaacaagatacatcaaagttgagagaaagaacataattgtaatcttggcttgagaaataagattgattgagcaatccattgtggcgagctcgacagaggatgtatcgtaaaaaatttgggcgagcatttataatttgtttattatcctttgattccctctctgttcttgatttaattattatttgtggtgaatcacaattcacctcattcaagaacatacacaacaaagaacatcaacataaaccagtactaaaaatgtaagttaaaaactagcactgaataattaacaagcatgaactaaaactgaactttaaatggtaatatgcagaaagtaatggacacctttctttaacgaggttcaaacaccaagtcaatgtaacttgtgcctacatccccgagaaacaaataactcttgaatatttattaatttttgcaatggtgatgacagattgatgactaaacaccaagagagatcgaattacaaagaagaattgctcttgaaca

SEQ ID NO: 316966 - DNA, 1252 bp, Cannabis indica
ttgtacgataacgtcaactcggccaaagcctcgagacaagtcaacttggccaaagcctacgtgaaaagtcacccagtcaagcctcgtgaaaagtcactctgccaaaccttgtgacagtcactcggccaagccttgtgaaagtgactcggccaagcctcgtgaaaagtgaatcagccaagccttgtgaaaagtcacttggccaagcctcgtgacgagtcactcgaccaagcctcgagacaagtcactcaagaagccttgtcaaaagtcactaggccaagcctcatgaaaattcactcaaccaagcctcctgaaatgtcaacttggctaatccttgtgaaaagtcacacggccaagcctcgtgacgagtcactcggccaagccttgtgaaaagtttgtcagccaaggctcatgaaaagtcactcaaccaagccttgagacaaataactcgaccaagcctcatgaaaattcactcgaccaagcctcatggcgactcactcggccaagcctcatgacaagtaactaagcaaagcctcaagataagtaactcggtcaggccttgtgaaaattcacttggctaaggctcgtgacgagtctcttggccaagcctcgttaggagtcactcggccaagcctcctgacaagtcactcaaccaagcctcatgacaagtcacttgaccaagccttatgacaattaactcgaccaagcctcatgacaagttacttggataagtgttgtcaaaagtcaattggctaagcctcgtgacaagtcagttaaccaagccttatgaaaagtcactcggccaagcctcatgacaagtcacttggccaagcatcaagacaagtcactcggccaagccttgtgaaaagtcacttggccaagcttcgtgaaaagtcatttggcctccaagagtggcaatatcatccaacaaaaaaaagaaaaaaaaatgatgttaacaataagaagaaaaacaacaaaaaggaatgacttgaaggggagtcaaacgtaggacctcttggaaaggaagctagtaaattttaactacgtcaaggatgaagtaagtgaaggtgaatgagaagaatcctcctatatatagcaagttgtatctgttggaaatctttttaccaggatctagatttactaccaagtatgtttgattaacatcctaatatgaattctaaaacaatgaaataaacacataagagtttaagaaaaccttacactgggtgcagcggaatataatgactccttttgt

SEQ ID NO: 316967 - DNA, 848 bp, Cannabis indica
agtaattttaggataggtgacctatggaagttttcccaagaagcatgcgagtgaggacaaagcatgctaaaaatactcgtgttggtctgtagggtcagtcatcattccatgaagcagccagagtgatgtactcgtgtataagagccatgattccgtgggtgtaagggcccaatagaggcttgaagcgggaacgttccaactgccatcaacattgaatttgattttgtaaacccacttacacccgattgcatgtcgatgagcaggaagagaaacaatgacccaagtgtcattcgcttccagagctatgatttcattatccatggcatcccattcatgccatgagcttgatcataggaagaaggtttagtaagcctggaaatggataaaacaagagctcaatatgttggagagagccgagagtcatcaatgaccttggagaggggatacaaagctccctgatcaagatcttgagaaaaaacagcattagtgcaattagtcaaaaaataatgataatcattcaagtaggaaggcttatgaatgtttcgaataggtcttgtagtagagtatggggcatgatttgtaggagcattttgaggctgggatatgggaagatgagggatgacagaactgggagaaataacagttggtgtaaaaccagtaggaatctggtttgtggttggaattttcggtgtgatgggggaagaagtagcaactggtgtaaaaccaataggaagctggaaaaaactgtcataatcaacaggtggagaagtattaaggaaaggaaaaatacgctcatgaaattgaacatctctactacaaaaaaactctattagtattgagatcaagaa

SEQ ID NO: 316968 - DNA, 948 bp, Cannabis indica
tattctcttactcaaaagtggaaagattggactaatatataagttgtaacttgcaccagaaaaaataggtacaatactaactacctaactaacataacagaaagttagttaagttagttggtgtatatgttagtttagaggatcaacttccacatattcggttatatctatgtattatgtatgtatctattgttttaatttaaattaaattagacttgatatttattgaataggatcaaatctattcaatattttacctctcatatttattaaatttttgaataccccatccaacatccaatccgattcaattagatattcaaaaataaaatttaatctgatccgatcataattagatttttaatgtttgacaatcaattgtaattagataagttaattgtgatggatcgatttattatatttatcctaaaaaaaattgaatttaaaaatagaaaccaatttattataatttaatgagattgctaaatgtagaaagccacacataaaacagtctcttacaataaataccttatagcaacacactctaatttattaatagtatttcctgccaatttttttaaagtttgataaattatttgtattatttattgaataatcaacaaattagttaaatattattttttaacccaattttaaaaattatatttatttttatatttacttttacttctttaattaatattttagggagccttataaaattaacatgaaaacatcatcaacccaacaagaaaataataaaaaaataattaactagttttattttgggcctcccaaattaatgggcatgggccttggttcggttgccctccccttgggttgggctagcgttaaatcaaaactcttacgatctacaaaggattaattgtaaaattaataatttacagtataaatatctaagttaattaacttctagttgtacataaa

SEQ ID NO: 316969 - DNA, 797 bp, Cannabis indica
acaaaaaataaaaaataaaaacactaggaatttataatagtccactcccatgtcatgatggtaatgggactacagctattttaatttttattaattggattcgacacactaaagttatgttcttaagaatgtgtgaataataataaaaaaagaaatttctaagtgaaatctgtattgagacttatgaacacaaggttcatgggagacccaacactcacaaatctgataaggatgatggttgtaatgttcttgaaaactgttaggctatttttagcctaagttttgagttgattttaaagtcgttttctatgttaatgttatcttttggaatagtgttttgcgcttgatttctcttgtttcagatccccgaggcattagagttcaaattctatcaatttgtaaaaagacggggcaaactgaagaaaaatatgctaaagttgacaagttatcttcagtagtcgcgaccaccagagatcatagtcgtgacaaattatgcggttgcgactatgaagctaggcagaaagctcaatttttgagttttgtctatggtcgcgactaggctttatgtagtcgcgactatgggctaaacactagaattttgagcagttttagaatttcgtcattcgaagatagcattcctaatttatatataagggtctcgtgttttaaaagcaaaacacacagattttgaaccctagaactgaaggaggcaaaggaagcacttgtggcgacccagagcaagatcaccaactagttctttcttatctcttgatttttttctatgttattttctattt

SEQ ID NO: 316970 - DNA, 585 bp, Cannabis indica
ggtaagggtaaaacagtaaaagcggaagtagacaagctaaccacaataacttcctctgggaagccttgtatcctatttagctggctaatctagttttggtccctatgcccaatggcacatggaggatgtgcattgaatacatggaccctaacaaggcctatcccaaagactgctttcctcttctgcgaataaactagatggtggatgcagcctccggatacaagttgctcagcttcatggatgcttatttcggatataattagattaaattgcacatagttgatgaagaacaaaccaacttctaaatggataaaggtttgtactgctataagttaatgccatttagcctgaagaatttaagagcaacctatcagcgattggtttataagatgttcaagaaccagttgggaagaaatatggaggtttatgttgatgacatgttggtaaaatctaagacatttgaatagcacagtacagacctcgaggaagccttctcggttttccaaaggtatgggatgaagatcatgttgggttttgtgccctaaataaagcccatttcaatataatcatatttacttattaata

SEQ ID NO: 316971 - DNA, 990 bp, Cannabis indica
tataaatatatataaaaaaactttcttaatcgggttggttgggttgattaggcgggttggtattattttttcaacctgctcaatataaagattgggcgggttatattttggtcaggttttttggtttgtatttttcgtcgagttatctcggtttggtttgtgctggttatttatgtttggacggtttacaaaaaattatgtataaccctactactaatagtcatgagtgaccataatttttacacaacgatctactagttaatacccgcacccccattaattattgggacgcatatagttatataattaacctacgaaaatagagatgataatttttaaactgtccctgatctgcaccattgtcattcctagttctcacttatgtagagacttggtgattttatgactttaaggtcctatcgtacatatatattataattcaaaaaactgttacttttagtgacaattttttagtcacaacataatttttttatgactaaatgtgacttttagtcacaacaaaatattatttttgaccaaaacattagtatttcgatacaaattgtcactaatttagttttagtcacaaaaagtatggtgactaaaaatacatttagtcataacaaattataatttttgtgactaatacctttagctacagactttttagtcacaacataagaatgatgatttataattagtcacaacctttttacttttaatcacaagttttattgtaactaaaaatacattttttggtagtgttaatacatcacattttccaaatatcataaatatatagttgaaattataaacatgactttaagtaattttcctttattttctaacgaattaatagttagctcaggctcagtcttgggcataggcgagctagacctgtacctaaggccagggccggccctgaaatgtagtgggctatagggtaaaaattattttttgggccccttatttagaaaaaaatggtatttt

SEQ ID NO: 316972 - DNA, 1758 bp, Cannabis indica
agccaaacgccgcgttccaaaacaccggacaccggaaatacgaaacataaaaactgctgatgacataattatgcatatctgaattccataaataacaatgataaattatttaaatagctataaataatttcctgattaacataaataactgctaatttctaaattaactaagcgggctttacatatttagtaattaattattgtataatcaattctgtatttattataaaaggctaatattttagtttacgaaaatttgcgttagtagtttggtgcttttattgagagcctttgtagtaaaactcataataataccctcttcaaaaatacaactcaaaatttgtactcttggcggacgatacttggcgtaatgaagagaatcaaccagaggagataacgcatcatcctggaaaggagcctcaggctttgcaaagaactaacactgctaaaactccccgttcttgaagaaacgatggagatttcaatccaactggtgaacagatcccagaaaggcgaagcaaagatgcttatgatccaaccagatacgttcaactagtagaactggaaaatagacaactctgacaatgcctgactgaatcaaacaagaggaatgtcgagttagagtgcgaagtagcggttgcaaggactgcacaaggagtggcccctcaaaatcaacctaacccatctataagacgaccatgggggaggccccgaggttctagaaccaggagacaaaagaatatccaagggaatccctcaaacacccaggaagaacaacttgagaatgtgaaagatatcccaatggatggagaaaacccacaaaagactggaaacataagaaatcaagagactcaatgtaacaatccaagaacttcccatggagttgtaaactaagggaatgaacaacatgatgtaccagagtcttttcgcatgaatgcaaatgccaggcaggagcgagctggaaaccaggaaattccatagcatgatgcgagaaatactagaaatcagcttaggacaggtcgacccctaaggcatccacagaggtctacttgcaacgatagagatagtgcacacacttacttaagtaggggtagtgtgtaaaatctcttttgaagaagagggccaacgcaagaagagtcacatgagattgtctcaagtagagatccaagtggatcaaggtcaaggacccgcagaaaaagtagattaactcgagctcatgcccatgataggcgaacgcaagataagggtggatgacgatgttattataaaggtgactaagagagtattagtaactctcaaggttaccaatccaaaagttactcggggacaagatctgtgagtaattatgataaggcatcacgaccttaatctttgcaatcaactaaaccaaagatagcctgacttatgcgagcatttaaattgtaatgcgccagatttacacaattaagtaaatcaaaatgcatgtgtacaacaaccaaggaagcaatagcccgtggatccaatacaattgcgagtaatacaattagaaaataagttcaggaaataccgggatggagaatatggaaaactaccggggtacgactcagacgaagaggcagaaccattccatcttgatattttcaatttacaatttcctcaaggattcaaaagcccccatgttgcatagtatgacggttaggggtgttcgtgttggaaaattattttaccaggatcttagatctactcacaagtatgttgtttaaacatcctaaatatgaa

SEQ ID NO: 316973 - DNA, 1775 bp, Cannabis indica
tttttttttaataaaaatagaaatatatagttttttctaaataaaaatagaaatatataattaattatatatataagagattttaatagttacataaaatataattattggatttttgttaaatagttgtaattattttagaaattaaataaaaataattaagaaaagacatacgcacagcctatttcaactttatttttcacttaattttttcaaaaaatttataattttgacaaaatgtttgctatcactaaattataatttttaaattacactctacataatcttttctataataaacaaaaatgactaacaaaacgaattatttatgttagggtattacttacattacatattgggttattttttattttcttattttttgacacggtggacactaacatgtttcactaaactaagattgaaggatacgtaaatgacaaaaagactcatttcattttccacataaaataatacatttctcaaacaaaaccaaacctttattataactaacaaatattcaaaaactactaattattgtgtgcatcttaattttgttttgtattgtttgtttcttcattttcacttaatttttttattccccaaacctaaaccatctactttagaacacatgcaaatctgcttttttattttttttagtcttttcctgccaatgtgggtgtgggagcatatctggcactgtagactagaatgtcatttatttatatttttattttttcaaaaggaaaaatagaaagtcgatcttttcgtatatttttataaaataattaattttacaaaatagaaatagtggatatttaaaagttgtagtatgcaactagactcaaactaggcccatttaatgaatgcatggtccaaactccccctacagatcgatccaacggccatagttccactctctctctccttctctcattttcattttcactatatcataaaagaaagagaaaataaattctactctctcctctgctctggttctgtcactagagaagctaacaaagctctctgctatttcagtttcttctctcttaaccattttttcaagaagccaaaaagggatttctctctaggtgaagaagaacatcctattaattctctgttttgtgtatttttcctttttgacattaaaaaaagcagtagaacaaacccaaaacagagagacagagacagaaaccagagatgagtttaactgtctttcttttctccattctcattttcatcacgaaccccatttgggtttgtggtaatgcagagcttggagcactcatgaacatcaaagctagtttagaccctgaaggtttgtacctttcttcatgggccattaatggagatccttgtgatggctccttcgatggtgtagcatgcaatggtttgggacgtgtggctaacatttcacttcaggggaagggactctctggcaagctctctcctgccattgctggcctcactcacttgactggcctttatctgcactataacactttgtacggagagataccaaaagaaatctccaacctcagaaatctcacagatttgtatctcaatgttaataatctctctggccagattcctccttcgattggaaacatggccaacttgcaaggttagtagtagtacttggcaaaaagccttttttttttttttttttcagtaagaaacagaatgaacatcaagaaaaataacagtaaacttaaaaagagttcaactaaatcaaaagaacacttgggttgcctcccaattagcgctaactt

SEQ ID NO: 316974 - DNA, 988 bp, Cannabis indica
attaactatacaattaatattaattaatatacataaacattaattatatattctaagttgttgttgttggggtctaattaacacgttgtatatatctattaatatatgtatatagatagaaacatcaagagtgttggatgcttcactttcggacatttgtataggtacttcagctgccccaaccttcttacctgctcactttttcacaaacaaagatgatgagtctggaattactcaagaatttaacctcatagatgggggcatagccgctaataatccggtaattaattaattaattatgtttatgtgggtggtgcatgttaatattaatttgtggtgaataattttttcatatatataaatatatatttatacatataatataggctttggtggcaatgagtgaagtgactagacaaataataaggaaaaatccagagtttagtacggagaagcctgtggattacaaccgttttctagtgatttcaataggaacgggttcaaaaaggaatgaacaaaaatacactgctaaaatggcttctaaatggggcataatatcatggatatttaacaatggatcaactcctataatagattgttatagtgaagccagtgctgatatggttcactaccataattctgtggtttttcaagcttttcaatctcaacatagctacctacgtattgatgtaagttaatttctttcttttatttttggtccttatttttataataatatattttcagtgtacgtggtggcaaccattttatatagtattgtctgatgagttttattaataacaacttgtacgacatattatcattattaatattgacttaattagtactctaacaacacaattattaataatctatgtcacatcaaaataaaacttgtgttgcaaatttttctctagttaatttgctataacatatatatttaggagtgatgtatttttatggaatgtattccgtgatacattagatg

SEQ ID NO: 316975 - DNA, 1547 bp, Cannabis indica
gataccacttttagtatttctcttaaaattataacaatcggatcgaatagcgagagataaagtggtatagtgcgcatgaaattaatacacgtagcattacttattattaacgctagctagcttgttatacatatatgagctcatctatataaggaggatagaccctcaaagcctttgtatatcatcagtagtaaacacacagacacatatatattataagtattcctagcttattaattaatggcacagtttgttatgatgaaagaagagagacaccgtactgtccgaagggaagtacaacgcgagtttcactgggatcaagaacactacccaattactttccatgatgatgatgacgatgatgagaagccatataataaatataataataacaataacaataattacgtggagcagtgctactggaatccatgccatattacttatagtaatcaaatgaagcctcgtgtggagactagagtgattgctcccccaaaagtaataaacactgttcatcatcagtaccaccaacagcggcctacccactatgggacgtagtcgtatcatccaacaacaacttcctaatcatcaactcatcaccatgaaaaaactaaccctagctctctcttctgctcctgctcctgctcctaaaactaatgacctgtgatgaagtagcacagctttatggtggggtcgtcgttcaacaccctatcggtaaaatattaaaattatatatagctatatgtgcaacatgcatgcataaagtgcatgcatgcatatatatatatacataaataagtgtgttatgtggctcctccttatttggtttctctaaaggaagtgatcaagtagtgttctgctgtttatattgaaggcgtgtattatacaatatggtttctttttctctctctttataaatatatattatatatacacatgtgatcgatgtatatataaataaacaaaaataaaacgattgctacaaaaataaacaaaagaaaaagtatatagaacgattatattaaccaaaaagtaaaaatcttggccggagaaactttgtagtactatctaataattagttgaaagtgataggaaacgatattgataattggtataataatactgataaactagttttgaaaaattctggatatataaaattaatatagtatatatgagtatgatataattggagaataatcattaatgataatattaactttcttatatagttaattaccgatatttggcatttcactttttctttaacgtacggtattaattctgattttttaatataaatatttcgttgatatataaatacaatatatataaggaaaaagtactacaaaattttgaacctatatatataggccggccaaaaaccatgaggtgaaccagaccaaattcacaagtgtatataagatctgctcattacacttttcaacttgccattgggaaccaattttataactttatctattctatataaagtgtgtttatataacagaattcttggtttataaaaaattcatgggtgacttttt

SEQ ID NO: 316976 - DNA, 606 bp, Cannabis indica
taattattttccttaattttaaaattagttaataaaatttttaaaagaaattatgaagtggaccaataaatgagtaacaggtggcatagaaatattctcagttatatttaacagaaaagtagtaacagaagtgagtaaaactaaactttgggtatttaatccgttgaaataaaagatgtggtatttaagtgtataaaattgaaaacatttagtatttatgctgcaaatatctatatttttttataaaaaaaactacaataacataaccactattccaaacccaaatatgataaaactacactcaaatatcacaatctgaacaaatgttatacacaacactaataaatacaaataaaatatattagaaaatagatctgaataaatacaccaaacaaattaaataaaaaagaaaaataaaatatataaagcaaatattagatcggagaagagatccactagagtcaggagagacgacatgcgcgtcgaagccaaaacctattggaggagggagcttgtggtggtggatagagctgagcattggttgatttggtcggtttttttctatataaaaatccaaaatttcgtttttggtctggattggtgcaa

SEQ ID NO: 316977 - DNA, 2322 bp, Cannabis indica
ataaatagttttggcatttatatgattgaaattagaaaatgttacatttatgaaataatagagaaatagttgaaaaaaattgcaaaaatgtaactagtgttgggcccactttgtggccggccattaagtcctatttttgctattattttatcattttttattccatataattcaatcataatcctaagtgaattagtataaaaagaaaagaatggtcacattatccaactaatgactgtaaacctagttttcatcttgtcagacaactggagagtttgagatttcttcttcttcttttctcttttctaatttcgaaatcctatagtcttcttcacaaacaaattcgagtcttagtgattgagtgcatgtccacccatagcaagttagtcatcaatcatagtgtgtaagactgtgaagaatccaaacaactgaaggatttttaggctcagatcttgattatactctgtgatataaaggaagggttagagatctgagcggaatgagttatttaattctgctgcaactaatgtaaggtttctcatactttatatttgtttaattttatcgttttaaaaattcatatttaggatgttaaaaatatacttgttagtaaatctaggtcctggtaaaatataatccaatagaaggtcccttgtgtatttttgttgtatcaagcatatctcagtagctgttttgtgaacttcaaatcccaagaagtatgttactggaccaagatttttgatagagaaactattgtgcagagaagaaattacttattgaacctcagatgtgtctgcaccagttatgagaatgtcatctacatacaccaagattagtagcaggttaccattttttatggaaaacagagtctgttgctagacttgctactgttgtatccccattaaatcagagtatttttgagagtgtcaaaccaggctcgaggagcctatttgagacatatatggctttgtggaatttacacacatggttgggataggtaggatccacaaagccttgtggttgggctatataaacatcttcttggagttatccatttagaaaagtattgttaatgtcaatctgttgaatttcccagccattgaggacaactaatgtgaacatgattcttattgtgcagggtttgatgacagggctataagtttcaaagaaatcaatgcttgatgtttgttggaaacctttagcgaccaaccttgctttaaacctttcaacagtgccatctgcattgagttttatcttatatacccatttattttgcacataatcatctttgaagttctaggacaagtccatgttttctttttcttttatgcatccatctcagtgttattgcagcattccatttaaaattggcaagagcctctttgagagaagttggttcctgttcattattggcatatgcaagaaatgtctttggtttgtaaaggcctaatttggaccaggtcgccataagatggagattggtgttttaagaggtgaatggaatattagttgttgagtactgaaccatatgaagaagatatggtgttgagagatggtggactgatctgtggaggagccctgtttggagatggtggtggactaggaggtggctgattttggttttggggtggtggaggaatgactttggaacaaggtacgagaagagcttgctgagtgctagcattagaagggacattgacagtggactgagttgaaggtaacaagctagtgtatggaaattcttactctgataccatgtaagagtactgaattttcagtactcgagcttgagcaagaaagaaacaatggaggagagagagaagaagatgaaagatggataatattgctcaactgaaaacaattggcctaatcttgacatttatatatggagaaccaatacaaagaagctcaagaaaaactttaactaactcctaacaacctctaaataactcaagaatagtacagttaagaaaaggaaaacctgcaataaacaacatgttgcttaaccatattctattctaacatatagattagattagatcgaatttaagtcattatacatattaaattggatctaaaatatgaaatttgtacttagtgtagatcgaacacactttaaacaaaatagtacaaattgaattggatgaatatagacacattatatttagttagtaattttttataaatagcgacataagtactcaaagttttaagtttgtaagtgacataaacttaatgcttatttttagcggtaagtacttaatatttttaaaactataatttttttctaattttgtcggtataaatttcattttaaattta

SEQ ID NO: 316978 - DNA, 1351 bp, Cannabis indica
aaactgggggataccttgaaggctagaaacaatatgatcaaccatgtacttgtgaaccaaaaattcctcaaagaaataagggaaacctggggacacaacctggggtacatgggtcatcgttaagagatcgccaatgtcctttccaaacttataggaaaggagctcccacaaatctcaatagggggaacgagatgaatcatacctaagagagaagagtggggcgtgaagaggtgagtgttaccacgaggcacacgataacccatagtcgatcaatgcgaggaggagagaatactcgttacaacaatgatcaagaaggcaaaatacggtctatgggtgggacgagatccgccagccgtcatggccaatcgaacctacgagaatgcttgaaccagaaaaaaattgatcttcgccaacaaattggtccaaaacaaggggattcgatccatttgcgagtagacgagttggagaataagttcaggaagcatcgagtcggggagctaggaaaacaatcgggatgtgatttcgtggaggaattttagtcggaagcttattggtcaaagaggaaagacgactgtaagaggttgtccaaagataagaaataaaagaaacacgataaatatgtacccatttatactgtctataccgagcttaatgaaactccggagagtatctaccttgtgtatgaatagaaggtcgctttcgataaaccaaagcccatgaaacacgcgagacataaaagggacccaaccagaatatgtgaatagcatggagatattgggcatacaacagaagaatgttgtcagttgaaagatgagatagaaggcctcatagcgcgaggacacttccagcaatatgtaaaggggcatgacaatgtccgtgaccagcccgatctacccagtaacctaagcgaccagggaccataaccttcccctgtaggaggaacggataccctggttatctccggaggataacatattgcaaagaaataacgatgatgccccaaaagaaggatactataggaggtcacccaacattaattggataaggggcaatcagtccggttaagtaattatgtaaaagtattatgaagtaatcaaataccggctcgcaatggctgtcgtataaagctatgacacagaaaagccagtcgtcgaccaatggcagtttgaggagaacaacaaataactaggatcagttcacttggagctgtggggatatgacagggaatgaccctgaataaacctctgtgggaatatgttaaggattgaccctaaatattaaaacaaactttatcaaaagtaggtgcttatggaagattgataaaataagcaattgaactgggaaagttctt

SEQ ID NO: 316979 - DNA, 782 bp, Cannabis indica
aaaagcatataaaattacaataatgctaataaatgcaaaaataattataaacttaataaattaattaaaaacttaagaactaaaccaattttagttaaaaaaaatgtgaaaaataactctaatttctagagttatcaagtcacaactaggtatttcgggccgaactgggtttgaggccgaaatacaattctgtaatgatttattggcatatgatttatgtgaaaataatctaaaatttgtttgggtttatttatgtgtaaaaattacttaaatgcccttaattgtttatgtgtatgttataaggccctatgggcattttgggtaatttggcttatgtattattgttgtaaattggaattaattgcatgatggaaaaaggaaatttctagttttgcttgcacctttaaccccacccctctctctccctaaacctcttttccaaactttgattttgttggatatcaacttgaatttgtgctaactcttggagcttggaatttagaggattgtcttgctatattttgaggtagtaattgtagtttttaaattaaatttccttgctgaaattgctttagaatattgtttatgttttctttaatgcatgagggaagaatcaatgtggattttgatgagttttggcttagattatatggatgttgtttgttgtgctctagatgagattttggagtgtttttcaagcttgaatccatgtgtatttgatgttttggttgctggaaaaaaataaggttgaacctagtttgaagttcaagtttttgtgagct

SEQ ID NO: 316980 - DNA, 792 bp, Cannabis indica
attgagaggtagagagagagagggggtatagagaaaaagaaagattgagatttgtatgaagaatattttgttgatgaagaagcttcttgggtaagagtgtgagagataaacagtttgagagaatttcaatagagaatcaatcttgactgtaatgtacccttgttcttgctcaatcaataaagacatcttggtggtgttccacaactggagtaataccataaatcacatcgatctataggaattgaaccagaatatatcttggtgttgtttttattgttttcttgctttaatcatttttggttttaattactctgctctaccatgttatatctcagattcttagttgtagttttgttaattgtttgttgatttgttttaagttttatttgattctgcatattagttgtaattttcccacattaatatattgtgcgtcaatttttccataatattaaattgacacactattattgtagcaagttttttctaaagtgaagagtaatgtatggcataaatacttaagtttaactctcaattattaataaataccgaagtttaatttttggcaacaataatacttaagttatatttctggaactctgtaagtacctaattgttaaataagcaaattgccacatggaaatccctcattggtccaagtcataattttatatattttttttaaaaaattaaaatataaaagaaaataacatgtagataattacttaatatttaacgcccaagtacctacagagttttaaacatataacttaagtattattaccataaaaa

SEQ ID NO: 316981 - DNA, 856 bp, Cannabis indica
tcttaaaggaatgagcttacttcattgtgattacaaggaatctgatttgtggttttggaaaaacgtgatgaaagatacttccattttaaagaaagcttcctataaaatggtgtctgatggtagagatactaacatctgggaggacccttgggtggtccatgggaataagtttatcccaacgtctaacaaacatgatgcttccagggtttcaaaagtatctgatcttttgtcagaaagcggtggttgggatgttcataagttgtatggcctttttgacaaagagaccgtttttgccattttaagaagtgggcaacctttgggtcagggcaaagataagtgggtttagactaaggaaataagtgggcgcttctcttgcaagtgcctatctgattcaagctttacagagagcccctcattgtgaggtgtctctctctctggaataagctttggaatagtaaaattctagaacgccataaggtcctttggtggtgtatcatgtctaatgctttttcggttcgagcgattctcaataagatatttcatattgaggataagatgtgccctatgtgtggggttgaggaggaatccatggaacatctttttttatcttgtaacgtggcttttcatttatggcggtcctctccgtgggggatctttcccatcgttggcactggtttttgcatgtgggactgcgtgaaattcatctggggtttaaaaaccaaggcattaatactaatgaggtgttcctccacgcctcaactactgttgataccattgttgggttttgtgccctaaataaaacctatttcaatataatcaaatttactaattaataaagatcagaaatcacatttta

SEQ ID NO: 316982 - DNA, 638 bp, Cannabis indica
ttatagaatttttagggttattgtttttatatacactgttataatgttatcaactaaatattttttttgataggattgatgtgataatgttgttaattaaatatttttttttataagattgatttaaatattttgtataagtacgagttcaaatagaactaatatttttctaattttttaattattttttcttaattttttatttttgatatgtaaaacaaaagcaataaaaaaaatctacatgtatacatgtatgacttttttttttatttaatttaatttttcttacatacaattaattaaagatattaatttttatcatgagacatgtgtctttcttgaagatattttattgttttcaaaaaaaagttaattattttatgttatatattacgatttaaataaaaaaatttattaaattaaataatttgatttacatatatttttacaatatataatgaaaaatataaaaaaaaaattttaaaaaaaaaaaaaaaaaaatagattaaaaaattaactttctttgtgcacaaaattaacaaagaaagttcttgcaaatatagaatgaaagaatcatatacagtaatagtcttaccttccattaaagtggtgaaatctaaaagacaaaaaaaaaaaaa

SEQ ID NO: 316983 - DNA, 997 bp, Cannabis indica
aattcataatcctccgctttctttcttccacccaactcgaataatttcccatcaataattctctgtagccgaagagaaagatgatatggacaacgaaatttcacctaactaatatgggaaattcttggaagagagtatggtaattgataagtaagtgtacgtgtgtatgtatatgttatatgtgtgtatgagtgtttgtttcccgagaaaatattgggaagaaattaaagaaaaagaaatggaaggggagaaagaaaatagtgaaagagacgtagttgagtagtcggcacgcggcttaggcatctcgccgtgcggagtttcataaatcataacttaattatttggctcttttccatcttttggctttattaacataataataataataataataataattcactcaattcaccttcttttatttcttttttaataaaatactaaatagaatttgttccaccaactttgatatttttaaactttttaagcccttacaaaatttcccaattaataagatggttgtatttaaagatttacgtttaatattactaatgagcggctgatatggataaaaatttgccgacataatttaatacatgttaaacttgagagatatgattcggtacatgtacaatcgctttatagatattttttttcaataaaactgaatggaatttgacggaaattcttgatccaacaattttaatagtttaagaagaattttcaacaatctaaattatttattatagtataatttagaatatgcgaattcttaataaaacaaataaataaataatttaatatgattttaaaatataagtaagcttgcattctaaaagcaacccaactttgatagtgacaattttcaagtgaagcataagtaaggtcaaagaatattattttatgtagattgtaagtgtcgttattttgtgacagattattttaatagaatgtctagtcatatctggatttttagtctgttttatctgcacacttg

SEQ ID NO: 316984 - DNA, 675 bp, Cannabis indica
atcaaatatttacaagttatctgatccacgtgtccttattcgactggtccacgtattttgggcgaattcaggggcaacagcaaccaaaattcgtatgacaacccatataaaaatccatataaaaactattggagaaactacctaagaaacttaaaccttaaattaaaaaaaaaaaaaaaaataatagatggagttaaaaatcgtcactattcattattgggtttttatgggtctttgatcaactataaaacaaaattaaataatcaatcgaaagctcaaaattccaagagcagagaatacaagaaaaactgcaactaatcttgatctgaagaataccgcagcatgctccgaacacatcaagcaaccaagtatcgttaacggattacagacaccataccaaaaaaaaaaaaaaaaaaagtagcaaaatttcagttaatataagaaatagaacaaattgaagatttatacaatactggaatttgaactcttagaggccattagcgaaggggcgaaactcgttagatcccctagtagaacactaccttaatggtctgaacacaaaaattgtagaaatcaaaatatgaataaattagcatcatcaacaaaggaaaattaaagggaaaagacttaataattacgtgacaaataattattaattgaattaaaaagttaaga

SEQ ID NO: 316985 - DNA, 1148 bp, Cannabis indica
ttttattatacactaataaaaaaacccttgtaaaaatccttatataattattttgttataatattagatcctttattgttaccaagaattaattaatattgtatcaaatgagtaacggctgagacttgtgaactatatataaaattttgccactaaaaaatttacttaaggaattaagtgtaacaaaataaactaactacataagaatttttaccaatttttttgccgtaaaaatccttagaataataataatgataataataaaactggcatttctcggtcactttgatatttccgttaaaacctttcgtttattaaagcgtatattaatgacaaacccacgcgacagaacgaacgaaataactctgagagaaagaacgaaagaaagaaagaaagaaagaacgaaaagctttagacctatctgtctaataattaagctcagtactgcaaagaaaactcaataaccgtatccatggcggaccaagacccagagatgaccacccatggagatccggaatctttcggggatggtagaactaacacccacttcgccaactcccgctgctcctgtttcttccttccctgtttcgggtcacgccgttcctccaccggtagattggtctggtgggagcgaatccgggccgtcgaaaacgatcatcactggtggtaccggggaatccgagctttcaagaagctccgagagtggtcagagattgtcgccggacccaagtggaagacttttattcggcggttaaataggaacaaaagtaacagcggtaacggtggaggagctcggcatgggaaattccaatacgaccccttgagttactccctcaacttcgacgatggtccggggcataattgtaatttggaggaagaggaatacgatggatttcgggatttctcgacccggtacgctgcaggtgcgggttcgggtcaggttaagtcggttgcgccaatagaattgggtaaagacgtggcggtgtatgcgtaagataaaataaagcgctgtttatgctaacatgcgcgcgatggcgaacaaaacggctgaatgagctgagaagtctactgtatgagctgtatggtttgactcgagtgacggcgcgttccttaacggtagacttttttttttcttctttaataatttt

SEQ ID NO: 316986 - DNA, 1406 bp, Cannabis indica
acttctgtctctttattgatatttaaataatagagattacattgaaatagagttttatttagggcataaagcccaacaatacagatctattaagactccacaccatttcaactccttttccttccacatgaaatctaggtggttgcttcatgtagatctcttcatccaagaatccatttagaaaagtaatcttaacatcaagttgttcaatctcgaacttcaattgaactgctaaggacaacatcaaccttattgtctttgtaatgaccgcttaattttaatatgagaattagcagataattagggtttaatttagaattagacttttaattatgatttacgtaattatggagatatatttaaattctaggtgtgctatttatattacatgtgaaatttcatatttttcatattttatgcccagtaatagtaatgcgacgtttggtcgatagagtcacttttcttatggtttaggattttagaaatagcggagcaatttagatagacatttagaatgtcggggtttggcggggttatggtttcagacccttttacccctatgccattttgccatttaaaaaccttagtgagagtattttagtctttttgatggcttggctaggtggtaccctctcttttgggaagctagccactattattttttctagagcattaattaagaaaaaaaaaataatctaagtaattggtagaattagaagaaaaagagaaattagaaaaactaaagtttgcctttccttcttcttgcttcaattcaaccagggtttcagagtcaagtaagttgtattctacaattcaaaggggatttagcaaggttttagtgattctcatccaaggtaagcttccctctttttgttcctttgattttcaaactttaaagaataggtgttcatgcaatttttggaggttagggtactgtaggtgtaattcaagtttggttagattaattataagttatttaagctgatttaacttgtatttgttgcttggtgttgtgtttgagcaaggtttgagctttagaactcaaactttgctctttaatggtgaattttgctatagagagtattacttggttttattgcatgatttaagttcaatatggtatttttaggtactctggaaggtttggtacgaattgagtttgatttgagatgtttgtgagattttttgaggttcctacgctgaaccggtcgaccggttcagtttggtcctgtagaaccggtagactgattcctcccctggcagaccccatagaactgattttccggttggggaaccagtttaccgacagtactattcttcagctctcacactcttacagaagaatcttcttacaaaacccaagcccaatctctttcttttctcagtacctctctctctacctctca

SEQ ID NO: 316987 - DNA, 947 bp, Cannabis indica
aataccttcccattataagttttcgtcagagttagcaaactgaaaaaaaaaaatatagcaacaccaaaccaaaaaacacaactatggtagaatgataatctacaaaataaaaattaatatacaaacctaaaatttaacacaaaacccaaatcacaagctcaacattactaaaaacttaaaacaacaaaaattcttgggaacattgaaataggtagagttaatatttaattgtttcaacaatgacataacactttattggtattaggaatttagatattgttatttgaatattattattgggtattagtgttgcttaacaccttctaaatgtgttattttgcgattgattagtaatattctctaaaaattattacattaaactatatgagactcgatacttaattacactaatagcgatatcaatacataaattgatgctagacaccactaataatatatgttttgagatttctcttgttatttaacatttcacttatattgcttgtttatattaatttattactgagtaattttgagataactacagagtatctcgaaggaagatacaaatttgtgatctactattaaaatatatttcatttgcaaaagttttgttccaatgatgtattaaaaaatgatttaaatttgttatatagcttaagttgatctaagtttagattacaaataatatatatgtaaaatttacatcataataaatacattattttatacttgtatactatttttaatatttaattattaattttagttagtacattaaattgtaaattttttaaagttattttttttatcttttttatacaataaaataataataaattaacgataaaggttaatattattttatagttttaatgattaagtacattgctaaaagttgatgtaactagagtaatttgcagcaaaaatacctaagttttatgccg

SEQ ID NO: 316988 - DNA, 1368 bp, Cannabis indica
atcacatggctgttaccaacacattcatttgtgtttaatgggataaaaattttggacaagagagctggaaataagctcaattaatttatacacgtttatgaacgttttcaaaaatctggttccatatgttcgaaaacaaccataaaacaacataaaaaataactattaaacaactgtttccagagaactcaaaatgtaactcctctccgagttaaatcttttcccaacgtcccaatacccatttaaataatataattgagtattgtaacagtttctaacagctagaaacttatcccattaattccataactcccatatgtaacaactcacataattacatgtttatcaattgtgatccttaggttacaatctattttcagatttgtaactcctaatatgttacaattttatgtgtattattatactatatatgatataatataacctccaacacataatatatattaatctcctattaatatataatttgtcacattaaaatattttaatctatattatatgataacaaataatataacaacaatcacgtttcaaaatattgaatttattgataagttttacatttctttctgattattcatattagtgcgtcaattaattattattattatcattttagttctgataaaattcgtggaatatgcttacttcaagttttatggacttattcaccatttggattccaatgcaaggttttatgatttgtgtatttcgttaatattgaggtcaaacctctgtttctttgttctctttattatttatttattttagaatataattttaaaattgattttacatttcatataatattatttgtgtttgtgtttttgtctattttggttttgttttatttttcacttttaacttaatattatattattctttaataattaaaaattcattttcaaagatttcttaaagatttcaggctgatggatgctgccattgttgaggtcagtttctgttcttcatgtttcggctggtgggttttggggtgagttacttttggagtaattgtagtggtaatttgtgtgtttatagtcacttgtaacaaatttttggtgattagaccatgtttaatgatgttaattatgatttatttttaccttataaaatatgcttttattaaaataaataatatggcctttatttttagatttattttaattttattttatttaattatgtatattttccatatttaaatagatttactacatggccagatttatggttggctttattgcgtgaatacgctatttattgtatctttatggctgaaatattcttgatttcagctttttttttttgaatggaaaataatattttattaaccaacaaaatctg

SEQ ID NO: 316989 - DNA, 1283 bp, Cannabis indica
atatatatatatatattattaggtaccattgaaggactttccaacaagaaagctcaaaaagtgccatgaaagaatacaaaacccagtatgttaaccattgttgaccgtctaatgatgaaggactctctatagctcgcatcgatgcatatctgtacatgttcatatatatcacatatgtatatatatatacataattaataatcaagtatgtatatatatttatttttcattgttttacttacaatggataaagaagcattgttcctggtctgcaccacaagttcaaaacaagaggaaaatgtatttaattaataattaaacacataataaattagtaattattatatatatgtacacaaataaataaatatacccgataattgtatccaaatgtttagctattgcaccaagaacacccatggctaaatattaatgatcaagtaatttagatagaaaatagttgtagtttcttatattaaacttaattattatagaacaataataatggattgcgtgatatgatgatcgatgatgcatgataaaaatatatatatatatatatatatatatgtaagattggagaagtgttggaaggggtttaatttggtggcatatcatatggatggggttattaagcgacaagtaaagaattttggttgttgatgagatcaaaattcttcttttctcttggtagaagatatatgaaggaacagttctactactactacagcatcaatcaatgaatgaatgaatatgcgttttttttaaaggaaaaaaaattaaaagtaagaataagggaaagggaaaggaataataataaggtatataattagtacgtatacatctgcccatgtctgccttttacaaacttcctgggtcccaccatatatattaattaattaattaatgtcaaaatatattaacattcctttcttttattttactttttttccttctattctgatattttttagatattaaattaagattaatgattaagttgattttattatagatacttaattatttttatttttatgcttctcaattagaaaaagacagagaaaagaaagcttttgtaatgaaattttatgcttctcaattaaagagctatttggtaattatagagttagctttacaataattgattatcaagaattaaacaacttagaaaaagaaactaacactatatacttgtaacatccccgtttcaagcttttattgggtccttacactcacggaatgaatggctcttatacacgagtacgccactctggctgctt

SEQ ID NO: 316990 - DNA, 1428 bp, Cannabis indica
ctcaattatacataattatctagttaggattttgctaatccatttcataactctagaatattacaccatgagattgggttggtgtaagggtcgctaatatatttttttgtatgagattgagttattgtaaaggttgctatagcatcatttgttgtagaaggttgagttactgtaagggttgcgttgttgtatgagattagattgccagtaagggttgttaacatggttgttgtatgagattgagttgctaacatgattgatttatgagaagttgttgtaatgattgctaaactggtttttgtatgaacttaggttgttgtaagggttgctaacatagttattgtatgaaattaggttgctaagatgcttgatttaagagattgggttactataagggttgttacaatagttgatatatgagattagattgttgtagaattactaacatggttgttgtataagaataggttgctaacatagttgatttattaaatttggttgttgtaagtgttgctaaaatgattgttgtaggggttgctcacatggttattgtatgagattatagttgctaacatgattattgtatgagattgggttataagtgttgctaatatagttgttgtatgagattgaatttttgtaatgattgctaatacaattgttgtataatattagattgctaatatggttgttgtatgatattagattattgtaagggtggctgatatatttattatataatttagcaacaactttatctcatataaaccattttaagaatatgtttattagcaactaaaaatccttgtaagccatttcatgtggctataatgcaatcgattcaatattcatttaattttattagtttaggaaattaaatttataaaccaattgaagcttaagctaacttaccaaattttttacatagatttgactactgaactcattaaataatagttgcagaaaatgatctttggttaactaattattgtgttgaaattttttaaatttaatctaaaattgattgatatagtgatctgaattttaaataatcaattttcagcaaaacttttgacttcaagttgttaggttagaatagttccataaagagaaagaaaaaaaaaaagaatttatttgattagaatagattagaccgtatcattgcatataaaatttgaattcatctatttttgaattgttggaataaacctccacttacactgatattaagactcaatacagaacaacacaaggacaaaacagtaaatacaagtaaagccctaagttggccttcggcctctacttccctaacagaaattagttagaatggatttggttaaatccacacctaactaatttctgtaactaacaaattaaacacatgcagaaataaaaacaaggaaccctagatctatatatacctgcact

SEQ ID NO: 316991 - DNA, 1073 bp, Cannabis indica
ctttttccaatagttataaactgtcttttaaagtttcatatttttatgacacccacatagctaatggttttaggaaccgatgggacatagtataaacgacagttataaactattggaaaaaactaattttgtagtagtgattctatgggtaattgctccatactatagaatttgaaatttgagagagagaattcaaaaatttgcttaagagaaaatgaaggcttttttagactataactgttgtgtatttagaatcaaaagcttaaccttccttttataatgtctcttctaggtttatggtaataatagattaggcttttcggaaaagataatggctctaaaaaccaaccttatagccaaagtccacaatggcctagtgggtttgatttttgccatttttatttcatttaatgaaactttcaccttttccctaaaatactatttttctattctaattatttaaattataattttatctatttaataattatcaaacaaaattactatttaaatatatgtattaattagacccacaaaatgtcttaaataacaaataaaacatctctttacttttcttctcaaatttatcccttagtaaaattaataaatcaacatagtcttctttaaaattataattgatttaataaaccaattaattgagtctacaagacaaaattatcatagataatgtgggaataatagcctatgtaaccaagctcccaataagtagttctcgaaatttatgaataaattaactaacttattaattcatctaacttcactatagaatcagaatttcattcttaattacataaaatactctctataccaaatacatatacgctttgattatctattgcttcaatctaaacagttattgatcctttatagatggtttgcatcaattagggataaatttaccgttttgccctttaatatattttatttttaaaatacttagctacgtataaatgatattttagtaaactaatataattaccgaaatacaagctcttttatttataaagttttagccaagctctaagaaaactatcatttcacttctaaatagt

SEQ ID NO: 316992 - DNA, 1680 bp, Cannabis indica
ttctgtgcatttgacttgattgtgtttgtgatattttagggctacggatcattcttattgcgagatttgccattcgacgccattcaattctgcatgtatgagcaactgcggataggatataagatagcggtacgtgggaacggtaattatcactttagatgaaggtacttaaaagatccatggaaaaaaaaacaccctcttcatacatatgaagcaattatatatataattaatgatttttcaatgttacctggggcatattttctttttccagcggaaaattggactagagatatgtggctggcgaatatttcctaattgctatttcagtgcatttccatctttcttggaagataatcctctagttttgtaattctgtaatgtccaaatgccttgcatctgctataaaaatgatcaacttacattttatgcaggcacgaagagagctgaacgatcttgaaactgccatgattggcgcatttgctggtaatattccctagacacaacttgaatgcagaattaattttcggctgccattctcactctgatagacccaacttctttcatatttcataacactctttttaaatttcaatattttcctttcattttgcaggtgcaatcactggagctataaccactcctcttgatgttataaaaacccgattaatggttcaggtacagattatcacttctttgagaataatttgtacataaacctttttcttaatcttccttttgaacttctgaaggggtcagcaaaacagtataagggaatttgcgattgtgttcggagtataatgagagaagaaggcagtcacatttttttcaaggtttgaatgtccctttaatgtctctttccttttctttattttattttcttggttaagactctaatgtattgttatcttattcaatcttttaatcaattgcccaatcaaaccagccaaatgctagtatttttttttctctctcccaacaattttatcaatatccctttgggtgtatatttctctatagggtactgccccaagagtgctttggattggtatcggaggctcgattttctttggtgttcttgaaaggacaaagcaattgttgacaaaaaggcgtcccattgacatggagaaatcttctttgttggagcaagattcaaaactttagctgctaattctatatcaagttctgtaagctttacattagtagttttcaatttatttttgatttggaactgatttcttgaaaatgttagaagtgaaataaaaaaggaattagaaaaagactaaataaaagggattaaaaacacttttatgtatcttagcaagttagtcataagaataaaaataataaaaaagaaagaaaaacaggaaaatcataatcagtcttaattattatttttttaaaatatgtttacacaaagaaaaatggaaattttcggttagacaaaatacagtcacgataattgcaaagaatgttagataaataaatgaaatgaacaacacgatggtgacttcatgtgcataaatgaacaacactcacattatggtttaggctttttcactaattgaaatacttcacgagtaatttatggtggaaatgcttaagtttaacactccattgcaaataaatatatttaagttatatttctaaaacttttatagatacttggttgttaagtgt

SEQ ID NO: 316993 - DNA, 684 bp, Cannabis indica
aaaatctttaaatgtaaaaatgtaaaattttacaaaaaaataatattttacataattatcccaaataaaatttgtgccatgtaaagtatgtttgcatgttagagacatacttccttgcttctctaattttatttaacatcctttcatgatttacaacttattcataaaaaaaatatcacgacattattttatgcattttgaatagatttagagttaatattgttttatcttttgcaattttttaaatttgtaaaaattcgattgtgttcaatacctagctcaatgaaatgaagatacaaaatatacttttctcaatagttctggataaatgttcaatgagaacttgatcagtgatcggtatcatttttattagggtaaatactattttaaatcttgtattttacaaaagttataaattgaaccatctattttgttaaataataaaatggaccctgtatttttcaaaatggtacaaataggacccttaactgattttttgtgaaaataaaatttaataataatctgacctagaggtgttatgaaaaaactagttaaatttcatctttctgttcgtgttacgaattgtcttcaagttgattatatttaaaaaaaaaagttgtcacataattaaactcagggtcctatttgtaacattttaaaaaatatagggtctattttatcatt

SEQ ID NO: 316994 - DNA, 1284 bp, Cannabis indica
attttttaatttttttttcttctaattcacattcttaaaaaatatacctatcaaacaaaataaattatattttaaatattatgacaaaaaattaaaataaaaattatatgaaattttcttaaaaaaaataaaaaaaatatatacatgagttagaaaaaattatgaaaatcaaatcaaaataaatattgaaattaacatgaaataatgtgaggaaaaaaatttaaaaaaaatatattaggagtaagttttaaaaattatttaagtttatatttttttaataatagggtgtatttattatttaatagggtgcaaataaaattcccctttaagaaatcactttatatattattttttttttaaattttaccgttcgtgttgtttgtatatgaattattatgtaaatttaggttgctatttgtttaataattgttttataaatttctgtaaaaatactaaaaataatttttcttaactaaaataattaaaaagttaaaatatattatttttattattctttctttaatttcgtttattatttagttagtatttaattattttaataattataacttaaatttattaaatatataaaaaaaaaataataaagcactaaggaactatttttaagagaaatgcaaaaagtcatttttattgaaattatgctctaagcattaaaatttcttataccattttttagtcaaattccatctctaaaaatatatgtcaaaatattttttttcaatctttcttcacaatagtattcgttagacttacatcattgtaaacatttaaaaaattcaaataatttacaatattaaaaaaaaaatttaataaactgaaatatcgaaaattgtgtttttaatgttgttaactttttaaaaaaaattttaaaatttaatgaaataatattataattatcacgaataccgttaccgaaaaaaaaaatattcacgcatgtaatttcaagcatggaagttgactaaaaaattatcatatgaacacttatctttatgagtaatttttaagagtgtgcatcattgttgttttcattggtaaaaaagctcataaaatcacccaagattggaatttaagaaaactagttagagtaaacagttgtcagtagaaactcactcaatgattaatcaaataatagtattattaatcaatagtgtctatcaccaataccatgccttacaattatcacataaaacttggctctcaattcaatattaggttgggcaatgtgtacaataatttattttcatataatcatacattttatct

SEQ ID NO: 316995 - DNA, 1188 bp, Cannabis indica
caaaaatattaatatatagttcgtaaaagggggtgtaattaaatagagttttttttttcataaatacaagaatctatcaatctattaatctcctattagattgactctaaacttaaaagcttttgtatagtaagctggtccacctattttttattattcataaaaaaacaaaactttataaaaaaataataaaatgatttaaaagatcatgacatggattccttctttgtcatattgtcttgcttaaattgtagataaaatataagataagagacactagaagaagagattggtagtttttttatagtcccaacaatataaatttcttattttggagtctctttacatgatccttaatttggaagacatgaacaaaccccaataaaagggtttttttttatttatttaattaatcaataagagaaatattcattaattaataacttcctattctctcttgactttagttcttaaaatttagcttattattaaagctctcttttttcttaacaaactcatcctaaaagagaaagcctaagcttcaaaatcaaaccccttttcagtatccatattaaaccacttaatattattattaataacaacttaaagggtagtcttttctttactttttttgataaaaaaactcataaagttgttacctttatcaatggaagagaatattaagaataatgagattatgttacctggttttagatttcatccaacagatgaggagttagttgggttttatctcaacagaaaaattcaacaacatcctcttcctctgcctattgagctcatcaaacaagttgatatatacaaatatgatccttgggatcttccaagtaagaaaagttccaacctttatttgttctctttaatcattattattatgacttaaagtgtgtaaataatttgagtttttttttttttgtttggtttaagaagacttgggaagtagtacaggtgagaaagaatggtatttctactgtccaagagatagaaagtacagaaatagtgctaggcctaatagagtaactggagctgggttttggaaagcaacaggtacagataggcctattattcatctgatggaactaagtgtatagggttgaaaaaatcacttgtgttctatagaggcagagctgctaaaggcatgaaaactgattggatgatgcatgagtttcg

SEQ ID NO: 316996 - DNA, 2606 bp, Cannabis indica
aagtgaccaagttagcaacattatttttatttaaagatgtaaagcaatgaagagagtgacaaatatgatgagtagcaccactatctacaatccataaaaagagtggaaaaaaattgtcattaccgaagacgttataaaccacatgaaggttttcactggtggaaggggcgccttggatttgttgattgagaagagagatcagctgttgactgagctggagttgggaagtgccagccgcggaagggtctggagtgggagtcaccgtggcttgattggctcgagtggtggtggtggtctttttcttgtctccataaccgggaggaaaaccgtggagaaagtagcatttgtcaacaaggtgacccggtttgagacagttagaataagttggccgaggtttcttgttttgagatggttagttgggattaggtttggtcgaagtagcagaaacaatgccagtattaccaaggcaccgttgtcgctcttgttgaacgaccatggagaacaccttggatagagagggaagtggctcataaagtaaaatctgagcccgaataccccagcaagactaattgagaccaatcaagaattgaatgatctggtctcttatgtaataatcttgaaccttttgcatcgcgctgcaagtacaaccacatgtgtaggggatattaggttggtattcgttgagctcgtcccaaagagcttgcaatttagtgaaataagcggtgacagaattatcaccctgtttgacattgccaacggaggttttgagctgtaagatgcggggaccattgctttgattaaagcggtcatggagattagtccacctctcacgagcggtggttttgaacatgatactagcagcgatctcacgagatacagactggaatccatgacatgaccatattgttgcaaatgtcccacgcagagcgagattgatcatttggaggaggacgggtatggtgccttcaatgaagggagttttgttttttgcagcaatatttatagatgtcgcacgcttccatgactggaaattttcttaaccaatcaagagaaatgaagcgatgaggttatttgggtgatctccagttccgagatgatacggagtacgttcatcatgggaaggtcgatcaagaacggcacgagaaaggccatgattagcattaaacaaagagttatcattaaaagacacatggccttgatgtccaaggttaggaatattaccaccaagaaaagcatggttcggttggccaaatgtggtggcggggttctgttggccgaaggtggtggaggggttcggttggccaaaggtggtggcggggatattggtggtgccggaaaaaatggtagctgtctgttgaaccgtcagggtcatggtggtggcagagaatggcagaagcggattgtaagatggtgaagccgtgaaggattgcgccggcgtctagtgggaaccaatcggagttgtggagggtggtccgatcgttccactaatggagagatcggcaacgtgatcggagccaaaaacaccagaagtgggaggatcggacattggaggaggagctctgatcgtgtccgacgagagaggagcagtcggaggtaaggcgagcgaagcttcgacgtcagcgataatggcttcggcggaggagatgtcgtggccagagatggtggtgggctcggtgacagaagcggcagccatggagttccaggttcttggagccatggaacatgaagatgataaaggaagggaggctagggtttattgctatttgataccataatagaagatgaaaagctctctttatttatcagctatatcacacggcagtaatgccaaaatgtgtttattgtaaatacaaatggtctatttatagagaaagaaataactgtaacccaagagtaatgggccgaaaataaggcccagtggccacagaaactaatattccatactttttgtatttgaaatattaccacggctggtcctatgcataagcgggttaggcccgtgcttaaacccacactttttgtagcccaaaataaaaaatagaaagtttcattaggcttttatttaagtaaaattaagtgtatttgtaaacaacaaatatttttagtttagttggttaaggtatatggcacattacataatgttgtgggttcgagttctataatagttcctatatatacatacttaaagactttgtccattttttgttggtttgtaagttattttaggttggcgcaaatgagaatactaatgtcatgtggtttttgagttatctgttggttgtttcatattgtaatgtttcaatatcagggtttatgctgtgttatttttatgttatttacatggtatatattttaaattttgatattgcagttattattcaattgtttgttagttgttcaactaaaatatcttatatattaaaagtgactatgtaatgtcaattcttgatttaacaaatttttttttactgttaattttttttttaaatctatatctgttaactttcacgatactatataacagaactgtgaattaatattattttcttattcttattacaatgaaattgttatcgtgttgtttattcgttgttattaagttattt

SEQ ID NO: 316997 - DNA, 807 bp, Cannabis indica
ttttgaaaaagtagtcatatattttcaatgtagaaaagtattagtttagggaaaaaattatcccttaatacatgcatagaaattcaaatttccctatatgtatatattcataattatatacataatatttatgctgaaacgaagaaaaggaaaagaaacatactgtgcacacacaatggcatgttgtatgtggttacgagtataatgtgtcaaactcttatagctgtacgatacgacaatataatatgcccaataaatcgacaaagactatatatatatatatcatttaatatttcccttatataattgaaatagaaaactaaaatgctaatatcacgcacaatatcttaaattttaattttttaaattaaatttaaatttgagatattactgaagaaataaataattattattcctcgaattttagaataaataattaaaatattagccaaacaatctttttatttataaaagataataaaaagatcccaaagcttaattttatcaaaaaaaatagtaaaattctaaaaccataagaaatggtacaaaattctaaaccagcttaccaaaataattttaagtgatgaaatatttcaaaattccaagaaggtcattcacctcacaaaaaagaggttgttacctcacaaaaattttaaaatggtaattttaccaaaaaatttcaaaagtgcactaaaatttaaagccataataaattaaatgacatttaaaataaaaaagtggtcattcacctcataatcaataataataatcaataataataataataataataataataataataat

SEQ ID NO: 316998 - DNA, 575 bp, Cannabis indica
tcaaagtttttaaattaaaaaaaataaacaaaaaaaaacatctaacgtgctttgcacgtagttgccttctagtattattaaatgtattaataaataaaaaaattgtgatgttatgccaatctttttcttgaaaaaatcaaactaatttgaatgttatgccactctataatcatttctaataaccatatttattctctcttttattatttattattattttttattttttttaataaatttataaatatttatctatttaaataaatatatcaataattaaattaaaaaaaaatatataatttatttatttctctttttaacgtttatttatttattttagttgtatacaattatgctcgaaaattactttgagaatcgagatatgtttagtaatccatcatcatgccaaaatacttagaaatatgcaagtcagaagtttataataaaatcatttacttatgtatgaaaagttattagtagttaattaactcaagtatatgatttgttttatgtacagagaaatttttttttttgattaataatgacaaaactacaaataagatacgatgataaca

SEQ ID NO: 316999 - DNA, 527 bp, Cannabis indica
tgtcttttattctttgagaaaatgtttctttctatttatgtgatgaagtcaactattttataagattagtttcatgttttaaaagcaaaatcgtaaattattctataataagctaaaataaatgatgggagttgttagtaattttagtttgattgtattgatccaggtaatggctctaaaacagctaaatatgaacttttttcttggtttgaacaaatgatatgttacgaccaacaaggaaatagctccaaggccttttgactgcgaatgggtaattctattgtgttagtttgaggccattatatagtgtaattttttttaagatttaaatttagaccattttaaatatttatttgttaaagtgacattaactttaaaaattatgaaatatgacctatattattagttttatgatagagtatagacatttttttaatttaaagctttagagcatattttcttttactttttagaattggatttcttttttaaaattttcaaatgtaattgcttttaattcattttgt

SEQ ID NO: 317000 - DNA, 643 bp, Cannabis indica
gaagaagaaaatgggaaaaagggagacggtgctgagttttattcaaaattgacttttgttggcacacttaggcttgccggcaaaaaaatttccctaaataaaaatgaaacgcaatgtttcattaattgtaaaaaagttttgtcgacaagcttaagtgcgtcaattttttgcgcacatctatactgggcgaaaattaaattgccaaaattttatcacttttgctgatgcatttactcgccagcagaagtaaaattaaaccaccaaatatttattaatttttgccagcacacttattttaccaatttaagtaaaattgaatcgccaaaagttggctcctcttggcggttagtttaccatcttttgtcggcaaaatactgcattttgccggcttagatcacttatactggcgaaataactcatcagtataagtattttccataataaaatgagggataaatttaccatcttttactgtggaaattgatcctctaaaccaacttattatccaactcatttaaaccaactaacttaactaacattcggttatgttagtcagttagttggtgctatccttgtttgagttaggactatatataagtctagtcttttcacttctatcacagagagaacataaggaagacag

SEQ ID NO: 317001 - DNA, 730 bp, Cannabis indica
aaatagctataaataatttttcataaataatcatgattaactgctaatttccaaattaactaagcgggctttacatttctcattctcttcctagcagccactattttttttggcccttcttctccttctccctttgtctctctgcgtgtaccccgacggcgaccagcggacttctcttcttcatcgtcattgtcggcagctaaaactcccccctctcgatccgtctttctcttcttcagtcttcaatctccaccagcggacaagaacccttcgtaactccggtctccagcaacggccttcaatacggtggatgttcagaaagtcctcttctccttcggggtttgtaactgacggtggtggtttgcagattgtggctgatggcgcggttccattataagttagatctgattttttttttgagaattaaactagatctgatttgtttttattgttttaggattttttgttccaagtgtgtttattttctctttagattaaagtagatgtgtatgtttttgcttgtaaataacattcatattttatgttaattagtattcagattttcagattttatgtaaataaaattcatattttttgttaaaatttaattgatgaaaagattctctttatgttaataactatttaagaaaataatatattattaataatataaaattagattaaatagaagctaaatatattagcagaaataaaaaaaataaattaaata

SEQ ID NO: 317002 - DNA, 600 bp, Cannabis indica
aaaaaacgtgttcaaccatggcttgtgatagccatattcccaaggttcaaacaatgttttctccttctgctccccatttttccaagattattcttggccaaattcctgggaataccaagctagtaagtatactatacattattactactctctctctctttctctgcttcaacacattattttcctatgattcataaatgtatgtataatgtatgtacaccacaccagagattagagtttgacttaacatatatattatttacatagccataattttgttgtaagattcatctgaatttgaaaaaattgtacagtatctttttcttacatgagttctcaaaatttctgactgtactatatattcaagcctagtttttgttttgttttctcaaaataagaggatggcatgttaaagtgagtctcttgtatgatatatgttgaattttcaattcctatattacttaatcatagtttctgcaacatgaaaaaggtgccttcatcagatcaaatgcttaactttagtggtataattaatctccatcaacaatttattatgtcttctcttgtgcagcaaattccaaagacattttgggtgaaata

SEQ ID NO: 317003 - DNA, 1488 bp, Cannabis indica
agtgatgaaaataaggcactgctaaaaaacaacacttggatattagttccaaggctgcatggaatgtatattgtcgacaacaaatgggtttacagagtaaaattaaatgcagatggcagttttcaaaggttcaaagcgaggttggttgcaaaagggttcagtcaaaggcctggtgttgattatggtgaaacatttagtccagttgtgaaagcatgcacgattcgaattgttctaaccattgctgtagcaaaatcctgggaggttagacaactcgatataaacaacgctttttcgaatggtactctgaatgaagatgtttatatggagcagccacctggttttgaagataaagatcaccccgaatatgtgtttaagttgacaaagagtttatatgggctaaggcaggcaccgagagcttggttcgacaagctgaaacaaacattgttgagttggaattttgtcaattccaaggctgacttttcattgtttttctacaaaacagaaagtgaaattttgcttgttctcatctatgtagatgatataatcatcacgcaacaattcagaaaaattaaagctcttcatcaacaagctgaatctggtttttgcattgaaggatcttgggtccttaaattactttctcggtattgaggtatacagggatgacacagggatgttttttatcacaagccaaatacataacagagtttttaaagaagaacaacatgacacatctgaagccatgtcccactcctatgtcagttggtaagactttgtccattactgatggaaacttactcaaaaatccaacagaatacaggagcttaattggtggtttacagtacttaactcatacaagacctgatctcagctttgctgtaaacaaattgagtcagttcttgaaagctcccacagattatcattggtctgcagccaaaataattcttagatacctaaagggtactctcaatcatggcttgcacatcaagtacagtgagaggttgacactaacaggtttttctgatgctgattgggcttgttgcccagatgatagaaaatcagtggttggttactgtgtgtattttggagatacactagtgtcatggtcatccaagaaacaagctgttgtatctcgctcaagcactgaatcggagtacagggctcttgctcaggtctcggttgaactaacatggattcaatccttcttacaagaacttcagtttcctctcaaagatactcccatagcattgtgtgacaatatgggagccaatgctcttgcctcaaatccagtttatcatgctcgaacaaagcatatagagctggacattcacttcgtaagagacaaagtgttggctaaaaccttggatatcagatatgttccctctcacgatcaaattgcagactgtcttaccagaagcttgtcaagttcaaggtttcattttctggttgacaaactaggtgtggtttccaccccacttagtttgagaggag

SEQ ID NO: 317004 - DNA, 1135 bp, Cannabis indica
tattttatgaacacccctaagaacatttggctactctctaaaccctattagtcctagagacaattacaaccacgttttgacagatgtataaaactcttctagagaaagccctaatttgcagcaacagaatcacactgtccaatgacaaatcagtaaactttccaaataaatcaaaaatcatgatttagactttaattcctgccatataaagattatattatctgttatattcataacaaaactgaaaagagcaactaggaaaagggaaagttaatttttccaaaaaataaaccaattaagcaaactctccataaaaataattccttctcttatatggaaatattcttaaaggatattctacagccataaaattgaattcacacacaagaaaataatagttaatttatattaaacactcacaataaattaaaaaatatttctataactaatttgccaaaaaaagacttaacagacacaaatattttccaccacccttattatagatgttgcctttggaatgcttgtttaagaccacattggccttagaaacatcatctttaggttccttcacatttctcttatctatcaatgtcgattcttcttcgattcagatatgcttttggatttcttccaaagaataaccgtcatttttatagagaattcttttcctatagcccttccaagttggtgacaactttgccacaattgtagcaacttgaaatgcctcaggaagctcaatcttgaaatcatttaacttgttcacaatgatttgtaattcataaatttgaggaagatctttagcatcactaacaggaaactcaaaatattgagaaattaaaaatttctttaccttcctcttccgccttttatttacttccaaagcatcccaaatctccttcgcggatttagtattattgtagagatcatatagcctattagacaaggcattgagaataatgaccttcacataggagattgtcctccactctcttcctcttcttctccaccatctcgagagtgtctttttcatttggtagcgggtaggaggctccaaggtagactcaagaatgtaggttatcttgagttggtcaagagaaaccttaccttgtcttgccatctagtaaagttggatcca

SEQ ID NO: 317005 - DNA, 2084 bp, Cannabis indica
tttttaaaaaaaaattatttgaactacgagctgacatgcgaagtacgttagaccccaactagtagtataaaaatatacaaaaatataagtattacaaactatataactatttataaattttaacttatctaatatattttaacatttctattcacctctggcttaataaacgattaaacatttatgtttctacgctttagagtaggtttctatctcattttcaacatcttatttctgcttcaccttcctacgttaatgctacttctctagaaattagcagtattgttatcctaaagtttgcatatctgacgtgacacttacacgtgacataatttaaccgacccttaatatgacaggagatttctaagcagaaatatgcctggcagatcccatatgaggttggtatccatggtctgaagattgccttccaagaagcatttggctgggacattaacatgccagccagaggagggaagattgactcaccttgcaagaatatttcacaagtaatcccacaggaaagacaagtctcgaaaaggacctggttgtgtagccaatatgttgaccaggagaaacaacgtcaggaatgtcggacaaagctacacaagccttgatttctccctcaaacaactttcacaaatatctctaactgtgtcctacaaatgcgaatttgactaatctacccgagattgtaggagtttcaagagatcgtatctgcttctaaaatataggaatatttactttttgacactccttttatggagccaattgtaacaacattcccctataaataatgaatgaatttacaggagaaaggacctgaaatcataatctcgcacgaagagcactttgttgaatattctctgtaaacatcttgagagccatagttggaattccctctgtcttccttagtgatctgcacagtattatctcataattaatacaacaaaaaggggagcaggtcattacccaaatttaaaggggtcgaacctctataatttgtgtgttctttttatttatttattatttctaactctttattggtgattactctacgtttgttagattctgagtcaattggcaatttttctagtcaatattttggtgctttcattgaaagcttcaatattcttacgaagatctcacctcttttgacctgatgattaccatggtcttgacaaggagaagcgtgtccaccgaatcccaagatttgatgatagtggaccccaatgttcgtgctccacccactagtgacaatcctgccaaccctgcccaaccacctcgggcaaacccgtctatgaggttctaaccagaaggcccagttaatatcgggcaagatccaataaataccaggtaaatcccggtcaatgctagacaacctgcccaaagtaccacaggggttcctttaacaagaactagcctcaagtatacactggaaaaactgagcttggagttggccaacctagtgtcaacgagccctatgttgacttaggagatgattccgagctagccatgctaagagaggtcacaaggctagtccatgatcataaaaacatcctccatcgcaagaaagaagaaacacgtgatgttgttggcaatgttttcgcccagcatagatgcgaattctaggaatggatggatcagcacgtcgcgatcctccgagcccatcaagtagaattaaaccactacaatagggaggtgaatgacctgattaggaggttcaacaaaagaggtggtccagaatggaagaatcgccactcataaatgacccacttcggggaaaaggtccccatgtcttagaggagactcaacgccccagggactgtgggtaaactttgcgcctagtgggcctaactatttctcaaacaagatcgcctcccaatcatcttaacaatgagtaaatattgtctgaaagggcatatggtgggaccaaccagttccaagaccttcccagagatgaaagaagaaaggaggatatcccacccaagcaaggctaaagtcggtctcacagtgggaatcttaccccaacctcaattaggatggtgcaactgttgggttttatgccctaaataaaactctgtttc

SEQ ID NO: 317006 - DNA, 2640 bp, Cannabis indica
aaaaatttggagtaagaactaaaatagcaattaattgattttctaaaggaaaattaggatcaattcgcctggagcctctcaaatatgataggaataaatcctaatgtaatttataatcatttaaacatcgaccccagctatccagcaaaacaacaaaaacagtagatagattccgagagacaaggggcactcaaagaagaagttaacaaattattgactaatgaatttatacgcgaggccttttatccctcgtggatctcaaatctagttcttgtcccaaaacgtaatggcacttgaaggtcttgtatcgatttttcagacttaaataaggcatgtcctaaagattgtttcccactacccagttgcgaccagttagtggatgcaacagcaggacacgagctgatgacttttatggatgcatattctggatataaccagataaagatgcatgtccctgatcaagagcataggagctttgcaacaaatatgggactttactgtgataaagtcatgtcgtttatatttaaaaatgttggagcgacgtaccaatgactagtaaatggtgtgttcgagaactagatcagacgaaatatggaagtttatgtcgatgatatgttggtaaagttgataaaaagtaaagatcatacaaatgatctcgtagaatgctttgatatacttacaaaatataacatgaagcttaatccaaagaaatgttcatttggggttttctcaggaaaatttctgggcttcatagtaaatgcgagaggaattgaagtcaacccagaaaaaaaaggccttgattgagatgccttcaccaacaaagctaaaagaagttcagtctttgacaggaagaatggcaacactcaataggttcattttgaagtcaacaaataaaatccttccatttattaatattttactaggcaacaagaatggacagaagaatgcgaggaaccttttaaagacataaagaagcacatgtcaacactcccaattcttgccaaaccaataattggagaaactttatacctttatctggctggctcgaagcatgccattagtgcgactttagtgtgagaagagggtaagctccaacaacctgtttactatgtcagtaaaaggtcattgggggcagagtctaggtacccacctcttaaaaaacttgcattatgcctaattcatggatctcgcaaattatggccatatttctaggcacatctaattaaagtcttaacaaatcaaccactcaggcaagttttatcataacctgatgcttcacaaagattgataaagtggtcgatttagttagggaaatttgacgtaacttacaacccaagaatgtcaatcaaaggacagactttggctgactttttgattgaaggaataaacccaaatgttgaacacgaagcagaaacatggaaattatatgttgatggggctttaaacgagaatggctcagggcaggagtcataatgatgtcacctgataactttaaattccactacatattgagattccagtttgatacctcaaacaacgatgcagactatgaggccttgttggtaggtttaagaataggtgaagccctaaaggtcaaaaatcttacatgttatagtgactcactactaattgtaaatcaagtcttgggaaaataccaagcgaaaggcctaaaaatggctaaatatttagagaaagttcagaagaacttggaaaagtttgattatttaaaaatcaaacaaatcccaagagaacaaaactctaatgcagattcattagcaaagctagcatcccaatttgatcttgagaagttgaatttggtaccagacgaagtcttgaatgacccaagcatatgtgaagaggaagaagttgagatgatagatacttcaccaacatggatgacacccattgtcaagtatctagttagtggagaacttcctgcagacaaaattgaggcacacaaactcttgtactcaatacctcgctacacaatggttgagggaaaactatataggaatggttattccattcctctcctacgatgtgtgttaccaacagaagcaaataaaataaaaagagaaatccatgaaggcttctgtggcaatcatgcaggttggcaaagtctatccaagaagatcatccatcaaggatattattggccaacaattaaaaaagacatacatgaatttgttaagaaatgtgacaaatgccaaagcttttcacatatacctcacataacaccaaccgacttgagaatgatgacctcgccatacccatttgcaatatgggggattgatttgattggggcattacccacagggcgaggtggagcaaaatacgcagttgtggaagttgacttctttacaaaatagatagaggttgaacctctagtttctataacttgcaaaaaagttcttgattttgttaccaataacatcatttgcaggtttggcattccaatcaaaatagtatctgacaatggaactcagtttgatgttgaattattcaatgagttttgtgaaaggaataaaattattaaaaacttctcattagtatcgagatctcaagcaaatggacaagtagaggctgttaataaactttaaaagatgctattaaaaagaagttagacgctgctaaaggaag

SEQ ID NO: 317007 - DNA, 2323 bp, Cannabis indica
tttttttttttttttaggtataaaggcttggtatctatgaactatatttttatgtgatgaactttatccgattttactattaatagtaatttctattttatctaaaaaaatatataaattaatttccttccccttaactaatgacaaacttatataatttttcttaaaaaaaataaaataaaacatttaaatatttcacataatttgagagtttatctattgttggattcattagaatcattactcataggcctccttaaaaaattgaaaacgcaaagaattccgatatacaacctttcaagggagaagaaaacaaaattattttcagtaacaattaacaaataatatgtatagctaaaaaaacaaatattcgtagatcgcagtaacaaatttggtaaattatgagaatttgcaacaactgaggcaagaggttagacccactccacgcacataaaaaatgtcagaattacacttacacaaatatacccaataggatatatagaaggttaaaattaagagaacaaaacatcagaagctaacgtcagcctagctatatgcatgggcaacaacttaattaattttgacaaaggaacttaaacaagaaaatatatagtatgtaacacaccaactaaccctttattttttttacttgtaattgctaaccacttattggactaaattaagggctataattttattgtatttgttttaataatattattcgaattagctctcaacagctttgtgaaatgtccattgatcatgtacattttcgtctatacaagttagatagatagcattatcttatgtaattggtacgtacctgaatcttgacttgtgagactctaattttgttattacttactcttcagttattttcttacccctcatatattttggactagaatttatatatacagaaccatgttatgtatatgtacctaatttaaaacagtctccattcccagatgtctaactgcgggcccataaaaaccagtctccattccagttggtaattaccttaatttatattaaaaaaaaaaactacccacttagttgatcaaataatatatggattaagaaccattaaaataaataataaaatataggaagcaaaaaccaatttgtttaggaagcgaaaaaccatgttaattataattatagtgcttttattataaaactattacagacaattttttttttttttcaaaaaaaaaaaaccaaaatggtggtttttagactagaaaagagaaagtgaatccgactttcgtagaaaatgatgataagaatgaatatatcaagtctattcaacccaaataatagcaatcttctcatattcccactaataatattgtgcgaatgcgaccacacatcaaatgttgcttcaagcacacaataaaaaaaagtagcacatgttttttgtttattgtttgttaaataattgtactagtcgaatttttatattgtaattactaaaggaaaaatactttaactaaaaaagcaatataatattacatataattattaattaccatttgtttaaaaggcagccccccaatgtattaattcttaacacgtataaactaacttcaatatatgtttccaaccattattgactatgacaagttgtagtccaaaacaatgatgtttggttggtgggggcttatatattcaactatatatgtgtatatatattatgacaatgcattcaataaatctagtactatatatatatctaggttaagttcaccgaaatcaccaagtctaatttaaaaaacacacgcttactaaagcggtatactactatatataaggtattagtttctcaagtaataaatcactactctttgctcattcaaagttaaatcaccaaaaagtttcatattacagtacccttaaactctccctattattcttagccatttttttcttcaatatttcaatatagttatattgatatacgtacaatatggctcctcatcttaacaccactgaattttcggttgtgaaggaggaagttgagcttgtgaagccctctgaagccacaccttcagatgtttttgtctttgtccactcttgacaatgaggccaacctcgaatgcttctccaaagccatctacgtatacaaggcccaacatgatcacactgctaacagtgttgacccggctgagatgatcaagcaagctctctccaaagctctcgtctattactaccctctagccgggagactcaaacggctagaccacgacggaaggcttcaactcacttgcgacactactggtgttccctttttggttgccacggccaactgtcgtctttcctc

SEQ ID NO: 317008 - DNA, 702 bp, Cannabis indica
tgcacagtacgtttaaaaattcacgtaatacgcctaagatagttagggtgttacaattatgttttgaaatatatttatataatatatattagatttttaaatttttatttttatattataatattaattatatatataattttttaaaaatataaataaatatgtgtgaattgaataaatcagttatttttatgtgtcaatcaatatatataatttatataagtgcagattttaaattttttaattcaatccgcactaatgcatacattataacactttacagattaaattagactaaattatacatatttaattagatttgatagttattattttatgaacacccctatagttaatgtctctcctttcaacacatattgaagtatatatatttatatattagatatagggaatcatatacttatcgatgtattcaaagcttaacggcttgaacatcactctactaccttttgggacatcccaaaaatcattaaattgtgtgaatatattaaaatatttattgtatcataatgagaatgacctatttagtactttaattgataataataataagctttaagaaaatttggtgatctacatgaatgattacactacaacgaacaggtttaaaaatggggtaagttgaaaaatgcctcttttatttattaattaatcaaatttacctctaattttatatttatt

SEQ ID NO: 317009 - DNA, 787 bp, Cannabis indica
aaaaaaaaaaaaccttaataaatatatagactgactgagattttgggggctaaaaaatatatttagaaacttaaaattttttatacagtaaaatttataattgtgcacctcaattgtaaaaagaaaaccacacaaatattgtttttattaatagtgattataagttttattaaaagtagaaagaaatattttgataataattagccactatagaaaacagataaaacaatataaggatttcaagaaaattaatagatactagtagctcacacgtttaattttcagtgtgaagaattttggccgagtcaaattgggtggctggtttgttgtgtcctactattttctgtttattgagatgagtgataatcatattgattatattttatagtacaaattaaccagaaatataacaaataataataataataatacaatgtgcacactgagagaaaagataagcttgcttggtagacgaaccaatcaaggatgtcttactttgattctttattgggctgggttgttggcccaaaaaaacacgtctataacacgacctcgtcaaagttgcttgtaattaaatactggaagagaagaagtgactgatcccaataacagttacagtttccttaaaaaacaaaataatacaacagaatagagttagtgagttacagttgatgtaaccgaacaaccgctaatacctaataccttattgtacttaaaagtgggcatgatgatagagtaatgagtacaatacttaagtaggtttagtaatatttttattttttaattt

SEQ ID NO: 317010 - DNA, 1905 bp, Cannabis indica
atcccgagtcttttgtaatattgtttataagtttaattaaaaagcaaaattttaatttatcacgattttccataaacctcgttgattagcaacgagctgcacagtatgtttaaaactcacgtaatacgcctatggtagttagggtgttacaacattgcagcaggaaatgggcctaaaatccactacactgtagggcattttgtttttggaatcagagtgatagtagtggtattgatctcctttaaaatcttccctgagtttagaaaggacaacacaacctctacagtatcattccccactaacttccagttgtcttggaagaaagcactcccatatccatctggcccaggagctttgttcttatctatggcaaaaattgcatcttcaacttcctttcttgtgtattcagccattacaatttccttgtgaatgttggttatcttaggtcccaaatccacaattgattggactaccttctttctagactgtattgtagatccaagcagcctttgataatagtctaagaaagcatgttgaactttatctggtgtatcacaccaatttccatgttcatcttcaatcgagaaaattctattgtggattcttctcaattttaaagaagcaaggaaaatgtgtgagttttcatcatcaaatttagcccaactcaccttagctttttgtgacatgaagctagcaagggccttacttacttcaacaaacttaactcttacttcttgctcctggtgcatgatttctacattttgagggtcttgattcagtttagattgcagctcggccaaagctactcttgtgatggtttctgtctgctgtatttcagagaagccagcttgattaatgtgcttcagtactgccttcaacttcctcagtttttgcacaatacaaaacattttggttcccctacattcctcattccaagccctttgttactagtgtatcatattcaagtgccaacttccacatattgaagtacctaaaaggtttcctcccataactcctatcctcatagatggtcaccaagatagggctatggtcaaagcttagttcaggtaaaaacacagcttcagaacaacaaaaggtattaatctagtgtgagttgaccattgctcgatctattttggagaaaatcctctcttcgggcttctgcttgttattccaggtgaaaaaggatcctaaatatttcaaatctaccatattacaattctccatacaatcccgaaatctctgagatggacagcagtgtgctctcttccctattctttcatctccattcattatctcattaaagtctcccattaacatccatggttcatcgattttctttgccaattcttctaactcagcccataaatcttctctttttctctcttcattgaaggcatagatcattgatacatgaaacttccctgcttgatgctgtgattgcacataacagtgcattacttggctagagcaatattggatatctatagaatatacacttggctaccacgctataactattctacctttatctatcaaggattgttagtagaaaaacaccaaccttggaggagacttgaatacaaaattcccatattcttattttgcacctttgtttctaagaggctaacaaacccaacctatttcgaataaatcaattgcttgatttcattgtgcttatgctggctattaacccctcttacattccaacacaggaatctatccactttgtaggaagagggagtctccctcccctcctcgtgttattctcattcccaactctctgttattcccactctcaatcccaacttcttcaacattccaaggttcttcactaagggacgtcagacatattcctcactgttgttctctctgattccttcattggagtgacgttttttgtcc

SEQ ID NO: 317011 - DNA, 438 bp, Cannabis indica
  modified_base (395)..(395): a, c, t, g, unknown or other
ttttttttttcttctcccttctcaatcatataggttggcagcattgctaattgctccattattgttgtgatttaattaatactgatgttgactctaattggctgacatttttattttaattaatgtatttcacttccaagttattatttcttctttaatttctttgtgatgaatactatcaaagtgacttatattttactaataaaatactatcaaagttgaggtttacaaaagcattcatactattttcgattcattattttacaaaagctattattagattctatatattaattgttaaaatgatatttaaactttgtattttttaaaatgtataaaatagtatcgtgagtttaatttttaactaatttattttaatgtaatcatttaaaaanaattttttacattgaacagatactagaattagaataaatttta

SEQ ID NO: 317012 - DNA, 1268 bp, Cannabis indica
tattatgtaatttgatatactatttttgttatctcttaaaatttatttgtttacatttttagtaattagtttatttttaaggtatattattataaatttctcttaattatttacaaatactgtcttgataatccaaaataaaagaagttaaaaaattaaatattatgttagcattcccatcagcttctctactctatcctttaaaatacttcacaaaaatttcacttttgcttctttatattttctctacatcatttaaatattatacttttatatatatcttattaattaaaacaatatataagacaaaagaaagtgaaaaaaatataaaaatattaattaaaataataagagagaaataaaaaatattaaaatatatttagctcacatattatttgagctttagagcactcacaatagctaatgtaaaataactacaaaggttaaaaaatagctaaaagttaaataaaatgtcaaaaatgctcatctaatagatgggctaaaatagttcaaacatttaccttatgaatagtatttagctaaatgtagctaagagttatcttggttttagcgcatagctatatttttttattatttttataatgtattttatttaattgtaagtgtaaaaataaataaatattatgtaatatataataatttattatttgtgtgtattataaatatattattttaatagtttagagaaaattataaagaaacttatgtatggtataatagaaatatgtgaggtaaaatagaaaattttgaattttgataaggtattttaaagaatagaataaagaaactgttgggagtgctaagtgaagaaaagtgatgagttaaggtattatacctcacttgatgtagtgtcattttgaaaatttttgctaaatttataacttctagctatttttttttatatataaatcagttatgttgtattaattcaatcaaattttagtctcctacaatatatttaagcaccaaagagtcttgatttaattctatgtacattctagattgccaaactattctttatcaacatgactaatctttctaattcttacaaaatactatatttaattatgggtgtacttaatgagtattacctatgaataggtaatataaaaaagtgaaaattacatgaaatatgggatttcataacaaagttagaaaaatatggcatttttaggtttgccacttttctatggcattttttcacatttaagttttttatggtatttgatatgccatatttttataaa

SEQ ID NO: 317013 - DNA, 2160 bp, Cannabis indica
gctattaatggttaatactgaccagaaattatcggcggattaatattggtgggacaccgccggtagtcaccaataccggccaattttgatgttattaccagtggatgcttccacccctaattctggtgattgttgtgggggaaatgaaatttttaaaatttaagatgcagtaaaatagaattttagatctgaaatccattaattttaagcaaggaattgtcgacgatttaaaactgtcagcaatgccccttttaaaaaaaaaacacgtttctcacttaaaaattgtcgcctatatatcccgataatttaaaatcatcgagaataccctaattttttcgataattttaaataattgcttaatttttttggcgaggaattcaaaaaaaatatttttaagtacgtcgcgaattctctttttctagtagtgataatttatgttctagagttgtacataagagtaatggtatttaattcccccgcgtaaggcgtaccgaaagaacatgtggtgccaatgattgtttttgcggattatattttgtttaatgtaatttcaaacttatatttgtttcctacagaataaataacaaaatatatgtatatatgtgggaaattatgaagcaataataataagaacgacgtcctctactatatatggcctaacgatgaattctttcctccaatgtcaaatgataataataataatatgaattttgcattggccataattaaaaatgacaattagtagctagggttatagacaagtgcatgaaaaaaaataataaatgaaatggttaaggcttaaacgtaaggttgacctcaatatctattttagttcttgtactaggaaaaagaaaactaccctaccatgtctgacttttgcaatattgtacgaaatttcaaagagggtagcaagaattcgtgggtaccgagttttgcggctatatctcatttctttctttctttctttattatattttttttttctcacttgcgaaattcataaatatctattatctcaagcgttgaagttgaattcttcttcttcttactttcattttttaatcccagatataaatatatataatattttgttttgttttcttctttttaagtgcaagtggataatgttagactgttacattaattaataatataatatatagttttttttttttttgagtggaatatatatagttttaatctgtataataaagtggttggttgatttatttttatccattataattgattgggaagggtgtgagttttttcgttgttttgaaatataatgaggaagggtgattggtcaaagagtgtatgcttgtgtctatataagaaggaataaaggagagatgtaaacctcaaagaaggaaaagagaaaaggttttacaaaaatggaaccgctttcagcaaaatcagctgctggaggagcttttgtcgtcaaacaagagatcaatagagttgaatctcatggtgatcaaaatcttcaatatcatgcttccaaggtaaatatacacatctagatataaatttacacacacacatatatatatgtaatattatcattcttgagacatcccacttttccttactcttccccttgaagattaatttaatttagatcttctagctaggaaatccataggcttatatataactagtacttatttatggatatatattagtacatatagcctatctatagcctgttaaaatttcctttttgatctttaattttcatttacgatcaatgaggaaaaaaataaatcaatatatacaagctagaaaatgatatctacatgatttcattattatcaccatcgcatgtatataataattaaatattaattaattaatatgtctaatgaaaaagagactatatatgtacttatgtatgtagtttatttgctctctaagctataggcgattatatgttcaaaataaaaataaaaaaaaagctataggcgattatacccaatatattatattaattcttggcatatatatatatggatatattttaaacctgaacaaattaatttcatcttttttgcctttgattgatggtcaacttgggatcttgtgtgtattactgattgtttctaacccttactgatattaatttatagagacatacatatatatatatataatcttaca

SEQ ID NO: 317014 - DNA, 863 bp, Cannabis indica
acaacaatggagatggtagcgataaggacccgtctgatcctactagagatccaaatcagtgcgagtcttcaggtattttctttttcattttaattacactaacaaagtaattaaaaggtgtatactaatgtatttcttttgttattcaaaatcaaaaacagaatcaattgctagaaaaaagactctggtattgaggtaacatcagaagagagaagtggaaaagatataatatcacttcctaatgttgatcatattcaaagacttagaaaactgcttgggggccgcatattgaaacgtaaatcctcttcccgttacactcggtacactcatgcacgtactctacaatcacctgataaagtacaaagattagagggactgataattagattgcaaaagcaagttcaacacattagtcaaaaggttcaaactaaggaacatttggcaaaggacaacaagatagaggagctaattcaaaagactctggatatgcattcaactaggccgtctcaacctcacatgcctgagcctttggcaaggcactctgacatgcatggacccttaacttctcagtatcagtggcagataccgcaaccaccaccactgcagcagcctcttccgatgccttatcactatccccacactaatgggccttcgccgcagcagcctcctccaccctatcactatcccaacacaaatgggctcccattgcagcagcctacgccaccctatcactatcccaacacaaatgggctcccattgcagcagcctacgccaccctatcactatcccaacacaaatgggctcccattgcagcagcctacgccaccctatcactatcccaacacaaatgggctcccattgca

SEQ ID NO: 317015 - DNA, 2345 bp, Cannabis indica
atataaaattatattttatagaagcataactagaaaaaaaaaacaaacagtatttacattgataattataagttttttcgatcgaactaatatacaaaaatattagttttgtactaaaattaataagtaataaaaatttttaaaactaacagtaaataaacaaaatattaaaagatgttcggaaagaaaaaagtaaagttctaactgtgatataaaatatgtaatattctaaagacaagtaatgtcatcgtcgttgttgctctgagtctcgggaggatacgatgacaatccagcactaggagcagtggggaatggtggaagaaccatcagaggcaagttgaaacctggcacagcccgagagagatactcaaactgatcttggaatcgtttgaggtagagttgttgtgttttatattgctgccttgtatactgagttgtctgctctacttcctccattttcttctgtaaggcctcgtattgttccatagtaacagtcggatgagcataagaattcatggcatgtgctcttttggccccaactgccttcaatcttgggagatggccaaagcctcttagatgtcgagatcgctccccgagtacttgtgtcataacaggcaagtctcgggggtactatctttgtcgggtctacagcggtctcatcaggctgatcctcagtgggcactggttgacttgcaaccaattcaaccatttgctcctaaaacaaataaataaattaaatagttagttaaaatacaaaaaattgaaataaactgttagaaatcaatataaaggtaaacttacataagcttgttgcgtatattcgttgcgctaattgttatctttatggtagaacatttgaaaagtttccacaacagttgaaagttcttctgtcccggggttaacctatattttagaaaaaaaaagtgttattattgtatttttgcaaaaaaataagacttatcaatgacaatatattatatgaagttaccccagcgacaacatgtgaaacaataggctttaatccccagccttcttgaagtttcatcttacctcgaatttatttattttttgctgctcttgcctgaaattaatattttttcttacaactaattatttattattgattatataacgtaaaatattactaaaattaataattttattaagtaccttttgtttgtttgtgttcctgtaagcattacaatcacttcacacctcctgagttactccatcaggaggtaacatgtctgccctctcctgtccaagctcctcaatattttcgatttatttcttcttataatcagaccgtcagtcatgtaaatcttttgacatcttgtactcaccatagtctacgaacgcaagataatctcgcgggagcataaactttatctacaaaaaagttacacatttacattagtacattaattagaaatttaagaataatatacgaaattataaatttagaaataaattacgaaataactcaagtctgtcccacaatgcatttatttcatctctagaaacatctttccatttgaatttatttatggagatggacatacgaaccatccatttacacatgttgttgaacttttttctgtttttgccgactggggtgcccgtttcttcatgcaattcattgtgtagtttggcagccggtattttggaaagcgctttctcaacacttttgcctttgtatttacctcttacccctttctttttcgaagagctgccacttggtgtagacatactatatatacaacacttattttcagatttaaaatgaataactatattcacaacatattaaagaagaacatatgaaattgttattcatattaaaacatcattacaattacaattcatcatcatcatcagctacatatacaacattattatactatcactctccgattctaagcaattattgtcttggtcatttagaccctcgttgttgtcatcgacaatgaaatcatctaactgttgaggctcagaattcacacaatggatatttgcaacttcagttgggttcacatcatggtgaaagtagtcaacatcatccaactgtgaaagttgaataactaactgagtttcaactgaattattttcttgtataaaggatgtatccccatcatcgttagggaaatcccagacattctgtgggatgtactcgttcacaatcagctagtctttactgttcttaagatcaggaatgtaatgtatcaattttgcttgagatgcaagtatgaacggttcactttggtactactctcggttgacacaaatgctagtaagaacaccatcactattcattctactcccattagtgtcaaaccacttacaca

SEQ ID NO: 317016 - DNA, 1045 bp, Cannabis indica
aaatttatatgcataattaaaatcttaaaatgtataaatttgagccttaattacttttctaagagtagattttggaagacttagaatatatatttgacataaacaaataactttattatatatttatattactttttaatattatgtttaattgcatgatacaaaatttaatatcaattaatactcttattaaaaatataataactttattgataactttattaaataaaacagtaaaaaataaatataaaacaattaaaatattaataacttagtgttatagataaatataataataaaataaagatatatagcataatattgttactgttatttttatgtaatttttatagtctaatttatggtgtgttttagtattttttagcctttaatttcgtgattaagagtcaataatgatcactttctaaaaataaattgaaatttctaagttttgaatgttcaacatgttcctttgtgattgaaaataaagtctggagcttcaaactgatttttgactatgatctattcatttttggggaaaactttcttaatgaaagttctagatctctcttttatttttcccaaacatcttaaatcatcaaattttaagttatattgagagagttatgagtaaaatactatcaatctcgtagtaggaaattgaaaacgagaaattacgaaaattagtgcagaaaatgggaaattgcaagcaaggctgaagccttagtgagaaaaaaaaataggaaacttcaatttttggatctatttaaagggtgttgatggcaaagctttgacactattcaaaaattgagaggattctgagtgtagaaggagagcaaggagcagaaggcactggtagaggactccaaacagtgttctttctcttccatctctatcttttatatttttcattgatttttttatttttattttaaaatgtcttttattagctaagttcttttaaggatttttatgtgaaccacttaattttattttatggattaatgtgatttattcaatttcttcttcttctctttattcaatt

SEQ ID NO: 317017 - DNA, 889 bp, Cannabis indica
taataataataaaatgataaaaaaaaatatgagaaaataaataatatttataaatctaataaaaaatttaaaaagagagaaaattaaggagagaagagataaaactatttgaagtgatttcagactgtgtcaccgtttcatacttatcctttatattaatatatagattattgataaatatatacctccatggctagttttatattgagtttatcaagaagaagccttctcatacatatcgatgacttctgtggcttatgaattaaaataagaaatcctaaaataataatatagcacttgaattatatgctcttgagttaaaaagagaaaaatatgagatatttttttttaagaaaaaagtaatagtaagttgaactattaatttattataggtattttttaaaaaaacaaaaataaataaatacacttgttgtctgttgtgtgcgattgagtgattaatttttttttaaaaaaataatatgtgataaaatattagaaaaaataataaaataatatttaaaattagaaaaatgagagaattaaggagagaataggaaaaactatttagagtgatttgaggctgccatgtcaccgccccatacttctcctttatgtacatatattgattattatattgccgacgttggttcagagtttgaagatgtacctcacatatggtcttgtaggtcttaaagacctcataattttcctgagcacatttctttgaggtggcccaataatcatcctgaaatgcaaaaagtgtattgtcaacttttgggctctgatactattgatttgggccaagatgcaaaataaccctaaatctaacaataaagttaataaatgtctctttttaaaaaaaaaattaacaaaatgtccattctgttaa

SEQ ID NO: 317018 - DNA, 598 bp, Cannabis indica
ttttagaattcatactaggatgttaatgaaacatacttattagtaaatctagatcctggtaaaataatttccaacactaacaatacagaactctcggttcataagggttgtcatgtacaatagtacttttggactaatcgttgtaaagacgtggtgtttacataaggcatgggggagaaacatattttctttgcatattttctatatgtcgtgactgttaggatttatgccctaaaagtatgtattgaatggataatatattaaagaatatatgcaatataattataagatatataaatgaatacattaattatagaaatataattaataaatatctaaaaaactcttattcatatggagatggtataatcttataagatcgtacaagagaattaagataagtcggttgtgtattaaagtaagggatctataatataaaactactaagtgcatttcactatacactatactctagtgtgtgtgattttttatttggatcacatatgtggatagacatacagtaaaggtgctatgtataatttgattatacatgactgtaccgatatgtcaataacatctttcattaacatgtcgttta

SEQ ID NO: 317019 - DNA, 985 bp, Cannabis indica
aggttgttcacctccccttgtctcttctatgcaggtgattttgagtgttgatctggggaggtggcaactgctgtgtcataggtcccatcatcttttcttttgagagatagtatttagtctatccccttgctctgttatgagtaattatagactgatagtgatatactatggtcagaacgaaacgatcatgtcacagtgcaccgccatatgaccctcatgttgccaatgtggcaatgatagacaaagttggcattgtagaggaggccacatttgtgatgatggagatttggaggttagccaggcagaggtgcctaaggctgattaggagactgagagttccaacatcgagtttgaggtggaggaggttgcacctattaggaggaggacttatagaatttgtgcggtcctccccaactaccctttgggtgcatatgatgtcaatggtcagccattgaataggctaggccaaccttcggtgctacgcctagaccatgtcttgatacaatcttcagagcctcaggttcttaaagctggatcatagggagataggtgggtctctcatgcattttttattcttgttgagacttttgacaagatactggccagtggactagcgagaggtgtccactgtgagatacccacgagggatcagagagcacactggcttgcccttagttggatggcatggttggagcatcatatccagcagggagtagtgttgctgttacacccatactttcgagatatatctacttacttcgggatgtgtccaatacaaatcatcctaaaagtattaaatacctctcagcgatatttgtgctctatgtggagctaggctggcctcaacttactccgtatgagattgggtactacttttatctaaagtctactccaaagcagaactgaactttcacttcagtcaggtcggccattgttaggttatttttagtattaattttagattaaatttagtatatttttaatt

SEQ ID NO: 317020 - DNA, 1058 bp, Cannabis indica
aatatacggatggaattttaattaacatggcaaaatttaattagtgggacagaagatgagacataaattaggaacagaagatttggattcaaattatcctttcattaaaattacacacacaactttcaagatgaaagaacacactttcaccacaaacatttccaacaaccttttccctctaattcttaaaggggtaaatagcgatataaatacctaaaattttaaatttgtaagtggcataattttaatgtttatttttaacggcataagtacccaatatttgtaaagctgtaattttactctaatttcgttagtacaaatcttattattttcttaaataggccacatataacgtccagattttagatcatttggtctagacaaaaatatatagtatcggttacttccaaatattcctttaataaattcaaaacgaagtctgtactcacaaaactggaggaaaattacagttttacaaatattgagtacttataccgctaaaaataaatattaaatttatgacacttacaaacttaaaatattaggtctattataattcacagattatattatagtattgcaaaaatatatagtatactccctaaaaagaactaaaaagaaggttccgttatctattttaggcttttcaacattcaaaaaggttttgtagtctaatattttcttttcttctcattattatatactttaaactttatttaagatcattaataaatttttgaaaaattttaaattgtttatagtaccaaaattaatattcaaaaagctaattacccaaacaatgacacccttgtagtgaatgaagaggttgccttaaatataagctaattaccgaaattaataaattacgtattgaataaaatatttgtatattattttggcactgtaaactatttatatttttttgaaaaaaaatacaaatatacaagtggttctaaacaatgacaaagatagctcaaaaatttatggagagccaatacatataaaaaaaatatatatttttttaaatattaaaaaaattaattttatttttaattaat

SEQ ID NO: 317021 - DNA, 997 bp, Cannabis indica
gaaatcccattgttatgagaactttagagagctttgcaaaccaaactcttggagcttgtttaagaccatagatagccttgttgagtttgcacacataatctagatgctcttcacttataaatccaagtggttgttgcatgtaaatttcttcttgtaactcaccattcaagaaggcattgtttacatcggattgcctaatggaccaacctcgggtaagagcaatagtcaagactactcgaatagtgattggtttaacaactggactgaatgtctcatcaaagtcaaagccagcttgttgatgaaatcctttggcaactaatcttgctttgaatctctcaacagaaccatctttgttatatttaactcttagaacccatttgcatctaataggttttctgttgggaggaagtcttacaagaatccaagtattgttgttggtgagagctttgtattcttgtgtcatagcaccattccatttgggcatttgaagagcagcctttacagttcttggttcacatgaggcaagaagtgccttaggcttcctaataccagcttttagtcgagtaatcataggatgtgagtttgctgcagtggtagaagttgtgggcctggtattatctgcattagaaacattagtagcaacaggtaatgtagttacaggtatattagagatggtagtgagaggaggtaaagtggcagaggactggactgctatatcaaccagttggttggaatcgggtacagaagcaggtgatgaaaaaattggggaatcattgttggatttatgtgatgggcagggaggtgacagtggaggatcaggtggtgtgggaggagtggaaatgagagaggttaagggtggtaaaccagaggtggtaacttgaaagttggtgtcaatggtttatttgtgagacacagcatagggaaactgactttcattaaaaattacatctcgagagatgtaaattcttttgtctttggacatgcatttgtaaccttt

SEQ ID NO: 317022 - DNA, 591 bp, Cannabis indica
tttcttaattaatattttggactaactttaatctaaattttggaactcgaacctaatcttcaccctgactctcaattctggctttgaattcgaatccaactttaaataaaattaacaaataaaaataaaaattaaatttacagaactcatttttattttttatttttaaaattaaaaaagaaaataattataaaacgtatttttgctttccaaaattaaaattttatttttatttttataattaaaaaatttaaaaacaaaaattaccgaaggctagctaattaaatcatatttaattaattgctacaaaaaaaaaatcatatttaattaatttttttttctttctacgttttcttcttcattttttatctttttattcatcatcttctatcataattgcacagagtgggcttcgacaaggcaggtggaggctttgtcggaaagaaagccaaatctgttgcttcaatgtcgccaatagataatcactctctttattctctatcgtaggtacttttttctttgccgatttctgaactattcgttgcttttgattcaaagcccaaaaggaattgagaagaaagacaaagaggc

SEQ ID NO: 317023 - DNA, 1577 bp, Cannabis indica
cttcacaagtcataacctatagaatggagttaatttgggtgactaattttataggtcatgtatagtggagagtgtccaaacaatggtgtgttgaatttagtggttttctagtcagaggaccacttctatttttatatatatatattttatatatatatatatatatattatcattttattttattttttatggcctgatcagagcactatatatctatgttttttctctatgggtgagattctgttttagtcaccaaactattttttattttattttttttaatttttgggaagtggaagaaattttagtggagctcagcctcaccattttgtcaaagtcaggtcattaatgttcatatcaattttacatgtataatatgtgcttggcttttggctgttttgtggggtttgtagtctctttgattttataacttgtttgtgttgagccttttactcctcatgtaatcgacatggtttgttgtttattggatcttctctttgtgagatctatgaggatctatctccatttgccattgggttttcttttttaactttaattaaatttacatctttacaatgtatacattatatatattgcaaagtgttggaaactattggtattcccacaaattgaaaaatcttggggcaaatgaagaggatctcgatggtattatctgagctaaaaattaaaatgctattatttaatactttaagatgtctaatatcatacaaatattatataacatcttagaattagttagtattatctgcgttttcaaataaatgacacgtgtattttcaaagttcccaaattaatttatgggcgtagttgacaggcccaaactaattaatgggtcaacccataagtagagtcggactatagcttcgggttgaactgtaaccttatcttgacaaagttggacctattagattcgaaagaacaactttggttcaaagaagtgaagactcaaagaaacacagtcgggcaccctcaacccggaagagcaatcgaagaggtgtccggaagcaatcctacgtagcacctctctaataccaaatctcacaaaattaggggtttgtcccctatgtcaaacctaagaaaggcgcacaatacaaaaaacaaactaccttgacatttactgtacacaatcaacgaggcatgaccacctgtcaacatcaggttgtacgaacctgtacaaataacgaaaaagcctccaactattaggcctcacctaccagacccaatgtcaatattacaatgtgttttaccctatcaatgggcatatttcacaaaacaaatccaagcaggtctggatttatccgaaaacctaacttcaacctataaataaggctttcacccttaaggagttacgaatttaagccacagactctggttagaaatttggcaagaaaacttgtgtaaaatactctatagctaaagagctcaataatattaactcgtggactaagactcattactgtcctaaccacgtaaaaaatctgtgtgttctttatccttaattattttctttaagctcaaatttctaatcgattttcgaatatcttaataaatagtt

SEQ ID NO: 317024 - DNA, 1365 bp, Cannabis indica
ttgagttcagctttatggatccattaaagctactgttttattattaaattgcatatatattctcacgaaatatattcaagatagaatcagaatcattttttctataattaaaaagaaatatatacatatatacaacgataaaaatataggataaaacagaaaattctgaacactactgaaaagaaaaaacaaatagaacattaaaacgacaaaatataagaaaacgacatcactatgacacgaaaacttttaaacgacaataaaaatattaaacgacaataaaacattaaacgaccacataacttttaagcgacactataataaaaaacgacaataaaattttaaacgagcatataacttttaaacgacatataatcaaaaaacgactataaaattttaaacgacaatataatcaaaaaacgacaatataataaaaaaacgacaataaaactatgacagcaatatctgaaaaatatgcaggctaaggttatatagagaagacagatatatactctaaagcaaagattgaattgaaaggaggaaaattagtagaaaattacagcaatagagtcaaggaaatttaatagaaaatgaaaatacatatttaaatagcagaaaaatggatatgaaaaatgtaaagcaaaattttaaagctaccaaccacataaatgttgatgttcaaaaacgacaatgacatctaaaaacgacaatacagcaagaaaatgaaacgttacacttttctcgacaatgataacacaagttgagaagacatataatataatattaaaagattaaaaggaaaaaaaaaagagatatagtcaatgaaacaatttatagaaaatgaacgactatgttacatatcaagctaaaactgacagtaaaaattagggacatataagaattagataatattaataataatgttaaacaaattaataaacgacaataaagctgaaatatacatcaatagctagagaacgacctataaggattgtgactaaaaaatttattaaacgacactaccaataataataaatatatagacattagacaaaaactaataatgacagtaatatgaaatgaaatttattattttcaagatgttagtgaaagaaattgaagccaaaactatctcttcttgccttcagtgggtgcaagatctcaggaggcgtttggttgggaggaatgaaaatataggaataggaatgggaatgggaataggaataggaatggaatggaatacaatataaaatgcataaaaaaattgataaaaaaataattaagttttttttcttattacattggaatggtcattcctttctttttaaaatggaatagaccattccacccaaaataggtggtaaa
